United States Patent Application Publication US 2015/0376612 A1 - sequence listing, part 12

SEQ ID NO: 29280 - DNA, 1045 bp, Homo sapiens
ccaactgatagaatttcagcgtataaagcacacgatgagatttccactccgtattacatcgagaacgcttacacctacttgaaattccacatttttgcagtgaatcctaatgacgtcccctgtacattttgtttttacatctgtcacgtctgatgttaacctctgaaatcacatgatccctgtttgtccccaagatagaatggccagaggagtgggcttcagccctagcctttccaaaggctggagtcagagcccctctgtgtgaattctggggccagccccacctggtactcagtgtcatgcatcttttgtgacatagatgacgtctgtataaatgagatatttgctacattttttgattaaaaaaaccatagagaacttttttcagtattttaaaagaatatttgaaacctcagcagatgtgtccatttgattatgtccattcttgattttttcagatttaagagtagatcataaacaactgcatttcagatcagagaattgtcccattgggggtgacactggcactaaaagggaggctcttggattgtttctggtgccacagtggtggtgccagggcaccgttggatgaggggagtgggaagagctgttccctggggccccggttctggtgggctccaccctcacgttgttctgaggggacttaaggctgggaggccctcatgggtcaggaggagctgctggcaaaacctgatagttgctaagctgatctgaacttagcttgcaaggagcagcagcccagaggccttcccagcaacagcatcgaagctgtcgccagggccgcctaggggatgtaggatgggccacagccatgtgccttctgagttttctcctgcaaactgtgcctttgcctctctttagtaaaaaatggaaacaactgcatctctctaccttctaaccccacggaacctccaagggctaggggcgccaaactgagcaaataaaaatagagaacgtctagttaaacttcaatttcatataaacagtgaacaattttttaatataagtatgccctgagcagtgt

SEQ ID NO: 29281 - DNA, 1035 bp, Homo sapiens
cctcggtgccctcaccacggtcctggaaacgttaagccacgctgtcttcctcggtgccctcaccaccgttctctgtaaaggtgctcagatgctttccttggggcagatacggggcctggcttgctctcccagagatgcccaggtgtgcagggcctcttcctcctcccctcactctctcctctgccttggtcgtggtccctgcttggttccctggttctggtagtccctcgagaggggatgtcctttcctgctcgtcctcagccaccagcacttggcagagcccttgctacacgagcagctctcacagaagcttcgagcgcagatccaagggtggcttccgatccctcaccgcagcttccccacacagtcctaaacatatttgcagcgttttgttttgtctcttctgtagccttagacaagctgggctccagcatatgccccttttcacctgactccttccactctccatagtcatctagagatttagccaggattttgcattgtcggtggtttgtgtctttgtgtagtggagtggtttgtcatcgtaaaggattctttccttaaaagtgttcatctatttcctcccagtcttgaggttagaaagtgtgacaagggtgtggtggctcatgcctgtaatcccggcactttgggaggctgaggccagcggatcacttgaggtccagagttcgagaccagcctggccaacatggcaaaaccccgtttctactaaaaatacaaacgttagccaggcgtggtggtgcatgccagtgatcccagctactccggaggctgaggcaggaggattgcttgaacctgggaggcagaggttgcagtgagcccagatcgctctgctgcactccagcctgggcgacagagcaagactccatctcaaaaaaaaaaaaaaaaaaaaagacaatgtgacaatgtcagtcctccgccccctttgttgctgtcagtcagaacgcggattgttttcccagggttccggcagtgtggaccctggaccagcagcctcagcatcacctggaaacttgc

SEQ ID NO: 29282 - DNA, 1046 bp, Homo sapiens
ctgtggctggacactcctggacctgcttctgttggggggcaggcctggctccctgcccctcccctgcctgcccttgggggagagttaagaaacaagtattagtgaagatttcattgtgtttttgctgtgggtctccacgaggacttagcaggcctcggagttgggactgggttggattgagggagacctgcgtgagtcacatcctcagtttccccatctgacttgaggaagctgcaaagttctaaggtctagaagcagctggtttttagtgttgtgttttgtttcaagtgagtgacttcaggtgaggagatgcgggttccttggccacgtcgtgaatcctgctctgagttcctcagttccccctgtgtccagctgtgcgtggggtgggaaggaaggaggatcgggagaaatgcagtgtccccctgggaatacactgagtgagtggaccttgggcacactggacccatgcctagcagacaactggacatgtagatccaggaaaagagccctcctctgagtcacgccaccctgtgcgtcatgggagataaagacttgtattaaacaagctggtggaaagaaacacatttatcgaggatcgttagggaaggtgattgatgtcatcaaaacactttgcattgcaacatgccaacagcattttgggaactaagctgctggggactagataaaccaaggcatatgggtacagctcacaggcgtttcttaaaaagctggttttgttgaaaaggaaatgcatcttaaaattcacacaaacaatggcaaagccacctggtgctcacgcaggaggatgtggtgctgcctgaatcctgaagtgggtggcacccacgaggggggttcctcggaatgctggtggcgtgtgccgggacgtacgtgcgggactagagggcacatgaggggatgctcgagtcaggggaggtcgggagggagggagggccaagctttggctgcccaagggtgcacagtatatcatggctcagccccgcgaagagacgctcctcttgagggcacctgtccctctgtttgcatcc

SEQ ID NO: 29283 - DNA, 1056 bp, Homo sapiens
aggcaggagaattgcttgaacctgggaggcgaaggttgcggtgagccgaaattgtgccattgcactccagcctgggcaacaagagcgaaactccgtctcaaaaaaaaaaaaaaaaaaaaaatgacagtacacactgagtagcatttgttctaggcttgcaaggttgctttacccttccaaaatctacccatgtgactgaccacgttaacagaataaaggggaaaaccatatgaccatgtcaatagatgcagaaatagcatttgacaaaattcagcacccgccgtggtagaaacgctccataaactaggagtagaagggcacttccgtgttgaaagacactcatagagtctcacatcttacctcataattagtggtgaagttatcaaatgcttttccccctaaggtgagaaccaggcaagaattctgctctcactacttctattcagtattgctctggggagtttagccggggcctccagtcacgaaagtgaaataaaagacatgaggattgacaaggaaaaagctcaattgtcctttggattatatagatagaaaaaatttaagaatctaccagaaaaagtggatgcaggatacaaggttaatacagaaaaatcaaatgtatttctgtatattagcaataaacaattagaaaataaaatttagaagttgatatcattttataacaacattaaaaatcctaaaaatacttagggataaatttaaaactactcaagatctttacactaaaaactgcaagacagtgctgagagaaatagaaaaagatctaaacatatggtgagatataccatgttttatgagtacaaagacttaacactgttaaaatattaattgacggccaggcatggtcgctcatgcttgtaatcccagcactttgggaggccgaggcgggtggatcacctgaggtcaggagttcaagaccagcctggccaaggtggtgaaaccccgtctctactaaaaatacaaaaattagccaggcgtggtgacgcatgcctgtagtcccagctgcttgggaggctgaggcagaagaatcgcttg

SEQ ID NO: 29284 - DNA, 1042 bp, Homo sapiens
gagtgcgcgggcgccgccgccccgccgcctgccgcgagccccgtcccccgcggaccgcgccggggccgggccgggccgcgccattgtctgcgccgcgccggggccagggccggggccaggcgggcgggggcgcggttccgtggcctcggggtccccgcccggcgccgccccggacccgcccccgcgcggaccccggccctgacagctggcgcgggggcggcgccgactgagcggccgagtgccgggggtcggcgcccggcctggcccacgtgcccgcgccgttgcttccgggcggacgggacggggctcgggctcggggcgccgcccgggtccgccgggagcgcgctgtcccggccacgtcgagttaaccccgcgagccccgtccctgggacttctctggacgtgtcattcccgtcccacctccaggaagggccacctgggccctgcttcatgtctcagcccagacgggtccttgcgacgcgccccgaggcaggttattgtacgtggttctggggatgaccgttcacatttaatgaataaaaatgtaacttgccttgcgaaccataatttcaaatgtttttcgactgcagtggttttcctacacccaaatgagctcgcagtcagttttgtttcttcttttgtcccgttgtgtggcccacaccgccttcgttgctaagagaatcgcagcccctcgggctcccttctgcgcctttctattccgggtggccctggtagacccgggcacctctgtggaaacacgtcccggccaagctgagccgtcagaagcttctgttggtgttctcgtgttggtcgaaagggaagttatttattttgaagttaactctgatcagattacgtttttagaaatccattcagacctcatagtgaggccagtttggtaaagcaagggcatcctgcgactttttacacagaaatgttttttattttttctgtgtatgtcattcatagtgacaaaattgaggctaggaaggatttggttgggatttttttttaagtgctatgaataagccacattttgatt

SEQ ID NO: 29285 - DNA, 1047 bp, Homo sapiens
gctgcagggagcagggtcgggagcatgtgcatttcggagagctctggttgctccgtcatagaagccatgctccacatcctgtaagtgagagactccccagcagcgttcagccatagctgcgatgtcaggcctgtcactagtgggactgcccggacccccaaggtatgggtacacggcgagggtgctggtgttaaatacaggggacccacaaaaccacctagcagaacaatccacatgaccctgtcgtgtgacccagaacatttcagggatggaacacggaccagctgaccttagcgtggtcgctggcttgctctggaaggtgccgtttccaagacgcccttacctgggttcctgagcacgtctgacagagcagctctgactccgggtttctggagtcagaccccttgccactgtctttgacctttagctttgggttccccttctcagtttgtttgtttgtttgtttattctcactctgtcactcaggctggagtgcagtgttacaatctcggctcactgcaacctctgtctcctggattcaagtgattctgctgccttagctccctgagtagctggaattacaggcacccgccaccgcactcagctaatttttgtttgttttttgagatggaatcttgctctgtcacccaggctggagtgcaatggcacaatctcagctccctgcaacctctacctcccaggttaaagcgattctccttcctcagtctcctgagtagctgggattacaataggcgtgcgccaccgtgcccggttaatttttttttgcatttttagtagagacggggtttcaccatgttggccagggtggtctcgatctcctgatctcgtgatccgtccaccttggcctcccaaagtgccaggacaggactacaggcgtgagccaccgcgcccagccagtttttgtatttttagtagagatgggctgtcaccatgttggccaggctggtctcaaactcctgaccttaggtgatccacccgcctttgcctcccaaagggctgggattacaggcgtgagccaccgtgccc

SEQ ID NO: 29286 - DNA, 1106 bp, Homo sapiens
acctgggaggcagagcttgcagctagctgagattgtgccactgcactccagcctgggcgacagagcgagactccatctcaaaaaaaaaaaaaaaatgttctttggccctccagaaagtcaacaagcaaaatgcattgagcatcccaagaaactgttgccatgaccttactttgacttgtccacatttgccttgactaggccacttctacctcttggtagccattgctttgattgtggtttgtcttcaggatggtactggtaaagtcctgttccatctcctgttataattcaaggaaatgcttcagggtcttgatgccacttgtttaaaatttccattgaaagctctgctcttgtctgcagctgatctgggcacaacggttttggcacccatcgagtggaaagcttgctcaacttcaattttgaaccagttgagatgtctgtggtcttggctattgttctgttaatcgtcagtcctctttaatcagagcatgaacaagatcaatattttccttgcaaattgatgtggatggtctgccactgtggtcttcatctccaatgttgtcttgatccttcttaaaacgaggtatctatgtgtatactgctgacttctttagggcactgtcctcatacactttttgtaaagcatcatgattttcaccattcttccacccaaggttcactatagatttgatgcttgtttttgcttcagtttttgcagaattcatgttctgctaggagcccttttcaaactgattcttactgcctcaaactagatctattcaggcatgttctaacaagttagtatgagtttattttggagcaaaagaattttgaaatgcatgcatagttttgtcataatatgcattttccatgaactttttgaagaccactcctgcaataataaaacattgaacttcatttaaagctaaaattcccttctcttccacttctgactatgaggcagcaactgctatcagaccaaacctttcccaagaactatcaaggccatataaaatatatttttaaaaagagctttttgcatcctggctaaaacagtgaaaccccgtctctactaaaaatacaaaaaattagctgggtgtggtggt

SEQ ID NO: 29287 - DNA, 1548 bp, Homo sapiens
tggagggaattctccaggtggacacttgatgtgggaaggaacaaggaatactcctgaaaggagcagaaacgggaaagctaaataaataatagactgcctaaaactatctcttagagttcaaaatacaggtagacttaagatacatggacagtaaggacaaaaggtgggagggaaataaaggattgcaccatcctgcaaggggtgaaagtatggatttcaagtagattctgggccaggtgcagtggctcacacctgtaatcccagcactttgggaggccaaggcaggcggatcacctgaggtcaggaatttgagaccagcctggccaacatgatgaaaccccgtctttactgaaaaaacaaaaaattaactgggcctggtgacgcatgcctgtaatcccagctactcgggaggttgaggcacgagaattgcttgaacccaggaggcggaggttgcagtgagccgagatggcaccactgcattctagcctgggcgacagagcaagacttcatctcaaaaaaaataataaagtagattctgacatcagacgtgatctctagggtaaccgctaaaagcaataaacatgttgatgaaactggactaatacctactttcactaatcccaaagaaggtaagaaaggaaaaataaccagatgggacacataggaaacagaggcaaatggtagctttaaaccaaatgtgtcagcaagcatattaaatgtaagtggaatgcaaactccaattaagtgtgttagattggatagacaaaacccagctatgttcattcacaggcttcacatatcgagtccaaggatgcagagtgaatgcgagaggccagaagccagggcaccacccacacatctgctacagctgttcacatctgacagcacggcctcaggcaggaggactcattagagatggagggacagctcagtgaccaagtggtgaggttaatgggatgacacaacaatgctaaacataaaagcaccaaagaacacaactccaaaatgtgactggaacagaaagaactaagaggagaaatagacaatcacagtgagagatctgaacacttgcctcagcagcaaataaagtgagtgttgttccagaatgtgtcctgactgaccactccctctggccccagtgaccatcctgccggacggccgtctcctccctggttgagcagccttgagcaagggtagcagtgggcagtgtgtggaggccagaggcctctcacgtccacccaccccaaaggcactgccctgggggacagctgagtgaggagagagggagacacccttgaagcagggaggggagagttggagggagtcacatgtgggagtgaagcccaggaggaggaggaggggcaggagcattgccgctgggggcagacaggctgatggagggagaggggaggctctgagccccaggtgacaccatgctgtacacattgctttacagcccatctttctatgttagtaaacccacttcattattttatagggctctgtggctgtattcagtattttatcaccataaaaattctcattgga

SEQ ID NO: 29288 - DNA, 1025 bp, Homo sapiens
gaggcagtggttgcagtgagctgaggtcgcaccattgcactccagcctggacaacagagcgagactccatctcaaaaataaaaaaaaaaaaaaagtggtgctgtaaggagagtttgtatccttgagggaagaccatttatgtttacttacggctttacaattaacatttagtttattgaggttactaattaaaatactaggttttctttaaacaattaaagaattgccttctacttataaatgtagtggattttaattgagtaggaccagtcactctaaaggagtcttaatatttgatcagctgcagttaaatgagattagattcactcagccatcagtccacttggcagtcttggttgagttctgggaagggcaaatgctgggtctcctgtgagcagcccctctgctcagcactgtgccccagggaagggcccgtgtccctgctgggtctccgcccaccatctcttcccagtgagctggtcctgatgtccatgtcagcctttcagtgactgttgctgcaccttcctgcacagtctgttaacagaccagaggaaacccactggtgtggctcaataaaataattctaaatatgcacgtgtctcttgcatgagacttctggggtgctgacaacagggccctgggcctcagttttcacctaggcgtcatcctcatgctcaggaacgtctgtggctaaatctctccccgtgagatgctctttttcttcaggaaataaaggtttttccagaagcatcccagcagaccttgttcggctggagtgggtcctgggggacctctctagtatcctcctattgaggtgggtgagggaggagaggccacatggccacctgcccccagcctctgccatgtccatggtcccaaggccatgtgagcccttatgcaggcccaggtcctggtcccctgctcctctctggcgtggtccagcccattgtctctctgccacagcaccctcagtctcacagcatcagtgaagtcttaatatcttttctcttttcctgtcaacattt

SEQ ID NO: 29289 - DNA, 1030 bp, Homo sapiens
ccgccacccgcgcgggcactgcgcctgcgcggagtgagagcgtgagcgcggagagcggaccgacgcgacacgccgtgcgcctccgcggctgcgctacgaaaacgagtcccggagcggccccgcgcccgccgcacccggccctcgcccgcccgaagacaggcgccaagctgccccgccgtctccccagctagcgcccggccgccgccgcctcgcgggccccgggcggaagggggcggggtcccgattcgccccgcccccgcggagggatacgcggcgccgcggcccaaaacccccgggcgaggcggccggggcgggtgaggcgctccgcctgctgcgcgtctacgcggtccccgcgggccttccgggcccactgcgccgcgcggaccgcctcgggctcggacggccggtgtccccggcgcgccgctcgcccggatcggccgcggcttcggcgcctggggctcggggctccggggaggccgtcgcccgcgatgctgctctccaagttcggctccctggcgcacctctgcgggcccggcggcgtggaccacctcccggtgaagatcctgcagccaggtacgcgcggggccggcggggccggggccggggccagggcggggaccgggggcgccccgggccgcaccaaccccgcccgcgcctccctgcagccaaggcggacaaggagagcttcgagaaggcgtaccaggtgggcgccgtgctgggtagcggcggcttcggcacggtctacgcgggtagccgcatcgccgacgggctcccggtgagtcggaccgccgggcgggcccgggtttctcgcgcgccttgcgcctcgcttggcccggcctgacccccgcgtctccgcaggtggctgtgaagcacgtggtgaaggagcgggtgaccgagtggggcagcctggtaagttggggcacgggcggcggcggcggcggggggcgggcgcggggcttttgctgaccgccgtgtcccccagggcggcgcgaccgtgcccctggaggtggtgctgctgcgcaaggtgggc

SEQ ID NO: 29290 - DNA, 1026 bp, Homo sapiens
gaatgcggtgtgtgcaggcatcgcagatgggggttctttcagttcaaaagtgagatgtctggagatcatatttttttatacaggtatttcaattaaaatgtttttgtacatagtggataatcctgtatttatggggctgggcatcctgggggaagagaggggctctgaggaagggctttggctgctgggtgacctgacaagtttcccgtggggctggtagttttgcccacgggggaaacgggggaggcccagctgggtgccagcctccccagtgccacaggctacttcatgtggcttgtggcccaccgcactaccccgtgctgcacccagggagaagagcagctgcctcctggggtgcctctgggaggtggaggcagggagccaggccctgaggatgcagcaacccacactagtcaggaggtcattcctcggtggtcccaggaggatctctgcagcccccacccagggaggccttgccagtggaaatggccatacttgcatcctggcttggtggaaacagagacgtgcgggggggtgggggagggagtccatgctgcctcagagggtggctgggggttttgaaggacagggaggagtttgccaggcacatggggtgggagtgtgttccgggcagtgccaaggacgtgcagaggacatgagggtggggtttggtggagggtatcggggtgttcagtcagttatagttagaccctggcctggcgggtgtgtggtgagagagtggggtatgaaccaggttcgggtgtgtcaatgggcctggccacaatgttcctggtgggtagaggaggcctgggtggagggtcccagtgagactgctcccccacccccaccccaggggccttctgctcaactgcccaccctgtgctgggctgtggggtgccccatgttggcagtggacctgcacctggggcatcacccagtctgccaagcgcacctactcggctctctggctcctggagccctgtctgccccctgcctcccatctgcccctccgaataagagtccctg

SEQ ID NO: 29291 - DNA, 1064 bp, Homo sapiens
cgggcatcacggagcgcgagaagcgcgagatcatcgagaacgcggagaaggagaagagcccggagcagaacctgttcgagaagtacctggagcgccgcggccgcagcaacttcctggccaagctgtacctggcgcggcacgtgctgatcctgctgctgagcgccgtgcccatctcctacctgtgcacctactacgccacgcagaagcagaacgagttcacctgcgcgctgggcgcgtccccggacggggcggcaggtgcggggcccgcggtgcgcgtgagctgcaagctcccgtccgtgcaactgcagcgcatcatcgcgggcgtggacatcgtgctgctgtgcgtcatgaacctcatcatcctcgtcaacctcatccacctcttcatcttccgcaagagcaacttcatcttcgacaagctgcacaaggtgggcatcaagacgcgccggcagtggcgccgctcgcagttctgcgacatcaacatcctggccatgttctgcaacgagaaccgcgaccacatcaagtcgctcaaccggctggacttcatcaccaacgagagcgacctcatgtacgacaacgtggtccggcagctgctggcggcgctggcgcagtccaaccacgacgccacccccacggtgcgcgactcgggggtgcagaccgtggaccccagcgccaaccccgccgagcccgacggcgccgccgagccgcccgtggtcaagcggccgcgcaagaagatgaagtggatccccaccagcaacccgcttccgcagcccttcaaggagccgctggccatcatgcgcgtggagaacagcaaggcggagaagccgaagcccgcgcgcaggaagacggccacggacacgctgatcgcgccgctgctggaccgctccgcccaccactacaagggcggagggggcgacccgggccccggccccgcccctgcccccgccccgccgcccgcccctgacaagaagcacgcgcgccacttctccctggacgtgcacccctacatcctcggcaccaagaaggccaaggccgaggcggtgcccgccgccctgcccgcctcc

SEQ ID NO: 29292 - DNA, 1071 bp, Homo sapiens
tgtaggtgcctttgcccttcaattggagcagagcggggttcccatatgggcgaagtggacgccagatcgtcccccgctgtgcgcagcccaaacttaaaaggtctttttaactgagctatcatgaagctgccgtgtgtctttgtcaaaactcttacaagaaagatggagtgggagctgtctgggcactagcgtcccagaaacaaccaggaacttgtggaggtgctaagctccctgcggggactcccgcagcctcggtagcctccagatggaagcctcctagctttcaggtccctgaagaggccgtgcaggccgccaggctcactgcgctgtgtgtctctgctccccgcttgctgccgccgcccttgcagtgtgactggtggggatgctggccagcctcgccggaggccctgatgctgtggggtccgaggagggggcctggcagggtgggtgggtggcaggagcctgtggggccccctgcatggtggtcagtgtgggggctctgcattgactgtgaccaggtcctgggaggttgggggctgccaggtgtgctggcaaggaggcctcgggctctggctcaggtgtgtttcccgtctcccagctctgccacacctgcgtgaagcggtcccgccaaagccgggaggggtttcctgtggccaaaggtgccaggcatcagaaacaggaagcaggggaggtcaaagctctgggccacaccctggtccctccaagtttgtcatttctgcaacccccaggtctgaccagtttggaacctgggctttctgagccggtctagtgggttggttgagagatgggggtttttctggtaactgcatttggtgctagccagtttttggtctgcactaggaagctaggctgcagtctgggaggcagtttctagtggggtgaaggggataagatgggtgtcttagctctagctgctgtaacaaagcatcacagaccaggaaactttaaaaaacagcaggctgggctgggtgtggtggttcacgcctgtaatcccagcactttgggaggccgaggcgggcagatcacgaggtcaggagatggagaccttcc

SEQ ID NO: 29293 - DNA, 1045 bp, Homo sapiens
cgcctctgctgagaggctgcaggggccagggctgggggctggcactgcctctggtggcgctgacatcgtcctgctcaaggcttggcagccggcccaggaaagcttctctgccctccctgacaggagacctgtgcacgcccaccccatggcacgactggggtcaggaccagcgcctgctgctgcaccgagaccctgccctgtccatggccacaggcgtaccctaggccggcctcagaggcgggtctggccaggctgggtggagggtgggggctgaccgcagacctggggctgccacacccatgggggaagggctgtggcgacgtgggcgcctcctgttggctgggccgacgcagcctcccgcccggctgcacaggagtttctttaaggagtttccccggtgtgcctcggcagccttgcgctgctctaatggtccggacttccgtgtgtgagtttcccccgtgcgccccggcagtcttgcgctgctcctaagagttctggcttgtgtgtgtagctagacccagggaggcggccgtctcccggaccgggtgcttgtctgggctggctggcctggcggctgctcacaacagcttccggtgggttccggtcgggttgcatcgtggagctttcacctacaaaaggggaaggaggcggcccaagggtccggggcctggtcctgctgtgaccggtgccagctgcacttcctggatgtgccaaccgctaagacgcccaggccagggttgggtccagactcaagcccaggtggcaaggagtgggaccccctgccaaggctgtgaggccccataggggagcctgcctgtggagcgggccccccttgccctctgcagaggctcaaggcccccggggacatgagcctggtgtttatcagctgtctccttagtctcagctgacctcccccgaccatggccccattgcaccacccaccccaagccaggccagttcctctcccagaagtcccggctgtccaagaagagggcagggtgggctgccctcttctcggccagcttcagatggggcctctggttgc

SEQ ID NO: 29294 - DNA, 2064 bp, Homo sapiens
tgagaacattcaggaagagccacatggtgcagcagggcctgtggccagtctcaggacagcctgctggtccctggccccgcctcgaggggctccgcgcaggtctcgccgatgctctgtgggtcttggccggtgcgtgcctctggtgctgcaggcgcctggctgttttcttccttccctcaggctcctgggcccccggcctgagctcctggtttctgagagtctgtggggagctgtgatgcctcggggcagccccctcgtgtggctgccccagcctgtccgggtttctaccgtggttccttccacaccatgtttgtctcttaaagtgggagagaaggtcttaggtccaaacacgttgatttgtgtgctttgtggattcctccgtctgtactgactctgtgccggtgttgttgcccaggctgtagttactgaaaggggaagtggcttttgtacaaaggccctggggtccttgccatgtgtcagcagctgcgttgctgtgtcctgagatcatgtgtggaccccagggctgccttcctatgtgtgcccgccgtgccgcagtgagggttgggcagctctggccctgttctgagtgaggcctgtgcaccagcaacccgccctgggcccgtctgcgtttggtttatgctggggtgtctggggacctgctggcctttccccacccgggcctgacctgaaccgaccctggacctcagcagcctttgatgggcaggaggcatttggggatatgggggaaggagcccccaggcccacccaacagatggttctagactgacagggcactacgcagtgagtcctgagccaggtctggggctccaggtggaaaccccgcctctcatgcctctcctcaggctccccacaggtgcaggaagccgccgcccagccatggacggggaggagcagcagccaccgcacgaggtgaggtggaggctgggctggctgcacagagacaggggcggggggcttccccgctttgtgggctctcggggtcggtccctggctgttgttctgcaaaggtgatcttcacagggttctccagggtcaggcaggaggcacctccgagggagaggggcgctgggctgaggtggcctggtggccctgtctgcccagcttgatggcagccgtgccagtgatggccaagcaggaggggtactgacagtgtggggcctaggctctacggaggccctgcttttcagggtgtgtggtacacagagcggccacgggtccctttcccgggtacgtggtccgtggagcggtcacgggccctcgtttttcagggtgtgtggtccacacagcggccacgggtccctttccagggtacgtggtccgtggagttgccacggagccctggctttctggggtgcatggaccctgacttgaactctcctttccacctgcaggccaacgtggaacctgttgtgccgtcagaggcttcagagccggtgcccagggtgctttctggagacccccagaacctgtgtacgtgtccctcagggtcctggcacgttccccggtgttgggctgttgagtcagggaggagggggaggcagccaaccactgccaggggcttggagcttgtggtgagcaggggccctggccgagacctgaggtaggtgctgctaggcctggtgccacccaacagcagctgctcctgggccctgcctggcagtggagcctcttggaggggctgcaagcagcacaggcaggcccctgggcatggggggctcgtgagcacaagcagtgtgagcggcacgggagtccctccttgctgtggcctcagcctgtccctcctgagtggggtgggggggcccatttcgcctcagagcccctcccctagctgagccccctgcggcacctgcccccactgtcccccacaccgaacctcatccacagcaacccccaaggtcgccctcatggggtgtatggggcacaggactcctgaggccctggcttctcgaagccgtgcagctcacagaggtggtagccggtgttcccatcactgggcaggcaaagcctgtggagtgtgacgctcgtcaggagtcttgtgctctg

SEQ ID NO: 29295 - DNA, 1021 bp, Homo sapiens
tccacctgggtgaccgacccatccccgtcaccttcaagagggccatcgcagcgctctccttctggcagaaggtcaggctggcttggggcctgtgcttcctgtcagaccccatcaggtagggctgcccccgggaccctggccggcctgcagggtggtctgtgggaggctccaggccctcctgtgcaggtccaagcgcagccaatcctcactcaaggccttccctgccctttccttccgccacaaatcccaaacaaacgtgctgtggtccctgcccggtgtccacagtgccagccccacccccccagcccgttgcccatccctgcggggctgcagccatccctctccacagcaaggatgacgtggaacgctgcaagcagaaggacctactggagcagatgatggccgagatgattggcgagttcccagacctgcaccgcaccatcgtctcggagcgcgacgtctacctaacctacatgctgcgccaggccgcgcggcgcctcgagctgcctcgggcctctgacggtgacggccgcccgcaggcgtgggaccccctgtgaggctgaggcccgagcaggtactgaccccttgtccttccccacagccgagcccaggaagtgcgtcccctccgtggtcgtgggcgtcgtgggcatgggccacgtgcctggcatcgagaagaactggagcaccgacctcaacatccaggagatcatgacgtgagtgcccgcccctccctgcaagccccaccccacaagcccccaggtggaggctgagcgccctggaggccaaccacatgcggcagtgacccaggcatgggggctggggtatggggagcccacccccagccaggcccagcgccccctccctcccacagcgtgcccccgccgtccgtctccggcagagtgtctcggttggccgtgaaggccgccttcttcggcctgctgggctacagcctgtactggatgggccgccgcaccgcgagcctggtcctgtcgctgcccgccgcgcagtactgcctgcagag

SEQ ID NO: 29296 - DNA, 2415 bp, Homo sapiens
gtgggcggatcatttgaggtcaggagtttgagaccagcctggccaacatggtgaaaccccagctctacaaaaaatacaaaaattagccgggcatggtggagcgtgcctgtgatcccagctacctgggaggctgaggcaggagaatcacttgaacccaggaggcggaggttgcagtgagccgagatcacgccactgtccctgggtgacagagtgagaccctgtctcaaaaaaaaaaaaaaatcgtaagttaaaaagtgttgcggctgtggagaaattggaacccttctgcactgttggtgggaatgtaaaatgatagagttgctgtggaaaacagtgtggaagttcctcaaataattaaatcaccacatgattcagcagttctgcttctgggtatatccccaagagcaggatctcaagatttgtataccgatattcatggccaaaaggcagaacaagtgtctatcagcaggtgaatggattaaatgtgatgtgtacatacagtggaatattattcatccttaagaaagaagatgctgatatgctacaacacggatgaacctggaggacgtggtgcagtgaaataagctggtcacagagagacaaatcctgggtgatcccacttacatgaggtacctagagagccacattcatagagacaaagtagaatggtgggtcccaggggctggagggagtagaggaatcgggagccagtgttcgatggggacaaagtttcagtttctgggtcccaggggctggagggagtagaggaatcgggagccagtgttcgatggggacaaagtttcagtttcacaagacagatttctggacatggatgggggtgatggttgtgcaacattatgaacgtatttaatagcactgatctgtacacttataaatggctaagatgggccgggcgcagtggctcatgcctgtaatcctagcacttttgggaggccaaggtgagaggatcgcttgagcccaggagttcaagactagcgtgggcaacataaaccccgtctttacaaaaagtaagacaagaattagcagagcttggcggcattgcctgtagtcccatctgcttggcaggctgaggcgagagggtggtgctgcagtgagccaggtttgtgccactgcactccaggccaagtgacagagtgagaccctgtctttaaaaaacaaaaaaagtggcttaagatggtaaatttattttatgtgtattttaccacagtgaaaataattgaagaaaaagggggcagtcatctggccctcagatctcacatccccttccccatgcctgtccgattccctggcctcggcagttctgcaggacatgaggccgaggccggggacccgaagacctgtggggaagggaatgcgagacctgggggtcagaagtggctgagtggcctgaggccagcgctgtcggagcctcgggcgggttttgcggggcgggcagctggcttctctgccctgcctcctcccactgtgggtgtgggggccccggcaggcacagaggagctcattcctcagctggcccgtaccggggcacccatcctggtgcaaaggctgttgtgtcccatggggcagggctgccccaggccctttgtccccactgtgcagtcacacagtcctggcttctgctgcggaaccctcgttctgggcaggaagacgggctgctgcgtgtgttcaggcccatttttaccagaggctgtgccgacaacctgctgggctgtgaggttgctggaactgggcggtgttggaggctcacaaggcacctgatgtcacctgggacgggcggttttcagggacgtgcaagctgctcacgttacacgcgttccctcctttccatgtgctgcccggaatcctggtgttgggtgacctcctgaccggcccacgtagtgaactctgtgtttggtttcagacaggccgacggtcgcaaggtcctacggtcaagcatccgggagtttctatgcagcgaagccatgttccacctgggagtccccaccacacgggccggcgcctgcgtcacgtccgagtccacggtggtgcgcgacgtgttctatgatggtaatcccaaatatgaacaatgcacggttgtgttgcgtgtagcttccactttcataaggtaatgccgggggcctttcggcctgtctacacgcacttgcttagagtcctaggagatttgggcctgtgctgctaggattctggtagaaacaaacccagatgaccgccttggcctcttctgaaagtccagcctgtccctggcagcctcagaagctgcctgtccgcgaagtagctgcgtcacgcccactgggagggatctgagtgcaaaggcatttggtactcagttaggacacttgtgctgagccctcccacgtgcccggccaggccctcgttgcagccagagatggccct

SEQ ID NO: 29297 - DNA, 1049 bp, Homo sapiens
gcaacctccgcctcccaggctcaagtggttctcctccttcagactcccaagtagctgggactactggcatgctccaccacacctagctaatttttgtactgttaggagagatggggcttcaccatgttggccaggctggtctccaacacctgatcgcaagtgatctgcctcagcctcccaaagtgctgggattctggggatgagccgccgcgcccagccagtgtgttgtgtttttaagtgatttctagcttcattccattgtgactagagatgtcagccttttgaggtttattacaacttgttttgtggcttatcttggagaactttctgtgtgccctggagaagacggtgtgctctcttttgctgggcagagcgtcctgtacccgtgtgccctggagaagacggtgtgctctcttctgctgggtggagggttccgtgtatgtgcctgtttggtcttgttggtttaggctgttgttcaggtcttccatttctcattgatcttctgtctggatggtttttttgttttttgagacggagtcttgctctgtcacccaggctggagtgcagtggcgcgatctcagctcactgcaagctccacctcccaggttcacggcattttcctgcctcagcctcccgagtagctgggactacaggcgcctgccaccacgcccgggtaatttttttgtatttttagtagagacggggtttcaccgtgttagccaggatggtcttgatcgcctgacctcgtgatccacctgcctcggcctcccaaagtgctgggattacaggcatgagccaccgctcccaaccctagatggtctatccattattaagtggtgtgtttaagtctccaactcttactatagatagaactgtttgttgtctgtcccttccattctgccaacgtttacatttttgggctttcttattgggtgcatgtttataatttttacatttttattgatgaattgactcttttatccatatataatgctgtctcttgtaacgactttttgttgagggtggatgtgtctcactttgttgcccag

SEQ ID NO: 29298 - DNA, 1049 bp, Homo sapiens
cccagctattcgggagcctgaggcaggagaatgccttgaacccaggtggtggaggttgcactgagccaagattgtgccactgcactccagcctaggcaacagagcaagactctgtctcaaaaagaaaaaaaaagaaaccattttatttgctcattcattaaaagcagctccttatctgttttatcctgagattgcagcaattcagtcacatcttcaggctctacttctagttctgttacttattttttgagacgaagtttccctcttgttgccctggctggagtgcagtggtgcaatcttggctcactgcaacctctgcctcccgagttcaagcgattctcctgcctcagcctcctgagtagcggggattacaggcgcccaccaccatgcctggctaatttttgcattttctataaagatgggatttcaccatgttggccaggctggtctcgaactcctgacttcaggtgatctgcctgccttggcctcccaaagttgctgggattacaggcatgaaccactgcgaccggcctgaaatgtatttctgaaataataagaaaattaggctgggcgcggtggctcacgcctgtaatcccagcactttgggaggccgagacaggcagatcacgaggtcaggagatcgagaccatcctggctaacacggtgaaaccccgtctctactaaaaattcaaaaaattagccgggtgtggtggtgggcgcctgtagtctcagctacttgggaggctgaggcaagagaatggcatgaacccaggaggcgcaacttgcagtgagccgagattgccccactgcactccagcctgggcgacagagcaagactccgtctcaaaaaaaaaaaaaaaattactccttgatccatgggctgcagtatggagtatgttagcaggcatgacaacattagtctccttgtacatcttaatcagagctcttgggtgactagatgcatggtcaatgagcagtaatattttgaaaggaatcttttttttctgagcagtaggtctcaacagtgtttttttttttttttttttttt

SEQ ID NO: 29299 - DNA, 1020 bp, Homo sapiens
tcgctctgtcacctaggctggagtgcagtggtgcaatcccagctcactgcagcctccgggttcaagcagttctccttcctcagcctccccagtagctgggattacaggtgcccgccaccatgcccagctaatttttgtatttttagtagagatggagtttcaccgtgttggccaggctggtctcgaactcctgacctcaggtgatccaccggcctcggcctcccaaagtgctgggattacaggtgtgagccaccgcacccggcccctctcatctttttgagtgatgctttccctggcttgaataccttccttacacacatgcactgatcagtgcttggctggagactggagtgggaggtgtcctgtgtggatcttcagcatttgctgtgagctctgccctctggtgttctgcctgtgaactcgagctaccttggactgcctgaactcctagttttgatttttcaagtcagagactgccagccagcctccactgcttcttcttccttgggctgtggcctggcttttccagcagaagctggacaactacagggctccctcctgtcttttgtttccttttttcagggacccttcactgcctggcgtccagtgtctagtgtcttgaaaaccattgcttccctatgttttcttttttttttttagttgttgcagatgggaagtaaatctggtctgttccgtcttggccagaaacaaaagcataaaaaatggaggctttttaatgaaagcttaagttagtgtagaaatactcacgggcacctagaagaatgctgacccactttctggttgagatgtgggagcggaggatgcctggacaggggagcagaggatgcctggacaggggagcgggggacgcctggataggagggcagaggtggctttctcccgggtaggcatcaaagcacttggagtatgtagcgaagatgatgggagtagggcttggaagaagtttccctagaaaaatcaagggctacagaatgagatgctgagggaatgataagaaag

SEQ ID NO: 29300 - DNA, 1049 bp, Homo sapiens
cctcttatttttcaggtaaagagattataaatcttccactgaatgaaaaaaattttcttaaagctgcatatactccaagaaaaaaaccacaaatgtttttctgttttgcctgaatacatgatttaaacaagagatttccacagaaggtaagataagtttctttttcaatttgattctgttttattgtgtaatttatgtaaaagttctgtacaggtggaagttcaaagatgggtcacagcgaaaaacgtagtttagaagatatgctggctgggcactgtggctcacacctgtaatctcagcactttgggaggccgaggtgggtggatcatgagatcaggagttcgagaccagcctgaccaacatgatgaaacccgtctctactgaaaatacaaaaattagctgggcatagtggtgtgtacctgtaatcccagctactcaggaggctgaggcaggagaatcgcttgaatccaggagatggaggttgcagtgagccgagatcgtgtcactgtactccagtctgggcgacagagcaagactctgtttcaaaacaaaacaaaacaaaacaaaaaaacagatgtgctcatggtctgttgtcttttggtggtttttgatcctcctgtgtctggttttgagatgctctgcatgtttttgagcaagttgcttggtctttccaagcccaagtttaattcttcttttttttttgagacggagtcttgctctgttgcccaggctggagtgcagtggtgtgatctcggctcactgcaacctccacctcccgggatcaagcgattcttcttcctcagcctcccaagtagctgggactacaggcacgcaccaccacacctggctaatttttgtatttgtagtagagacggggtttcaccatattgaccagggtggtctcgaactcctgaccttgtgatccgcccgcctcggcctcccaaagtgctgggatagcaggcgtgagccaccgcgccctgtccaaagtttaattctgacaaaacaggaacagttttgcacatatttaatgaggtatatgttccgtctca

SEQ ID NO: 29301 - DNA, 1050 bp, Homo sapiens
ggtgggtaatttataaggaaaagaggtttgacacagttctggttctggtaagagtttcaggctgcttccgctcatggcaaaagttcaaggggagccaaagggaagctagcttgtagagaccccgtggtgatagagaggaagagagagaaagagaaggtgccagtctttttcttttttttttttggtatttttagtagagatggggttttaccgtgttagccaggacggtctcgatctcctgacctcgtgatccacccgcctcagcctcccaaagtgctgggttacaggcgtgagccaccacgcctgatgtttttttttttgagatggagtctctctgccacccaggctggagtgcagtggtgcagtctcggctcactgcaacctctacctcccagattcaagtgattctcctgcttcagcctcccgagtagctgggattacaggtgcccgccaccacacgcagctaatttttgtatttttagtagagacggggtttcactacgttggccgggctgatctcgaactcctgacctcgtgatccaaccacttttgcctcccaaagtgctgggattacaggtgtgagccactgtgcctgggtgccaggctttttcaacaaccagttctcttgggaactaagagtgagaactggccgggtgcggtggctcacgcctgtaatcccagcactttgggaggccgaggcgggtggatcacgaggtcaggagatcgagaccatcctggctaacacagtgaaaccccttcactactaaaaatacaaaaaattagccgggcgtggtggcgggcacctatagtcccagctattcgggaggctgaggcaggagaatggcctgaacccaggaggcggagcttgcagtgagccgagattacgccactgcactccagcctgggcgacagcgagactccatctcaaaaaaaaaaaaaaaaaattagctgggcgaggcaggagaatcacttgaacctgggaggtggatgttgcagtgagccaagatcacgccattgcactccagcctgggtgacaggaatgaaactttg

SEQ ID NO: 29302 - DNA, 1031 bp, Homo sapiens
tgaatactcaaggtgtgattgaagaattccaattcattccatgtgtcaaagatcttgttttaagatgttggtgtttttatattggtagggtgcccatcagccctggtttgcccaagtgtcctggtttttcctgtggtcctggtctcattaagaaagtgttttcatttcgagtccttttggaagtcttattctgctgtttgggtaaagaattgactgtattttttagtttttaatttttgtttttagggttgcccgtgttttcccaaatacagaattctaaaccagagaatagcaccttacatagtagagagattgcttctcttttggtaggcggtggccaggaaggaacgccaggtagcattaagccttggcccccaagtatgtcttgttccctgtctctttgctttcagtgggttccttgggccttcttgtttatgatggagaatacataggaattagcctcctcagcttccttctttcttgctgtgcttaagacaagcagccatatggggctgttatctttctgccactgggaaatgagagggtgggtgctaaaaaattaacttaaaaaggaaaaggatgaggccaggcgcagtggctcatgactgtaattgcagcactttgggaggctgaggtgggcggatcacctgaggtcaggagttcaagactagcctggccaacatggtgaaatcctgtttctactaaaatacaaaaattagccaggcatgatggtggatgcctgtaatccaagctacttgggaggctgagacgggagaatcgcttcaacccgggagatggtggttgcggtgagccaagatcacaccactgcactccagcctgggcggctgagcgagactccatctcaaaaaaaaaaaaaaaaaaagaaggatgaacacctttgagctcgtgtgttagtgacatcacatcccttctttcattcatttagtaaattcaagtatgatttgttgggcacttataatatgccaggtgcattacataactcctgtggccttttgaagaaaatattattt

SEQ ID NO: 29303 - DNA, 1020 bp, Homo sapiens
tttcattactcataaagcagtgtcatttataactctgagctgtgggcttcctcattcctgattgcagaattagaactgctcacccagtgggaagcagcagtgggtcacagcgggcccccaggaagcaccccctgccgcagagagacttgctgcactcagggcagaactgaaagaaagacagcgtctccaccaagggaaacactgggaggaagggaactttgccataacagttcctgggccactgaccatccactccacatccattgtccatctcctgtcatggcttcttcctcttcttcggttgacttcctgtggtaaattacactctgttaaaacagcttcctgagatggagttcgtgggtggtgatgtttagggcatcgggcctgcgtgtttgagaccctctgattagaagttcagactgggcattaccccctgggctttgggagcctccgtgttgtcctctagtctcacaagtctgatgtagcaagctcctggctcacgtgtgtcacctgttttctctcctctctgagggcatttaggttcttttctaagccctattgtttctcaatttcccagtaatgtggaattattccatgggtcaggacaggggatccccaaagagcatcattgagccaagagagtttcatagtcagagcttgggcgaatttagtaataggtaagtacaaaatcaagcaaacagaaaaatattgactctaagggaaaagttgtataagtaagcaaagatatcccgagtagacaaatgaggtcaacagtggatatccatttctttcatttgttgttctgggctccctgaacccttttagtctgtacatttgtgacattagctgagggaaatttctcatattgtttctttgatattttccctcttttctctttctgggacttctaatgaggtgttagattactcaaattaatgctttccttatttttgcttttaatgttttgtactttgcctttttggcctacatctgagagacttcttcatcttttaagttctc

SEQ ID NO: 29304 - DNA, 1106 bp, Homo sapiens
tctagcattagacttctgcaaaagcagttagtgaattcatctcagccagctgtaacggggtcttcctggagtccatccttgctcctgccttacatgtgacctgacctgggcttctgcccctccaggctgtggacacacaggtagagaggcgtggtggtccctgtgcctgcaccctgcagtccgccttggccagtcttctttcctgtgtcatgccccacccgcccatccctgatgggagtattttaaaacaaatcccagacaccagattatttctcatgtaaatatttcagtatgtatgtacatttatttatttttgagacagggtctcactacgcccaggctagagtccactggctccaacacagcccactgcagtctcaacctcctcaagctcaggtgatcctcccacctcggcctcctgagtagctgggactacaggcacataacaccacacctggctagtttttaaaatattttttgtagagatggggtttccccatgttacccaggctggtttcgaactcttgggctcaagtgatctgcctgcccaggcctcccaaagtcctgggactacaggtgtgagccacgatgcccagctatgtatctctaaaataaagacttttttcttttaaatataatcagaatttcatgatcacactccaaaaatattaaccgtaattgtttcataccatcaaacattcagtcagggcacaaaccagtatcttacatctgctttgagctctgagaaagcgcagctccacgaaggccgcggttccccttgacgacattcagcatgcatgtgagtgttcagtggaatgccgtcttcccttgcgctgtaaatctgagagttgcaagggccgccaggggactgcctcacctcagctccttctgaagctgagtgtgagtgaaggtcgccagcagcagtgggtcgtgctgggtgtgaggctgctggcagaatgggagtgggagtggaggcagcggggagctgtggtgtgggccgggggattgtcgtggctgtgaggtggtagtagatgttgtaaaaacctttactacctggcccttgcagcccagtgactagatgcatgtatctcataatttgccataac

SEQ ID NO: 29305 - DNA, 1490 bp, Homo sapiens
gaccagcctggcccaacatggtgaaaccctgtctctactaaaaatacaaaaattagctgggcgtggtggccggcacctgtaatcacagctactcaggaggctgaggcaggagaatcacttgaacccgagggtggaggttgcagtgagccgagattgtgactctgcactccagcctgggcgacaaaggggagactgtctcaaacaaaaacaaggcctggcgcagtggctcacgcctgtaatcccagcactttgggaggccgaggcgggcggatcacaaggtcaggagatcgagaccgtcctggctaacacggtgaaactctgtctctactaaaaatacaaaaaattggctggacgtagtgatgggtgcctgtagtcccagctactcgggagcctgaggcaggagaatggcatgaacccaggaggcggagcttgcagtgagccgagattgcgccactgcactccagcctgggccagagtgagactgcatctcaaaaaaacaaacaaaatccttgtatgctttgacatgtttcctccaatggtgacattttctaaaacactagtagaatatcacaactagaatattgatgtgaatgtgtgaatatgatccatcgatcattatgggctcaaaaaaaatagaggttattttttctttttttggagatagactctcactctatcccccaggctggagtgcagtggtgtgatctcggctcactgcaacctctgcctcctgggttcaagcaattctcatgcctcaacattccgagtagctgggattacagccacccaccaccacgtcttgctaatttttatatttttagtagagaccatgttggccaggctggccttgaactcctgagatcaagtgatccgcctgccttgacctccctcaagtgccaggattacaggcatgagccaccatgcccagcctggggttattttttcttaaatgtttggaagaatttattaggccattaaaccttctctgtatagagagcctattaattatagattttgtggagttttagtatgttctggaactattctgattttgtttcttgtcagtttaaataagtcctttttttttttttttttttttttttttttgagacggagtcttgctctgtcacccaggctggagtgcagtggcgtgatctcggctcactgcaagctctgcctcctgggttcatgctattctcctgcctcagcctcccgagtagctgggattacacgtgcccaccaccatgcccggctaattttttttgtatttttagtagagacggggtttcaccatgttagccaggatggtcttgatctcctgacctcaggtgatccacctgcctcgtcctcccaaagtgttgggattacaggtgtgagccactgcgcctggcctagataagtccttttttttttgtttttttttttgagacagagttttgctcttgttgcccaggctggagtgcaatggtgcgatcttggcttaccgcaat

SEQ ID NO: 29306 - DNA, 1025 bp, Homo sapiens
gcttcagcatccagcggggctcctgagctatagcttgtgtggctcatttgcaccctggtccttaagagagaagtcctgaagacagagcttacatacgcaccattaggacagagggatggtggtcatcctttatcatcttttgagccactcccagaacctcccagaactcagtcattgtgtgttatgtgtgttctttctgggtctggggtgtgtcaggcaaagagtctatattctagaaaacgggtgcagtgctgcaccaaaggggaaaggttcctgttgtttacttagacttgagcagcgacactgaaaggcctctttttctctttcagtggctgaatgaagagaaggtcatccagaggcttgtggagttgatccacccgagccaggatgaagatgtgagtgtgctgcttaccgagcttcgtgcatcagtccaggcctgtgctgccaggtcacccactgctgcgggccagggggcgagggagggcaagtcatccctttcctaagatgaggatcggttaggtacttttctttctttaatcaagcactgacttctaggctggattttttttttctttttttttttgagatggcgtttcgctcttgttgcctgggctggagtgcagtggtgcaatctcggctcaccacaacctccgcctcttgggttcaagcaattctcctgctcacccagtcgggtgagccaccacacccagcctctaggctgttttcttcttgttgttgttgttgtttaaatagagatgaggtctcactacattgctcaggctggtctcaaaaacctggcctcaagtgatcctcctacctcagcctcctaaagtgctgtggttacaggagtgagccaccatgcctggcctacacttttttttcttaactgaaaaataatctatgtgtattataaaaataggacaggcgcggtggctcatgcctgtaatcccagcacttggggaggctgaggcgggccgatcacttgaggtcaggagttttgagaccagcctggccaacgtggcgaa

SEQ ID NO: 29307 - DNA, 1086 bp, Homo sapiens
gagctccactggggtagaggccagctccatggtcacagatggcttggcagcatccagttcctcagggctgtgggccgaggccgccctcagcattgcaccacatgggcgtctccacagggcagcacacaacgtggagctgagctttcccctcactcttaatgtatttggctctttagacctgggtggctgggtccagcccacactaaaagagatgggggctataaaggcatgaactccaggacgggattgctaggggccccctaggagccacccaccctggaagcacctaaggtgacaatggggctccctgtggtgatccctgttgagagtttggggtatatcccagtaggccttttcctagcattacacataccgatctatacatacaaccacgtgtccttggcagattggaaaacagtggtgctgactcgtgtctgaggccttcaccgctgcctggccaaccaccctactttgttctccatcagcccacagggctgatcagacagacaggagaggccacgttggcgtctgtaggaaacaaggaggccgccctgcctgatgttggcgtctgtaggaagcaaggaggccgccctgcctgagaactggagcccacccatgcatgtgggtgttgtgggctgatggcctggcctgggtcccaaaggcagacctgagagctaatctggctgctttcttttctccctaaaatactcctgtgagtgtttgctttccctcagtcttcccacagcatgtgaaccaatgctgcagggagtcaggggttgtttctctcttaatcacatttgtcttacctacagaacagccctacattgtcagcaggggcacgttcccatcacggattgcgtgttaatgtttccctagaaaagatgagtcctctgttttcttggtagcaacttccctattttcattagcttacaggactcattctgaataatagcagctacttattaccacatttaaaatatagtatcagtaacatggccacatattcagcatatttcaaaacgtggatcacaggtatagcccagtatctgcattgcatatctgaccattattagccctgttttgaat

SEQ ID NO: 29308 - DNA, 1049 bp, Homo sapiens
acataattcagcccccaacactgatagcctgtgcttttttaaagtgaaagaaaaaggaacaatgagaaaatgataagaaattgacttaaccttgatagtgaggttgttaggactctctttctctctctctctctctctctgtctgtctctggtagtacctaatacatatttgttagtttattaaccagaagtagtgttataatgttaccgttttctctagttaggcaactggaatattgatattttaatcttcataaacccaggaaagctgagccacttctgaggcccaagcttaaccctgtatgtgatagaggggactgtgtaaaaatcaggaaaacagagataagccagctgtttctcttagattattgtgattattattattattattttcagacagtgtcttgctctgtcacccacgtgggagtacagcagcacgatcatatctcagcgtggcctcagagtcctgagctcaagcgatcctcccacctgtcccccccaaagtgctgggattataggtgtgagccactgcacctggctctctgatttttaaaattattttgcatattactttaaaaaatatatgattacgtattacttttacaactggaaagagtgtttaaataaatatctcagaagacttgcttgaaaacaccacagggggtaggcgcagtggctcacgcttgtaatcccagcactttgggaggccaaggcgggtggatcacctgaggtcaggtgatcgagaccagcctggccaacatggcaaaatcctgtctctactaaaaatacaaaaaggaggctgaggcaggagaatcgcttgaacccaggaggtggaggttgcagtgagctaagatcgcaccatcgcactccagcctgggtgacagagcgagactctggctcaaaaaaaataaaaataaataaaaataaaagtcgacacaggaacagtgaaagagacagggatagcagtgaaggttttaaaagtgggacagagcaggacctctaactggtgctagggccagtgagtcctgtgttgtgtcacttgccctgcc

SEQ ID NO: 29309 - DNA, 1050 bp, Homo sapiens
aggtgaacctggaggagggccgggggcgcggacgctgggcaggggccgggcatttgccctggaggtgaacctggaggagggccgggggcatggatgctgggcaggggccgggcatttgctctggaggagggccgggggcatggatgctgggcaggggccgggcacttgccctggaggtgaacctggaggagggccgggtgcgcggacactgggcaggggccgggcacttgccctggaggtgaacctggaggagggccgggggcatggatgctgggcaggggccgggcatttgctctggaggtgaacctggaggagggccgggggcgcggacactgggcaggggccgggcacttgctctccgaagtgaacctggaggcctctgccacttggctctctgggtcgtgggtctggcaaggtcggggccaggaggccgccccgatggtgcctgttgctttcagggcagcgggtggcatgagacgtgggaacatgggccacctcacacggatcgccaacgcggtggtgcagaacctggagcggggccctgtgcagacgcacatcagcgaggtcatccgaggtgagcccccaacccggtcatccttctgctggtcgcgggcaccgggaccccgaaggagctgccgcctgagactaagctctgcccggcagcaggtgctgactgcactgacagtgagagacccatggccacctctgtcctctcacttcacacatcacatctctcctcgtgggggcctgggtctcatgtgtcagttctattgggcggacttctgtggagaccctgccaggcgtcagcgtgtggcacaagagacagtccctcccggggtagttggtgactccggagctggcactcagaagccgttagcgccaccgggctccttgcagctcagggagccctgcctggctaggctgtcctggctgtgtgctctgcactcaggtgattggagagtctcattctcactcaggtgtgagatttcgtagcacaagtctcaggggagcaggttgcagcctgtttcttaagaacgcagtgggttaggt

SEQ ID NO: 29310 - DNA, 1961 bp, Homo sapiens
gatctccagattgtgaatccttccaggactctgacctccccggaaaaacaggcaggacacgcgcccaggcctgtaggctgctgctgagtttgggcctgtgaggtggggggaaggaagctggctgctttctcagattctgttccacggcttctgcgtttctgggagttcctcagaatgggcttccacccaacagacttggaactcagatgcccactggggtttcggtaggggcagaagtgcccaccaccctgcccacaggtgctgcacctcaatctcactgtggccccaggcccctccggacacgcggctatgctgcctctttctcatccggcaaagcccctgcttcaggccctcagacgggctgaccacagtagcagcgccccatcctcccggacccaggatgcacctgccggagcccccgggtgccctgcaccatctgcacggggtctcccagggctcaccaggcagcacttcccttgcagggctccctgcggactgccgtggccgctgggagagcttcgtggaggagacgctgacggagacgaaccgcaggaacactgtggacctggtgaggaggctcggggctgccccctcggtgcacgcacggtgctgggacgccgtcagacgctcctgcctttgccctgaggcagaggccaagggaggcacaagggccgcacgcctgcctgctcctcttgactatgcggtgcccctgcatagtgtgtcctccgggctgatgtccgtaacagagaccccgtcctgtgccacacccagggctgggtctctgaggacctctgtgcagagccggtgttggcctcaggtccctttcctcccactccaggagctgtagcttgttggcagagggctccttttgcctgagacccacaacctgccccctgcacatggaggtcgggctgtcacggggccttggcctcacctaggcacctccttacacagcacggcctcctgggcccagagatctgatgagtgatgtgctgggtggggtctgggagccctgggctgggcatggtcctgggcgctgggctgggtggggtctggggcgctgggctggctcacacgcccaccccatctggcctgtgttttaggtgagcactcaccaccttcactcctcaagtgaggacgaggacattgagggtgctttccctaacgagctgtcccttcagcaggtgagggcgtggccggcacctgcaccctgccgggcccttcccggcacctgtgtgcgctgcgcttggtcctccagacgagtctgatggcatctcactagcaaaggggagcgggggctcgtctccgagcacgtatggggcggggtgggtctgaagggagaaccccaaagtcactccaccttgatgagagcactgaggacacggcagatggactcgaaagtcagagaatatggggcgtatctcagatgtgaccgcagcgagcgcgcagcctgagttttggtagaatcgtgagccctgaacagagtttactgcccacttgtgctggaggagaagctcccgaacaactagagagattgtggttcccaaagagcagcctccaggcctgatgcctcctccatgaccggtgtctgtccgtccctccctccctccctccctcccaggccttctctgactaccagatccagcagatgacagccaacttcgtggatcagtttggcttcaatgatgaggagtttgccgaccaggacgacaacatcaagtgagtctacttggagcgcactctgcacgaggcgcggctctccctgctgctgagctcccgtggaggcagctccctgaggtcttgccgggagtgccgtctgatgtccccgggagacagcaggtgttcccagttgtgtgagggtgctgaggcccccgatgagcaccgggggaggagcactgaggccccagatgagcagtgggcctggaggaacgctgaagccatcccccttgctcttgcagtgc

SEQ ID NO: 29311 - DNA, 1945 bp, Homo sapiens
ttacccacttctcctaaacaacccctaaaaaactgctctgaaaagcagggaatatcattgtgcaaagtaagttgtttttttccacggggctgtctgcgtaaaacttgccacttagagccctgcctgcaccgtcgtcacggcccagcctgcaggtgagcttcctcgcgcccccgcctgacctgagtgcccctccctcagtcagacacagtgtcgtcgccctgcaggaagccagggggcccgtctgctgctcgtggccaggctgggccttggggtgcccgaccccctccagagcaagccccttagatgcccggcagggtcctctctaccctcccatcccctgggaggtttccccagactgtgtccagtgtgaggctgaagttgagatcatagcacaggaggctctggggtccttgaagaatgaggcgcttgatgatgagcaggatctgagtgctgcctggaggaggtttgaggtcatcaatggacaggcagcttgtcccagtacttggaacttggggcagcagagctgcctagctgggcacaacctgggccaccccacaaagggcaggagtgagaggggccaaagatggtgctcccaggccgcctggacctttttgtccagctggtccttgggcatgaggcggggtggcactgagggtgggggtgcccgtaaccggagtccatgtttgccacacagggtcgggtgtgctgacagccggctgttaagccctgcctgccccgcgccaaaggaagtgactgctgccccagccgtggctgtgccccccgaggctactgtggccatcaccacagcactgagcaaggctggccccgccatacccaccccagcagtctcttctgcactggccgtggcggtccccctagggcccatcatggcagtcacagcagccccagccatggtggccaccctggggacagtgacaaaggacgggtgagcaggttgagtgtgggggtagggggtgtggacagggcccgcagcccgcacggttccaaccccaccccattcctgcaggaagacagatgccccgccagaaggagctgccttaaatggcccagtgtgatgctgctgccgcccggccacggcccaccctggtcaggctgcctccttaatcgagaaaactacctggtgatgcaatcttttttttttttaatttaatttaattttaaaataaatgctgcattggtaaagctggcagttgaaaccagttggacggcccagcttgcgtctcttctgcctgagtgggcctctcaggtcactcgtgccctgctggaggacagaggggcacctcagccgcccccaagcccagagcacagcaataaggtcggcctgcaggagccggggtgggggtgggggtggggggggcaggaccctgagatgccaccaggacctgatgggccaggaagggcgtggacatggaggctgtttttacagttttttttttgttgttgttttgtttttaaagaatacagaaggagccaagcttttttgcactttgtatccagctgcaagctcagggcagagtcaagggcctgggttggaaaaacctgactcacaggaatgcataattgacccttgcagctacccaatagcccttggagctggcactgaaccaggctgcaagatttgactgccttaaaaacacaaggccctctaggcctggcagggatgtccctgtgcccagcacagggtgcctggcagggggagaccacaggtatgcaggtggggggacatggtgtggcactaggggctcgaagactggtttctagcactaccggtcacggccatgtcgtcctagaagggtccagaagattattttacgttgagtccatttttaatgttctgatcacctgacagggcaccccaaacccccaactcccaataaaagccgtgacgttcggacaaaccgcgtactgtgaaccttccggcccc

SEQ ID NO: 29312 - DNA, 1050 bp, Homo sapiens
cttgcatctggtcagacatcccctgttctcagtgacttatggtaaatgacttagcagctttttttttttttttttttttttctgtgaagagtcttcctctgttgcccaggctggagtgcagttggcacaatttcggctcattgtgacctctgcctcctgggcttaagtgatcctcccacctcagcttcccagtagctgggactacaggtgcgcaccaccacacgcggcttttttttttcttcttttttttgtagagatcaagtttcactatattacccaggctgatctccaactgggctcctctgcctcccagagtgctgggacagggtctcactctgttgcccaggctggagtgcagtggcatcgtcccggctcactgcagcctagacctcccaggctcaagtgatcctcctgcctcagcctcctgagtagctggaaccacatgcgtgcaccaccacacgcagcgaactattttgtagagatggggttttgccgtgttatccaggctggttttgaactcctgggttcaagggatctgccctcttcggcctccccaagtgctaggactacaggtgtgagccaccgtgccccgccagccatctgtgattttgaccaacttcccattttatgatcctaatcaaagttccactgatgatttcggcccaggcccagtgactcatgagtaaccttgaccagtgttctcattagtgaccctaatgatccaccagtgatcttttagtgattctggccagggtctccatcatcaacctggattaatgactgatccgtggcgccccgtacctgctctgggctctggatgacattgaatccaggaatagactccagcttatccaaggtgcctcctgtgtgccccagaccacgtccgctgatcattggcacctggtggtcagggatgctgagtaccctgcacagtacccctcccccacctctgtgcatcccttcaccttccctggctaggagtgcagctggatttggaaagtatttaagcagctataggggtgcccagctggtgagggaatggaaaggaag

SEQ ID NO: 29313 - DNA, 1031 bp, Homo sapiens
tttctttctttctttctttctttctttctttctttcttttccttctttctttctttctttgtccctccctcttcctcttcctcttcctctctctctttttctttcttttctttctttctgacagagtctcactctgttgcccaggctggagtccagtgacactatcacagcttactgcagccttgacctcctgggctcaagcgatccttcagcctcctgagtagctgggactacaggtgtgtgccaccacctggctagcgtgtgtgtttgtgtgtgtgtgtgtagatggggtcccactgtgttgccctggctggtctcgaactcttgggctcatgctatcctcccaccctggcttccctgctgggattacaggcatgagccaccacacctggctcctttatttttctttctttccagtctattacttttagcctatcttggtgtttatatttaacatttcatttcttgaggtagcttatagtttgtgtctcactttttaaatacattctgataatctctgcctttcaatctgagtttagatcatttctatttaatgtaatcattgatattattgggtttaaatctaccatcttgctatttatttgtcccatcttacctttgttccatttccacttcttttctgctttctgatggattgatcaagtatgttttcgtattctgttttattaccactcttagcttattaattgtgtcttgttgtagtttttaaaatgttttctctaggatttataatatacatttttaacttgtcatagtctaccctcacatgatgttatggcatctacatataatgtaagagcctccttacagcagtatgttttcatttctcctcccatcctctgtattggtgttgttatgttttacatctgcatatgtcttaaggctgggcatggtggctcatgcctataatcccagcactttgggaagccaaggctgaagaattcttgagcccaggcattcaagaccagcctaggcaaatagtgagaccctgtctctacaaaaaaataaaa

SEQ ID NO: 29314 - DNA, 1047 bp, Homo sapiens
gggcctcagctacgactcagaccactgtgagaaggtgggagaagagttggggacacagatccagctcaagggagggcctcattaggttcttcttagcgttcacttggggttttagggtgggtgtgagctcagccttgaaccggggactcctctgatggctcctccccacttaacccttgaggtttccttggtatcaactctctcttattccaacacattgcaggcctccacgcagggccttccccagcattctccccgaccccatcggtggccagcccggggcagggaggtgctcctttgctttgggtgccctctgtcctcagatcactcccagaaagatctaatccctggcagctgccatcacaaccttgtcccctctgcagccctgtgccctcgtctgcagctcccatctgtctgtttcatgtctccccctgctgaaatcttttctcgtccatctcttgcttctcctcctccctgtctctccacatttctgctttcatttattgaagaacatttctgagcaactgccatgtggcaagtactgggggcttctgggtgctgggagtggaacaggacagctgctctctggagctgcaacttagtaggggagaaagacttgtaagggacaatggctgcccacgtgtcaagggctgcattccaacagggacataagttccacgagggggaagggaacccaatccacactgaaggaatcagggagaatttccagaggaaatgtcaaccatgccctgaggttagcagagccaggcagatggggtaggtaggagggaatggaggagaggaagtgccagcatggggaataactgtgccaatggccctggggttggcgcaaagttggtgaatcctcagagtgcagaggctgtctctccatttctgcatctgtttgatgtttactgaacatccgctgagccccaggtcttgttcttgggggcgggtgcaacagtgcataacatggacatgaccctgccctggtggggcttgcaacagaccaaaaaccatgtccagtaactgtaagttgtgttaaaa

SEQ ID NO: 29315 - DNA, 1030 bp, Homo sapiens
tcctgctgcagaactctgcctgcctctccctctggacgacgatttttgatttttgctaatgtctgggtggaggagctgggcagtgactccatgagcgaggccccgcaaggagctgctttccagtgggagcgaggggtagaccggaagagggttttacagaccaggggtaacgtccagccccacctcggagctgggcaaggggctgtcagtctgctaggcccgcaggaggaggcctgagttggcaggagatatggtctccagtagccaggcagaggccttgctctgtggtcctggggcaggccctgaatagggccacagagggtagcagcaccggctcagagaagggagagtggacgcccctggtcatcatggaattaactcagagcgtgaactcttggtaggtgcccagccctgtgcttgggctgaaaccaaaaaaagacaacttcagatcttgaaattgtgcgacccccacactcctgtcccttaccctctccccaagccctttgttcctgcctcttctctctacatcatttgtggggtggccaaggctgggccagggctctgacgtgccctccacactgacttgcccgcagctatttcggcttcatcaccaaacaccccctgctgagccgcttcgcctgccacgtctttgtctcccaggagtccatgaggccggtggcgcagagtgtggggtgagtggggccccagggtgtgggtgcagaatgggtgcagggttacggaggtggggagcggaggtgagcaggtgggggcaggagcctggcaggggaggtctggggaaggagaaccagatgtgctgtgtagagagggcagtggtgggtgacagtttggggtgctgggcatggggtgggaacaggcacagacacatggcccaggcactctggcaggggtagaattgctgggccaggagagctgagggtcacacttgggggtgacatggccatgcctgggtggggggttatggatggctgcagagggaggaaggagggagagctcagaggctctgtggaag

SEQ ID NO: 29316 - DNA, 1042 bp, Homo sapiens
actgcccacaggaggtgttgggggacgagcccagcacgcgaggggtatttggtgttgatgttcccttcgtcccctcgccagggagagaggagggtcagcagggctctggggcaggggtatggggaaaatgagaagactggggtgacaggtgtgggtctgaccccccaaccccgagagaccagcaggggtgcagaagccaaactgcagagggggtggagaggggggtggtggaggggggtggtggagaggggggtggtggagggggatggtggaggggggatggtggaggggggtggtggagagggggtggtggagaggggggtggtggagaggggtgtgatcctagccgctgatgtaattcaggggaggtttccgggccctttctctggccaggttggttggcactgatgaccaggtggacgtggtctctgacttggagtttgttggggagtcgggaatattgtgggggtttgcggaccaggaacagagccagaactcctctattttcagtaggagtgagatgtgggaagagtggtcaggctgctgaggttgtgtggtcatagaaggtggaggcagcagtgggctgccagatgggtttgggcacactgggaagcagatacgcccgggcctgttggatgactgggtgcagggtcacaggaaggggaggatgagcttggcagcttgggcagctgcggggccttggctgagatgggaaacatggctgcatgttgggacagaccagtgtgcccgtttgcttgggactgctggttttagctctgaacttctgtccaggcagcccctcagtcccaggcagacagagggtgggtcactccagttatagggtgtgcctgtggcatcccagttacagacaagagtgtgtgtcagtagagaagaggaatgggctggggtctccggggcccccaaccaaggaagactccacacacgaactggagaaggagcagctggggctggctggcgaggcaaagctggtgctgctcagcccctccctgctcctcaaggccttgacctcccctttccctca

SEQ ID NO: 29317 - DNA, 1065 bp, Homo sapiens
caagcccaagctcaagtccccgctggggaaggggccggtgaccttcagggacccgctgctgaagcagtcctcggacagcgagctcatggcccagcagcaccacgccgcctctgccgggctggcctctgccgccgggcctgcccgccctcgctacctcttccagagaaggtccaagctatggggggaccccgtggagagccgggggctccctgggcctgaagacgacaaaccaactgtgatcagtgagctcagctcccgcctgcagcagctgaacaaggacacgcgttccctgggggaggaaccagttggtggcctgggcagcctgctggaccctgccaagaagtcgcccatcgcagcagctcggtgagcagggcggtgcggggagggatccgtgccttgtccgtggccccgtctgtcattcctcttgtctgttctctggctctcctgttcctccttgttctgttccattccttctgtggcaacccccaacccgcccccgccatccacctctgaatccggtcttgcttggcctgcccgagagaggaggttcttctgggcgtctgacacgtcagggttgctgctcactgtgtccctgttggtgccagaagtgggagctgggctcccctcagagactcaggttgggcatgaggcgcctccatggccctcctggaggctcttggccccagggattcctgtgagttctctctctccctcccgacacaggctgtctttaccattaagggttgttttgtgttttactttggaggtacgcctccctcctcccatcctctctgtggccatgtggctgcccagtgtggctgataccctctgccttacagctgcctcctgccttgcttcctctggcggcttggagcacactgactccttttcttttgggggatctgccactaactccctatttcccatcccagaaacatttgtctcttggcaccaccttagaatcccttaaacatggattcccgtgtgtcatttctaaagtgcagtaagaagatagatggaagtcacgccatctccctgcactccatctgccctcttgccttctcc

SEQ ID NO: 29318 - DNA, 1056 bp, Homo sapiens
cttctggctgcaggcagcggagcggagcacaggacacttggtgatgtctgagtccagtcctgtttcagatctggtccttgtgtgcccaccgtggctgttgtcagctcttgtcctgcggcccctaatggctggagtccggtactcactgctcacttagggataaaactgctggtggaactgcctaaagtgtgggaggttctgacatccaggtatggctgcttccttcccagggccagtcgtggcagaggcgctaggtcaccctcagggccataccctgagctgtgtctccagccccttgtgttccacagtgtttgtctcccaggcccatccttctcctccctgaccgacaccatgaggaagggaatgcccacccaccttttccagagatggctcattcctgatgtgctttagccacaaggtgttctgtggcctgagagctttctggacaagttaagctgtcctgtatgtcgtggaaccaaagctcggtaacctgtggaaaaatgatgagctctggggccacctttgattttcaggggaacctggaggatgtggcactctcatgctgcctctggaaggtccaggaccttcggccttttgaatcctcgatcccagattgtccacctgctctgtgctcccagctccaagtctagctctgctggacagaccattcatctgcccagagcccctcctcggtctctgggccccacacctgactctgaggctacatttgggcatgattcagacctgactccgagccccacaactggccacaggcaccccatctgtctgaggctctcacttgtctctgagaccctggcttcacacctggctctaaactccatttgtcttccaggccccgtgctcggatctgaatcccatgtggggtctgaggtccatagtaaggctcacgtctgccttggcacttagctttacatgggactctcacatctggttttgtaggtaaagttcatggcaaagtagctttggaaacacaaaaagaggttctttgctgcagtacttctggtgcctttgacaagcttgtgtggaggagggcac

SEQ ID NO: 29319 - DNA, 1066 bp, Homo sapiens
taactcgatgtttcaccattccaggactgccaaactgttttccaaagtgcctgcactattttacttcctcctcagcagtgtataagggttccgatttctccacagcctcattaacacttgctattatctttttcattaccagtaagtggcatctcattctggttttgatttgcatttctctcatgactaatgatgttgagcatcttttcatgtacttatcggccatttgtatattttctttggagaaatgtgcatttgcttcatgtatttttaaaaaccattttatcgatatacatatttaaggtataccacttgatgagtttgaagtaagtatatacccataaaaacgtcaccacaatgaatgccataaacatattcatcacttcaaaaagtttgctccctctctcttcatttctaattcttatgttttgtgataaggacacttaacataagatctatttccagtaaatctttaagtatgtaatacagtgttgttaactatagtcactatgctgtacaggaggtctctaggactcatccctctggcatagctgaagctttgcacccaatgagcaatgccctagcccttggcaaccaccattctactctctgcttctcagtttgaatattttagattccttatgtacgtgagatcatgtagtatctgtcctactgtgtccggcttctttaacttagtatatttgctgcaaatggaaggatttcctttttattttattttattttaattttttttgagactgagtctcgctctgtcgcccaggctggagtgcagtggcgtgatctcggctcactgcaagctctgccttctgggttcacgccattctcctgcctcagcctcccaagtagctgggactacaggtgcccgccaccatgcctggctaattttttttttttttttgtatttttagtagagatggggtttcaccgtagccaggatggtctcgatctcctgaccttgtgatccgccggcctcggcctcccaaagtgctgggattacaggcgtgagccactgcgccaggccaggatttccttttttaaaaaggct

SEQ ID NO: 29320 - DNA, 1157 bp, Homo sapiens
tattatctttccaaacatagccatataattcctctgtattagaatttttcacaggaattctaactagtatattttttgtacatgctttaaagaataaaaaaatttgaactgttgaccaaatgtgatatattatatactattgtgtgtattttaaagtgagggtaaaaaaagacaccaaagcctctgggaagttaaactataaattgacttacagaattaattaattaggaagttaaactataattaacttacagaacttaccaagaagtgttaatgcctaccctaggaatgactataaacctattagttagaatttccgtatatctcagtttttaatatgtaattgttttgaaaaatttggccaatttgaaaaaaacaattaatatgtaaatggatatatctacattaattcatattctttattaattctttattagatactaatctgggttctgtacaattttgtatctggccattcatttgttttagatgccagtaacaaatatacaattttttgaaaccaccaataccaatatatttttaatggatggagccatctctatgctgatatatcacggttactacaccaatttatagttaagagatatccaaatgtggtgttggacctaggaaactaatacttataaacccagtcaccaggaatgcatggttgaatggccaaaattcaggaaatgtacaggtggataaaccaatgatccattaacctaacagtataatggttcccaagaaccaaggggaacaaaattggttggagaagaaatagaagatacttgcagaaaaaaaaccaacttgctgctaaggccaggttccttactggcatgccacccctccatcctgggggtagccagtcctgagtgagcctccctgaggttcactggtagtcactacacatgtctagctagtggcattccttggtcagttttgaatgtagagatagaaagcaaacaaacagttacccaaagacagtaattctctcccatccacaggagggttttgcctagcattcacatgcatgttgctacagtacaattgattcattaattaactttagccaattacttagtaaactcaggtcaacaagaaaggaggcaatgctttcattcatagctgaaaccatacatactgaggatctaata

SEQ ID NO: 29321 - DNA, 1050 bp, Homo sapiens
ctccctttcacactcatgtggttggctcatttaacaccttaacctcataggttctttgtttcctcagctctgagactttttcttgaattcagccttccactgcctatgtcttagacattttttaatggcctcaactgttccatgtaagtaaccataagcctaaatatccatattctcttacccttattttgatcttttaaaatacttgttgagtatcccttatcgaaaatgcgtgggaccagaagtattttggattttggatatttttcagattttggaatatttgcattatacttaccagttgagtatccttaatttgaaaatctgaaatctgaaatgctccaatgaacatttcctttgagcatcatgtaagtgctcaaaactttcagattttgaagcatttcagattcagtaacagtgtgcagttgtgataaacaaattatatatggaactgacgtgatcctacaacataaactctttgagaactgaggctgtgcattttttagattagtagatactttgcaatttttttgaatggagtctcactcttctgcccaggttggagtgcagtggcatcatctcagctcattgcaacctctgcctcctgggttcaagtgattctcctgcctcagtctcccgagtacctggatcacaggcatgcgctaccacgcccgaatattttttatatttttagtagagatggggtttcaccatgttggcgaggctggtctcgaaatcctgacctcaagtgatctgcctgcctcagtctcccaaagtgctgggattacaggcgtgagccacctcgcctggcaatcttctttcaacttaatcagcccttatacactcaaagagttacttggatgcatgcattctcattatctattttcatcactgcatatatctgaggaaggataatgagactctactatcagtagaaggatgcttggattatcacgtgcaacactttatagcctatcttgacttttctcccaaacttcatagaagaaaagatgggattttctgactctttttaacttcctaggactagag

SEQ ID NO: 29322 - DNA, 1035 bp, Homo sapiens
taagaagcaggcaaaaggcaagcacaggggtggcatgcactcacactggggctgctccttcctgggcaagtttcagaaactcactgacagttagagctagcagctcccgtagagatgaatgcccatgttttcctgaagggagaactgatgcttagaaaggctgaatgacttgtctaagactctgggaccagaacagggatcttattccagtatttcttgcatgaagccattctacttccacgtttctaatttataacttttaaaaggtcattttaaaaacgaaatagcatgaacatcaagtctggaggctagtggtgggattattcacatttatttttccacttgacatttgagggcgatagtgatgcttaagtaaaaccaaaattatcctgggagtatagaaaataatatatctgtttacattttggtgtgggatgagtagaatcttgttttcaaattccttgcttgaaaggctattaagaagaataaatcctcacttaacagttttctaaatccttggtagtgtcctctgtcctttggtaacacatgaaagtagagcacacttttctacttttgttccttctgcacccctcataaggtgaagcatgcatagagcactcccagggtcagtgtgagcccagcagcagctcaggctgccgatgctccagagtcggattccaccttccacttaaatggcagccacaggtagacgtgcccatcacaaccaactctgtgcgttcataatttctgtttattctacaggtggtttccacaagaaaaatggcacaatgtttctcagaagacaattacataagaatcagcatacttcaaattcacagcaaataatcagacaattgatgaaaatacttacccaaacactaattgtagactatgccttctgaatatgtttgtcataaacttggagtaaggaatcctcacaggcactggacaattcaaaaaacgtaaagttgtttgttagaatactggtgcttttggatagaaaccctcatccatatcctggtaaggcttgaagtt

SEQ ID NO: 29323 - DNA, 1029 bp, Homo sapiens
ccagctccagaagtgaaagagctggcttcagctgggcatgaggccaaatgaaaatgctttcactcccctcaagggctgcagagggggcccttgcaaagggagggtcaccgagctgcaatttcttctgcctccaatccagaaagagcctgaaggattgctcaaggtgtcctgggaaagattttgatttcaaagagacaatctcccccaggaactccaggagaattttgtgtggtgtttaaagggtaagaagctgctgggtgtggcagctcacacctgtaattgctgtgctttcagagctacaggcaggaggatcacttgaggccaggagttagagaacagtccgggcaacacagtgagacaccccccactacaaaaaacaagaagacccctctttttacccctaattgagaggcgtgactagaaggcagaaagctggctgttgaggtgggagtctctctcttcaggcagaggtagggccgcttcctggggcagaggcgtggatggtgtgtctggctctgcagttcctgatgaagacatactggggtgcccaggctaacctttggcaaaactaggagctgaactcaggagtccctgatgccagcctttctgatgcggtcccccctcccctcccccatgtgtctcgctccatagctccaggccaggagccccaactggctggtggaggatgtcttgctcctcagcagctgggatttgtaagtatttgtaggaacatggaacagatcagtggctgacaggcccaggaagcagacagtccccttcccataggtcaccagcttcacttccccttcctgcaccccatcctgatttgagggagcccaggatgacaaagagggagtagttgagcaaggtatggagtggcagtctctacaggagctcaaaggatgcatttgtccatctgccctgggctcagcttccacactcagagtcactcacatccctccaccgtcgccacagctcacctgtgtgcccacacagacaaggtcacactgaccccaaacgcacactgtt

SEQ ID NO: 29324 - DNA, 1027 bp, Homo sapiens
gcctcccaaagtgctgggattacaggcgtgagccactgcgcccagccaactttttaatttttttaagttcattttacaagagaggacactaagcctgaggttactcgaccacattttatgggcagtaatctggatctttgtttttttttgagacagagttctgctctgtcgcccaggctagagtgcagtggcacgatctccactcgctgcaagctctgcctcccgggttcacgccattgtcctgcctcagcctcctgagtagctgggactacaggcgcctgccaccgcgcctggctaattttttgtatttttagtagagacagggtttcaccgtgttagccaggatgatctcgatctcctgacctcgtgatccacccgcctcggcctcccaaagtattgggattataggcgtgagccaccgcacccggccaggatcttctaaactttcaagttctgtgtcatatttattggcccaccagtaagctaatggattaagtttcgaacgtgtggtaatttttttcatgagcagaatattctacccaattatatcctttagtaacttgtcggttactgttacccttgacgaaatttttagtttcctagtacgtcatttataatgaaaattgctgatctttccttttgaataaattagaatccttgaaaatgaatcacaataaattttctgttttatatatgaaattagtgttcataagcaagtaacgcaggtcaccagctgtttaaaactgttaatcaaaacttgatgtaatgaattaatattgactaatttccctctaggcagaagaagagttcaacatagagaaaggtcggcttgtgcaaacccaaagactaaagattatggaatattatgagaagaaagagaaacagattgagcagcagaagaaaatgtaagtagatcctggttgcagtattaagctaagaagttttctgaagtcatgagcaggcgctttggagtcaggcatatataaattcaggtcttaactcgaccacctactactaatctgacaaa

SEQ ID NO: 29325 - DNA, 1034 bp, Homo sapiens
ccttcaggccagtgtccctcaaatcctattccgttgaaaagtccccccaggatgagggactccaccttctcaagcctctgtccatccccaaaaggctgggcctgccaaagccggaaggcgagccgttgtccctgccaaccccccggtccccgtccgacagagagctacgcagcgcccaggaggagcgcagggagctgtccagcagctctggcctgggcctgcacgggagctcctccaacatgaagacactgggcagccagagcttcaacacctcggactccgccatgctcacgcccccctccagcccgcccccaccgccacccccgggcgaggagcccgccaccttgcggaggaagctcagggaggccgagcccaatgcctcggtggtcccgccgcccttgcccgccacctggatgcggcccccccgggagcctgctcagccccccagagaggaggtgcggaagtcgtttgtggagagcgtggaggagattccctttgctgatgatgtggaggacacctatgacgacaagactgaggactcaagcctgcaggagaaattcttcacgcccccgtcctgctggccgcgccccgagaagcctcgccacccgcccctggccaaggagaacgggaggctgcctgctctggaggggacgctgcagccacagaagagggggctgcccttggtgtccgcggaagccaaggagttggccgaggagcgcatgcgagccagggagaagtccgtgaagagccaggcgctgcgggacgccatggccaggcagctgagcaggatgcagcagatggagctggcctcaggcgcccccaggccccgcaaggcgtcctcagcaccctcccagggcaaggagcgccggcctgactcccccacacgccccactctcaggggctccgaggagcccaccctgaagcatgaagccaccagcgaggaggtcctctccccgccgtcggactcagggggcccagatggctctttcacttcatccgagggctccagtgggaagagcaagaagaggtcgtca

SEQ ID NO: 29326 - DNA, 1025 bp, Homo sapiens
tgactgcagcaaagaagagccctgtatatgcttgcttcaggctctgagggttgctccgtcctcagtgttcaggcctgaggtgtccactgacaagaatcagcagagggatctaaaaaaaatctgtattcatatacctgtacatctgtacatgtttgcagacatatttaaattctagagaagtacacacttactgaggaaaatgctgaaaagtacagtaaaggtaattaagccacctgtaattctattaattaatattttcctgcccttctttctggtgtttttttcagtgtattcttgtttttgtagatgaggtcattcttaacatatacttttcgattctccttttttcatttaaccgtaggcgttcccatgttgttcctgactctttacaagcaccttttggaatgtgtgggcatcaggcttctcttagctgttgctctagtgttggatgttcgagttgtttctcatctttggataagcgttcttatgataaagcttcttttgtgtgttgcagctgtttcccgggatattttcctaggaatatgagcattgagtgctaagcagcactcccacatgccatgcatgcgagtgcatggcagcagcttgtggcttggggtgtcttggttagggcgtgtctctccccttgattgtctaaaagtcactctgacttcttacaagaggcggggctgggattttgaagattcgcactggaagtgtctcataaatctcaatgataactggagagagcagctggagggcagggctgcttctctgaatttctcttctctctctccgtcttttccatgcccatcagccattcttcctatggaccagatgggtgggagcagctttgcttggagtctggccataattaactacctcccacatctagtctttgcacgccagtcttttcatgctatggctcacagaaaaggtgatgatattcattgataaacggttgtggttgtctggaggctctggcagccccaggtgcccctaccttgggaaggctggaatgctgtccg

SEQ ID NO: 29327 - DNA, 1049 bp, Homo sapiens
gggaaagattgtgatcagtggcagaggatgggcaggtgagtcagctctgttccaaagggaacaggcagaagtggttgagggagcctagcaggtgggggtggaggggcgcctggagaaggttaggggaccgtcttctaggaaggcaaagcagcacagggacagcgcggcactgttcagcagcagtgaggtcatagtttcagaggctgaacctatggtgaggaggagtttgagaaaatggaaaatgctgtgggatcctagattaacacagaattaagggctgctgggttaacctgaagtcatgtaaagaagaatgcgatcagtcttctgaaaagcaagaggcttaaacccagtaggaaatggccattaatctaaataggaaacttagcaatggaaaaattttttgaggaggattttggaatttcccctccaggagaaggctaagattgatcagagctgatttagtaccttaacagcttgtcaggtctaagggccatggtgggtgatagtcccaggcctgtaggagcaatctgatccaaatgggagatgtatcatgttttgacattagtttaatgtggatgggccatacacaaggatcaagatatattaaagatagttcctattattttttatttttatttttagagacaggtcccgccctatttcccaggatagagggcagtggcacagtcatagctcattgcaaccttgaacttgcgggctcaagtgattctcctgcctcagcctcccaagtagctaggactgtaggcatatgccgccatgcctagctaatttttaatttgaattaaatttttaatttaaattgaactcctgggctcaagcaattctcctgcctcacccttccaaagtgttgggatcacaggtgtgaaccactgtgcccagccagtccctattctcgagctcacattttagtagtaaatttgtgttactagaaaaatgagagtcgttttttgactttctccctttttttctttggtgggtagacctttcatcacttcctgaggttgctttgcttttcctcagtaaaaaga

SEQ ID NO: 29328 - DNA, 1049 bp, Homo sapiens
gtcttgctttgttgcccaggctctctggggtgtggtggcactatctcagctcactgaagctttgacttcctggtctcaagggatcctcccacttcagcctcccaagtagctgggactacagctaatttttaaattttttgtagagacgaggcctccctgtgtttcccagactggtctcaaactcctagccttaagccatctgctggcctcggcctccccaactatagggattataggtgtgagccaccgcacccggccctgtgtagctgatttctagcacaaagtcccacagttaaaatgtgtttgtttttctcaaaccccaccttatttcataaaagatttaaaggtcatcatcctaacttctgtctgaactttacccagccttctatcccagactttcctttcagccattctgctcttaggtaggaatttgttacttgatatttgattttctttctgtttgactttgtaaatttctgccaggtgcgccatttatatgatactggcgaaacaaaagatattcacctggaaatggagagcctggtgaattcccgaaccacccccaaattgactcgcaatggtgagttctggtggtggctttttaaaatgcaggcagccccttcagagaagtctatactcattccctgagccacaaggtgcggtccgaggcagtggccgaagtactgtctgagacagtggctctcaacccagggtgattttgccctccaggggatacttggtagttgtctggggacatttttgatggtcatgattgggggtgggcaggagccagggatgctgctgaacatcccgcagtgcacgagacaggcctccaccacacggaattaccttggcctgaggtgttacgagagcacagagagaaaccaggtacagacgcggggcagaggggagagagggagagagtgtgagagctaaggtttcgggagaagactttgtggaaaaagtctttggctgggtcctgcaacatagccaggattcagtgacaggtgaggaccactccagattttgtatgtattgaaggccctgaa

SEQ ID NO: 29329 - DNA, 1062 bp, Homo sapiens
gctcagtgtgccaggaacctccaaaacagaaaaggagtttttcagtcctttgttcttctttgtgggtttctgtggaggctttcaagtcttacttactattttgaaaacctctgctccattttcaacatattccttcccagcctcctggactaccattgctcccacctccatgtctttttggcactcaagcttttttgagttcttcctttgggtgtcatgagttatgcaaggctgagtgtttcacgtggtcccatttgacaaaagccatttactacccagaagataatgaaatgccctttcagttcacaaagtactgtcaggtatgtgatactcagaacaaccctgaggcagattggataagatcaaagaagtagtcattgttccaagcaaatggaaaagccatgactgtgtgtttaggcagcaaggtctatgttctctcgggaataatccaccccccaaacccctctttttttttttttttttttttttgagttggagtctcactctgtcacctaggctggagtgcagtggtgctgtctcagctcactgcaacctccgcttcctgggctcaagcagttctcctgcctcagcttcccaagtagctggggttaccggcacacaccaccatgcctggctgatttttgtatttttagtacagatggggtttcatcatgttgaccaggctggtctcgaagtcacgtcctcaagtgatctgcccgcctcagcctcccaaagtgctgggattacaggtgtgggccattgtgcctggctgcctttccccccgcccattttaatggtataaaagttttggttttggaacgtggagtcactttagggggaagaagaagctgtggccctgggttgtgtaacatggttctggctgagtgccagagcttctccatccctaccctcctctttctctggagacaggactacgccgacacagagctcctgctttcccgagaaaacgtggaccaggaggctctgctcagctatgccagggaggcggcagacttctctacccagcagcagctgccgtctctggattttgccatcaatcac

SEQ ID NO: 29330 - DNA, 1036 bp, Homo sapiens
gaaattaaaaggcatccaaattggaaaggaagacagttatctccatttgtagatgatatgatcttatgtgtagaaaatcctacagattccaccagaaaaacctgttcaaggctagtacataaatccaacaaagtagcaggatacaaagttaatacacaaaaatcagttacatttttatatactaatagtgaacagtctgaaaaggaaatgatgaaaataattgtctacagtagcatcaaaaataataaaacacttaggaattagccaaggaggtgaaagccttgtacagtgaaaactaaaaaacatcactggaataaattaaaagataaatgagaacaaattcacgcttatgggttggaagacttactattgttaagatgtcacaattacccaaacaatacacattcagtgtaatccctatcaaaatcccaatgattttttttttttttttacagaaatagaaaaacccatcctaaaatttacatggaatctcaagggaccctgaatagccaaaacagcccttctaaaggagaccaaagctggaggactcatgcctcctgatttcaaaacttactataaagctatactaatcaaaacagtgtggtactgacataaaggcagacatataaaccaatggaatacaatagagggcccagaaacataccctaacatatatggtcaaactatgttttgttaagagatggggtcttgctatgttgcccaggctggagtctagctcctgggaggatcaaataatcctcctgcttcagcctcatgcacctcacttacggtcaaattatttttgacaaggataccaggactactcagtacggaaaggacaggcttttcaaataatgatgctaagttgcctatgttgaaggaagacagatcaggagcccgaggcatgttggcgatttgggtcctggtttctgagggaaaatatgatcaagtgttcctctccacctacttttttctttttttggtttttgagacaggatcttgctctgtttcccaggctggagtgcagtggcatgat

SEQ ID NO: 29331 - DNA, 1145 bp, Homo sapiens
tgaatgtttcatttccaaccaaatggatcctccttcccatggaagtggtgtggtgaggggtgtagctgggggagtgatctcaggggtcagcgggaatcagcagagggagaggtttggcttggagaagcatttgatccactgatgaatcatgcctaagtcccatactcttttaagctaatttcaagggaaaatacattccactgagctggtttagggtcagttgtctagatttatttctgctttggagagaacaactgagattttctccatgaaaatagttgaagaaaaccatggccttggagctagctagccctcattccccattcctttctgtggcttggaaccaagacacactgcttgggtttgagcatgcacagctaccttattggagaataaggaccctcctggaacaaggctgtgctcaccaagcctgtgccctggtgcatacacttgaacctggttttctttcgtcccgagccatttgcatctctaagaagcctgtgggcatgagtcttcccttcagccattctaactcttgggagcttcaacatcataataccagtgacttagtgtctgaaaaaggtgaggatcatcctggaatgtgaacagaaaacaacagtcctgttgttttcataattaggagccattcagactcctaatatgccttagggaactcaactgtggctgcttcctggtccttcttacaccccctaaattgtccaacaagttagtaacaagttaatcatcatgcaaatgccctttctccttttgtgtagttctgtgacattagatgttatggcccaggcgagacttctgtttatctttttccttctttcttggcatctgcccgcatctgtactacgtgcaaacatgaacgtgaattcctctacctagccagacccaaacacaaacgggtaggcagacctggacttaattccagagcaagtgaggagtgttgaaggggaggcacgcacccaggtgggagggaacacaggggaaaaggtgattggctgcttggggctggggtgggcggggtcgctttagtgaggtccggaatgctgagctgcagtctcaagtgcaggaggggcgttgtaggcaaaggtgaggaggcggcagaggtgaggaacacgtaaaagtgtggtgca

SEQ ID NO: 29332 - DNA, 1919 bp, Homo sapiens
gttacctcttcatgaagggaaaacattgtctcattggcagtttggccatgctggggggcccactgtcctctgggtgtgtagaggctgtcttggcgggcacagtcttgctggcagggcccaggctgcaagatgaacgcgtgcagcggctgtaggctggcctgggagaacgaagtggggagagggggccaatccagccatgtggccttgcagcccggctctgatcttagatggacagcagatatttgatgtgctgcgtttctcttctgaagtctcactcctcctttctttgtgatttaaacaatttcttccctcccactttttgtccaaattcctcagtccatactctttgaaatctgaagtatggagaggcgatagcagggccctccccacccatcttccggcttggaaggggtatcatgtggttcagctgggccctttgctggagagcagagggaggggtgttccccagggaagagggcaggaaagaccagaggttaaaaataggcagcttgtaggaacttgcccaccactccctcaggtcctcctgtgatgtgcacacttggagtagaatggctttggagcagagaaggggaaaatagatcagccctcacttaaacatcacattagccattggcttttcctctatcttccacataagaggaactttccccaatcacctggtggttttggatttgtgtcccctggtactttggggatgtgtccacatgtgtgtgcagtgcctctgtctgcatgtgtgtggcgctaagatgactcagtgtcgcatgtgctgagacattccggggctgcaggtgggtgttctcacagaggctcgcctgagggatcttttgcacatacaaagatgtgtcccatttataagttagttccctacactaaatgaaagaactctccggggccgtgtgtgtgcagtgaatacacatgtgggtcgttgtttcacacaggcggtgtcctggttgcaggcagagtgtgagaatgcaagctgtgctggctgctctgatatggtccacaaggtatgaggcagcttttgttctctttttgttcttttcggaagtaggggtgcctgcccacccccgaagccagggaaagtgcagtcttctctggcctcctggtcaggtagagctgctccggttaaaactgtcaagagcatcctgtctctgttccctgagacagccacaggggactcccaggaatacccagccaaggacttgagatgctgcctgctttgtcatctgtacctgcttgccacactctcctccacttaataccctgttgttactagcgaggatttccggtcctgactttcaatctggattttgaataacttgataaggtgattgctttcggatccctctgggcctgtgtctgcccctccctgtaagctgagagagcagctgggcccttcagtttctatggcccttccgccaccgagtgaacatgctcctgtggggcttggcctgtgtgacccacctcatcccttttgtctcagtcttcctgctaaatacagcctcttctctccctcatcccttctttctctgctctctgggcagaagagaagctttggctgtagtctttgatgtgggaggctagactggaaggcattctgggtgggggagggaggtgcctggtggaattggggcgtatgggggctgtgtggagaggggcccgctgcctttactgagcccctcccctccctgggcagtagggcgcgtgttaccccttgctctccacatctcagggagaagaacccaggtcctcatgtgaatcctgctgttttacttggggacacccgggaatgtgaatgggtgaaggtcttcctggctggtgcctttgtttcgggttgtttttctttgaggtgcctctcctactcccacagggcctgtgcaggggtgctcagagcccac

SEQ ID NO: 29333 - DNA, 1499 bp, Homo sapiens
gttctttcattctctctctctctctctctcgttttctttctctctctttttttttttttttttttgacatagtttcactcttgtcgcccaggttggagtgcagtggcttgatctcagctcactgcaacctctgcttcctggttcaagcgattctcctgcctcagcctcctgagtagctgggattacaggcgcacgcgaccatgcccagctaatgttttgtatttttagtagagatgggattttgccatgttgcccagactggtctagaattcctggcctcaagtgatcctccctcccaaagtgctgggattataggcgtgagccatcgagcccaggctctcagtaaagaaggctttctattcacatttttgtatcagatgagattagtttcagtcggaaattgcaaaatgtggcttagcatgaaagaagattttctttttatgtaaaaggaccctagagatgggaagcccagagccagtgtagccagctgcatggccatcaggattttgtctcgttccttctacctggacttgccagctaaagcctggtgattgtgtggcccactctatggattgacaggtgagagttcaatttgacctaactccactaccctggcacgtagctttctcatccttaaggttacctcataacaaagcatggctgccggagctccagccatctttcttttctttctgggtagaacaccaaagggaggaaatgtaaagaaaggcaaaatgtttttctatgtgagagactcctttaaaggagtctttcaggaagacccacacacttctgcttatatctcattaaccagaacctggaaaacatggtcacagctagcttcaaggaagtttgagaaatgcggttttgtaagtgagtgcatcactggctctagtaagattggggtactgttactaagaaggaaatctttctccagttggtgtctgacttcgtctctgtagtgtctctcacgtgagcaccttctgcttcatgtgagtccacttcttcctgccctgtatgcacgtaagcagtcctccctccagacacaggctggctgtcctcgcagctctcctttgctcttcttttctcggagctaagtcgtagtcgcagtgcaggagtcggctgtgcccaggctggagtgcaatggcgtgatcttggctcacggcaacctctgcctcccaggttcaagcaattctcctgcctcagcctcccaagtagctgggactacaggcatgcaccaccacacctggctaattttgtatttttagtagagacggggtttctccatgtttgtcaggctgatctcgaactcctgacctcaggaggcccgcctcggcctcccaaagtgcggggattatagccgtgagccaccatgcccggccggtagtgcatggatttctgtaggtaccatagcagtgtcagtgcaaagcttggcatacctgggaggttgctgcctctgtgtttctgggctcttctccccatcccctttctgcaactgt

SEQ ID NO: 29334 - DNA, 1054 bp, Homo sapiens
tgtttcccagtgtaaccttaactccctcgtgttatctaatgagattttcagctttatttactctagtataagacacggaatttaacagcaagaaatgaatttgggttatgtggacaagttaccagaatgaaaaacttaaactgtcttctaccctgatccccacaacatattttggcagtccatctctgcctatattgttcagataagattagaaagaaataaaacatttaacttacatactgatgttctgttggccgtcttatttgctccggctttgagccatgtagcactctttttttttttgagacccagtctggctctgtcgcccaggctggagtgcaatggtgttatctcggctcactgcaacctctgcctcccggttctagcgattctcctgcctcagcctcctgagtagtgggattacaggtatgtactgccacgcccggctaatttttgtatttttagtagagatggggtttcatcatgttgatcaggctggcctcaaacttctgacctcgtgatctgcccacctcagcctcccaaagtgcagcactctttaatagcaaatcctgtgtcccaaacatgaggacatatgccaggagggtgttcaggagagtctgtgtaactcactcttgggacagtgctgggttctgttttttggggacacacttggggtgacttgaaaatgtgctatttcatacctggtttgttctgtatcccttttagctctctttatcaggtatttccatttctaaattggggtaaatgaattcgttgaatttttttctttgtgcataatctgaacaagtgagtataagtcctgtagctggggggctgggtgtggggcatgggagcggaaaaatatggaaggcaagggaaagctgggtaaggaagagtgcagagtgtaagaagttctcagaaataccagaaagttgtgggaatttgttaggaagtcagtcaagtagggtatgagatttttttttaaatttgcgggcttttcattcactgtcagccgtgagccaccaagatccttgggtgactttctagcaagtgt

SEQ ID NO: 29335 - DNA, 1009 bp, Homo sapiens
attttatgatatatatttattactgtattgtatatgttattaccattgtgtgctgcatatcttttatatcagtaaaattgaaaataaatgtgtccatataaatacatgcacatgtttttggagaccagtctgttaagcatttgccagcacagtactgcagtgggtgaagtaaatactgccctcctgcagtccacagtgtctggaggggaccaatagacagatgatcacagacacctccaagtgtgcagggcactggtgggggccggggcaggcccagcgaaagtgcaggacctggcacttagtcggaagtgagggtgcagttgagcaggaactgagggtgacgggccagcacagccgcatctgggcgaggctgaggcagaggagcagacgggcagctggtttgctgccgcggaatgataagacgggcggaatgataagacggaaactgtggcactctggagaaagtgggtgtggctggagtgcacagctgctcgttgtaggttgcatgaagggcatgttgacagcctgaggattctgcctccttttctccgttgccacaaatacttataggcttcagaaaagaggtgttaaagtagtaattgttgtgaagtaaatacttaagttcagcaaatacagactgtccaattcctgtgttcaagactctgctgatggttttccaggagctgaaagttgtccttgcccactaggagggtattccatggtagggagccagatgtgtgtgcagtcagctgtgatagcaggcggatttgaacaaaatgctgtggaggaggccgttaattctgattgcggaatggggaaggcaggaaagtagtttgcagcaatttccttttggaagcccagaagaatatccctccttccaccaaaggccctttccgtctttatttcccagtttatctccattcccctgccctgagctgctgctgtttcacgaatgctaattcggcctctagccagactgctagagagggctacatcccatgcttcctcc

SEQ ID NO: 29336 - DNA, 1028 bp, Homo sapiens
tgcctggcaggagtggcttctaagaagagctgttgattgttgaactttgacgataaggtgagggtttggattttttggggatagctttattttggtataatttcagaaaagtttgagaatagtacacgagttcctatttacccttcacctagagtcacgatgatttgcgttttgccccatttactttttcatatttttttcttctctttgaatttttttcccagaacaatttgtaaattagtgaaagtgtctcccttgactcctgaatccttcagtgtctgtttcctgggaacaagaatattctctcggagtctgatagggcacctttagcatagggttcttccataggaagtggcatggtgtgaaggtgtccagagaggatgaaggtgtggcgggcagtgtggaatggtgtccactggagggtggggtggtgaggacagggtactaactggggacggagaagaggcgtggaccagaagacctggtgtgggacaagcagcactgccttctagggaggtaagccatgtggagactctgaggaggcagatttagcttcagccttgtacttgggagtacagagtcagagtttggaggtgcagctgagtctgaaggacactgccggtctccatccttggggcgcacagggttctgtcatgaggataataggtagagatggtctccatccttggggcgcacagggttctgtcatgaggataataggtagagatgagtgtgcccatagtcctgtgtggacttaggagttactagtgacagcagcaggtgaaattaagacccttggttgttaaaagagtgggaaggatgctgggaagccaagggccaaagccagcctaggggggtgcagggagggtcccagggaaatggggaggggtgaagacccaaggaggttgaagggaaggtggtgcagcagtgtgagaagagacagatttggccacgcgcggtgggtcacagctgtaatcccagcgctttgggaggccgaggcgggagagaccaacctgggcaacaaagtg

SEQ ID NO: 29337 - DNA, 1030 bp, Homo sapiens
gtctaacatggttattgaagtatgtagaagaatcattaagataattgtaagtgagagagggtaaaatgacttaaaagaattgtaaggtttctatgcttcagtcaaactggtaaaatgtcaacactagtagactgagatatcaatataatgtaatatgtagagcagctattaaataatttacacaaagagatacacactaaatcactagacatatcaaaatggaattctaaaaaggtgctagtaaccccaaggaaagtacgaaaaagaaaacagagaaaccaagaacagaggaaacaaagataacaaaaaaattctatggaagacctaagacttaatatacaggtaattacattaaatataaacagtctaaatacactaataaaaagatagattagtgagtgaaacaagccaggcacacaaagtcaaatatcacctgttttcactcataagtgggtgctaaaaaatgtgtacacatgaagacagagattggggtgacagacaatgaagacttggaagggtgaaggagtatgagggggtcatatgataggtaattcctaattgggtacaatgcgcattatttgggtaatggataccctaaaagccctgacttgaccactatgtaatctatgcatataacaaaactgcatacggccgggctcagtggctcacgcctgtaatcccagcactttgggaggctgaggtgtgtagatcacttgaggtccagagttcaagaccaggtgggccaacatggtgaaaccccatctctactaaaaatacaaaaattagctgggcatcgtggcaggtggctgtaatcccagctactcaggaggctgaggcaggagaatcacttgaacccaggaggtgaaggttgtagtgagctgagattgctccactgcactccagcctgggtgacagagtgagactccatctctaaataaataaatcagcaggtatttataaacataggccagataatgtcacttctctgctcacaaccttccactggtaccacatctcacagcaaatggaa

SEQ ID NO: 29338 - DNA, 1068 bp, Homo sapiens
ggtgctggccaagtggaggtgcttctttcaccaaatggctgtggagcaagggcaggcgggcctggctgccatggacaccaagctggaggtggcggtgctgcaggtggggcagccttccccttccccactcctgtggcttgtgagggggtgggcaccgtggggtcacacggggcatggtgggcagtggtcggaggtggttttgggaactcacccagggcatgtggctcactctgcagctgctggggttggcctggtggggaggaggaggtcagagggactctgaacagagaggggagatgctggcaggagggctggagacccagccctgcagggcgtgggcgtgcatcagcagcggggtgggaatagacctgtctatgcagtagaaacaaaccagacatggatcctgttcttactaacgatgtaataaagccagaaacagcaccagaggccaatgggtggggggaaggataaaatatgagtgaatggggctgatccaggccttctcacttctcaaggaaagtgtcgcaaagttgggcatcgcatccagggctgagattgaggactggttcacggcagagaccctgggagtgtctgggtgagagcagcccccaggctgagaggacacgagcatcagccatggttccagccaagccccagtgacgtctcccagtcctggctgccctgcctgagagggtgggccctgggatgacagtgctgaaggaactgcttttcacacagcaggacttgatggcttcaggagtccctgaggctggggctgggctgggcaggggagacacagggccagcacagaccccatagagggctctttatagaattatctgggtccagagcaaaggtggcactctcagccctccctggagtccacgccggcaggtgaaggatcagagccccatgccccatccttggagccaggggctgggacccagatcaccaggagcctccagttgaagtggggaggtgactggggtggtgcagtagtgagccatcccctcacacactgccagccttgcccactgtgtcctccctggccgcccggagctgtgtccg

SEQ ID NO: 29339 - DNA, 1112 bp, Homo sapiens
gcttcaggggggccttcaggcaggaggagtgtctcctggttttgcctagctcccctgcatcccctgtgccaggcccgtacctgcctctgacacccctctgtctcttcctgcagacgatgatgcttttgagcctgtggaggtcagcctgccagcccctggggatggtgggagtgaaggtgcattactccggcgcctggagcagcctctgcccactgcgggggcctctctggcagacctggaagactctgccgacagcagcagcgccctgctcgtgccccctgaccctgcccagagcgggagcaccccagctgcagaggcactgccagggggtggccgccacagccgcagctccctcaatactgtggtgtagacggcctggcctgtaccccaacggtctgggagcacctgtctgttgtagaaaacaccggtccctggggagacttgaaaggcccctgtcccagcctggacgccacgcactgccgcacgtcactggcgggctcgcgtgtgtacatagagaccacagcccgccttctgccaaaagaagtgatggcctgcaccgagcttccttgagggcttcagaaacatgcatagctttggatcactgtcttctcctttataaatggcagaagagtgacaaaattcattcagaccgcacatgttagaggcagggaatgaagaaggtactgtgggccatggccacacctgatgcgtttttggtgggcttacttggtgcagtgtgctgtccagagagacctgctgacccagtctgggacaggcacagtgggagctgccacagtgccccttgctggccgccctcaggagggggcctctggaccgtcagtgtggcgtaggcagtgggtctgcttcagggaggcagcctcttgactttgtcacaacggttgcactgaagatggcccccacaagcccagttgtgaatatcaaggtgaccctgcccctggctgggagctcccctggggctctggaacctgaagccctgagaaggagagcttggaaggaggttgagctcttcactgtgtctttccatctgggctctgcagcccagctctgtggcaggaggcctgaccccaccccatcagtccctctcccagcat

SEQ ID NO: 29340 - DNA, 1028 bp, Homo sapiens
gctgttggacggacgtgggaggcctgtgtgcagccctggcccctggaaaaggatgtgcacctctgcaggagggccgctccccagccacacctggggtacacagcacatgagcgcagcctcctaggagtgctagtcctaggacaggaaatcctagtttgctccggtgatggtcagaggggtgttggcacacagcagcctggggccatggtgagatgctcctcctgacctgggattcgctcttctgcttctgtgctgtcaccatgttcttgattttgagcggccttatttcacatgtatcctaaagatggttgggtgcagggagacactgtgtgccttgtccacacagcccgcctgggcaggaggacgacagcatccccagcgtagcacgagggtggcccccttctcagagcggccatttcctcccctccccctcagatggcaacagtctgtttgactccatggccagcgggatgcgcctggtcgtcagctgcatctcctccttcctcatcctgtcactgctgctcttcatggtccaccggctgcgccagcggcgccgggagcgcatcgagtccctgattggagcaaactgtaagtgccctctgagggccacaaccctggtccccatccccaccccaggtcaccccatgtctccatgagctccccagccctggacagagaggggcagaggcaggtttgaaggccacatgttgtggggtctgtgtcctcacctgtgggccaggaaagttcttgccaagaccctccttattcccattgagccacagggtgggcagaactcggaggcctctgagggtcagaggcccggatcacccttccagctggaggggtgtggtcagccagaggctgggtctgacagaagtgtcagcccagagggacaggttggtgtggtgagggtgagacatgccacggagcacaccaggggtctcatggggatgccgaatgtggccgaggggtaggcagcggggcacaggtgtgtgcactcagggacggcaggcccagcctgggggtgg

SEQ ID NO: 29341 - DNA, 1027 bp, Homo sapiens
agctgggccctgctctgcctgccctgtggccatgcttccatgggctcctgactctcctagggccttcttctggaaagtgctcaagaaccgagacactatcaccaaaactggagactctgggaataggatgtcatgtgttaagcatcagaatgtcccctccaacaagctaagagtgtctactcttgccaccctgtcatcattgtgcttgaggtcaaagccagtgccagaaggcaagaagaaatgaaaaaccatccaggccagaggggaagaaatgaaaccatctccctttgcagatcacatgattgcatagaaaatcctagggaatctacaggaaagttattagaactaataagtgtgtttaagcaaggtctccagatataaggtcaacgtaacaaaaattcatcatatttatataatctatctgtaacagttgaaaattgaaaattttgagaaaagtgccattaataatagcaccaaaaaaaatgaaatacccaattataaataatataaaatatgtgcacattctgtttgctgcaaactgtaaaaccatgatgacaaaaaggcttaaataaaaggaaagataccatgttcatggatcaggtgtctcaatatcattaggaggttagctcttcccaaattatagattcagtataatcccaaccaaaattctagcagacatttttgtaggtattgacaagctaattctaaaaatcaggtggagcgaggcatggtgtctcgcacctgtaatcccagcactttgggaggctggggagggtggatcacttgagatcaggagtttgtgaccagtatggccaacatggtgaagccccatctctacaaaaaatacaaaaaattagttgggtatggtggcttatgcctataataccagctactcaggaggctgaggcaggagaatcacttcaacctgggaggtaaaggttacagtgagctgagatcacgccactgtactccagcctgggtgacagagcgagactccatctcaaaaagtaaaaataaaatagggctg

SEQ ID NO: 29342 - DNA, 1034 bp, Homo sapiens
caagctggtctcaaactataggcctcaagtgttgaaggacatctgggctgtttccagtctttggctattacaatgaaaactgccgtgaacatccgcatacaggtttttgtgcaaacgtgttttcttttttctttttttcttttgtgtgtgtgtgtgtgtgtgtgtgtgagacagagtctttctctgttgcccaggctggagtgcagtggcacagtcttggctcactgcagcttccgcctcttgggttcaagcgattcgcatgtctcagcctcccgagtagctgggattacaggcatgtgccactacgcccagctaatttttgtctttttagtagagatgggtttcaccatgttgaccaggctggtcttgaactcccagtctcagatgatccacctgcatcggcctcccaaagtgctgggattacaggcatgagccaccacgcctggctgcaaatgtgttttcacttctgtgtgatagatgcccaggattacagttgcttgattgtatcgtagttgcaggtttagtttttaaagaaacaagcaaattgttttccagagtggctgtactattttatagtcccactatcaacgtaggagtgattcaacgtaggagtgatttaatttctccatatcctccccagcgcttactgttttcactatttttcatcttagcccttctgttaggtatgcagatatgtatgtagacctgtggctccttatggtttcaatttgcatttccctgaggctactgatgttaaaacctcttcatgtttcatgtgcttatttgccatctgtatattctctgttgttcacattattcttccgttttctctttgcatcgtttgttcgttttgttttgagaaagggtcttgctctgtcacccaggctcaaacgcagtggtgcaatcatagttcactgtaacctccagctcccgggctcaggcagtcctcccacttcagtctcctgagtagctggaactgtaggtgtgcaccgtcatgcctggctaagttttttattttctatagagataggatc

SEQ ID NO: 29343 - DNA, 1075 bp, Homo sapiens
gcgagactctgtctcaaaaaacaaaaaacacacagtcattgatggttgcatccctcctgccgctgagatctctgtctctgtctctgtgccctgcaggttgtgggttggctatcagtatgttatcactggccggaaccgctccttggaaggtcgctgggaggtggcattcaaaggtgagcccttctggtgtgtgggagtgtttgaagctgggcagagtcaccctgattcggggcctcccctcctccctcttacccagtgctgcctggcccgtaggggtgctgtgcagggagtgggtgagccccagttgcagggagggctgcggtcatggggccagtgcagcctgcagatcaggccctgcattgggcggtggctgtctctggaaccctctgttgcatctcactttggccagctttctagattgtcccccgcctccttttgaagttaaagaccttggagtataaaaatgagcatgcagagtgtgcccctggcaggctggaggggaggacaagcttgccaggacaaaggtcagacgtagaatccagacctgaaggaaactatcaggcagatagagagagagagagagagagagagagagtgagcatgcatgtgtgtgtgtgcgcaaagattttatgcggagctgcttggaaataccaagacgacgtaaaggaaacatggctgctgtttcctttacattccctgggctcggacttggcttgcccttcctgtcccattgccctggcactggcgagctcctcctggacatactccagcagtgccttctccagctgccgccagggtcacactcccttgccctgccccttccctgtctgttgggctgtactttgtgcctgtggcttgagctaggatttgggttcttttcgtaaacacatcccagtcctgctgttgatgtcttaagtatctctaagaaggataaatgaggagtgatgggcctggggacagggttgaaaagggtcaaggcctgggtggccggcttccctggagaaaagagggccccacagaggcggggccatgcctggctgctgggacagggcaggagcagaggtgggggctgcag

SEQ ID NO: 29344 - DNA, 1071 bp, Homo sapiens
aacaaagcacaccagaccagaagggccacagcaaagtggcctgaggcagccagctctgctgtatgtcatatcgtggttaaatgtgggggcttgagccagggactggggctgctcccctgctttcaccacttactggctgtgatcctttgggcaaattgcatccataaaatggagaaaataatagtgcctgtcacttggggttgttgtgaggattacattacatgctacatataaagggattagacaagaatgtagcacacagtaatccctcaattagcagttactttattcatgtaataaaacttaaaaaaatgtattctgacattggtaaaatggcagtccaggaagctccaggttctcgttccaccatagaaaacattaataagcaactagggactagatggaataactttatagaagctctggaaaacagtcagaggtttcttagcccagctaagaaaatgcctaatcaagaaaaagccacattcaaaatacagattgagtatcccttaactgaaatgtttgggaccagaagtgttttggattttggatttttttctgattttggaatatttacattatacttaccagttgaacactccagtgagcatttcctttgagtacaacgttggcactcaagagttttggattttgggctgggctcatatctgtcatctcagtgctttgggagttcaaggtgggaggattacttgatgccaggattataagagaatactgttaagaattgtacattaacaaattgcttaacctaaatgaagcggacacattcctagaaacatacaacctgccaagactgaatcatgaggaaatagaaaatctgaataggactataattaataaggagattgaatcagtaatcaaaaacctctcaacaaagaaaagtcctgaaccacatggcttcactgatgaattctccaaacgtttaaagaagaattaacatcagtccttctcaagtgaattcattctgtgactctaacatgccctgataccaaagccagacagtaatactactagaaaattacagaccaatatcctttgtgaatattgata

SEQ ID NO: 29345 - DNA, 1032 bp, Homo sapiens
gttaccttatggggttacttcattgccctgctaaaagcctgctaaaaaggagtataaaaaatgtaaaaccaaagggacaaaaaaaggggaaagatgtaacagtagatcagtaatttctgcatgtttttgaaaagagggaaatgacatgctaggtacagcctgggcattcagtaccttcccactcactcccttctgggcttgtccgtgggtttcagaggctggaatgctggagcagtagcactcagaaccacctggcagcaggcttctgtgtgtcatttgccctatgacatgtgtcttgggaaatgtggcaagtggaagggaggtggaacctttcttcctcaggccatagtgtatgttgggggtgtgcatgggcttagatttttgaggtgactttttgcagtggcttctgccttcccccactggccagctgtctcagggctgcagagcagctgcagtattggcagcagatttttgcagtttcctaacctatagatggcagtagtagcttcctgactcttgacaatgactgtgggaattagatggggagttagcccactttacttttgctcacactatatagccttgccagttgttttgaaagcacctattttctgtattaaacccttcgtgttagaaatcccttagcatggtttctgttttcccagtggaaccatctttgtttttttttttttttccaaggcaggagaatttttcttagtacagaacaaaatgaaaagtctcccatgtctacttctttctgcacagacacagcaaccatccgatttctcaatcttttccccacgtttcccccttttctattccacaaaaccaccattgtcatcatggcccgttctcaatgagctgttgggtacacctcccagatggggtggtggccgggcagaggggctcctcacttcccagaaggggcggctgggcagaggcgccccccacctcccggacggggcggctggccgggcggaggcgcccccccacctccttcccggacggggcggctggccgggcgggggctga

SEQ ID NO: 29346 - DNA, 1041 bp, Homo sapiens
ttccagctatcctttgattagtgttaacatggtatatcttttttattcttttattttctcttatttatgcctatataaagtgagtttgttttaggtaatatgtagttgtatcttgattttttccctacatgacaaattctgcctttcagttggagtgtttagatcgttctgcgtatttattgattaggcaagtttaattaaaatctaccatattaccctttgttttcatttgtaccatctgtttgtcttttttttttccttcttttggattattttttattctcttctatgttggcttacttgccacaactcttgtgttattttagtcgggttcatcattaacttatcatagactaccttcaagtgatggaccactttacctgtagtttgagagccttaaaacagtgtgcttctgtttctctcttcccacctttggtgctactattgtcaaaattttacttctgtgtatgctataaactgcacaatacagtatctgtgtgtttgctttaaataattgtaggtcaacagctttttctttcagaactttaacatgtcacatcactgtcttctaggctgtatcgtttctaatgagaaatctgctgtcatctagatctttgtttttctgtgcatgtcttctttttctgcctgcttttaggattttatcgctgattttaagcaaatcaattccaatgtgacttggaattgtattgtttgtatttctggtgcttgtggttcattgagctacctggatttgtgggtttatagttttcatcaaattgggaaattttccccattgtttcttcagatgttgtgtctgttcccccatgtattagggtgtgtgaggttgttccacagcttactgatgatttgcacattttttcctggtattttttcattctgtgttttagttcagagtgtttctattattatatcttcaagtcactaatcttttctactacaaaatctaacctgttaatgttctgcagcgtacttttcatcttaagtgttacagtttttatctctaggtaataggttcgtaaa

SEQ ID NO: 29347 - DNA, 1033 bp, Homo sapiens
atgggctggaatttctcctgcatttctttgctggaaatgttttgattttcttagtgatgtaactgtggacatgtgtgcttctgctagtactctgtctccctcttgttctttgtgggcaaatgttgaagagaaatcaattctaaacaatttatgcagcatactaaatttcacacagtaatttgagacagctcagtttgagacagccttgaaacaaggctaaggcttgctgacaaaggagaaattgaatctagagaaagaatttgtattgcagagactcgtgggtttctacagggcatgaatccactaattcctgggcgttgcatagcccaaagcagtagctctccaagtgtgcccaggggtctctgggggttccctgacccttctaggggctccgtgaggtcaaaactgttttcatgataatactgaggtgtcatttgcctttctctcatcctcacaagcataaggtagcatttccagacactatttgatatgtgatgacatcattgctctgacagctaatgggatgtatgcttgggattctctctttttttctctctctcttttgaaagaacagtgcctcactgtgttgcccaggatggattgcagtggctgggtcatagctcactgtaaccttgaactcctgggttcaagaggtactctcacctcataataaaataaaaaataaaatttttattttattttatttgtagagtcagggtctggctatgttgcccaggctggtcttgaattcttggactcaagtgaccctcccaccttggcttctcaaagtgctgggattataggcatgagccaccgcacctggccttttttttttttttttttttttttaagaatttttttggccgggcacggtggctcacgcctgtaatcccaacactttaggaggccgaggcaggtggatcacgaggtcaggagatcaagaccatcctggctaacacagtgaaaccctgtctccactaaaaatacaaaaaattagccgggcgtgatggtgcgcgcctaatctcagctactc

SEQ ID NO: 29348 - DNA, 1032 bp, Homo sapiens
tggcatatgtgaaacttcagcagctgagcattgttggagtaattttctcttttgggcctcatcacctccgtggaagtcaggagggataggcagggcaggatggtcacctccatgctttacagatggaggaagcagcctggcgaggctgagcagggttgcacgggccaggagctgaagcctgctgtttgtctcgcaacggatctctggggcgtctttccaagccagtctccctgcgtggttccaggaagctacaggggtggggaggttgtgtgctggcctgctggtgctacggggcagtggcagcgatggggaaggggctagacgggcttcaggggagagctgcagggactggtgagccgggacccccaagaacctggatgtggggctttgcgggaaggttagaggtggcccttggactccataaaagggcagatggcatttgagcactgtagagaaggcagggagtttgtgatgtgatcacagttggttctgggatggtctgtgcactgtttggaatgccaggtcctgcctttcctcacttcctagctctgccctcccaggtctgctctctgtctgacgcaggttggtgttctgatgatgcactcctccatcgccagccgcgtccctttctggagttatagcacatcccatgaagctatctggtcccgaagtccctctggggccccggagtacagtgtgccttccagagcgtgcatcgctcccttccccactgggcagcacctgttcagaatgggtgcttgccagaggcctgcccatggcccctggtggctcagatgctggccatctctgaggccccattcaaggcccttattattcactcttgcctcaggacagaggtgacccctccatttagaaggtcaccgagcaatatgccctctgttttgtcttttagttgtgctatcaacagtggtctctgtcctccctatttttttagtttttgagatggagtctcatgctgtcacccaggctggagtgcagttgtatgatcttggctcactgcaacctctgcct

SEQ ID NO: 29349 - DNA, 1073 bp, Homo sapiens
aatccagcgttccaggttcttgcttgctttctctgttgcatgtttgtttctctctttttctacagtgagaaccctggctcccaacagcatcagtaggtttactcatttgcttagtcttacactgcacccagaatagtttcagaagtactgcattcgcaccactagtaacagcagacctattaagtagaatttaatttaatttaattttttttagctctttgtgttttcagattgatggtgtatactcaaggttcttgggttcaaaagctacttggattaattctcttctctcttccatgtgattgttacacagttaggttcaaaactgtgttgaggcagggccgggtggttcacacctgaaattccagcactttgggaggctgaggtgggtggattgcttgagcccagaagttctaaaccagcctgggcaatatggcatctctgcaaaaactacaaaaattagctgggcatgatggcacacgcctgtagtcccagctacttggaggggactgaggtgggaggatcgtttgagcccagtgagcagaggttatggtgagctgagatcatgcctctgcactccagcctaggcaacagagcaagacctgcctcaaaaaccaaaaccaaaaaaaaaacctgttttgatttgaaaccatgtttattaaataatattgagagtggtatttactgtaacctcagtatttataacaagcccctctttcattacactaattggtaaggaagcatctcaattttgaacggttttattattttcctaggttttttttttttttttttaaaagatggagtcttgctgtgtcacctaggctggagtgcagtggtgcgacctcggctcactgtaacctctgcctcccgggttcaagcgattctcctgcctcagcctccccagtagctgggactacaggtgcgtgccaccacgcccagataatttttgtatttttagtggagatggggtttcgccatgatggccaggctggtcttgaactcctgacctcaggtgatccacccgcctgcatctctgaaagtgctgggattataggcatgagccatcatgc

SEQ ID NO: 29350 - DNA, 1882 bp, Homo sapiens
gggctcaaggcgtgagtgggggaggggcagggctattgtccccacctcaaacctttcccggcctacctggcctgcccactctgtccccttcaggcctctgtgcctctcacttcagtatctggggattgccctgtgcagggacactgtgctgacctgccttcctctccccgcccctcctcccacccagattctacaagggcactgtcccccgcctgggccgggtctgcctggatgtggccatagtgtttgtcatctatgatgaagtggtgaagctgctcaacaaagtgtggaagacggactaagcctagagaggccgcaaggggaccgccccaggcaccgccagagtgtcctgctacctttgtctcacgattccagtgcagtagtgccaaaaggccccttcccacgtccctcgagctctgtagcctggtctgtgcattgtggctgtcaaatccatgtgtcccccctgtggtctgtgtgtgacaccaccactgtgtcccagtgtctggcccagccatggctggatgtgcatctggcctatgaccctgtgcctgtgtttcatgttctgtgtcacgtgaccctgtgccccgcctcccggggtgcccgtgtggcctgggtcctcggccctgtagccctggcccggtcccagtccggtgccttccaccctgccctggcctaccacagctgcctccgggcctcggcctggcttcaccgcattccaggggctgcagccccctgcttctcccgccattggccttaactggccctcgggccctctctccgccccggacagggtggcacccaccactctcaggaccaccctgccaaggcagaataaaccggatcctgttgcagcctcctgtcctgtgttcgtccctgtatggacccatctatgcatgggcattggtggctgtgcctctgcaggggaccaggccacccccatctgaggacactgcagtagggggacagggaaagcctagtgtccacccagggcagagcagctgtggccacagtgttggctccctgagaagcccagcgccaggccaagaaggatctgggtgcaccctggccttccctgtggcctctgggcaagatcccgtggcatgggtaaaagggtgtgttgacaaggcctaggggtggcctggcagagtgttcagagcagggggctgggcccaggagatggagcccccaggacgactgcctgcccctcacccacagggaagcttagggaagggttgggttgcccagggcccctctggggtatgcccagctcctcagtgagtgaaatgggctgctcgtggggaggaggagatgggggcacgttgaggcctctgaactccaggtgggggtgggtgtctggcatctgctacccaaaggctctgggcaggggccctcccttgttccttcacctgggctgggaggcagctgccctggggcagcaggaggtggggctgcctgaccagggctctctgggcacctcatgccacagccatgagcctcagagaaaggtgtccctctggctggaggccagagctctgaactggcatgtccccatggggccaagcccctctttccacagcctatgagccacgtggaggacgctcaggcaggatgggatcacttagtgcccctggctgtgcagagaagccagcttcctgtccaagtgcctccgtgggggaagagtcatgcaagcgtttggctcagactggagaacaagcttttgccagccagaaactccatgtgaacaggtcccgtccctggggagactgccctgtcctagtgacctcacacagcaccagatgcctggaatcccgggaatgtgcagctggggaggagtctggggtgcaaagggcccgaggtggatctgagagccaagcatgggctt

SEQ ID NO: 29351 - DNA, 1023 bp, Homo sapiens
aataattatatagtgtgtttgaaggtgatcagttatagaggaaaatggagccggtttgagggcataggagtgcctggatggagtttcataaaggggcggtcaaggtagcagcaattgagggggtgacatttgagcaaagacctgaagaaatggaaggatttggtcatgggaacatttgagggaagggtcagtggccaggcaaagtcctgaggcagaagtgtgctgtgtattcaaggaaggggctggagccagagatggggcagagaggctgacggagggccagatctcaggccgttaggaaggtcacgggctgtacttgggatgggtgcagggctgtcgggggtaaaaggatcatggtggctcatgtgctgagacacatacttgaggagtagggacaggagccagaagagcagctggaggctgttgcagtggtctaggcgagaagggacagtgactctgactagggtggtggtgacagggtgagaggtgatcaggccatcaggattgggtgtgtgctttgaatgagcagccaccttgatatgctaatgcactgatgtggagtgagagagaaaagcccaggataactccatttggttttggcttgaataagtagaaataacggagttatcaccagtggatgaggggaagactgaaggtgcagcacgggagggaaggacaagaattactttttggacacatggtgctaagtcttgagctgcccgctggatgttcaggtgggggcatcatgtaggcagctggagacagatctggagctccacagaggaggggcctagctagagcagtgaacctggagttgctgacatataggtgatccacatccatctatgtttgcctgcagtcccctggggatgagtgtaggtgaaaagaccagactgcccaacaggggtgggctgaggaggggagcaggagcagccagtacagtgggaagaaaacccagagagtgtgctggctcctggatgcactggagaggaggggccggtcagcagggacagggcctgctgc

SEQ ID NO: 29352 - DNA, 1066 bp, Homo sapiens
  misc_feature (55)..(55): n is a, c, g, or t
agttcaagaccagcctggacaacatagtgagacccccatctctatcaaaaaactnaaaaatattagccgagtgtgtggcatgcacttgtaatcacagctacttggaaggctgaagtgggaagatcacctgagcccaggaggtcaaggctgcagtgagctgtgatcggggtgagctgtgatcggggcactgcactccagcctaggcaaagagcgagaccctgtctttaaaaaacaaacaaacaaaaagaaaacaagggggtgaagggcctgtaatctcagcactttgggaggccaaggcaggtggatcacttgaggtcaggagttcaagaccagcccaggcaaaatggagaaaccccatctctaccaaaaatacaaaaattaaccaggcattgtggcacatcctgtagtcccagctatttgggaggctgaggtgggagactcactggaggctgggaagtcaagactgtaatgagctgtgattgtgccactgcactccaacctgggtgacggagtgagaagcctgtgtcaaaaaaaaaaaaaacaatggttggaaattaagttaaagttttgaaaggtgttaaaagttcatcatgtaattctgtaaccaagtaaaattccagatgaaagaattaaaggtaaaaattgagcttttccttaaaattttttaaaaatatgtatttgaatttttgcatgagaaaggaatttttaaacatgtaagcagtggaagaaagcataaaggaaaatatcagttcagctaatacataaatatttgaaatatagctatagagttttattatttctaaacatggacctctaagtctagatgtaaaaatctatcccaagaaagtagaaaagatccacatagttttacctataaatatttaatcattgcagcatgattatgcaaataaaaatcaaaagccaatgtctggcaaaaggaaatagtgcttttgttttgttttgaaacagggtctcctctgtcacccaggctacagtgcagtggcacgatctcagctcactgcatcctcgacctcctgagctcaagccatcctcccacctcagcctc

SEQ ID NO: 29353 - DNA, 1034 bp, Homo sapiens
gccaaatataatggaaatccgactagctatttttgggagctgccaaaacagacaaatggcatattgattatgagttctgagtgtgctgtgggtccctggagagtggagcagggtcatcgagggaaggtgggcagcagctacggaggagacaggcaggtgttacaaggacaaaaatggaatggtctctcttcataggcctcttctacttcctgggctcaatcgtgaacttcagccaagacccagatgtgcatctgaaatacattcaggctgcctgtaagacagggcagatcaaggaggtggagaggatatgccgagagagcagctgctacaacccagagcgtgtgaagaacttcctgaaggtgtgttccagtgctgcctccttccatgagctgcccttgctgatggcaggtggggcagaccatccgcaggacgtcccaggggcaggaagctggatctgtctcgccagggaccccttagtcccagggacagagctccactttatggcttaaagttctaaagtaacccttctatcgttttaagagtgtggaaagcagcttgaggctgtgctctaagtatctggcacttattgctgcattgtaattcatcaacatcccattagtgccattgtcaattaggcaggcaaagctgcagaaacaagtagaccactcagcactagtgtcataaagaacaggaagcctacttccttatgtggcagtccagggtaggctggaggtcagtggggtgactttccttcccactgtacttcaaggaccagcttcatggctgctttgccgtgttcagcacctcacctggatgtcgtcttcccagtcagctagaggaagggaagagcacagaggaaccagcataggtggtttttatgggcgaggcctgcaagtggcagatgacacttggattcacgttccattggaggaaatgaggtcatgtggccacacttaaaacttcaaaatgtgatctaggcacgggaccacatgaggggaggcatgattgtggtggcctgtggctgtcctacccaa

SEQ ID NO: 29354 - DNA, 1086 bp, Homo sapiens
gcagtgagccgagattgcaccactgcactccattcgcctgggcaacagagtgagaccctgtctcaaaaaaaaaaaaaaaaaaaagattttatgcctcatcaaaattgtttccaggagtgttcattgttttttaaatgcaatccccaactcctagttctgtatttagcctagtagagaagtctagtaagcacaaatgggatttgttttgttcaggtctccttctggtcattgctaatctaaggcttgagctcattcaaggagaatcggtagacttgagccctcacattgatcttgccatagaaaccctataagaatgtgattgctggctgggcacggtggctcacggctataatctcagcactttaggaggccaaggtgggcagatcatttgaggtcaggagttcgagaccagcctggccaacatgacgaaactctgtctctactaaaaatacaaaaataagccaggcatgttggtgtgcgtctgtaatcccagctacttgggaggctgagacatgagaatcgcttgaacctgggagatggaggttgcagtgagctgagattgtgccactgcattccagcctgagtgatggagtgagactctgtctcaaaaaaagaaaaaaaaaggaaaaaaagaatgtgattgcttaaaagctgcaacagtgacttggactcatcccagtaatagggctttatggagcctcagcctttctcacaggcccaactctgtgaccacatgggcttggcccagctgcaacatgggagaatgaagccttgtgcaaagggcctaagatggcttgaaggacagccagggatttgggacccacaagcactgctgccaccacagaggtatggatgtggacaggggcctgtgagttctggttgccaggctataccctaccctggggcaagattgagcagctggtcttaaaaagttattgccattgatcagggcttctcaccgaactccctgtttcataggttgcagatgccatccttggaaataaaatgtttactcattacgaccgggcccacattgcccagctctgtgagaaggcaggcctcctgcagcaagcactggagcactac

SEQ ID NO: 29355 - DNA, 1031 bp, Homo sapiens
ctttacttatctcttctgatttttctttaataatcacttactgtttttataattaggaaacaacatattaagtatattgttctgttacctcaatttattcaaatctacaagttagctgctaagaagtgggtcatattccaactctaggaaataaaagtactgttaatttgctgcttggggtctactggactctcatgactttgtgagtgtatgtaaccgtttctggtgaatgagatttgaaacacaccaagcgtcactcagaaacttggcagacagaccctaaggaatgcccagaccctaaaggagaaacaagtagttgggtgaggtgccagcaggctctggcttagtgccccaggacgctggcagtcttctctgggcagtaggactgcgtgatggtttctacattctataaaatacactgttgctatgaggagaaaatgtttgaaaacaagaagtaaagataaacctgaaggaaacaaaggataggagactcaggtaagtgctagatgttctaaagccctactcttagtactgtgtttgatcgtcaactctgtgcatcactctgaagtggtctggtgtgtgacagtggctgtggtcactctgtggccatacctggttggtgatgcagatcctagaaggaataagaaagagtgtgccaggtggcaggggaaggcacccaggagtgtagcttgtcaagaccatcattagatactgagggagcactcactcagccatgctgcaaggctgctgtgttgacctatccagtcttagcccaaaaattacttacttcaagagaatatttagtggctgggtgcagtggctcgcgcctataaccccagcatttttggaggccaaggtgagcagagcccaggagtttgagaccagcatggacaacacggccaaaccccatctctacaaaaaaatataaaaattagccaggtgggccaggtgcggtggctcacacctgtaatcccagcactttgggaggccaaggcgggtggatcacatggtcaagagatcgagaccagcct

SEQ ID NO: 29356 - DNA, 1050 bp, Homo sapiens
atagaacagcagttctgatgcacatcatctttataccatgcacaccctaactggggagggttgaaaaagcagatactatggtatttaagtaacttttctcaaccatagttgaaaaagatagttaaaagaagaaactcttggctgggcacaatagtttatgcctgtaatcccaactgcatgggaggttgaggcaggaggatggcttgagcccaggagtttgaggctgcagtgagctgtgatcacaccattgcactccagcctgggtgaaacagtgagagcctgtctcaggggaaaaaaaaaaaaaagtcgggaacagtggctgattcctataatcccagcactttggaaggctgagacaggaggattgcttgaggctaggagtttgaatccagcctgagcgacatagtaagaccctgtctctacaaaaatattttttaaaaaagaaagaaactctgtactttaaaaataaaaagtttaagaagaaaaattgtcagttccatccacataggtcattttgctgtagcgcagaacgcatcacacttatctgtgtgactttaataactacatagactcctatgctgttctgttttgttaccatttggctttcggctgctttgcctcctttcactgtgagggccaccatcacaggtgtgctcaacactcgcctgagaatgtggctaccactccagcatcggaagggaacatggcagagggatggtggagcactcttctaggccgggctgctctcacttgttgtgtccttacaggtactgtcagtttgtgttgaggaagataacattgtgaattatgcaaccaacgtgcttcagaatccagaccttggtctgcgtttggccgttcgtagtaacctggctggggcagagaagttgtttgtgagaaaattcaataccctctttgcacagggcagctatgctgaagccgccaaagttgcagcgtctgcaccaaaggtgataaaccttgaatactgttcaagtgttctgagtgttaagaaccaaccttgagaggaaaataagtcataaaagcatttcacta

SEQ ID NO: 29357 - DNA, 1030 bp, Homo sapiens
ttagtagagacgaggtttcaccatgttggccaggatggtcttgatctgaccttgtgatccacctgcgttggcctcccaaattgctggaattacaggcatgagccactgcacctggccctgtttagctttttaagaaactgcccaactgttttccaaagtgactgtctcattttatgtacccatcagcaatgtatgaggatgccagtttctccacacatccatgccaacacttgatactatcttttttattatagcaattccagtggttgtgtactagcattttgcagttttaatttgtatttctctaatgcctaattatgttaaatatcttttatttttaaatatgattattaaccatttatatatattttctgagaaatgtctatttaaatatttgcccagttcttaattgtgttgtccatcttattattgaattataagagttctttatatattctggatatacatagtttatcagctatgtgatttacatatattttctcccagtctgtaccttgtcttttcattctcctaatgacatcttgtcttagtctgtttgtgctgctataatgaaatggctgacactgggaaatctataaagaatagaaatttatttctcatagttctggaggctgggaagtccaagattaagatgctaccagatagtgtgtctgttaagggttcacactccacttccaagatggcccctgttgctgcatcctctggaggggaggaacactgtgacagaagggcaaaaaggaacctaagtccctccatcaagctcttttgtgagaacatgagggcttgcctcccaaaaggctccatctcccaacacttggggatgaagtttcagcatgcattttggagagaacaaaaaacattcaaaccataggatatgttttgaagggcaaaacttactaattttgataaagcccaacttacctattttttttttctttaatggatcatgcttttggagtcatagctaagagtgcttagcctatggttttgtagttttaatttttttttt

SEQ ID NO: 29358 - DNA, 1035 bp, Homo sapiens
gactgaggcaggagaatcacttgaccccagtaggtggatgttgcagtgagccaagatcacaccattgcattccaggctgggcgagaagagtgaaaatccatctccaaaaaaaaaatgataataaaataaaaataaattttctctcctctcagcattattaattatgctttaaaaaattttttttagtgattgctctagagtttacaataaacatttataacctaactctactttcaaataatattataccacttcatgggtagtagaaagagttccccactctttccttccatgccctatgacattggtaccacttatttcactcattcataaactatagtaattcaagacatggtggctgttatttgtttgaacagaaagttgtctctcagatcagttgggaatatgaaatacaaaagattctattttatgttcattgttttttttctctaacatcactcttcctttcttcatgcagatgtgagtttctggcctgcatcatttatcttctctctgaaagacttttaacatttcttgcaaggcaggtcttctggcaacagattccggtgtctctttgtttatttttgtctgacaaagtcattatttctcctttacttttgaggcataatttcactggacacagaattctaggttggcaagaggtttgtttaagcactttaaatatttcacttcactctttcttgcatgaatggtttctgaagggaagtgtgatgtaatgtttttgtgcaggttaaaagagcagaaccttgtgaaagagctgaggccccgagacctcctggagagcagcagtgacagcgatgagaaagtccctttggctaaggcttcctcactgtccaagcgaaaacttgagcttgaggtagagacagtagagaagaagaagaaagggcggcctcggaaggactctcgtctcatgcctgtgtctctgtctgtccaggtgaggccagtgggcccatcctgccttctttagcccacctttctgtacttagagcttgaaggccctgtgtgcatggtaag

SEQ ID NO: 29359 - DNA, 1187 bp, Homo sapiens
aagaaataagtcatattcacaaataaaataactaggatgcaaccagagatgcatatcttaatgaagaaaaaattaaaaaccctactgagaggcttcaaagaaaactcaaagaaataactagaaattcataccattgattagctaggatggcatcataaagatgtcagctctcttgtagcctataaatttaaccagtacaaataaccgtaggaattttgggaatcagacaaggtaactataaagttatgtggaaaaatcgactgggcacagtggctgacaactgtaatctcagcactttgggaggccgaggcaggcagatcacctgaggtcacgagtttgagaccagcctggccaacatggtgaaaccccgtccctactaaaaatataaaaattagctgggagtggtggtgcccacctgtagctactgtagctactacctgtatcccagatacttggaggctgaggcaggagaattgcttgaacctgggaggttgcagtgagccaagatagtgccactctccagcctgggtgacagagtgagactttgtatcaaataaataaataaataaaataaagttatctggaaaaataaataggaatggccgaaatatttctgaaaaagaagattagccagggaagactagccccaccagaaattaagacttaaaagctgtcataactcaaaacagtgagatactgacacatgagtagatagtgcagtggaatatgatagaatatgaggaaacaggcccgaatatttatgggaattttaaaggtagcatttcacatcagtgataaaacattggctaattcggtaaatggaagacaggactacatggcacctcctagaaacaatgttgggtcccagcctcataacttatcattacatacattctaaacagcttatagtttgtttctttttaaattgttatttaaaatatttttgtttaaaattttagaagattccctggaagaatattttttataatctcagaggtcaaaaaagtgttttctgtaaatgacaatttagagtacacaaaaattttaaaattttagtgcatttaaaagataggctgtctgggcgtggtggctcacacctgtaatcccagcactttcggaggctgaggcagatggatacaaggtcaagagatcaagaccatcctggccaacatggtgaaaccccgtct

SEQ ID NO: 29360 - DNA, 1067 bp, Homo sapiens
tctggaacttggtgcacatgtctatgagggtgcccaagtgtggggtaggcctcaagtgaggacttttacaaggccctaaccagagccttgcattctctttcctacccaccgcccagtggggctcctttaccagacaagtagagttgaccaccttcagctggggacctgacactcattactcactggtcctggtagcaggtgcaggcagaaccattcaagaagaaaaatcaatgaaaagcagaagtaaatgaataagaaagaaccggatctttgaaaagcaaagtgtgagaaatatatacttggtatatttaattgggggttgggaagaaaaaacctagacaaaattagagtttaaagatctagaaaaacatttaacccagacagaaaaaaatcatcaaacagtacaatataatgtttgtactattaagctaaagaacaaaatactaaaaaataattttctagaaaataggaactttcataattgataccataggattaggaaaaactgaacagaatagtaaccaatgaagaaatgaaaggctgtcttcagaaatgcttcttggttctaaattagttgtaggtgcattgttttgagcttttaagaaaaattatacagaacaatagcaatatttataattgaaaggaagatataagccagggttattgtatctggaaaatacaagaaaacctaagaaaaataatgtaacaaaagcatagaataatatgaataaagatagaaaaatcagaaacaatactagtaaatataataacacttgaaagcagttactcatttatttatttatttacttgagacagagtcctgctctgttgcccaggctggactgcagtgttacgatctcagctcactgcaacctccacctcccgggttccagctattctcctgcctcagactcctgagtagctgggactacaggcacgtgccaccacacccggccactttttttttgtatttttagtagagacagggtttcactgtgttagccaggatggtcttgatctcctgacctcgtgatctgcctgtcctggcctcccgaagtgctgggatt

SEQ ID NO: 29361 - DNA, 1032 bp, Homo sapiens
gaacctttctggtaagagttctgtggggaccagaggtaaataaggctctctctctgaacagaaagctgtgtggaagatagatgagagagattgacatacaaaccgtattctagaatgcagggcaggggaaacaggagctagaggaataagcgtgatagcccaaggaggaagggcacttcaccagcagagtcgggtttgtggatgtgtccttggactgaaccttgacgtgactagaattgtgatggcagagaaggcgctacagcacatgagaccatcaggagaaaaggcccagagggtgaaagcatttagggaaagacatagaacatgttaggagggaggctaaacagggcaagagggagaatggggctgggaggcagagccttgccagcagcttgaacttccttcttggggttaggggagagaggagaacattgaggcttctgaggaagctggatgaaacacccaacctgtgtcttaggcaggccctagaggagttaggaatttctagtcttggtgagatgctcagggagacagggagatcacaggtgatggaggtgagaaatagagaggcactaaagacagggtagaggtagaattaatgggacttggccatgtaggcaggtgactgtagatttgggccactctgaatgtatttatttacttatatattttctttatttattttgagacagagtctcgctctgttacccaggccaggctggagtgcagtggcatggtctcagctcactgcaacctccacctcccgggttcaagtgattctcctacctcagcctcccgagtagctgggattacaggcacatgccaccacgcctggctaatttttgtatttttagtattcggtatttagtgtttttgtatttttaatacacattttcgccacgttggcctggctgctctcgaactcctgacctcaggtgatccacccgcctcggcctcccaaagtgctggtattacaggtgtgagccaccgctcccagcctctctctgaatttatttctttaatatgctgcag

SEQ ID NO: 29362 - DNA, 1039 bp, Homo sapiens
cacaactaaactgaactgatcatgtgtgtgttctcctcctgccacctctctctccttccatcttgtgtgacatctttcccatttttcagggactaggttcacgtgtttcttttgaaactgttcatcctgagttaccccggtagatgtgctgtatcactgtctgtgtgttttgcctggcatggaaggtgtgagggtactttccatatgcccccagggtagggactgcctcagtcccttctgtatgccctactgcattgaacaacctcttccacatgatgggtatgtgataaatattggctaaaacaggtaagaaagctgaggttttcataatttatcaagatgaagttaggtttactgtgcatgaaagccgaagccttgagttttagtttcatttctcctgttgatctccaagagcatttcctgatgtgtactgtgcagatctttccctggagaactggacaaatattgtaattatgaattatgatgcttgtgattaggaaaggaaaaatgttattatgaactagtttactgtgtgaaggtctgatagaatttttattttaaaatgctttacctaaatcagtttttgtgaatagcctacccttctccagcctctcttctactgtcatataacttgttcctttttgataagctcctttgtaggccaaaagttttatgctatgtaaacataagtaagtcaagatgcttaagtgacgaactaggtacaaatgaataagagactacactcagatcagcagccaagtgcatcagcctggcagagcaagcacaacagtggcccttattgctgagggcctctctacagccctagaatggagcatgataatatctactctaaccacttcatagtatgcttgtgatactcagttgggagcgtagatataaaaatgctccccaaactgttaagtgctttagaaatctgagataataagtaataataaaaagaggctgggcacggtggcacatgcctgtaatcccagcactttgggaggctgaggcaggtggatcacgaggtcaagagatc

SEQ ID NO: 29363 - DNA, 1046 bp, Homo sapiens
caaaaaataaatgagctatgcatggtggcgtgcatttgtagttccagctacttcggaggctgagataggaggattgtttgagcccaggagtttgaggctgcagtgagccatgattgtgccccactgcacttcaacctgggtgacagagcaatatcctgtctcaaaataaataaaaataaaatggtggtaatttctgaagcagtttggtattttatggtggtggtatgaagaaaacaaatactgtaataagagcaatatctttcaaactttttggacaggtgctaagtgtggtggctcacacctgtaatctcagctacttgggaggctgaggcagaagaatcacttgaggataggagtttgaggttgcagtcagctatgatcgtgccactgcactccagcctgggcaacagagcaagaccccatctctaaataaatgttttaaaaataaaaataaatgttttggataaaaccccatattaataataagtattttacattattatctggcatagactgttatatatagcatattattgttgaaatacaaaacaatatgtatccgtactgtatgtgatatagtgccattttcagtaactgctgtacacacagcaactcagatgaaactcaaggaaattcttcagagcaaaaacagccaatcttgaaaacatacatgtagcaggattccatttatgtaacattggtgaaataatgtaattatagagatggaaaacagattaaaggttaccaggggtttaggttagggatggtgagggggtggttcatacgagggagtcctgtggtgttgaaaaccatctgtcagcctgactggtggttacacagggctatacatgaagttaaaattgtgtagagttaggtacacaaaggagtacagatgtaactggggaaactgagtatgttctgtagactgtaccaatgtcaatttctgcgtcctgatgctgtgctgtagtgtataaggtgttaacattgggggaggctggggcaagggtacccaggacctccctagacaacctcctatgcaacctcct

SEQ ID NO: 29364 - DNA, 1156 bp, Homo sapiens
ggtgtctgtcatgttttccctttcctagggtccctctgctccctggtgtcctgtttttttctgtagagctggtgtagggtgtatgaaacagaagacttgcagcatgggggtcaggagctctgtcttgctctagagccgactccaggctctgttatcacagaactgtgtgccctgggtgggcttcgtcttccaacagagaccttgaacttcaaatataggcagcaccttctagctgagcagggtggtggcgggacagaggaaggcaagggctgagcatcctgtagacatgggcactttgtgggaatatggccaggcctggcagcaactggaacgcagtcacctctttgtgatgaggatttctacaacaccagcgcttcagacccatcgctctcctggttccttttctcaaaggattggacccttgaggatccaggatcagggcagagggcagatgtactgagccacccattcaggaccagctgctacatgggagccatcccaattactgaactcttttctctagcacttggggtggttggggacagagaccactgtgaagtttgcacacctggtcctactcacaaccacttctgggctcaatgttcaagttgaaacagcattgggcattgggacctttcaggctcagaggagcaaacatagtggccagtcagacctcaccctccagctcctccttcaggcaccatccaggcttcaccagctacaggctgcctttctcactaaaagccagtgcctgactccgacctaagaccttagcatgggacgtcccccaggctgactgtgacctgactgttgcaaatttacagaaggcaggggaggccagtgggcacagcaggcctgtttgaccataaatatgtatttaagaagtatatgtttaaagatgggattgaagacatatttagctctattccatcctgcagccccactaaggctgtggctaaaggtcatgaggtaagaaagacagtggaagaggaggcaactacaaggctttggaagccccaggtaccttagtagaccatagaaagcctagaagcagttctgtgtagattgtggaattctcaaaaggcacctctagaaatgagggactaaagacagaattctgttactaagcagttagagctgcattaccctccctccc

SEQ ID NO: 29365 - DNA, 1026 bp, Homo sapiens
aaatagtaaagttccagaagtgaactttccaggttaaaggttgttagtgtcttttgcagttagctgtataactaccttgtctaatttgaaccatatctggggaacagcatctcttcagcgatgggcacagggcagcctgtcccttatggcagtgttgtcacagcaagaagtgcagctgtaggttgtgtcatgggcatgaatgctgtgtcattcgcaggagccagtagagccacagtaacatggacagcgacagctccagtgctgccaggaaaccatccaactgatttctgtgtttgccccacagatctacgaactgcgtgtgatggagaccaaacccgacaaggcagtgtccatcattgagtgtgacatgaacgtgagtggctctgtccagttacagtgagcctgggccctgggaggatgggcagttggtgaccactgcaggccagggtgtcaggagggcatcaaacagcccctgggactctgggtaaagaggaggaagatgctgtcagaacatcatgaggagactgtgaccttgtgatctatctcagggccagttggggcaacagagtttgctgccagtgctgccatggttagctctgacccgttgaggagtgaatattctttttttttttgagacttagtttcactcctgttgcccaggctggagtgcagtggtgcgatcttggctcactacaacctccacctcccaggttcaagcgattctcctgcctcagcctcccgagtagctgggattacaggcatgtgccaccaggcccggctagttttgtattttggtagagacagggttttaccatgttggccaagctggtctcaaactcctgacctcaggtaatccacccgcctcggcctcccaaagtgctgagattacaggtgtgggccaccgcgcctggccgaggagtgaatatgcttaagagctaaggaagcgtactgaaccttctgagtaggaatgaagtgctgatgcacacagcatcctggttgtattactagggaatactgctgagcaaa

SEQ ID NO: 29366 - DNA, 1112 bp, Homo sapiens
cctccccacagccctgacggtggctctcacagacccttcctgaaaacagcaaagggacaatggtggcaacacccaatgacagcttgccactgctcccttagctgggatcacagaggtggcacatgggctataactctggtccttgcaggccgccctggtgcctctagctcttcactcagtggccatgctgatcctaagaggaggaaccctgtcccggagttgctgttacttgcagaagacaaagaacggctaagcccgccccagcttctcctgggttctccacgttcttctgtgccaggctcagtggcacctcgtcttggtttttggacatcaatgttcctatatttccatgtggctagagcttctccttgagcggtttttccgcaaggaatccttggtgtccacagagacctctgttttaccctcctgcttaccattttggccggctttggagttcaggcttgacaaccttccccagagctcgcaggcctggtctcaccatcactgagcctcttggttcctgactgtaatcacctctcccattactgagttcttttttgccctcttcattatgttgctctgtttgttccccgggggcccctttcgtcagatggttggctccccctgaggcccctggtttctgggcttgatgggcaggaggctctatttgtgtgtgcaggtgtgtacatgttacccatgcatgtgtgtgtgcatgcgtttgtgtggggcctagatctgtgagccatccctggggctgagtggggctgaagccctgtgttggaggctgagctcctggtgctgagtggagcagaagccctgctgtcagaggctaagctcctggtgctgagtggagcagaagccctgctggcagaggctgagctgctgtgggggcccctggcaagagcagcctgcacaagaagcgccgtggccctggtccgcgtactggaggtgggcgcctcagcaggtctctgtagctggaaggaccgggctgtgggcccagctctctgccctgcccggaggtgacctcagcacacccatagcatgcctgtggcagatctgggattcagacttggggtcccgggcctattctgtgtgggttagtgagggcagca

SEQ ID NO: 29367 - DNA, 1086 bp, Homo sapiens
cgctccttctagcatggtagaaggttccagttgtcctctgtcttcatcaacatttgacagactgtttaattttttgctaatctgctgagagtgtaattatatcacattgtagttttgacaggcattcccaggattattaattaggttaaacatctttgcatatatttattggacatttacgttgcttgtgaaatatctgtccaagccttttgcttatttttctttcggtgtttgcttttgtattctgttgacctctgtgttctttagatattctggatacgagtccagtgtggacttgtctttctccacccctctggcatgcttttatggttttaaatctacagaaaagctgcaagtgtagtaaaataaatacctgtacaccttcacctgtggtcaccagttgttagcattttgccacatttgtactacttctctgcctatatattcatacatagataggtagagattaagagagaattttttttgaaacatttgaaagcagattgtagacattatagcatttcacccctaaatactttcggatgtatctcgtaggaataaagacattcttctacataaaatactgttatccttccaaggaaattaataacaccccattatctgtagtccatattcagattacccacaaagatcccccagatgtcccttatagcccccttttttttgatccaggatctgatctaagagccaggatctaaggtttatatgtcatgtttggtcatcatgcccctttggtctcttaatgtggaagttacccagcgttttcctttggttgtttctcttgatgctgacctttttgatgagtccaagctagtagtcttgcccagtgtctcgtaacctggatgtgtctgattgtttcctttatggctggattgaggttgagcattgttggcagggacacacaaggttggtgccatgtctgtggcatcacatcaggagataagcaatgccagtttgttcattattggcagtgctagcttttctcagtggtgaaagtggtgacagccagatgtctccattgaagatacacattttccttttgtgatcagtaaacagtttggagag

SEQ ID NO: 29368 - DNA, 1060 bp, Homo sapiens
acttgtactaagagtagtatgttatggccgggcacggtggctcatgcctgtaatcccagcactttgggaggccaagatgggcagatcacctgaggtcaggagttcaagaccagcctggccaatggggtgaaaccccatctctattaaaaatacagaaattagccgggcactgtggcgtgtgcctgtagtcccagctactcgggaggctgaggcacaagaactgcttgaaccccagaggcagatgttgcagtgagccgaaaccacgtcactgcactccagcctgggtgacagagcaagattctgtctcaaaaaaaaaaaaaagaaaaagagtagtatgtcatattctccaatcactagtaggcttctttctgtgactctgcatctcctgtcgtttctgctctatagaggtggtatctctgttatatagtgcatagatattaaaaactgttacatagattaattatatattatatatagatattaaaaactgttatatatatagttttttttttagatagggtctcactctgtcacccaggctttaatgcagtggtgtgatcatggctcactgcagcctcaaactcctgggctcaagcagttctccttcttcagcatcccaaatagctgggactatacaactgtgcccagcgaatttttatttgttttgagagatggaatctgactatgttgctcaggctggtctcaaactcctggcctcaagtaatccttccacctcagcctcccaaagtgttgggactacaggtgtgagcccaccacacctggcaataaactgttatattttgtaaactgcaatgaagaattaaaaactatctgtctttgtcaagtctaatgctttttggctggaattcaactttgtctgctattagtatttcaacccctactttcttattgtttctgtttgccccatatacctttttgcccatctctaattttagcgttttggaattactttgtgttacactctttttcttattgagtgacatattctgagtcaaggagtaaattctgagaatgaatccttgaacagatacgtgttgtg

SEQ ID NO: 29369 - DNA, 1047 bp, Homo sapiens
agatagttgcatcatctttgtcacctccacccccataaaacaccccccttggtgtcttccacactggctgggactgaactgggtctgccacgtctgccctgttgggacctcgttcctgtatggggtttctgtgtctgtccccctagccccaccctctctgctccctgtgacttctgtcccagctggaatgtgaggaaggctgcctggaggaagtggccactttgattctgggggatgagtgggatagcatcttggcaaagaatgatgtttcctgtgggattaccagcagttctgggcagctggaaggtttggatgcaggaaggtgggatgcaagccccttgccaggctcagctgcaggcattcgccctttgtgtgttaacactgtagctctaatcgtgcctggtgttctgaagcaggctcctcttccctgctgctgtgctgccatcccctgctcactccgcactcgcatgcattgcggattcagcacttaagccctagtgtgtaaatgacttggatctccctcctggcagactgtgaccctcagcacaggggctctgtcttagtcagctctgtggcctggtacacaattggtgctcattaaacacgtgttggattactggctgaggtggtgcagtggctgcctaccagcaagtctttgtttcccattctgtcaggagcagaggcctggccatgagcattccaggtcagcattgcagctgtggtttctggcaggggctttgagggtccaagggtctgatcaaagaagctgggtggggctgagtagggggtgggtggctctgcaggtagagaactgacttccgagagctgtaggtgaagtgaggaccaggcagcagtccagagctgtgaggccccaggcccagaggaatggaatgaagaaagacctgttccacacaaggaggggttttctagtggaagctgagcttggaagctcctggagccaagtttaccacaggataggcaggtacagccgcccagtgtgtgcagtgtgtgcccactctggtgcttggacaagaagttcaagtccct

SEQ ID NO: 29370 - DNA, 1042 bp, Homo sapiens
atggggtgtggtcattgtgggcaacctggatacctaaccttggctggtggtgggagctgggccctggatcggggtcactgcttttttagagctcagtgagggactggactggactcgactcacgtccaggccttagtataatcctgcagtaaggtgggaagccagggtcatgggctgggctttcaggtgaagaccccccccccagaggggggtcagacctgagggattccagagtgtttgggtggtggaggtagggccagtggccctggcaggttctagtgctgcaggccaccctgggaggtacctggaggaactcaccctgaggggggatggccagcagataggagatgtgggatgaaggtgtgtgcaggccttgtgctcccagtgagccggtggcgtttgtgtgtggggtgaagcagagagtttcctggaggtcgtgagtgggcctccgtttgcagagagactggggagggggctagatagagttaggctgcagagtgtaagagccctacaggagggctccttgcactggaatagaactggctactggctctggagcctcctaggtgactgctgcgtggagaaggaggggcgggtccagccatcagactgggactccccagaccctgggcacaagtgactggagtggcgggagcagacagcaagtggggttccaggattttacaatggtgggggctgggatgctctgctgtggctgggatggggactgtggaaaggtggtgtttgtgggtgggggtggcattgcctgcaggtggcactcagttgtgagaggtgaatttggaaagcatgtggggtcaggagggagcagagaatagcaggctcactgctctgtcggggaagcaggtaggacctgctgtgtgcctggtgctgggatgtaaaagagcctaatgacgacgcggtctgtgcgttgttcagagtttttggggcggctagagcctactcagcagacaaatgtagtttataatcgcgtgctgtatagtagttaagcctctggtctctccagccagtttttgctgcttcc

SEQ ID NO: 29371 - DNA, 1051 bp, Homo sapiens
caggcaccggccccactggccagacttcccaacttctccccagacccctagactctagaggttagaggctgcacagagcaatgggaggatacacactcgtcctcctggagcccctgaagaacagttaactaaatcaggacaataatcataactgagcactcgaagcagaggctgggtgtctggtcactcaggacagttcaagcctcatcctgtaggacagactcccctagatccgaccagagcgccaccatatctgttatgtgtggccagtttcattccatgcacgacaacatggtcccccaccatgcagggggcccctcgacccagccccctggatgcttgtgacagcgagcagctctccccacaggcagtgagtgtagaggggtgtaaggacggggtcagggctccttcccagggatggcggctatgggaggcatggtggctggccctctgcccgcggtggactcgggagggagggctgactgtgtgtgtgaatgggcagagttggtgctatggaggttttgggggtctccaggacggagggtggcccaacagagttctgggaggcagtcaccacctcgtggccttgctgagacctggaaccctcagccagggcactccatctttcaaagcttcttggctgcatgcgtcaggtgggcaagctcaggaaggttaaatgcacccgtgctggcggagtcccataaaaggggattcggcatcaaaaggaggaaaaaggttcaaagggcatttatcatggggttcagaatcacggatgtgaggggcggtagtggggacaacagacagaaaagcttccccttcccatactcacagtccagacacggcaatagccaaattccaaatttctaggtattctggactcagaatggggaatatcatacgagacttagggggataatgcccttatcttcctattttaagggaaagaacaaactgaaccttctatgcaaaataggatgatgatcctggtcctcccagtaagaaataaaataagtagtctccaggcattcctttccgccagaggagcaactgt

SEQ ID NO: 29372 - DNA, 1042 bp, Homo sapiens
gcctcaggtgttatctgtgtttggggttcctctgcttatcatggctgctagctccagtgggactgaggcatagcgcctgggaagcatggcagggttggaggctgagtggtccatgtcccccaggaccctctgaaggatggtaaggcataccctgctcacatccacgctgccagagttttgccacgatgggtgctgttcagcagagtgggtgatggcttaagagaatggctcctggccattcttgttcctccagtccccaccctggccatctgcctgtccccccaaaaagcagtctctgtgggaggcatggctgacagccctgtggtttctcagtgacaattagtgcccattgtggaggcatggcccagccagtgctgtgcctaagtggtagggagaaggccatggcctccggatgcctgagtgacctaggctgagggatctagggcagatgggagggacaggatgactgactccttgcctgttcccaagtccttgggcatggaaagctgccggccgggccagcctagtgggagctgggtctgctgccgcctggctgtgtgggaggaccagcgtctggccgagaatgtcactgctcaggccatttggccatgcagggtcttctgggttgggacaaagaagctcaggcagggtacttggcttgcttgtggcacaggtgacagggcatctcagggtggcaggaggggctgtcccactgcccttaactcctcgtaggtcaccacacttcagggaggccaggtcagccagacaccaaacgacagccctggtaacagggtccgcaggagggtggttggctgggcaggtccgaggctgcccaggcacacttgctcactctccctcctgttgcttgctcctttcttgtcccttcttttccctcccccctccagttcttggtcttctctatgtttctctgtggccctctctgtgcctctttctctgcctttccccatctcctatcctgcccatctggaatgtggtgattgcttattcctgtctgctgtggtgattggtttttcatgtctgc

SEQ ID NO: 29373 - DNA, 1072 bp, Homo sapiens
agagttgagtaatgtggagttccactgcgggagggccgaggacctggtgcccaccctggtgagcagactggcctcccagcacctcgtggccatcctggacccaccccgtgctggcttgcgtgagtggcttttgcttaaggaggtggcacgggaacgaggacacatggggtggctcaccatgttatgcactctctggctgtggggacccagctggtgtttgcctcctcagattccaaggtgatcctggccatccggagagctaagaacctcaggcggctgctgtacgtctcatgcaacccccgggcagccatgggcaactttgtggagtgagtgtctgcaggggcctgggtgggggctaggcctgctaccaagcccccagctcccacaggagcccctgattagcctatcggctgaccttagcgccccccttttccccccacagcctctgcagagccccatctaaccgggtgaagggcattcccttccggccggtcaaggctgtggcagtggacctgttcccgcagaccccgcactgtgagatgctcatcctgtttgagagggtggagcaccccaatggcacaggggtcttggggccccacagccctccagctcaacccacaccaggacccccagataacaccctacaagaaactgggaccttcccctcatcctaggcccaggacccattatggggacaggagctgaagggctcccagggccccaggggcggggaaggcatggcttgctggccaggatattcagaggtaggcagccaaagggcacagaaccctgtgccccaccaggattggcctgctgctaggggccaggggccctgaccaggaagacaggtgggttcctgtagcctgttgcccatccccagggcctttgtggactagccaaggctgtgagggccagaataaacaactgctcaacaaagggtgtttctgtgatgagagccaggggtctgaacacagggcctgggtgccagggaaagggccaaactaggcctaggcagctctgcaagcctctctgcatggctgggggagtcagggcagagcttactttaaaaaag

SEQ ID NO: 29374 - DNA, 1049 bp, Homo sapiens
agagcagggggactgcttgcccagttgtgggcacttgggccagctcgtgattcccacaggtccactccatactcggcatacgacccagagacgtacacaggccactggaagcagctgactgtgcgcaccagccgccgccaccaggccatggccattgcctacttccacccccaggtctcaacgggggccctgctgggggagggtgcctagcctaggtgggcctcagcacagcctgatgggaacttttcaccacttactccagaagctgagccctgaggagctggcagagctgaagacctccctagcgcagcacttcacagcagggccaggcagggccagtggagtgacctgcctctacttcgtggaggagggacagcggtaaggagcccgagtggggcggggcaggtccctgcagggactgtgacactgaaggacctgcaccttcgcccacagaaagactcctagccaggagggcctgcccctggagcatgtggctggggaccggtgcatccacgaggacctgctagggctgaccttccggatctctccacacgccttcttccaggtagccatgagtccctggtgggcatggggacatgttgagggaggcctgacgcaccatcaggacgtgatgggaacagtgggctcaggcggtgagatttgggggagtatccaggcaggtgagccacaggggagggtgaagtaagaaagaggttggtcatcactgatttgactcgggataacctagaggtacacacggcagtggcccttgtcacagggaggatgaggagtggccctcagtgcattaccacagggcactgctctgggctcggcaggagggaggccatggtggcctctgggctgggaaatactgtttcactgtttgctcactgctgcaggaaggctgtggggacctggagcggccgtttttggagacaggcctggcaggacctcctggagggctaggtgtgggggtgggagctgcagttgggtgattccaggggccccggtgtgagttgtgggaggcaaagcccccttgctggggcagg

SEQ ID NO: 29375 - DNA, 1031 bp, Homo sapiens
tctggggtcaaggcggatcgctggggaccaggcacctggaatgagacagaggggcagtgctgtgtgggcctccccagggacagaacatggagtgggagctgcgcatggagcccccgcttgggcagctctgcaggcctccaggccaccaaggcagccagcacagtggtcctggcaggagggtgagagggcggcacattccagccacagcccacctctcctcccaggatgcctggggaagtgcaggaagagccctgtgggggcggggatgggagctcgggccatctttggaaagaggctgttaagagaagggaacaagatggggctgcaggccattccctccccatgacaatgagagagctgcagccacagtccatgcggccccctgtgccttcagcatccagcctgctgcgactttgaggatgatggcagctgagggttcatcggggccaggctgtgtcccaggaggcatggacttgctggagctcagctggtcaacttccaggaggctctgaccaccaccaagttccagccatgagggtctcctcctcagccaggggcacccaaccccttgggaaaggaagggctaggcagctcccacaccctcctcaccccaggacgagcctgtagagaagagcagctgtgttttcagctagagccatgggcatgaggggtccagggaaagggctgtccggacaagccacctgcagtgcccacggcccagcctgaggcagctcactcccaccccagcccccgcccaggcctgagcccaccggctgttggccaggcccgaatggccaagatcgatgagtgcccagcacacgagccttgtttaccaggctgtactgtgtctgctcagcatcagggcctcccactgaagccctcccacaccctcacacccttgcctgcaccctgtgccctgaacctgccatgcacagccctggccaccccagcacatggggtccagtctgaagcagttgcccatgagggctgccccaggctgaagcccaggcccacgccacagctgaggtgag

SEQ ID NO: 29376 - DNA, 1018 bp, Homo sapiens
tacaaggtcagatgcggtggcccacgcctgtaatcccagcactttaggaggccaaggcgggtggatcacctgaggttgggagttccagatcagcctggccaacatggtgaaaccccgcctctcctaaaaatacaaaaattagctgggtgtggtggcgcacgcctgtagtcccagctactcaggaggctgaggcaggagaatggcttgaacctgggaggcggaggttgcagtgagccaagattttgccactgcactccagcctgggtgacagagcgagactccatctaaaaaaaaaaaaaaaaaaaaaaatcactggcctctgccctgggtggacacttgcactgccagagttgtgttccccactgttagccagcactgggggctgagacccaccagttctacacatgtccaggggaggcagtacagatgactgagtattaaatctagacctttaattacacatatttttacttttctgtgtgatgaaataggaaggatgcatgaggcttttttttttgagatggagtctcgctgttgcctaggctggagtgcagtggcgcaatctcagttcactgcaacctccacctcctgggttcaagtcattctcgtgcctcagcctcccgagtagctgggattacaggcacccgccaccacgcctggttaatttttttcttttttttttttttttttgagacggagtcttgccctgtcgcccaggctggagtgcagtggtgcgatctcgctgactgcaacctccgcctcctgggttcaagcgattctcctaccccagcctcccgagtagctgggattacaggcgcctgccaccacgcctggttaattttttctttttttttttttttgagacggagtctttccctgtcgcccaggctggagtgcagtggtgcgatctcgctcactgcaacctccgcctcctgggttcaagcgattctcctgcctcagcctcccgagtagctgggattacaggcatgcgcctccatgcccagctaatttttgcatt

SEQ ID NO: 29377 - DNA, 1037 bp, Homo sapiens
ggtcggtggggcggaatcctggagagatggggcggggtccaaggtggggcggggtcggatccgccttcggggcgggtccccagaggtggcggctggagtgcgggacgcgggcaggttccggctggctgggggcacctactcaagcaccggggccttccaccccctccgctcctcccctgcagagtgcccgcgccagttctggggccccgactgcaaggagctgtgtagctgccacccacacgggcagtgcgaggacgtgacaggccagtgtacttgtcacgcgcggcgctggggcgcgcgctgcgagcatgcgtgccagtgccagcacggcacgtgccacccgcggagcggcgcgtgccgctgtgagcccggctggtggggcgcgcagtgcgccagcgcgtgctactgcagcgccacgtcgcgctgcgacccacagaccggcgcctgcctgtgccacgcaggctggtggggccgcagctgcaacaaccagtgcgcctgcaactcgtctccctgcgagcagcagagcggccgctgtcagtgccgcgagcgtacgttcggcgcgcgctgcgatcgctactgccagtgcttccgcggccgctgccaccctgtggacggcacgtgtgcctgcgagccgggctaccgcggcaagtactgtcgcgagccgtgccccgccggcttctacggcttgggctgtcgccgccggtaagcgcggtctctcggccagggagggaggaggtggaagggcgggccgccgatggggacaggggtgaggcgggtcccagccttccctagcctccgacccctcccccaggtgtggccagtgcaagggccagcagccgtgcacggtggccgagggccgctgcttgacgtgcgagcccggctggaacggaaccaagtgcgaccagccttgcgccaccggtttctatggcgagggctgcagccaccgctgtccgccatgccgcgacgggcatgcctgtaaccatgtcaccggcaagtgtacgcgctgcaacgcgggctggatcggcgaccggtgagca

SEQ ID NO: 29378 - DNA, 1084 bp, Homo sapiens
tcttgtgtcttcactttgcagaggaatgtttgctgggggattgaaggagatggaacaggaagaggtcctgatccacggtgtgtcctacaatgctatgtgccaaatcctacatttcatatacacctccgagctggagctcagcctgagcaatgtacaagagacactggtggctgcctgccagcttcaggtgaggcatgtctcatctagcaaggcagacccacacccaggtggggttccctgagatgcccatgatgcctgccgggcactagcattggcttgaagatgggtcaggaatgtgaggagaccaagcagtgacgaaggccatgaagtggggaagactctggagttgttcctggagctcaagcagagccgctctagacaccccaggcctctgcctttgccctcttctctattgctggttgtttccccactgtctgagtctccctgtcattgaaagcatcctgcacataagcaggtaggctgacccgaggctgcatgtggacgtcctgtgtgctctggggtctggcaatggggagcatccaccagcattgctgccagggcccttcctgcctgtcccctcactgggccacttcagtctcttgaaaacttatgtgttttgttactgaactttatctatctatttgtctgtccatccatccatccatccatgcatgcacgcatccatccatccatccatgcatgcatgcatccatccatccatccatccatccatccatccatccatccatctatccatccatccatgcatgcatccatccatggtggcaggcatccatccatccatccatccatccatgcatgcatccatccatccatccatccatccatccatccacccatccatccatccactcattcaatttattggagacaagctctctctctcttgcccaggctggagtgcagtggcacgatcacagctcactgcagcctcaacctcctgggctccagcaatccttctgcctcagcctcccaaatagctaggacctataggcatgtgccactacacctggctaatttttaaattatttttatagagatagaggcttgctttgttgcttag

SEQ ID NO: 29379 - DNA, 1024 bp, Homo sapiens
attattttcgaggctaattatattttttatcctagtgtgagtctttatacttttttggggggcatattaaggtgtttgaagaggaggcaccgacccagatcccgtgggatataagatcctatgtggcatgtgtacagtatttctcacgttggaaccttctgaattctaaaatacacttgatttaaagagtttggacaagggatcgaggacctgaacaagctgacccaagaaatatttttctcccccatctcacaccagaggcagcatactggtttgccattctgtacctgtgacatcctggaggtcccaggcaccagcagtagagatggccctcactctctgtgctgtggagtgttccgtgctgtcgatgtcctctatttatttggtcattcccctgctactgggtacttggtgaacaattttttaaaattgtggttctaaaataataaacacaaataacacttaccatctagttcagtaatattacgattattcacattattacgaaacagatctccagaacttttttatcttacaaatctgaaactctatacccactaaaccacaactcccttttctcctttacccccaggccctggcagctaccattctactttctgtctctatgaattaaactattctaagtacctcataagtagaatcatacagcattagccctttatcacttgcttatttcatttggcatcgtgtccttaaggttcatgtgtgttataacatgtgacctgatttccttcattttgaaggctgaatagtgtgccattttatggatataccacattttgtttgtctattcacctatcaagggatacttggtttgcttccatctcttgtctattgtgtataatgctgctatgaacatgggtgtgcaaatgtctgagactctgctttcagttctttggctatattcccagaagtggaattgctagatcattctattgacaattttctgaggaacatagcagttgcaccacttttcattcccaccaacagtgcacaagggtta

SEQ ID NO: 29380 - DNA, 1044 bp, Homo sapiens
aaaaatacaaaaattaggtcatcagcaaagcctgagtcctgtcctcttgctctcctccccggacagcatgagcttcaccactcgctctaccttctccaccaactactggtccctgggctctgtccaggctcccagctatggcgcctggctggtcagcagcgtggccagcgtctatgcaggcaccgagggctctggttcctggatcttcgtgtcccgctccaccagcttccagggctgcatggggtctgggggcctggccgcggggatggctggggatctggcaggaatgggaagcatccagaatgagaaggagaccatacaaagcctgaatgaccgcctggcctcctacctggacagagcgaggagcctggagaccgagaaccggaagctggagagcaaaatccagaagcacttggagaagaagggacccagatcagagactggaggcattacttcaagaccatcgaggacctgagggctcagatctttgcaaatactgtggacaacgcccgtatctttctgtagatcgacaatgcccgtcttgctgctgatgactttagagtcaagtatgagacagaactgcccatgcactagtctgtggagagcgacatacatgggcttcgcaaagtgattgatgacaccaatgtccctcagctgtagctggagacagagatcgaagctctcaaggaggagctgctcttcatgaagaagaaccatgaagaggaagtaaaaggcctacaagaccagattgccagctctgggttgactgtggaggtagatgcccccaaatctcaggaccttgccaagatcgtggcagacatccaggctcaatatgatgagctggctcggaagaaacgacaggagctggacaagtactggtctcagcagattgaggagagcaccacagtggtcaccatgcagtccactgaggttggaactgctgagatgacaatcacggagttgagacgtacgtccagtccttggagatcaacctggactccttgagaaatctgaaggccagcttgtagaacagcctcagggagg

SEQ ID NO: 29381 - DNA, 1011 bp, Homo sapiens
gaaagagaatctagctaatgcctgataatctgaggtggaacagtttgatcccgaaaccattccccgaccccgtggaaaaattgtcttccaagaaagtggtccctagtgccaaaaagattggggactgctgaattagaagacacccagctggtatctgtggcagaattgattgcttgcttgttaatggggaaaaaccctcacacatttggtcacagaagtctcctgtgtttgttgttgtggtataagaggagaggaaaaacagtgtgtttttttcattcagaactacagtaacatgctgtacaagtatgtagcttaggagcaattggctgtaccttatggcctagatgtgtagtagtctctaccacctaggtttgtgtaggtgtaccctttgatgttcacacactgaggaaattgcctccagcgatataagtctcagaatgtatccccaacattaagtgatgcatgactggaggtaattggagaataaacatattttggggagaggaaagtaggatgaagtgaggtggagaagacagatgttcacatcttgtagctgactgtgctgtgcctacagagcctgcagcttggccatgcctcacagtgtgggactggccactccctgacctgaacagctggctatccacagtcacttttggttgctccatggcaaaagtgcatttgcagtaggttcattttactgattaggttttagaggctccaattcaaatcagtttgcggtttttgaacgtactgactcaattattagaagataatctttaatttaaaaggcaatgcagatgaatttaaatgcatcaggttcaatcacagttactgtgcttgactctcagaatttcagtaaaggaaagtaggccctggaaatgccacccccttggcacccacctcccagactcctggctgtgtgtctcctgaccactactcaggtcttgccatttttatgcatccattactatgaggaagaacccaattttgttcattcaatgggagggagga

SEQ ID NO: 29382 - DNA, 1062 bp, Homo sapiens
gggggcttttgagatgtttgtgagataaaacctcacccctcaagaagccggaatctccttgtcgtgggtaaataggcaggtttgggccgggcgcggtggctcatgcctgtaatcccagcactttgggaggtcaaggcagatggatcacctgaggtcaggaatgcgagaccagcctgaccaacatggtgaaaccccatttctgctaaaaatgcaagaaaattagctgggtgtggtggtgcacgcctgtaatcccagctactggggaggctgaggcaggagaatcacttgaacctgagaggcagaggttgcagtgagccaagatcacaccactgcactctagcctgggtgacagagcgagactccgtctaaaaaaaaaaaaaagggcaggtttgaatggtggggcatatttgtcatgttctctgtacaatgatagagggagaagtaatcgagctagaccttgaccaatatgggactatgagagacagaatggcctagatgggtgactaaaggtgttcaggggatgacaggtatcccttttggactaaggactgctgatggggctgagtaggtaaggcttgaaggagagcagcctggggaggatgagacaagaggtagggaaactggtaggggcatcactgctgtggtctgacccagagtggtggccctggaggagtggagggtggctgtctgagatggaggagaggtgaaggaatcagaactagtaggttcatagggcacatgggttagaaaggaaaaatattaaaacagtgaggtttccaagatggaaatggtagctttgatagtaaaattagacaagttggagggctactagctagattaggcactgagctgtaggtgaaactgggaatgtgaaccactgggaaagaaggatgggctcgagcagggtgtgtgggatgaaagagagaggtcagaaaagggagaattatcatagagcagagtttccaggcaagagaatcctaagtgagaggtggtcatggggtatacaccttggctgtggccatctctggggccttggtgagaaagatgagccagcccaggagg

SEQ ID NO: 29383 - DNA, 1043 bp, Homo sapiens
cctggcacccgggcgggccctgttgcctgcggcaggtccgaatgcggccttcctggccgcgaccctccgcgctggagcgggcggccttgcaacaggcgggcgatttggggccggcctgacgagcctcagttccctcgatcgggcccggggactgcagccgtaggagcccagccttgccagctctcccggtttcctgagaggagccggagatcgcgctgtcagtgcaaaatcaccagagcgcgaagcgtcggctgccagttctgaccattttagatccggtgcgggccgagccgagtggatctggggcgggcagcggggcaccgccaccttccgcctgggctcctcactgggcgccctcgctccggccctccgcggggccgagtgcctccaagacggctccctgggagattcttccagagcgcaccctttggaaggctgccccgctgggaatcagcacccactccctctcctctaccgcagccgccccctttgcctttgtggccgaccttgcttcatgctgccaaggattgagtttctttgaggggatactgctcgttcgggggccctacagaaggctgagggtatctactcagtaaaatcgtaccgaactgaaagttcctctgaaatgattttgactctgccatccatcacttcataaaaattcatcttgtatccttcagtttgtagctatgtggcacattaagcttcctttcttctccccactgaaacttcgaacagtacaaaacggggaacttggcttgtgatgactaaaattggggatatgagactgggggcgggcgcggtggctcatgcctgtaatcccagcactttgggaggccaaggctggcagatcacctgaggtcaggagagactagcctggccaacatggtgaaaccccgtctctactaaaaatacaaaaattagctgggtgtggtgacacgtgcttgtaatcccagctactcgggaggctgaggtaggagaatcgcttgaacccaggagatgaaggctgcagtgagccaagaccctaccactgcactctagcc

SEQ ID NO: 29384 - DNA, 1026 bp, Homo sapiens
aatgctgggattacaggcgtgtgccaccacacccagcctggaatattttttaagtttaaaaaaatttatatcactatggcaatacaaatgtatatacatatttgtttatacttttacaaaaaaagggaacagtaggccgggcgcggtggctcacgcttgtaatcccagcactttgggaagccgaggcgggtggatcacgaggtcaggagatcgagaccatcctggctaacacggtgaaaccccgtctctactaaaaatacaaaaaaagattagccaggcttggtgggcacctgtagtcccagctactcgggaggctgaggcaggagaatggcgtgaacccgggaggcggagcttgcagtgagctgagattgcactccagcctgggagacagagcgagactctgtctcaaaaaaaaaaaggaacagtaaatcaaaagttaataaaaatggccaaagagggagagatcaggatggaactgacagatatgtaccatatttaataattttgactttggaactctgtcagtgtttacataattaaaaagcaaacttatatttaaaaacactacacattgaacattcatagtttgtctttagatccatttgccgggttagaattgggaaacccaaagtgaagacttctgcctgtgtggtaagaccacccccgactcacccaggtcaaaaatgtccatccaagggacacttcaccagatcagtggccacagactccaggaggctgcccagaaaggccagctcacctttttaaacctagggcatggaattaaaactggagtttcaaaacttatggctctaggaacaaaaaaaatttttttaattaaaaagaaaaactggagttactactatgagtggcggaaaatgaccaagaaggaagaggaggataggtccttaggatggtgaccacagttgtgtatattagtccattttcacactgctataaagaacttcctggccaggtgcggtggctcataactgtaattccagcactttgggaggttgaggtgggtgg

SEQ ID NO: 29385 - DNA, 1015 bp, Homo sapiens
ttgctccccctaccccaggccctgtgattgtcccttgatacccatgttcacccactgcctcaccctgaggcccaagcatgctctgtggagcgagccggttctggggctgttgccagcctggctaggcagcctggccaggcttccctctcatcggtggggtcccctcaaatccctgaatcctgccctcttcagccggaagtggtgaggaaaattaacgagatgacatatgcattagtctgccagggctgcatagcgaagcaccacagactgggcagcttaaacgacagaaatgtctattctcattctcagaattgtggaggccaaaaaacaaaacaaacaaacaaacaaaaaacatgaattctggaggccagaagtccaaggtcattgttcgaacagggttgtttccttctgaggcctgtctccctggctttttttttttttttaagagacagggtctcgctctgtcactcaggctagagtgcagtggcgtgatctcagctcactgcagcctcaacctctcgggctcaagctatcctcccacctcagcaccttccccgctacccctcccaagtaactgggatgacaggcgtgtgcgaccacgcccagctaatttttgtattttttgtagagatggagtttcgctatgttgtcccaggctggtctcaaactcctgagctcaggcaatctgcccacctccgcctccaaaagtgctgggattataggcctgagccactgtgcccatctccctggcttattgatagccatcttctccctgagtccttacagggtcatccttttgtgtgtgtctgtgtcctaatctccccttataagaacacctgtcatactagattaggacccaccctattgacctcattttaccttaatcatctctataaagaccctatctccaaatacagtaccattctgaggtcctgtaacatatgaatttgaagggacacagttcagcccgtaacagtatccatggacataaagtgctcagcacaggtcatggcac

SEQ ID NO: 29386 - DNA, 1046 bp, Homo sapiens
aaagttgctaggattctctctctgttgctgcaccttatccatggaaaccttctcgtttcagggatgatgcagtgtgtgattgcagtcgcggacaaagtattcgatgccttcctgaacatgatggcggataaagtaagcctctccagcatgaatgcgtgtctgtctgctggaggcatctggggcactgcggtacctgtttcttttgcatctctaggccaagaccaaggagaacgaggaggagctggagcggcacgctcagttcctgttggtgaacttcaaccacatccacaagaggataaggagggtggcagacaagtatctatctggtctggtggataagtaagctcattttcctgctaatgttttgtgtgtatgtatataaacttctgtgatttcaaatgctgggaaaaatcatccttatattattaatctaggaaaaaatggagtcagaatgaaaactcctaagggtgatgcagcctccctccaatgtctgtgagtttcctgcagagtctgaattttggtgcagaaacttctgttcattctgagctatcgatgttacttacagcacatttgctgggtgccacatccctgtgtctctcagtcccacccactctggcatgacctggtgcaccatcttctagcccagggcccagccagaggtcccctggtaggatcagtatctttgggcttctcaggaacaaaagcccacacagacccttctgtgctgtatactctttgttctgggagccaaaacagaccctgttgggacatgtccccacactgatgagaactctcacaggtgggctggaccagcttctccaaggtgagaaggccagaggcagcaaaacacccacatggaggctgcctgcagctccccagaggtatccagtggttctggagcctgttgcagatactgtgtgcctggtccaggcagcagcgccaccacaggtggtcaggagccagccaggggtcacgagaacgagtccagcacacacgtggcgtgtgtctgagctgggcttcctgagcagtgggccactggtgggtca

SEQ ID NO: 29387 - DNA, 1014 bp, Homo sapiens
tctcggctcactgcaatctctgccttccaggttcaagtgattctcctgcctcagcctcccaagtagctgggagtacaggcacccaccgccaggcccagctaatttttgtatttttagtagagccaggttttcaccatgttggtctgttggtcaggctgatctcgaactcctgacctcaagtgatctgcctgcctcggcctcccaaagtgctgggattacaggcgtgagccaccgcgcccagcccatccttttacttcatgtgttggtggcttcctctgtaaaatggggatgctaataacagtgatgacctcacaaggctgtgttaaagcacagagttagggctcagtaagtgtcagatgctactgtcacttcagcttggccttccctgtccccgttccagagtcaatcttgtgtctagttttcctggataaattatagctacagtacagttcttggcattcaatctacccacatacaaaaatagtatgttgtgggtttgctgtgagaactgtaaaggtgcctcttacctttgaagtagatgcagttgagaatcatcatctgggtagcagggtctatattctccagagcatcttttatgaggcccttggtgagcttcatgatgtggttgttggtttttgatatgaaggcagggtctgagaagtcagctatctgggcctcagcaaagtaatactctcttactttagttttgaagtcaagcaggattggaaactgcttctggatataaaggtcattgactgaccgcagtgtgtacccaaaattcctcctgaagaggcgatgagtcagcttacggaagagattatgaatggtcgtgatttcatacttgctgctggcattaacaaagtctttaaaatgcaaaatcgagtgcacttgttcatgggtctctcccttcagacctaaggaaatcatacccatcgcagtagaaatgccaacgggtgctatgaagatgttatcgaaagtgttgacctggtctttcagcactcggtagaggttgaa

SEQ ID NO: 29388 - DNA, 1058 bp, Homo sapiens
agtagaaaattaaaaaaaaaaaacacaaggaaaatggacaagggacatgaacagaaaaaagcatcacccagttgagatgcccgcattgtgagcttctctccatccccaggatcttattctggggctcatggatgggttttggggctctaaaccattctcactgaagacagctttgagtgtgtacacacgtgtacctcctggagaggcccagcccccagaagaggcctgagcaggctggaccctcagctccagaaggcaggtgcgaacccttccttaggctcctgtggtacaggttgataggacagcctctggactctgcagtgtgaaaacaggaatggagtgatgccatgtgaatttacatgcactttacattatccctggagaatctctgagatgattaggatgtggatatgctttgctttgggcttaatctgggctaaaaagctgccaatcacttattttattaaatctaatttattattcttcttattattttttagcacaaagattgtgtggttccttaccttcttcgacttctcaaaggtcttccaaaagtgtattgggtagaagaaagcacagctcggaaaggcagaggtaattgtatataatgttttccctgaatataagagaaaatacacatgttcagtgtctgtaggatcaagtgtttattcatactgacacatcagatgcatcttgtctccctcctggctgggaaacaactgcctgcagcattgtgggctgagcttacatccatgtgttggccacagcccatggatgagttggggagaaggtaggcctgggtaggccagctttccattgcattcttctgagagtgagcaagaacgttgagaccttcaagaaccttttctcatgtctcattggccagaattgggtcatctgcccgtccccaaatcagtcactgttacccttagaatttataggctcactcctggagtgaggtcagttttccagattatattgctgctgctcaaaaagggtgagatggaggttggagacccaacagcaatgttcactgtaaatagtttcatcactttgtt

SEQ ID NO: 29389 - DNA, 1024 bp, Homo sapiens
ttcaagtgatacttctgcctcagcctcccaagtagctgggacgataggtgtgcgccaccacgcctggctaatttttgtatttttagtagagatggggtttcaccatgttggccaggctggtcttgaactcctgacctcaggtgatccacctgtattggcctcccaaagggttgggattacaggtgtgagccactgcacctggcctattttttatttttatttatttaagagatagggtctcactatgttggccaggctagtctcaaactcccaactcaagttatcctcccacctcagcctcctgaatagctggtactgcaggcatatgacactgcactcagcttgctttattttgaatgtggttttctattttgtagagctgtttttgggggggtctcattttctaggtccaaaagcttctttgcatgtgtccagtggatttccatgggatcttccagttagatgaaagacggagagatgcagtgattgcattgggcatttttctgattgaatctgatcttcaggtaagtcttcatgaaattaaaagtttcttcattgtaaaagggggtgtagtgagcgtttaagtttgtatctgcttatatttacctaaagcaatagtagaagaatacatttgaacctaatcaaagtggttagtggagagggtaggacaaggtgggaatgaaacttcctaatgtaaaccttcttagaaaatttgagttttttagaattgtgtgcatatattatgttgtaaaaaaagtgtatttttgtttgtttgttattatgtgccacagagtaagttaaaatgctttgagaagtaattgtgtgccttccagggtaggtttggttttcaagctcaggtaaaatgcttatcagtcagactcaggggtattgtatttctccttccaaaaggacaaaatcattttaggtaattttgatataatatcatctttttcaaaattgcgattatgtatataaacttttagagtatgtatcagtgtatcttgttttttttttttttgagatg

SEQ ID NO: 29390 - DNA, 1048 bp, Homo sapiens
ggagataaaatagctgggcatagtggttcacgcctgtaatcccagcactttgggaggccaaggcaggaggatttcttgaggccagcagtttgagaccagcctgggcaacaaagtgagacctgcctctaccaaaaaaaaaaagaaaaaggaaaaaaaaatctcagcttggttccacaagccctgtagtcccatctacttaggaggctgaggcaggaggatcacttgagtctagaagttcaagactgcagtgagctatgatggcaccactgtactccaatttgagtgacagaggaagagcctgtctcaaaaacaaaacaaggccaggtgcggtgcctcacacttgtaatcccagcactttgggaggccgaggcggatggatcacctgaggtcaggagttcaagaccatcctggccaacatggtgagaccccgtctctactaaaaatacaaaaattagctaggtgtggtggtggacacctgtaatcccagcttcttgagaggctgaggcaggagaatcgctagaacccagaggcggaggttgcagtcagccaagatcatgccattgcactctagcctgggagacaaagtgagattctgtctcagaaacaaaacaaaacaaaatgccaggcacagtggctcactcctataatcccagcactttgggaggccaaggtgggaggattgcttgagtctaggagttcaaagttgcagtgagctaggatcgtaccactgcactccaccctaagccacagagcaagcccctgcctctaaaatataaatactttattagacaagcaaaaacagagggaaattgttgccagtagcactgctttataagaaatgttaaaataagatctttaccagcctgggcaacattgtgaaaccccatctctacaaaaaatacaaaaattgggcatggtggctcacacctgtagtcctagctacttcggggctgaggcgggaggatcacttgagccctggaggcagaggttgtagtgagccgtgattgcaccactgcactccagcctgggtaatagagtgaggccctgt

SEQ ID NO: 29391 - DNA, 1056 bp, Homo sapiens
agaagctacatgtagctcaccagtggttttctctaaggaatcacaaaagtaaactacccaaccacatgccacgtaatatttcagccattcagaggaaactgttttctctttatttgcttatatgttaatatggtttttaaattggtaacttttatatagtatggtaacagtatgttaatacacacatacatacgcacacatgctttgggtccttccataatacttttatatttgtaaatcaatgttttggagcaatcccaagtttaagggaaatatttttgtaaatgtaatggttttgaaaatctgagcaatccttttgcttatacatttttaaagcatttgtgctttaaaattgttatgctggtgtttgaaacatgatactcctgtggtgcagatgagaagctataacagtgaatatgtggtttctcttacgtcatccaccttgacatgatgggtcagaaacaaatggaaatccagagcaagtcctccagggttgcaccaggtttacctaaagcttgttgccttttcttgtgctgtttatgcgtgtagagcactcaagaaagttctgaaactgctttgtatctgctttgtactgttggtgccttcttggtattgtaccccaaaattctgcatagattatttagtataatggtaagttaaaaaatgttaaaggaagattttattaagaatctgaatgtttattcattatattgttacaatttaacattaacatttatttgtggtatttgtgatttggttaatctgtataaaaattgtaagtagaaaggtttatatttcatcttaattcttttgatgttgtaaacgtactttttaaaagatggattatttgaatgtttatggcacctgacttgtaaaaaaaaaaaactacaaaaaaatccttagaatcattaaattgtgtccctgtattaccaaaataacacagcaccgtgcatgtatagtttaattgcagtttcatctgtgaaaacgtgaaattgtctagtccttcgttatgttccccagatgtcttccagatttgctctgcatgtggtaacttgt

SEQ ID NO: 29392 - DNA, 1032 bp, Homo sapiens
tgatcatgccactgcactccagcctgggtgacagagcaagactccatctcaaaacaaaaccaaacaaaaacacaatctaaaagtagagacggggtttcaccatgttagccaggatggtctcgatctcctgacctcctgatctgcccgcctcggcctcccaaagtgctaggattacaggcgtaagccactgagcccggcctaatttttttttatttttagtagagacggggtttcatcatgttggtcaagctggtcacgaactcctgacctcagttgatccacctgccttggcctcccaaagtgctgggattacaggtgtgagccactgcacccggcctctagttgttaaagagtgactacatggtgttcccttgtagggatgtgacccataagtgtccttcagccagactcacattggacattaaagtttacatcagttacctattgctgcattaaaaaaacactccaaaactcaggcttgaaataacagccatgcatttgttcatgagtccattgggctggcacagctgggtagttctgctgagcccacctgggttcagccatgcactgcagtcatctgctggctcccttcaccatccctcaattgtggtggtttaacgtcttaacagttggtccttcctacagttgcctctttatcctaaagtagactagactcagtggcttctcatgatggcagaaatattccaaaagagcaagagcctatgctgcaaggtctcttggaaccaaatctcagaacatcacttcaacagttctaccatgtttttttgttgttgttttgagacaaggtcttactctgccactcaggctggagtgcggtggcacagtcttggctcactgcaacctccgccacctgggctcaagcaatcctccgcctcagtctcttgaatagctgagaccacaagtatgtgccgccatgcgtggctaatttttttttttttttttgagacagcgtcttgctctgtctcccaggctggagtgcagtggcacgatgttggctcactgcaacctctg

SEQ ID NO: 29393 - DNA, 1047 bp, Homo sapiens
tcacccaggctggagtgcagtggcacgatcttggctcactgcaacctctgcctcctgggttcaagcaattctcctgcctcagcctcccacgtagctgggattacgggcacccactaccatgcccggctaatttttttgtatttttagtagagatggggtttcaccatgttggccaggctagtctcaaactcctggcctcaagtgatccgcccgcctcggcctcccaaagtgctgggattacaggcattagccactgtgcccagcccaagttaatcaactatgaagagaaaaataaaatcacataatcttggttgttcagcctctcataagaaagccaaattgttttttgcttttccatgttgtttacttgtatttctgaattgtagagtcaaaggagaagttcagagtcccatcagcaatgcacctgtcatacaggaagatctcatcatgtcctgtaacaccagataccattttcagtcttttctctctttctcctgcagggctacaccaagtccattgatatttggtctgtaggctgcattctggcagaaatgctttctaacaggcccatctttccagggaagcattatcttgaccagctgaaccacattttgggtaaggttcccgagcccttcaggagctagatttactcaagtttgtacagcttacatcaaagtcacttcattaaattaagaagagttctaatatactctttaacctgtggtaggtgtgaatttttaaccttctctgatttaaaatgttaaggacttttgtgtaaaaacataagaaaggtaaacatcaggagtggtgataagcaacggctcatatcaattatcagggttcattccgactcagagttgatggtgtgtagtcatttaccttggtcctgataactaatagctaatttttttatctgataggtattcttggatccccatcacaagaagacctgaattgtataataaatttaaaagctaggaactatttgctttctcttccacacaaaaataaggtgccatggaacaggctgttcccaaatgctgactc

SEQ ID NO: 29394 - DNA, 1105 bp, Homo sapiens
gccttccctgagacagagtctcactctgtcacccaggctggagtgcaatggcatgatcttggctcactgcagccaccgccttctgggttcaagtgatgctcctgcctcagcctcccaagtagctgggattacaggcacgcacaaccatgcctaatttttgtgtttttagtagatacagggtttcaccatgttggccaggctggtcttgaactcctgacctcaggtggtccacctgcctcagcctcccaaagtgctgggattacaggcatgagccaccacatccagactcttcatcttctgttattgaagtaaagtacagatttctcagctttttagtaacatcaccttttgttcttcccctggacaggtgtaaactccagccatattgaactatccagcacctggtacccagccttccgtgcttcagcttctgtagctccttcttccttaagtgctttttcgtgtgctgcctattaaaatcctacctgcttttcaaggcaccattaaataccaccttcttagagagaggtccacagatactaacatagagcagagcctgacagataataaacactcaataaattgtaggtattattaagtgagaattgttcataacttcttttcaataccatcattacctggttcccaataaatgaactgtaaatattttgagtaatatacatctataaactaagacaaagcagtattatcagtaagtgtaagcaagtttaaagtgaatgcgtaaatgattaatgtgtagaatttatttttaatctcagtttaaatgtttgtcagttttaatcagagcatagtgagaaaatgatttcatgggcagacatggacatttcttattcttcatacttaatcacaaaccccaccaatctataataagattgatttcgagtactgtcagtctttttttgtgaaacagaatcctcaagctcctaagaattctgttttttggccgggcgcggtggctcacgcctgtaatcctagcactttgggaggccgagacgggcggatcacgaggtcaggagatcgagaccatcttggctaacacggtgaaaccccgtttctactaaaaatacaaaaaattagccgggcg

SEQ ID NO: 29395 - DNA, 1043 bp, Homo sapiens
tcccaaagtgggattacagcctggctgtcaatatgcttttaagtgtgctcattgctactgggtgtcactgcttctaagtcttctcagcagacagaactaggaaaataggcttatgtatactcagctacatattacacatgtatctatgtttatttctgtgtatgtctgtgtatatgttagaaattatgagttcatactgatatctcattctaatccaacactgtgtggtttattttagccttccctcttatttgtaattattttgccaacctggctgtcattatccttcatttttttaaacttactttttcagtcagtaccactgtctacatgaattagtgtcagaattgctaactcacatctttgtgagaaacaaatttacttactaggtagcagcatttgtgttacagttctttatgcctttagctttacaatatccagtcaaaataggttttcaaagtttcttcctcatgcccttcagtgtggttatgttattcctttgtaacgcagttagattcacttgttactgtttgtattctgggttctttaatttttttggtatgcgctacattactctggttttgagtcatctatacacaaagatatactcagagaaatatcactccttccttatccctaccatccattcccatttcgttttatccctttcccacctatcccctgtaggtagctgatctctttagtttctggtttatccttcctgtatttcttttgtacaaataagcagatatatgtatatgttcttattgcccatttcttatatgaaggatagcatagtctaaatcttgtactttggttttttcacttaacaatatatcttggaattcattctgtgtctgttcttagacatcttagaatgattttcattcatttttactgctgcatagtactccatgtggatataacatagtgtcttcagtctcctccaatgtgtgggcatttagattgtttccagtattttgcaattacaaatagtgctactgtggataatcttgtacatatgttttttcatatcattggag

SEQ ID NO: 29396 - DNA, 1032 bp, Homo sapiens
aagaattgggaagtcactgagaaccaaggcagtgcctctgtcattctctgtggagcagcaggccttgtttctgcagtccagatctgtctactacttggctcctctctgcagaatgaagtctgggtgcatgtggcccatcccagcattcccagttatgcaaccagatactcttctgccagccagcctggccccttggagtctctgtgctccagctccaggctgtctgagaagaggagctagttggcccagctctaccttagaatggattcttgtctgggctgggtagtacctcatcagctgtggccaggagcaatactctcaacagcacagacaaaaggggacagatccctattgggtaaaggtgatgtgggctggggtaagtaccctgagaggtgtctgtcacagaaaactgcctgagagaactttgtcaaagttctgggctccactctccaggggttttgttcagtcaataggtataaaatagaaactaagtgtccacttgtttaaaaagctccctggatgagtctgatgcctcttcagatttagaaatcactttactctaatacgtgtaaataaattaatatgtatttgtgtttgcatgaggaaataatggaaagataagcaactaataaaaatgggtaatgggtggagattgatgaggctgttgaggatgagggagcaggttctttcacacacacacacacacacacacacacacacacattttaaccaacttaaaaatttaaagaaacacttcagcttaacaattagaaatcagattcaaaacaatgattttaaaattgaagatactgaggtccagaaggtgcactgtatctgggaccaggtttctcatctgtgaagtaattccagtttttggtatcagtcacttaaatgtaatttattttttctcatcagcataatcccatagaagttcatactggtaggcaggagaagaagggaatagatcccaaagggaattggaagaatttgggttctattgctttgtctttgttctgtagagaaggtacttcc

SEQ ID NO: 29397 - DNA, 1058 bp, Homo sapiens
tgcaaatttttctgtggagatttttgtttcattaaattataggagttctttgtagattttgatgagtctttttttagattcatgtgctgcagatattttctcctttccaagagttacctctttttttttttttttttttgatacagtcgcaatttgtcgcccaggctggagtgcaatggtgcaatctctgcttcctaggttcaagtgattctcctgcctcagcctcccaagtagctgggattacaggcacgccccaccacaccctaggctcactgcaacctctgcttcctaggttcaagtgattctcctgcctcagcctcccaagtagctgggattacaggcacgccccaccacgcccagctaatttttgtatttttagagacgggatttcaccatgttggctaggctggtctcgaactcctgacctcagcctcggcctcccaaagtgctgggattacaggcgtgagccactgcgcccggccgaattacagctattttaaagatcatcttcagtaactagtaactgggtcactgtggatatgtggatatgttgtctcttttttctcgtttctgtttccttgtatgcttggtaacgttcaagtgaatgctggatactgtgtatgaaaattgttgatgctctaggtgacatttttctccagagagagctctccctaatcactgataggcagatacagtggtgacagataaccataattcagtgagagattgagctgattcgagggttggttgcagttttttttttttttttgtattacacaccttttaatttgaattaattaggcatgatcattattgaaaattggtaaagtgtagattgataacaaccaaaacaggggaaaacattcatttaaaactttcccaaataaatgctccatgtataggcctctattaaaataataacaataaacattttttgaaccactttatatattttaagatttgtttagggctttttcatttgcacgtgaaaatattcctttttttttttttttttttttagtatttattgatcattcttgggtgtttctcggagaggg

SEQ ID NO: 29398 - DNA, 1020 bp, Homo sapiens
ctttttgtttgtttgttttttgagatggagtcttgctctgtctctcaggctggagtgcagtggtgccatctcagctcactgcaacctccacctcctggtttcaagcaattctcctgcctcagcctcccaagtagctgggactacaagcgcgtattgccacccccaggtaattttttgtattttagtagagacagggtttcaccctgttgcccatgctggtcgtgaactcctgagctcaggcaatccacccgccttggcctcccaaagtgctgggattacaggcatgagccaccgcacccagctgtcagatgtctttactgcctccgtgaagatgatatgatttcatcacatttaacattgttaatgtgaagatcatgtcaatagatttccttatatggaatctctcatacctggaataaactgtgcttgtttatttgtattcctttttataatgtgccattggattctgtttgctaatattcagagattttgtgttgatattcgtaagtagtattcaactgtagtatcttttgtgcagtctttgtcaggttggggttaccattacacttgcttcataaaatgagtgtggaagttttctttccttttctgtgttctgaaatagcattaagactactttgtctttttttttttttttttgacacagagtcttgctctgtcacccaggctggaatgcagtggcatgatctcggctgactgcaacctcttcctcccaggttcaagtgattctcctgcctcagcctcccaagaagttgggactacaggtgcacaccaccacgtgtaactaatttttatatttttagtagagatggggtttcactatgttggccagactggtctcaaactcctgacctcaggtgatctacccacctcggcctcccaaagtgctgggattacaggcgccagccaccagtctaccttatcttaaaatggtataattttcctttgaaactatttgcctggtatttttttggttttcttagactggtttctgcttggttt

SEQ ID NO: 29399 - DNA, 1029 bp, Homo sapiens
aacgtacttgagtgaggatgtgttgaaatttgtgggaagctgtgaaaggcagcttttagcctaccaaaagaggactggcctggaaggcaagagacctgagtcttggtccctgcttctgatgacatgtcacatgggcatgtgctcgtcactctgcttctgcaagtttttgtgtttctcatctgtggagttaagggattgggatggtctctagggtctcgtacagctctaatattgtcaccgccctcaggaacattacatgaaattagcatatatgcaatatattaagattcatgtgtggattgtttcccagttactagcgctgtctttaatgtaatttacctcagaaatctctggataatcattattgagatataatgaaatagggaaaaacttgaggttaaaaactagtaaattgatttacttcaacattaaaagcccacaattaaacccttgaggaaaatgactatttttattttttattttttgctctgcaagtaaggttggaacttcgtaatactgtatgacagtagtcgtttacctcacgaattagattattcatgtgtgtttgactgaagagagtttttacctagtgactggaatgaatgttaatgctgctattttggcattggaaaaaaaaggtgtaatgaaaaatgtcaagtttgagagagagagaaatacttaaatagaactgatttaaaagcaattctgaaaaagaaagaacttggcacaatctttctatgaaagcaaagactttactgcacagctaaagaaaatgaagcaaaaacaatacattgccccaattaatgtttgaattcactgaacacaaggtaggctagcaaagtagagagtaatatctttgcctcaccttggccacaaggatttattttgtcagtaaccaagtttagtgtactgctatttagctttttcactacagatgtgaaaatgtttctttttggggtttgtttgaaattttctttcccttttcaatttagcagtgctgaacctatcctcaaataaatttacattttt

SEQ ID NO: 29400 - DNA, 1082 bp, Homo sapiens
ctgtgatgtttggtaagttaggtgtattaaatgtattttcagctaggctgggtgcaggactcatgcctataatcccaggactttgggagaccgaggcatgaggattccttgagcttaggagtttgagaccaatctaggcaacatagtgaggccttttctgtactaaaggtactaaaaattaaaaaaaaaaaaaattagccaggtgtggtggtacgtgcctatagtcccagctacttgggagcctggggctgaggatcgcttgaacctgagtggtcaaggctacagtgagccgtcgtcgtgtcaccgcattcccgcctggcaacagagcaagaaactttcccaaaaaaaacaagcatttcaccttatgaggttttccatttatgaagggtttattgggatgtaagtccatagtaagtcaaggagcatctttatatagttagaatagggacagtcaagtgtttcatgcataatccaaatcttcaggaggcaacatcaaggtaacccgagtttagggatattctgcaaaataactggcctgtaaacctcaaaattaagtcaagatcatggaaccaagaaaacactgaggaattgttccacactaaagaagtgtgcagaaacatggcaactccatgtggttcatgattctgaatcggcatgattggcaaaactagaatgtctgaaaattagattgtagtcgtgtatctgtgttaatgattttatttttatcttcttttttttttaactcttcttttttttggtattttcttttttgttttggtttgtccttccttttttttgttgttttttgttttttgttacaaacccttgtgtcgatagctgactgctctgctgtatacgaaaccctgacccagaaacaggttgtctgtgaatggtttagcacaggtcccccgtgaatgtgcattgtgtgacgggcaaaagtgtggccgcctttctactgtgccaagttttccagcatgagaggctttccatatctggtcctcagatatgtggtgtgaatgaaggggggaccagctatccgaggccaaccgaggctccacagttggctgccatgtcattttgcc

SEQ ID NO: 29401 - DNA, 1029 bp, Homo sapiens
tgagattcttaattttgcttgctcattgtttacttaacttttttaatcaagaagtctcctctacacttttggagctcaaagatgcaaggacagcagcttacatgagtaacagaagaatctagtgtttctgagcagagtttagagtaaaaggataagtcaaaacaaaattaatttttatattaatagcatccctaatgatgtattcctggtagttagctataaccattacaccattcccataatctgatttgtgtaaattcaagttgacttttccccaaaactgtatgtaatttattcctcaccttgctcacaatttatatacctattaattgaaaaacacctcattccccaacaaacatctagagctccttgcctccggcctactccacccaccctcttgcctaatcctgagatgctattttgctcccctttagatttgctttttttctttcacttcttgaggctcccacactgaaaggtgcctaggagctcatccagtagctgcgctgtctctgctccctctaggaaaggccacctgcctgagctttgaaatggcccacaccgtaccagaaggaagaagagagattccaggaggattcagacgttacccaggctttctggaaactgagcagaaccacaggaggagaaagctataggcagctgaacaaaatttatgtgtttctatttcccctgctataacatgaaaggactgggctctgtctgtggttttcaaatctcctcctctcttaggggcttcaggcctcaccccaaatagggaaacttcacatacagcattctctcccctaatccctgttttttctattctttgctcttctcttatctacctccttcccctcccgtttcccttcttcctctgcccttagtcttttttctttttcttaatttccttttagtcattatcatcttcagttcacataggtagtaactattagggttagcagggcaagatcccatttggaaaaaggatttgattgctttgaaaatgatgttgggcaacccacaggatag

SEQ ID NO: 29402 - DNA, 1091 bp, Homo sapiens
gttcctaagtagtgctccaccaaagatcagagttgagaaaatagattatttcagtaacaagaaatatctgttgtctgcttttgcttgtatcactttttagcctttaaaacctttcatgtagagttatttactcagaaaatgtttattgaactcttcatccaaataatgggatggaattggggaataatacagagaagataccagtgttacccaggagtttgtgaagtgctgagaggaagagaagagctgagtgacttggggctgtctttctttggcttcccagacttctgagctaggtgttgatgtgtgagtaggagtttgccttgagaaatgccttctaggcaaagcgaagtgtgcatgtaaaggcacagaccgtgaacacagtgcatcaggtcaggaaaaccacaaattacttgggaaggctggagtgtagggtgccttagtaagaaggtgggagttgagacagctgggggtaggcagggccaaatcctgaagggcattatttggtaaggactttggacttgatcttgtgggtgacggagtcattaaaggatggccctgtttctgtctgccagttccactcccactttatctcttatgctttctgcccattttgcctacttacttactttttttttgagacagagttttgcttggaggctcactgcaaccttgcctcctgggttcaagcaattctgcctcagcctcctgagtggctgggattacaggtgtgtgctaccatgcctggctaatttttgtatttttagtagagacaggatttcgccatgttgtccaggctggtctcaaactcctgacctcaggtgatccacctgcctcggcctcccaaagtgctgggattacaggcgtgagccattgcacctggccgcattgtgcctactttatctcgtggtactcagtgggggtgattttacctccctgctacagaggcatttggaaatgtataggggggcggctttttgttgtgttgtcacgttgattagggggtgttattggccgtcagtaggcatgtcaagggcagacatgctaaatggtctggattgcacggtacactccctccactggagaatcat

SEQ ID NO: 29403 - DNA, 1049 bp, Homo sapiens
tggcatgacctcggctcactgcaacctctgcctcctaggttcaagcgattctcctgcctcagcctcctgagtagctgggactacaggcgcgtgccaccatgctcagctaattttttttttgtatttttgtagagacagcgttttgccatgttggccaagatggtctcaaactcctgacctcaggtggtccccctgacttcagcctcccaaagtgctgtgattacaggctttagtcaccgtgcccggcctttttttgaaagaggcagtcatacatggtcaattttgaaattttttgggaagacaaatcaacactagtgggaatgaaggaagaagaaccggagtggaggaataaattaggaaagcctaaccacctagaggtgcagtaataaagtggcagcggaaggtagcagatggaggtgaggagttttgtattgacagaaatagtaacagggacccttgtgggaagagtggtaaaaagacttttaatcatggcaagtctgagtggaatcaaaggattatgagaccttaaagggtaagagaccaagagaggtgggatttggatttggagggatttctgagatagaacaaggcttgctggttgattggctatgggcggttgttcattctgaggcctctaggttgggagcctgggagatggtggtgccattatccaagtaaaggaatactgttagagcagatttgtcagggggaaatagttctggtttgaacttaagtttgtaatgcctgtaggccattcaggctatatccagaaaccatcttaaaatttgtaagaggggagcaggagctggagatgaaaatttgtgtaaatggtagttaaaatcttgagtggatgagcacagattcttatctgggtcattggttaggtgaaattgcaatcatggccaggcgcggtggctcacgcctataatcccagcactttgggaggcccaggtgggcggatcacgaggttaggagatcgagaccatcctggctaacatggtgaaaccctatctctactaaaaatacaaaaaaaaaaagtagccggccgt

SEQ ID NO: 29404 - DNA, 1027 bp, Homo sapiens
tgctgaatacaactgtgaaaattaatgtgaactcacaggcttaggagccaagacagaatttaaattaggtcgagcctgaaagaaataaggccctaaaaagtaatggagagaaagtattgccagtagcatcatttctccaccacacatcgcattgctgttgcactcactgggaagtgtgccagtgaacatgtctcattatgagaggctcagaatttcccatcacatcctttggcccttttaacaagattagcttatctaaaatgtggactgaaaaaagtattttacgtttaggacatgtcaattgaaaagatacccccatctgataagatttctcctgtctgataaggtttttactagtctgaagttgtttagatgtgggaactacttctgtcactgctgtaggcttgtttgaccttctgactctccatttgaaatgctaagtcccctttttgtgattgtcgtttcctaagtgaaatacaaatgtaattggaatttgaatccaagatccagattatagccttttatcaggttgatgaaataccctgctgttaaccttctccattgcacattattagcatttaataaatattggctaacagtgctggatttatggagggctcgttgaaatattcactaatatttgaatggtgatcttttaaaaaatgcttccaaaaggatttatggatttctagccattttttagatttacccccttctgtttccttatcagttcattaggaattgtgactattttgtttagagtcctttcctaatgattatgtagaggatgtaaagatgaagagtgggatttgagttgggcctttaagagtgggtgtgattttgatatgcagataataggaacaagtgacagcttgagctgtggaatctaatcttggaaatgtacttaggtggcaaactgtagaggactccaaaggcaaaactaagtttgactgtatatttgttcagtggaggaagcatcttatttatttatttatttgtttatttttttttttgaggtggagtctca

SEQ ID NO: 29405 - DNA, 1031 bp, Homo sapiens
ggcgcgtcgtcgggcctcaagcacagcccggggtccctcgctggctctgttcggaccctgctcggtcgctcgcctgggccccagccatctctcacttcagcccatgagttctgccccacgtctgtctccctgggtgtcttaagagacgcgacccgcaccgacgcccccgcgaatgcaccgcgaatgcacgtgaccgcgcctagtggcgccccctcagtcaacgccgtcgcagtgcccctcccgaagcccgccgcttccgccggcccgcgcggccccgcccccagccgcgaggaaccaatccgcatgcacacttcttgtccccgccccggcaccctcctcggcgcgcgcccctccctccgcccgcccgccggcccgcccgtcagtctggcaggcaggcaggcaatcggtccgagtggctgtcggctcttcagctctcccgctcggcgtcttccttcctcctcccggtcagcgtcggcggctgcaccggcggcggcgcagtccctgcgggaggggcgacaagagctgagcggcggccgccgagcgtcgagctcagcgcggcggaggcggcggcggcccggcagccaacatggcggcggcggcggcggcgggcgcgggcccggagatggtccgcgggcaggtgttcgacgtggggccgcgctacaccaacctctcgtacatcggcgagggcgcctacggcatggtgtggtgagtgtccgcgaccggccacgcccggcccccccaccgcccggggccgcagcggacgcagcctcggcctcgcccgcgcctcggcctcaggcgccgcggcgacctcgaacccggacttcaccgcggtccgcgcgccagggctcgggcgcggccccgggccggttgaggtttaggtgttgttgctcgcggttcccgggccttcggtcgctcgggaaggggctcagggagtggcgcggggggcgtaggccggtactagtggacccttggccccgggcgcagcgcggcctttaaagtctggaccctcgggaaggcaacggaagggtccc

SEQ ID NO: 29406 - DNA, 1073 bp, Homo sapiens
agctttgctggggccctacctgcatgcccagccttacccctcattctcacagcacagatgaggttgagaccatgcagtcaatgcattgcttaaggtctcttatttacaaaaaaaaaccttaaacatagtcgctgtcattcagacattcagagaatggttggccacaaacaatgaccaagtattgcttggcttaacttgaaggcctgctgtctccttctgggggtcagggacgcagctccaccctcaccactagcccaccctgcccgtgggcataaccttgacgaagagagagaatgattggcatctgcttttctcttttctttgctaataattctgttcctggctgccgagagtgaagtttcaccatgtggaggtttggctcctatcacctggtggtctgattcataccctagcctgaggctccactggaagatctcgcagcctcagtgtatgggaaaccctttccccaggcttgtcccagcactgccgctccccacccctgagccaggaccccagaggatggccatgccccgtgcctggcagaggtctggtgccagcactgggagctgctccgcccttgccttggggccgagggagccctcgtccacccctgcacagcagctgggcacagaggagcgctcttccatcttgaccaggactgcaccaagaagcaccaggtgtcttcagcctccaacctccggggcgaccttctcttccagccacagtcccatgagggcccctagccagggacactggtctgtaaattgtaatcctttctccagcccagctctccacttgttccttgtgtgagctgagcaggcagtgcacctctgagtgtcccttttgtaaggcccaggggttgcactgagtctgcagaggccgcgacctcctagaacgctgtgggtgcaggtgagccggcgtgtcctggggagatgctgccagcacacaggggccctcctgctgccagcaggttggggtggttaagtcttattagtgtctattcttaaaattaagtgggctggagaagaatggagctccacatgccagcaccgtatatggaatacaaaagctgg

SEQ ID NO: 29407 - DNA, 1062 bp, Homo sapiens
ctgtctccattaaaaacacaaaaaaattagctgggcatggtggcacgcccctgtagtcacagctactcaggaggctgaggcaggagaatcacttgaacccaggaggcagaggttgtagtgagccaagatcgtgccacttcactccagccaggtgacagagcgagactctgtctcaaaaaaaaaaaaaaaaaagaactgggcgggcacaggctgccgtcagggcctcgctcaggcttccctgctgtgtgaccactcacgtcacatgctccatcttggcccagcagctttcagggcagagacggtgtccccgagctagagacagggaagcagaaggatctgctgtctgtgtcgggctcgcaagcctcgtgagtgcctccctgacccagaatgctgcccaggggcgcaggcaccgctaggcggcctcaggtggtccgttcatttcaccattcctgcaactaaaggacttgtgggttgtgtataatttctcactgtttttgatgagcctcgtttgggtgcatctctgagcctcctggctttgttccagtgctgcggctttgaatgctgctgtcttagaagcagctgtgcctctgctcaggtagcagcagggggcttcacgccccatccccccggccctgcccccaactctggctgtgtttctgcaggatgagaaggcgcgcattgaagcattgggtggctttgtgtctcacatggactgctggagagtcaacgggaccctggccgtctccagagccatcggtgagagccaaagaggccgacccaagtgggagaaggtctctcggaagcccaggcctcgagtgtggcccgcggctcaccaggggttcagggaggcagtgtgatgggccgagggggatttgtcatgcactggggtgataccctcgtagtgtgaagggaacagggcagattcagagactgcagcaccagtgtctgagtgtaagttacactgtatgttattatctcacctaaaacagctcctacaaatctcatagaaacctgtggctcaccaccctatgggctggaagtagagcttccaatattccggaa

SEQ ID NO: 29408 - DNA, 1033 bp, Homo sapiens
agggagaagtgcacagtgtgatagggcaggaagagaaggaaacggaggagaggaggggactttcccataagcaggcagaagaaaaggcagctgtgttgtgatggacatggatgcagtggtgtccgatgtggggtcagccctagaggagagacagagagagagacagaaaagtgagagagtcctgacccttacgattaacatgggatctgcctgcaaatgctgtttagggccattgcctcttcctgtactgctatttttgagagtgatgctcctgagccccatgacccagtcaaatttgatgtcccctcgagccagattcagtgctgggagtccagtgtgatctgcctggatcttgctgcattgagaacaggccagatcttgaccccaatacaggggctggatatgaacaggcaatagctgggtttctgagtcagaaagacttggttgattgctaattgcttaggcgagtaatttaattttgttgagtcagattcctcagctacaaaatgcagatgacagtacttactcctccaggttgtggggaaaatggagattctgagcacgatgtccatttcacagaaaggtaccaatttggtggcttattttcctttctaccttcagaagtggctatccctgccacccaaacagacccttgactctcaagtgtacggggtcccatttacacagggggagagcttacagcctacgttgagtctatacttaccacttagtgagcatggtatccgctcaggggcctctgtgggcatccatctcctctgcagcatctttcctccccaccgctgggcctgcacatgaccccctccttgggttagacctctgatcagtgatgaccttggtatgctggtgatggtcagtcttggcaccaaatgagacagtttatgtcatcagctattcaataaaacactaatctagttgtcaccgtgaaagtattttgtgacattgttatgtacgtgttgttacaaatgtgcatgatgcatttactacagcatagaattttgcctgggtgccagcc

SEQ ID NO: 29409 - DNA, 1038 bp, Homo sapiens
agctcctgaaggaagcgctaaacatggaaaggaacaaccagtaccagccactgcaaaatcatgccaaaatgtaaagaccatcaagactaggaagaaactgcatcaactaacaagcaaaataaccagctaacatcataatgacaggatcaaattcacacataacaatattaactttaaatgtaaatggactaaatgctccaattaaaagacacagactggaaaattggataaagagtcaagacccatcagtgtgctatattcaggaaacccatctcacatgcagagacacacataggctcaaaataaaaggatggaggaacatctaccaagcaaatggaaaacaaaaaaaggcaggggttgcaatcctagtctatgataaaacagactttaaaccaacaaagatcaaaagagacaaagaaggccattacataatggtaaagggatcaattcaacaagaagagctaactatcctaaatatatatgcacccactacaggagcaccaagattcataaagcaagtcctgagtgacctacaaagagactttagactcccacacattaataatggcagactttaacaccccactgtcaacattaggcagatcaacgagacagaaagtcaacaaggatacccaggaattgaactcagctctgcaccaagcggacctagtagacatctacagaactctccaccccaaatcaacagaatatacatttttttcagcaccacaccacacctattccaaaattgaccacatacttggaagtaaagctctcctcagcaaatgtaaaagaacagaaattataacaaactatctctcagaccacagtgcaatcaaactagaactcaggattaagaatctcactcaaaaccattcaactacatggaaactgaacaacctactcctgaatgactactgggtacataatgaaatgaaggcagaaataaagatgttctttgaaaccaacgagaacaaagacacaacataccagaatctctgggacgcattcaaagcagtgtgtagagggaaatttata

SEQ ID NO: 29410 - DNA, 1079 bp, Homo sapiens
atcaattgaacctgggaggcagagtttgcagtgagccaagactgtgcacaagactgtgccactgcactccagcctgggcaacaagagcaagactccgtctcaattaaaaaaaaaaaaaatctagcctgagagtctaggaggggagtaactattaaaccaaggtcgttccttatcaaaagacatgacagttgccacagactaaactgagagaaaaatgaagaatttacagatccttactactatttccactcttgctacctctctgaccttttatccccttcaagtgtatgtccaaatttaccttctccatgagacttactctgactacactacgtaaaattacaattctcttatacctcctcaacttctaagcctgctctattatttttttcctaattctataacgtcatcttccagttcaccagagaatttgcatttttattatacttactatctttcttcctccactggactgtttgttagttccttctgttgaaatagtttgtttttgttgttcatttctgtctgttaatgtttaccgatttctctcaagtgcctaaagcagtgcctggcacacaataagcactcaatattcattaatggaaaaaggttatctagaagtagtcagaaatcaattcaaaaaggtagactgagggaaaaagtggaaaatgttcaaatgtgggaaacagccaattttcttcaagtctgggagctcctaaggtgtactgttagaggaaatgtgacagccccacaatcctggggttcagaagaaaaatatatatggccagatctcatcataaggaccaatagtttggggaagcctttcctcagaagagtatgtgtgtggttaaaaactcgtgtgtggtaataacaatggtttactagaggctgggcacggtggctcacgcctgtaatcccagcactttgggaggccgacgcaggcagatcacaaggtcaggagtttgagaccagcctggccaacatggtgaaaccccatctctactaaaaatacaaaaattagccaggcgtggtggcacgcacctgtaatcccagctcctcaggcaggaaaactgcttgaa

SEQ ID NO: 29411 - DNA, 1145 bp, Homo sapiens
gaggcagaggttgcagtgagccaagattgcaccactgcaccactgcacttcagcctacgtgacagagcgagactctatatcaaaacaaaacaaaacaaaataaaaacagaagaaagaaggcacaaatcacccatatcgagtgtaaacagggctgggggcggggggttgttttatagatgtggaatacctaaaatgggtaatagagtcaattttaacaacattatgccagtactttgagatgaaatgagagtattcttagaaaaatctaatcaaacacatatatttgactcaagaagaagtagaaaatctcagttcttctaagggtattgaatacatagtgacaaatattcccacaaacaaaactgggttaggcagggtgcggtggctcatgcctgtaattccagcactttgggaggctgaggtgggtggattacttgaggtcaggggtttgtgaccagcctggccaatacaatgaaacctcttctctactaaaaatacaaaaattggctgagtgtggttgcacgagcctgtaatcccagctactccagaggctgaggcaggagaatcacttgagcccaggaggtggaggttgcagtgagctgagatggcgctactgcactccagcctgggccaaagagcgagactctgtctcaaaacaaacaaaaacaaccccaaaactggctcagagagattcactggtaggaaattccaaccttacacaagatcctccagagaataaaacaattctgaagaataaacgatgccttaatcacagtagtgccacatatagtgctggctagtacataatggacaagtctggtccatgcattccaaggatgcaaaatcggtttgacattagaagaatgacaaattgcaatattaaaggagaaaaaaatcacaataaaagatgcagaaaaaacattgaataaaatctgaagaatgattttcagaaactacttaccatacgagaaatgtaaaataacttccttaatctggtgagagactcctgcaaggaacctacagcaggcatcgtgtttaatagtgaactgtatataaacatcctttgtgacaagacaaggatgccgcattgtactgaataccagcagggagagtaaggtgaaagaaaaaaatgaaaggtgtaggaa

SEQ ID NO: 29412 - DNA, 1094 bp, Homo sapiens
tgcaacaccagcagtccagcagtccctctgtcaggggagggttaaaactagtgggtgccaggctgagaccagggtctcagtgtcctgcagggacttctaggcaaggagtccccatcagcgtcaggctttgtgccagggctgaggtcccagaggaaccagacttaccccaactcaagcacacaaaatgagggtgtcgtgtgaggtgacagccatatgcagtgtgatgcttgcaggacagagactgggacagggaaagcctgaggggtctccacagaggatgagtgacaggtgcaggggacacctggcaggggactcccaggcatagagcctcgagaagctccaggcggcccacagggctggaccaagtgagtcctggggccaaggtggtctgagagcaggctagacaggtgccaggcccagacccagagaactcatccctggaggacagactcatctggggagtcctggaggctgtttgcagggaatcgatgagaccagagttggatgggtgggcaggggtgtgaatccagaactagagacaccccatggagggtgttgtggtgacccaggcagtttgactgatatgaggacagattcaggagaagggggaacaggagagggatgagcaaggacagccctgggcttttttgatgaacagttaacactgggatcatgtcagcacatcctgtattttaaacaaaatgcccaagggaagtggtggtctgcaaagtgtccccagaaggcagcaagggcttggcttcgtctcccccaaggccatccactcatcgtcttgctcataaaggcttactaggggccaggctgggggacacagggagggtgggccaaacgcagggggactgtgcagtcaggaggacagatcatggcccatttttggagcaataaagggggagggggtcccccctctgcagtggggggatgccagtactggtctcacagatcaagcagcactggctggtgctgggcgcccctcaaaggcagcagtgccagtggagaggagaccaagggctgtggcggggagctcctgggggacacggagggagaggctgacagaccacagggtccttgtggcccgc

SEQ ID NO: 29413 - DNA, 1051 bp, Homo sapiens
cttaaagtcttagattaacttttccatttctccgcaggtggctgttaccggtttgatagcagttcttgtgagtctgtagatcatgtgtgtagtattgtgtgttagtcatgctgagtcttcctatccatgaatatgggaagcctttcaacttatttgtatgttttttacttttagaaactttatgttgacagctgattagttagatttaacatgactaatataaatttgtgatttctttttcttttttttttttttttttgagacggagtctcactcttgtcaccatactggggtgcagtgatgtgatctctcctcactgccacctctgccttccaggttgaactgattctcctgccttatcctccctagtagctgggactacagatgcatgccaccacgtccagctaatttttgaagatttagtagagacgtggttttaccatgttggccaggatggtctcgatctcttgacctcgtgatccccccacctcggcctcccaaagtgctgggattacaggcatgagccaccgcgcctggacaaatttgtgatatcttataccaatattttgtatgtctgaatgaataggcatcaaggtaaaaaaattacataagctagttaaccaaaaatcacccccgtactcatggacattttttcatgaatttgttcatttctattgatatacatttcctcatttcagtagatcatgtatatttgaacctggaaacttatcctcatggcagaaagtgttcagagtcacctctctcagcttcactggtacaggtagagcaggctctgtgagcttggcctgtttcaatgaagcctgatctttagggaatctcctcagggagattgacacagagctgctgaagcccttgatcacagggacccaaaagtttgtgttcacacaccatggttccagaagaagacttacaaagaggaaatcatgactatttttaattttagtattttaatatttaattttttaaatgatctctatgaaaaaaaaaattgtgatcagctgggtgcggtggctcacccctgtaatcccag

SEQ ID NO: 29414 - DNA, 1094 bp, Homo sapiens
gacagagtttcactcttgttgcccaagctggagtgcaatggcacaatcttggctcaccacaacctctgccatccaggttcaagcaattctcctgcctcagcctcccgagtagctgggattacaggcatgcgccaccatgcccggctaattttgtatttttagtagagacggggtttcaccatgttgccaaagctggtctcaaactcctgagctcaggcaatctgcccaccttggcctcccaaagtgttaggattacaggtgtgagccacggaggccagcccaatattgcacttcttaaatgcacttgtctattccttaattgtcttcattgttatattctcatagttttaaaagagtaaagatttttttggggctgggcatggtggctcacgcctgtaattccaggactttgggaggcccaggtgggcagatcacttgaggtcaggagttcgagaccagcctggccaacatggtgaaaccctgtctctgtaaaaaatagaaaagttagctgggtgtggtggtgcatgcctgtagtcccagctacttgagaggctgaggcatgagaattgcttgaacccaggaactcaggaggcggaagttgcagtgagccgagatcatactactgcactccaggctgggcaacagagtgagactcagtcaagaaaaaaaaaagctgggggtggtggctcatgccggtaatcccagcactttgggaggctgaggcacggagatcacgaggtcaggagttcaagaccagcctgaccaatatggtgaaaccccatctctagtgaaaatacaaaaattagccaggcgtggtggcactcgcctgtagtcccagctacttggaggctgaagcaggagaatcgcttaaacccgggaggtggaggttgcagtgagccaagatgccgccactgcactccagcctgggtgactgagcaagactccatctcaaaaaaaaaaaaaaagtttttttgaaaataagaaataaaggccaggcacagtggcttacacctataatcccagcactttgggaggctgaggtgggtggatcacgaggtcaggagtttgagaccataatggccaacatggtgaaa

SEQ ID NO: 29415 - DNA, 1062 bp, Homo sapiens
acaacaacaggccgggcacagtagctcacgcctgtaatcccagcactttgggaggccaaggcgggtggatgacctgaagtgaggagtttgagactagcctggtgaacatggtgaacacggtgaaaccccatctctactacaaatacaaaaaattagcttggcgtggtggcgggcacctgtaatcccagctacttgggaagctgaggcaggagaatcttgaacctgggagacggaggttgcagtgagccaagaccgtgccgttgcactccagcctgggcaacaagagtgaaacgctgtctcaaaaacaacaacagcaacaaaaaacaggccaggtgtggtggctcacatttgtattcccagccctttgggaggccagggcaggaggattgcttgaacccaggagtttcagaccaccctgggcaatatagcaagaccccatttttacaaaaaattaaaaattagctggacatagtggcatgtctctgtagtcctaactactcaggaggctgaggcaggaggatcacttgagcctaggagatcgaggcagcagtgagctatgatcgtgccactgcactccaccctgggcaacagaaaagtccctgtctctgaaaataaaaacagtaagaaaacaggaccatcactcacagcacctctgcctctgccctacctacttgaatgaggagcagggtgtctcagctggtcagagcagcccttgaatgagccccagctatttctggggtcctcaaacgaaacctcccatggccaagtcatacccaacacgggcctgctcccctgttctggcctcagctcggagatgctgagtgacagaggctcagccttcgggtgttcctggcaaaccctcacctccggaggccccacagctcagacctagtccttggttcacatggccccacttccatcctctttttcccttaagactgatttgtcctgggagatcactggatccctcattcaggtggagtgctgcaggacgacactttttccaggggtgacccaggcctgcagggtcccagtgtcacaggcaggccttgcccgagcctc

SEQ ID NO: 29416 - DNA, 1060 bp, Homo sapiens
tgcaaaatttttgtttttcctagacagagtctccttctgtcacccaggctggagtgcagtggcacgatcttggctcactgcaacctctgcctcccgggttcaagcgattctcctgccaagcctcctgagtagctgggactacaggcgagcaccaccatgcccagctaatttttgtatttttagtagagacaggatttcaccatgttagccaggatggtctcgatctcctgacctcgtgatccacctgtctcggcctcccaaagttctgggattacaggtgtgagccaccgcacccagccctacaaaatttttcaaaaatgtataggtgtggtggcacatgcttgtagtccgaactactggggaagctgagacaggaggattggttgagcccaggagtttgaggccacagtaaactgtgatggcaccactgcactccagcctgggtaacagagtgagaccctgtctctaaaaaagaattaaaattttttttaaataacaaaatgggctgggctcggtggctcatgcctgtaatcccagcactttggaggctgaggtgtgtggatcacttgaggccaggagttcaagaccagtctggccaacatggtgaaatcccgtctctactaaaaatacaaaactcaaccaggtgtgatggcacatacctgtaattctagctacttgggaggctgaggcaggagaatcggcttgaacctgggacacggaggttgcagtgagccgagatcgcaccactgcactccagcctgggcgaccaagtgagactccgtgtctcaaaaataagaacaaaatgtagatgcctacgtaccatctctctacccttggctcctggggagtaagggtcacccagtgacctcctagaaggccagtgacaatggggggtgtcagagtgctcttcagagccaagggagcagtaggaattgggatcttagtctcttagtctgactccaagctgtgagggagagagttgcagggcacttaagcttggtggagaccgtcagtgcctccttgcctgtccctgcagcaaaagttcaggacaccagagcca

SEQ ID NO: 29417 - DNA, 1020 bp, Homo sapiens
cggagcagaaggagttggaggaggaggaggtggaggaggaggagggaaaagaaatggagcaggaggaggagggaaaagaaatggaagaggaggagcaggaggaaaatgaaatggaggaggaggaggaggaaaaagaaatggaggaggaaaaagaaacaggaggaggaaaaagaaacggaggaggaagaggaggaggaggacaaagaaacagccaggccggacgtggtggctcacccctgtagtcccagctgctcgggaggctgaggcagaagaatcgcttcaacccgggaggcagagtttgcgtgagccgagatcgtgccactgcattccagcctggagacagagtgagactccatctcatctcaaaaaaaacaaaagaaaacaaaacaaaaacaaaaaaacagccaggagccgtggctcacgcctgtaatcctagcaatttgggaggcgataagaattattgaaatgcaataagaattaccgaaatgttgaacaaagacaccaagtgagcacgtgctgttggaaaaatagcaccaatactacactagctcaacacaaggttgccacaatcctgtaatatattaaaaattgggccaggcaaggggccgggaggggtggctcacacctgtaatctcagcactttgggaggccaaggcaggcggatcacctgaggtcaggagctccagaccagcctggccaacatggtaaaaccccatctctactaaaaatacaaaaattggctgggggtggtggtgggtgcctgtaatcctagctactatgtaggctgaggcaggagaaccacttgaacccgggaggtggaggttacagtgagccaagatcatgccatggcactccagcctgggtgacaagagcaaaacttcatctcaaaaaaaaagaaaagaaaagaaaaacaaaatgggccaggcgggctgggtgcagtggctcatgcctgtaattccggcacctttgggaggctgagatgggtggatcacgaggtcagaagtttgagaccagcctggc

SEQ ID NO: 29418 - DNA, 1051 bp, Homo sapiens
cttgcctttttcttgtctatttcatagccaaggaggaaggaaaaactggacctcatggatttactttaggaaggtacaaagcctgagaagcttaaggtatttcagtctgttttatattactcacttgcaaaaagcaggctcatcgaatacaggtgagtttcaacacatcttgaatatggcagcatttaaaagtctttagactgggcatggtgactcatgcctgtaatcccagcactttgggaggccaaggtgggaggatcatttgaggccaggagttcgagaccagtctgctaagcatagcaagaccccttctctacaaaaagtaagcaaattagctaggtgtggtggtgtgttcctgtagttccagctgcttgggtggctgaggcaggcagatcgcctgagcacaggagttgggggctgcagtgagctatgattacaccactgcacttgagccagggtgacagagtgagacctgtcttaaaaaaaaaaaaaagggggtcttcaaagacaagaacatctgtgctgtcacgttgggtggatgaggggctgccaggtttgcaatgaatgtttcccatttcttcttagtttatggacttaccataaactcaggatggcagtttggtgggttggagaaggatatggtgattgcgggagttacaagacattacttataggggaaaacagggttttgaaaggttaacgcttaaaagtgagaatggaaaagggatgaatgaatgaacaagatgaggtgagatggaagaggtaaagggaaaaggagaacaagcagctcttctctgcgtggcgcctgggatgaatggtttctggggacatccctgatggcagttttgtggagaggcgcaaaactttatgtggtaagaaatgagctgtaggcccagcgcagtgacccacgcctgtaatcccagaactttgggaggccgaggagggcggatcacttgaggtcaggagttcaagaccagcctggccaacatggagaaaccttgtctctactaaaagtacaaaaattaggcaggcgtggtggcaagtgcctgta

SEQ ID NO: 29419 - DNA, 1051 bp, Homo sapiens
gatagagttttgctcttgtctttcaggctggagtggggtgcaatggtgcagtcttggctcactgcaacctccacctcccagttcaagaggttctcctgcttcagcctcccgagtagctgggactaccatgcctggctgatttttgtgttattggtagagacggggtttcaccatgttctccagactggtctcaaactcctgaccttaggtgatccacccgcctcagcctcccaaagttctgggattacaggcatgagccactgcgcccggcccattatatcattcttatgtgtttgcttcctcatagcttagctttggtatataactgttttggaattatcatccttggctactaggatcagtgataagggtgacactagtctgaggctggacaggccactcctgggcagatgtctttgcagaagtattttttgtgtaaggttgtgatggcctttgtgtaatgttgtgagttgtgtttttgaggtagggtcttgctctatcacctgggctggagtgcagttgcactgtcaaggctcactgtagcctcagcctcctggactgaagcaatcctcttacctcaatcctctcacctcagcctcccaaagtgctgggattacaggcatgagccaccacacccagccgagaatggggcacttgtgcacgagagtcctctcttcatggcctttccctggctctatttttcagagttgttttttgttgttttgttttgttttgttttgagatggagtcttgctctgttgcacaggctggagtgcagtggcggaatctcggctcactgcaacctccgcctcctgggttcaagcaattctcccgcctcagcctccccagtagctgggattacaggcacccgccatcatgcccagataacttttgtatttttgtagagatggggtttcaccatgttagtcaggctggtctcgaactcctgacctcaggtgatccacccacctcggcctcccaaagtgctgggactacaggtgtgagccactgtgtgtggccgcagctctattttgacaattttcacagtctc

SEQ ID NO: 29420 - DNA, 1082 bp, Homo sapiens
tcaggtgattcacccgccttggcctcccaaagtgctgggattacaggcatgagccgccatacccagccaacttttatctttttagtagagacggggtttcatcctgttggccaggctggtcttgaactcctgaccttaattgatccacttgcctcagcctcccaaagtgctgggattataggcatgagccactgcacttggcctttagtggtgttttctgagatcttggtacactcatcacccaagcagtgtacactgtacctagtgtgtagtcttttatccctcatccccctccccttctactcttccccttgagtacccagagtccattatatcattcttttttttttttttttttttttttttttgagatggagtctcactctgttgcctaggctggagtgcaatggtgtggtcttggctcactgcaacctcctccacctcctgagttcaagtgattctcctgcctcagccttccaccagctgggattacaggcgcccaccaccatgcttggctaaattgttttggtattattagtaaagccagggtttcaccatgttggccaggctggtcttgaactcctgacctcaggtggtctgcctgccttggcctcccaaagtgctgggagtacaggcatgagccagcatgccggaccccgttatatcattctttttttttttcttttttaatgttattattatactttaagttttagggtacatatgcacaacgtgcaggtttgttacatatgtacacatgtgccatgttggtgtgctgcacccattaactcatcatttagcattagatatatctcctaatgctatccctccccgctccccgcatcccacaacagtccctggtgtgtgatgttccccttcctgtgtccatgtgttcttgttgttcatttcccacctatgagtgagaacatggtggtgtttggttttttgtccttgtgatagtttgctgagaatgatggtttccagcttcatccatgtccctacaagggacatgaactcatcattttttatggctgcatagtattctatggtgtatatgtgccacattttcttaatccagtcta

SEQ ID NO: 29421 - DNA, 1027 bp, Homo sapiens
ctacacataagcgttaaggcccctgaagggccagagaaggcttaggagtttctcaagagtgagcccagggtgggagggggccagagtcactgagaacagcccatttgaaaagtcaggcagagggatcctgagccctgaatatgcctgcctggcctgcggtaaccatgccagcagggtcagggcatttggccaattgctgtcttggtcgaggcaggaacatcttgcttccccagcccctgtctttttgtctccagtatccttggagcagctgcagggtgggtagtggggtgtctctcccagctgcttgaagagatgagcctccacccggctgcctctgccaggggaaacgagtaatgactgcagcagggagaaaagcgagcccagccccttttagaatcaaccctgctgctccgattctaattttcagttcagattttgcaggcacgagtgtgggtccctgagtacctgccctttgaattcttttggtgaggactgagcattcccccaggagcttctcatcgaaccccaaaaacacggcccccaattcaccacctcatcccttcccaggacctgctgaagctcacacccgtggaccacccagactgcctgccgctacaggatgccctccgcatctcccaggacttctttccggcatcagtgtggacattgaccccactggactgcagtcacagtggactcccaaggggcaggtgagctcatggcacagcaaggcctcacgctcaggttgaggagcccagagtggaccagatccccagtcccttctctgatggcacaggcatctctctgtgccccttgtctctgcaaccctgattccccattcccagccaaggagaggtcttcgatccctggtcatgctgatttgattccctgtggcattgtgggccctaggctgagagctttaagcccagtctctcaataatcctaagaatccagtgagccagaagagggcacaggaccagagagtctctccaggtacgccacacagtctttgagctgtgtcagagct

SEQ ID NO: 29422 - DNA, 1026 bp, Homo sapiens
agcttttataggtgctgtcctttccttggaggacgcctcaactttaggagcatgggtagacctccattcaaagcccagctcccccttgtagcttggtgatcgtgaggaagtcatagaacatccctgtgcctgttttctcctctgagaaatggcgttagtgagaattgtttccctttttaatcacagaaaataaagcatgcgaagaagttaacttggtgccattgggcagagggtgagagcccagcaaaccggagagatcagctgcccacatcagtggcgaggagtgcggagagtgggtgaggctggggcaggaagcaggccagcctgccagagcccaggaacaggtgaaaggcaagagtgagctcctcaccctgaattctcagggttcacaggcatgcaggggctgtggggagtacaatcatcagggctgctctcgttcccctggttccctccatatctgacgtggtcccagggcccctctccctgtgtttcctctctgccctactttctttctggctgccctcccaggactcatttttggccctggtaaggtggagtcttgaggtaactataggcctattaataactcctctgatgttcaacctgccatttgttgagacctctgagcttagtcagaaatctgctcctgctgggacctgagagagggctggagggagctgacagtgcaatggcagttttccctggggcagccactccagggtctattggcaggtatctgccgaactggagctttcttttgggtgtctggtgttctgaggtgtgattttccctctgaagataggctgagccccaggtgggtgccttagcctcagaaatgggtccccctgagctgggagctgtgctctaccctcagtgtcctaggacacctcacacctggccctgcccattctggcttccgaagcccacagagagggtctgtagaaattgctagatacaaaaggactacaaataagtcataggaagtgtatttacataacgcagtggttttcagccattactatatgt

SEQ ID NO: 29423 - DNA, 1049 bp, Homo sapiens
cttacaaggagagggggtcagcgcacagagaagttcaagagaagaccctgtgctgactgagatagaagtccgccatctccaaggcaaggagagaggcccagagaaaccaccccaggctgacagtttgacgttggacttccagtctccagaattgtgaggaaccagatttctgtggttaagcccttcagtcagggtgccgtgttatggcagccctggcaaactgctccagcctattaggacacgcataggattatgctccttgtagaaaggctgcctcgaaagggaattttatcatgacaggctccaccagcactgagaggctgacccgctgtggaaaatggcctcccttaaggaatgttacaatgacatgcgagggtacaactcctgcctgatggggctgcagggatgagttctgtgagatgacactttaaagactaatgcatagagtcgcttcaccttcttttgttgtaatcaatgcaccccccccacccccaccccttgtttgtgcaaaagtgttggattttaagtcctggaggaggtctggcagggcagcggagctgcctgcctgttgccggagatccacttagggtggggagttaaaatgataacagtgtgagtattttgctgcaatgttaccattgtactcaattcttaaagcaacatgccgagatactcctggcatagcctaaagtgaaaacagaaggattttctctggtcttcctctgataggtgaaagggactttgcctgtaaccaagttgccactggggactaatggcagccagattcctttgggagaggacagtgggtcactcaagtgggaacgccctaggatggagcttagggagtccccatattcgtgtctgagtcctgggcccaccttggttttcacaagtcctgtctgtggagacccttctgtgcccaatctcaccgcagaccggcactggacgtggttggtggtgtggtgcacgtgccctttgaagaatatggagaaattgaatccatccaacagctcttgtttggtctgttgtgtggagctctgcaaagagag

SEQ ID NO: 29424 - DNA, 1034 bp, Homo sapiens
tcatcacccctgctcagcagcccagcagcccagcagccattgccacatcccatttccagggcctcctgcccccatgcccccacgtgcccatggaccgacacaccactcttcctgttggcccaaggtaggcatggagggaatttttcaagtccacttttagtaggtaagtcaaaaccaaacaaaataaccactcgacacctggtccaatgcccttccaaactcactcttttctctgacccttaaacacttgtcctgcatctcccagactccactgtaccttgatcagtaggtccctcttcactgcagtgtcttttttgcagagttcttttagctctttcatgcttttgctatgggcagaggaaagaaagaagggtaaatttgggaatcaggggagatttgtgagttccagtcccttttgtttgaaaacccagtgaatcccagcttactgggtgagagttttcagtggagtcctctgatcacaggggctccagaggaccagggtgggacctctcatgctcctcccctgggccccatctccacttcacatgagccactgcgtgtttacagttagctttcagctggacacagagttccactgctgggtacaaacacctgaaagcctccagttggctccagtctgttcctgatggttaaaaaaccttagtcctgagttggaaatccttgcctaggagtccagggcagcttagtgaccacagccaccggcccatccctgcctccagtgtccctggactccaagaacctttcagagtcattgagggcacatggggggagacctgtgagtccctaggtcaaccctgatgctgccatggagagagccctcctcacctggacactcctgcccacgtcttgtgtagctgacctattgggttgctgcacagagcagagacgatgacgtgcaccgaggagaagttgttgaggcttaggcactcctggagagggaagaatgagctgtgcggttcagagttggagcttggcccactacagcctcagccccctctgctgagatctcccct

SEQ ID NO: 29425 - DNA, 1041 bp, Homo sapiens
gacatcagcagcctgttccaggtggagcccctgccctcccacctctgcatcactatcgccatcaacaacacgctcaccccccaaccctgccaccagggaccatctgtacatgaccgacacctccaagtggggaccatcctgcctccactgcacgcacccaccttcccgccccaccctgtggtcttcctgccagggacagggtggccttcgcagagaggaggccctggatctggggaggcatgtgagctgaggtcaaaagacccatggcaagggcccagcgaaccacaattctcccgccctaggtatcccaagggttactttgtccagaacacagactttgacttcttcagctacgcaggactgctgtggtctctgcttctatacacgacaccccccacctacatcgatgacgtcaccgtcaccaccggcgtgaagcgagacagtggtgagggcttctggtaagatcctccctcagtggggcccagggtggctgtgtttgttctctgtttggaaagctctcccagcatctctaaaccttcataggttcccatccacctatgaagctaaaatccaggctgtctgagccggcgtgggctcccgaaatcacccatgtggtagatctcgcttggagaagaggggtctggcctaacgtcacacagctcagggtggcaatcctgtcccttccccacggtgctgctctcactctagctccccttgctacacattgtgctcaaggaacaggcagcttcgaggggccgggtgcggtggctaacgcctgtcatcccagctctttgtaaggaggacttggtaggaggatcactttaggccaggagtttaagaccagcctgggcaacatagcgagaccatcaccacaaaaaattaaaaaccgtcaggcatggtgatgcatgccagtagtcccagctgctgaggcaggagaatctgttgagcctgggaggtcaagggtgcagtgagctgtgaccacgccactgcactctggtctgggcaacagagggagaccctgtcttttttatttttatttgt

SEQ ID NO: 29426 - DNA, 1076 bp, Homo sapiens
ttctcctgcctcagcctccaaagtagctgagattacaggcacgcgccattgcacctggctaattttttttttttttttttgggggacggagtctcactctgttgccaggctagagtgcagtggcgtgatctcagctcactgcaacctccacctcccaggttcaagcgattctcttgcctcggcctcccaagtagctgggataacagctgggataacaggcatgcgccaccatgccctgctaattttgtatttttagtagaggcatggtttccccatgttcgccaggccggtctctatctcctgacctcaggtgatccaccagcctcagcctcccaaagtgctgggattacagacatgagccactgcgcctgggcctcctatgagtctttaatgccaaggatgcttcctcaggataaaggcttatgtccatttcagtgtcgactgtcagggactcagctgcagactcttttgactcatctgctttttatttgtttttaatttttttgcaagcctttatgctgctttcctgtctttctcctcttcctgagttctcttccccatacctacagcgtggcctccgcacataccaagcttgcaagcttgctgtttgctgcaaagaaacctggactgacaatctctcttctgtcatctgggcagccagactgagtgtccccttctacctgggtgcctgtgtgcatgtcctctaacccctaaccctttgcagcttctgttttttttttttttctttttttcttttgtttttttggagacagagttttgctcttgttgcccaggctggagtacaatggcaagatctcggctcaccacaacctctgcctcccgggttcaagcgattctcttgcctcagcctcccaagtagctggggttataggcatgcgccaccatgcccagcttattttgtatttttattagagacggggtttctccgtgttggtcaggctggtctcaaactccctacctcaggtgatccacccgcctcggcctcccaaagtgctgggattacaggcgtgagccaccatgcccggccagcttctgtttctttatgtataaacagt

SEQ ID NO: 29427 - DNA, 1103 bp, Homo sapiens
ggggcagacagacaggagatggattggaagggccaggtgtgaaggagttgggctgtcacaagatcctaagaagggaaccaccaggccaggcatggtggctcacgcctgtaatcccagcactttgggaggccaaggcaggcagatcacttgagatcagaagtttgagaccagcctggccaacatggtgaatcccggtctctactaaaaatacaaaaattagccaagaatggtggtgggcgcttgtaatcccagctactcgggaggccaaggcaggagaatcacttgaagttggaaggcagaggttgcagtgatccaagatcgtgccactgcactccagcctgggtgaaagagtgaaactccatctcaaaaaaaaaaaaaaaaaaaaaaagggaaccaccataatcaggcttatgttttggatatttgactccattgttagtgtagggcatgcaccagagggagaggaggaagccggaggtcagcagctagtttggaggccagccctgaaaagatcccaggaggtagctctgaagcctgagctgcagagtggcagtgaggactgagagacagagacgctgcccatgcagcctcaggaagtagataagaggggaccggtcgggtgagaataagagcggttatgctgactcccaggttggggcacctggctggagggagtgcgactggagggtagagggaagagctctctttctctttcccagcaaaacctgcccccaatgtcacccagtagctggagtcttgctccttttctgcaatggccccacttcctggttgttgttgctgttgttgttgttgttgtttgagatagagtctcgctttgttgcccacgttggagtgcagtgggctgatctccgctcactgcaatctctgcctcccaggttcaagcgagtctcctgcctcagcctccctagtagctgggattacaggcacccaccaccacacccagctaattgttttgtatttttagtggagaccgggtttcaccatgtgaccaggctggttttgaactcctgacctcaagtgatctgcctgcctcggcctcccaaagtgctaggattataggtgtgagccaccgcacccagccc

SEQ ID NO: 29428 - DNA, 1054 bp, Homo sapiens
catgttgcacagggagcttttgttaagggtccctgtgtggctcagagttccaggaacgggtgtgggccctgataaaaccccagactcatggctcagtgaagttgcacagctggacaagcctggagaccctcaaataacttgcccaggctaccctggcttgcaaagggccattgctcatccaggagtggacggtgcctggcatgcagtgggtgcccagtgttcacctgccacgtccactgtccatgcacttattaccgtcatgctgtcaccatgaccagcgccttaggtgctgtggctggtgccaggcccgtgagagccggggcaggttcgctcagggtccagatttgcctgcattgtcccagagtcctcccacacccgggggagtgggctgtcattgggagccagtaagggggtgttgatttcttttccaaccagtagaggcaggggccatagacttaggtggaaccgctggctctttgctggctcccagggttctgacagctgggtcttctgagccctggggactggctgcctgtggctgagcccttcaagggcattgcgctccttctgcaaatgtcactcccagtctccatgtccaggcccaaagcagccccggggagtcctcagggctcattttcctgcaagggggtgggtgggggtcagctggggcaggccctgtggtgattagaagaggctgcctgcgcccacagaaggtgggtgggctactcagagaaggaggcccctgcaggctggcagggggcctggtggctctggccccagccctggtggttctgtggcatggagctgacaccacagacacctgtgaggttggaccgctggactagcagcacgccctgcccttcctgttggaagcttgtccagtccagagctgtcagggccacaggggctgagcatgcagctccacactccctggagactccgccatcaagggtcagctttgtctggtcttgtggaaactgtttttgcccccagccgtgagaggcacttttacacataactgagtcggagcatgacaggcatgtaggagagaaac

SEQ ID NO: 29429 - DNA, 1143 bp, Homo sapiens
ggctgcccacagtatctaaggccagcttggtcatcaaggcatgctggaaggtcaccccaggtggcacaggtggcttggggtgtgcttctgggtagcagccactatgcagcgctggcctccaagcagaagctactgtttcggacacctaaggtgtccccagcctccttcccctaccccgaggttttctggaatagctgagggggcagtggtgagctgcagggttggggtcctgggggctgcgtgtccacccagcctccagaggaacacatgcaggcccccatcacccgttcctgcccaacctgcttttctgtctcactcctagctctgtggtctcggacaagcatgttaactgctccagggctcagtttccccatctgtaatagggaatgatctttatgctcccacaggatcgtcctgaggctgcagagaggtggtgttgaaaagtgcctagctcagggcctggctcagtgacggttagctgttagggttaccatcgcattgcaattgttactccatggtgaagacaccccggggactctggacttgtttggctccactgaaaggctgcttgggtgaaacaatctcagctctgcatagcgtggcctgtgggttgcactcatgacagtgtggagcctgttcagtcggtaccgagtgtgcgaccttgcctagctggccccggcatttattttgtagctggagccctggtgggatggggtcgggtgggctctgggagtctgggggaacaggtgcaggaacctgcgggtgcccctcccctggggacctctgctttgttagaggtatggctgggggctgaccatctatttgtaggtgttgccagagcagtccccgcctctccttttcagaggacattgttgaggggaccttgccttctgcgtcttggctggctgcttcatctgtggggggctccccctggctgaccaacagccctttctggaccccttgcatcagcgcctccccagtcagcttcactgctgaaggcagggccagcatggccaccagggtcttccccctctgcccgaggtctctgcccgctcagcttccctcaccctggttgtggatggtcagtgcctctgccctgctctgctaaccaggccctgtgcccagttggcactccgtggttac

SEQ ID NO: 29430 - DNA, 1052 bp, Homo sapiens
ctcagcctcctgagtagctgggactgcaggcatgtgccaccacaccctactttgtacttttactttcatatctttgctcttattaaaagccaagtgctatttcatagtacacaggtgcactttacagcatttacttgattgagttttcccaggcttcattactgttacaaggcatgcttgctcgtgtgtctctgcatgtgtataagtgtttttataggaaacattcctagtcaaagagtgtgtccatttaggtttttaaatatattgatgccgggcacagtggctcaccccagtaatcccagcactttgggaggttgaggcaggaggattacttgagtccaggagttcgagaccagcctgggcaacattgggagacccccatctctacaaaaaaattaaaaattagctgggtatgattgcacactcctgtagtctcagctacctgaaagactgaggtgggaaaatctcttgagcccaggaggtcaaggctacattaagccatgatcatggcactgcaacagatctagcctgggcagcagagcgagaccctgtctcaaatacatacatacatacctcctaaaaggctgtaccaattcatacctgcaagcatctatgagaacatacacattcctatatcctctctgatgctggcaattaccagattttggttttttgtgttttctttggtcccaatttggttaaaaattataacaccttttgatttgcacaaccctcatttccggtttattggtatttacttttctgcaaattgcctacacttatccatctttctattgtttttctttctttttttgagacggagtcttgcttgtctcccaggctggagtgcaatggtgcgatcgccatcttggttcactgcaacccttgcctcccggattcaagccattctcctggctaagcctcccaagtagctgggactacaggcatgcgccaccacccccagctaatttttatatttttagtggagacaaggtttcaccctgttggccaggctggtctcgaactcctgacctcaagtgacctgtccacct

SEQ ID NO: 29431 - DNA, 1027 bp, Homo sapiens
ccggttcgcgactctgtttccagcggccgcgcggccggcccgcgtgctccgaggaccggctgaggttgcagcgagaaagttctgagcccgggtgcggggctgcctggccggtggcgctgcccctgtgagccgtggctgtgggtttccaagcggactgacacatgccaggtgccggggcgacccgaatgccccttgtggccgccggggtcccagatggtgtccctccccgggtcggctgcccggaggggggcggggggggtggtgacatggtcccagagcgcgggacagtaggggaggcaggttcgtgcctcagttgtactctccagtggggagagagtaaggccgggcaactttgtctccaacttttggtgtttcccaaggggtggagttgaggtcaggaggactcaggacacttaagcagtttgtgaaacgctacacatgttcttttaatttggagatggccatgtggtttttgaagcaagcctcttgctgcctaaatcattctcttcggatgtgcgtgttttgcttttctggagtatggccagccaagtggcacggcccgcaagtgcctgtgcacgcctgggctcctgttctgtttgtggcagtttagctgggaggatcttgggcccctttgtctgtgcctccttaaggcaaacagctgtctccttgaatatttccagtgtggatggtgcaggggggtggccgtgtagtctgttcccctgggctgcagcctctcttctggaggtgtagggggcagcggggaacaggaggagcttggcctttgtttcaagtcctcctacctctgacccaaacctagagattctgtggacagtttcaccccaaatttgcctctctcaggagcgtgtttacattttggggccttgtcgggagctagcaaaacaaggtgaagacaaaacagcgacagtatctggggagtacaggccagcaccgttcctttttccggaaatgcgtgggtcaaggaggcaaaaggggttttgaggaagctgtttgttttaaagggggagtt

SEQ ID NO: 29432 - DNA, 1073 bp, Homo sapiens
tgtttcttcctctggacaccagctcagcatggaagggatgactgttagcacgttcttgaggtccaaaaactttcagtgaggctgtggtttgacttcatcaggtgaatgcttatgtgtgcccgtgtgcgtgtcggcacatgcacacacacacatctgttcaaataagaggctcagtgttaaacgcagtgttggtcaggctctctcagtgatctgaacatgagatattatgattgtctttcctgagcacatatctttttacatagctctgcaaccttggtttaaaccaaatagctcataaattggcagtgcttggcattggatgtgttcatttattcattcatttagtggattcatttattgagcacctactaggagtcagacactctactaagcattgaggatacaaaactgagcgcatagaaaataactttgtatgtcacacctattgacttgaaatatcatttctgagactttcatacaggaaaactgatttaacaccaatatactcccaaaataacatgtaagcttcatgacatttacttcagaagcattctgtttgcatctctgtactttttatatgcacttatttttcttacatagctgttgaaaaatagtccacaaattatctgtgatctctaaagagacaccatttcttttatatgattattttcatttccttgactttataaaaagactctgcctcaggatagcactttagagtttacaaaggacttttggatgtgtcatttcatttaagtcactcaatagtcccgtactgttcccattttgcagttgactagaaaaatgaggcacagaaaacttggtaacttgctcctggtcatttgactaaaaagaggctgaacttgggatgttttttacctgggaactgcaaatgtttggggacagtgaccttctttcttgtggctgaagcaggcccaggaaaccccatttcagaccaagcctattatgacaggcctggcctactgagtcaagccctcagtggagcttgaggaacactgcacagccattaaagaattatatgatagaatatttaaagacgagaaaagcagttc

SEQ ID NO: 29433 - DNA, 1263 bp, Homo sapiens
aatgagaacgttaaggatgccctttatttttttcctaataatttgacttctaggaatatatcttaaggaaataatgtaactgctgaaaaaaatttatactcaaaacttgatcacaacaagctttatgaaagtgaaaaatcagacaaaacttgaatgcttaaagtaggaggtggcaaattatggcctgtgggccacctgcctacaaatgaagttttatttggctgcttttgagctataatagcagaaccaagtaggtgggacagagaccatatgccctgcaaagccaaaaatatttactgtcttgtcttttgcacagaaagtttactaattactggtctaaggtaggtaaatgattaatttactcatatcacttaaaccttcataaaattttaatcagccgtttaaaatggccaaagatgttttagtggcaggaaatgcgtgttactgttttaagcagaaatatgaaattttatatagtgtggcctcaaaagtataaaaactgcataggcttaaggaaaaaatacccaatattaatagtactagcttggggatgagggattgtatgtgattttttttttcaacgctttgtctagagtaaattgaggttaggcttagtaatctaaaacatagttttttaaaaatcaccaaaaaaggaagaacaccatatcattctaagattgaaagtcattttggctagaagagcagttcttgtttggtttggttttgttttggtgggttcttttggaaccctcagattgaaacgagagatgttttcatttttgagaaaatcatcaggttttaggccctgattgtgaaccagaacaaacgagagattgggtatagcattttgtttaagtcaaatcctttatcgtgagagtcacagtattttgacatttttattataatggaatttatgtgaattctacatcagggctgtggcagatgtgactgtattctagaatatgagttccccaaaggtgtaaaagagaacaggaatcctcaattttattcccagaagggagagagactgagaaaatcagaacgtagagtgtgatgtgagtttgggtggagctgctgccttgcagcctgtgtgggcccaggttcttgcttcatcccagccatagtgggagccagcagcttgggggagcttctgttccatctgcttggctcttagcatgtggttgggacaagctttctgggcctggctaagttttatgaacagatggcacagcaaattcctgatggttaggtcaagaggagaat

SEQ ID NO: 29434 - DNA, 1056 bp, Homo sapiens
actgaaaagggcattattttgaacattaccacacctaacgaaagttacagtaattagtaacagtaattccttaatattacctgatacccagactgtattcaaattttgccttattgtcttggatattacttattctgctcttccttccttccatgcacccatacttccatccttccatttctttttctttttcctaataaggatccaaacagcatccacatattctatttggttattttgtattttaagtccttttaataacagtcctcacccagccactcatctttttccccctcctctatgccattgaattattgaagaaaccaggtcatatgtgtagtagagtgttagaatgtcccacactctagatttggctgatttgttcctcatggtggtgtcatttaatgtctcctatccactgtatttcctttacattagtagtaagatctagagtcttggtgaggttcaagctcagttttctaggtaagaattcttcatgggtggtgtatacatttcctgtgtatcccatactgtctggctgtcctgtgcgttagttaaggctaaggttgattaggagattctgtacattccctcctgtgactgtgctctgacatggatagttggggttaatctgcatccctctggccactccgtatgggggatttgagtaggagtgaaaggctcatgcttctgctaagcatatgcctataatcctagcaacagaaatgcggttctgtgcagtcatcgcatgtgttcctgctgggtgttctcttagggttcagtcatctcaggtaggggttggcaaactttgtaaagggccagaaagtaaatattttaggctttgcaaggcacataaggtttcaatcacatgttcttctttgttgtaacctttaaaaagtataagaaccattcttagcttacaggccataggaaaacgggtaacagactggatttggcttgcaggctttagtatgctgtaagaaatgacttaagagttcaagaatttcagcttcctatctggaatgtgctcctttcccacagaccctgctagaccaa

SEQ ID NO: 29435 - DNA, 1032 bp, Homo sapiens
aggcatagtccccatggcacagtcctgaggatcgcagagcgtggtcaggtttgcagggtcggaggttgctgacctcaccgtggatggagggcttcttcaacacaggttgctgtaccccacttccagagttcccattcagcgtggtctccttgagccctgataatctgcattttgtgtaggttcctaagcgctgttcctgctggtcagagaacccacgttgagagctggggtagtagaggtgcagcagacgaagcacacgggcgctaaaacctgctgtgagatctcaggcaacgacttcacctttctgtgccttggcttcctcagctgtaaaatggaatgacagagcactgtcctcatagattagttgtgaggattaaatgagcgattgggaggcggagatgcgcggatcacctgaggtcaggagttcaagaccagcctatataattgattttaattgaaattccttttggtaattcttaaagataataatacattttgatgtttactcatgaacattactgatattccttcctccagctacatgataatgttttctctcctgtgggtgagatctaagaaatgaaactcggccaggcatggtggctaatgcctgtaatcctagcactttaggaggtctagacctcctcctgaggtcaggagtttgagaccagcctggccaacatggtgaaaccccatttctactaaaaatacaaaaattagccaggcatggtggctcaagcctgtaatcccagctactcaggaggctgaggcaggagaatcacttgaacctgggagatggaggttgcagtgagccgagcttgtgccactgcattccagcctgggtggcagacagagtgagactctgtctcaaaaaaaaaaaaaaaaaaaaaaatggccgggtgcagtggctcacacctgtaatcccagcactttgggaggccaaggcgggcagattacaaggtcaggagttcgagaccatcctggctaacacggtgaaaccccatctctactaaaaaaatacaaaaaattagc

SEQ ID NO: 29436 - DNA, 1050 bp, Homo sapiens
gtacacccaagattttcatttagtagaaagtgtccaatgatttgaagttgtaaaagaaagctttcaggagctcataattaataggaccttctaatgttcaatctggaaagtatcttagagttcatcagcagtttggtggggtactcagtcatagaggaaattcactatgggtgggtgacaggcaggggaatatttcctgaagcccaggcatattacagaataaaacacaaaattgtaggaagttttaggacaagtcattggatgtcaaggatatgtaatgtttaccacctacagccctagaccaatcctggccctcaaggaccttagttcgctcacccctgcttttagtttttcctcagtggagaatgaaaagtcctgatagagtctagttttcctgttacagagggagaaatgaggcccagagagaggttaaggatcctgacctttgttaaacaggaagtttaacaaagtagcactcctagtctagtgctactgtttggcagctatatctcacaattaagtgccatattctacatatacccaagttgtattgcatatgaggattttcagtgacattcattggattaggaagtacttcagcattggctcattgtttattgatcaaatgatctgtgaaagaccaactttgttgtcatttcaataaagctgggcacttagaagctagctgtgtcttatggaaggcttgttgactgcttctgcatccaggagcccagcttaagtgccaggggcctgcagagcaaggggagtagtatgtaaatatttgattttagcccaagccagcatccacaacaggaggatgtttccggggtgagaatattgacaccaagggcagcattatttacataattatcctcttctctattagctacatttatgtcccctgacagcacctagcacagagtaaagggtaaatggtacccacttcatacctgctgaattatattactaaaatatgggtttgtatgtgtgtatacatatacacatacacatacatcctgaattttcacattggtactctgttttaagggg

SEQ ID NO: 29437 - DNA, 1022 bp, Homo sapiens
tattaacactaatccgaatataccttatgctgatactattgtattttttctttgttcaggcactattattggtggagcaagtagtgtctagggatattacacctaacttgataatgatggttttactaagcccttattctggccaggcctctgggcattatacagataattaaaattgaatcataaaaaattttaaacacagtgcactttagcaataagatttttctacttttaaacatgattttaaaacccattttaaaaatgcatttccttggcctggtgaatttgctctcttttttccccaaggattacagaaagtgcatagcaaattcagccttcagaatacccaggagctgaagactcaagtaggctacagctgtcttcacccacagtattctaaaagaactaatgagatgagaagtctgcagctggtggcaagcacaataaaccatgagccaagggcttctcttcatcagagcctcccctttccccatgggatcccaaaggagacagaatactaacaaagccagcaggctgtctcattccacactattgctcatttgcagctataattggtagctgaggttgcattctgtatgctgaaactgtcatacatgaaggaatatatttgttcattgtgatacggatataaattggccagttttcagatacagcaagaccaaactagatacccaatagtgaaaatgtagcaaagaaaatactgttcaaaaaattaggtgtttgttgtggaaatacaaaactgaggttgttaaaaagctacttcctgcttcttaatatcttgcaacttaattcagctgattaaacatttacgtattcttcatattcaaactaacgtaaaacagaaattcctgggtcttgacaagattcattattctcatctttcaaggttaaagtgctattgttaataattgggttttgttacgttttcaatataatatctttaatattttctgctttgtattcaagaggagaaaaagcagagaggggaagacttcatttca

SEQ ID NO: 29438 - DNA, 1033 bp, Homo sapiens
acagtggctcatgcctgcaattccagcattttgagaggctgaggcaggaggattgcttgagttcaggagttcgaggctgcagtgagctatgatcatgccactgtactccagcctgggcaacagagactgtctgaagaaaataaaatttctgagtgttgtttctaaatgagcaaatacctttttggtcagattaaaaagtgttttggttagatcaaattgtagtaagaaccaggagtatccagcataaaacaccacagtgtaagttttaaagttttttaatttctaaagttgtcactgatacacaaccacagtaaaaagtttaggattccttaaatgtcctgatgaaatgcacatgcatatcttcagcacatttccaaaatatacacaaatgagtcagttgacatctgcttctgcttttttttttttttttttttttttttttttttttttttttaggtataaatttgaatctggctctttttaatcatctccagcactttgtctaagtagctttccatgatttatatacaaaagtcacttcccgggagaggaagactctttaaagtgtaagctgaagtatacacacgattaacatcagagagaccttcgtttttggaagtaatttgaaagaaaatgagcatggtttagaaaaaaaaaaagaaattggaaccacatttttagatatttatgtataacaagaaaggattgtatcagccttcctctatagtacatactatgtgactttatttgtataattttcaaggtactttttaagtagaaacaatgtttaatccaaaattttaaggcttacatacctaaaagtgatgcaccttaacatctgagtgttttttacatgttaataataaggaaataatgatataaaagcattaaattgagagatgtagtttaaaaatcgggatccatttaatattgaaatgaatcaaatttaaagagagaatgaaatttttcccctcgtctttcagcatgtttgagtgtaatgcttcagttcatggtgaaatttttcctaaatgag

SEQ ID NO: 29439 - DNA, 1050 bp, Homo sapiens
caggccttgccagggcagtcactcttcgagctgccacttgagcattctcttcctctcctcacactgctgtgccacggaccataccctatgctttcctgttccaacacactacttgttctcacctcctttctgggactcctttctctgtccaaagttgacatgtccttcaggatctaggtaggtcggagcttgcctcctccagggagatttctttcaagttgaaatcagtcttcctctctgctgaatttcagaagcttttgctcatttcattggtgtgttttgttctctttgtttagcaacctgttccctttttacagagtaggcccttcataaatatcggtcagatgaacctgatgagcttgagaataatgatgaaactaaacactatgagccaagagtttgtactggaatacaaaatcaatttgatgtccttttgataacacctgggttggcaagggatgaggaagcaggcactcccatacattgtctgtgggaatgtaaattagtggaactgttgctagtctagcagaattacaagtgtacatagcctgttgacccagcaaaattctgcttctaggaattaactctacccactgtaaagtgacaggtgtataaacctaggatcagaagtctaagtgtttctttatcaatcgggaactgattaaaatcattgtggcacactcatgtgatggagttcagtgcaatcattaaaagggagtgagctctatttgtactgatggagaatccttttcaagacaacctggagggagaaagacaaagaagtatgtataatatgcttccatttgttatattaaaagggagaaaaatagtttgcttagttatgtatggactatcaagaagaatgcataagatgccattaatagtgatttcccttaggacaggaatgggatggaagagttgaggtctgacagagatgtgtgcagtggatcaggggataaactcctctcaccaactgtatggtttctgttgctgcataagagatcactacatatttagtggctgggtaatgtgacctgattagtttgatta

SEQ ID NO: 29440 - DNA, 1135 bp, Homo sapiens
tgtgggggtgggcggtgttgaaggcaggtatgggtggtggcaggagagctaggaccagacccccatttcagggaggaggtgactgtgaaatctagtggtgcagggaccctgggtctgctcttttcttctgcacatccttgtctgtccactttcacaggcattgacagctgcccctacactctaaccctttaatttccgccccattgtttgggccttgactagttagtgttttaggattagcttctgtcccaaacacctggaccacctgaaggtcactacttcttaccagatccaatttggttttctgttaagttaattagttcatttcattctgcccttttaggtaattttgtcactcgaatattctagtctacagtgtagagaaaaggcacaacacctttgctattctaaaacggtaatgtcatagcagtcaatagtactgaatgcctgtgcagtgtgtaccagtgctgtgcatgcagcactgtggtagctgtcgaggatttgtatagcacctacaagagacttacagtcttagcaagagaagcccagtacaatgaagtagttaacaagtggcagaggcttacagcgtggtccaaagtgctgtaggatttcagagaagagaacagatgatctgtaagaatgcaaagctgaaaaggctgaaggaaagactcctgacatgaggatgtgtagagttttgatgagtggaacagtcattacactttttcctcttacactcgttgctctgacacattatacgtttatttcttcatttttctctctcccttccaagtagaaattaaacctgagagggaagagtctttgcaaccttagcccatgtctccccagatcctataacactgtctgaaatgtagtgggtactcagtgaattcctgttaataaatgaatcataggcaagcagaatagaaatgaaggtacaggtgtaccatctgacattgaattggagtagtttttcgagctgaagggaaccttagctacctaggcctccttgcatttagactgtgcttcacataatcctaagagtttcttgccccctcctccctcaggttatcaggatggagcaactagaataaggggctgagttccttcctgttccctctcccagcgcagttgtgct

SEQ ID NO: 29441 - DNA, 1050 bp, Homo sapiens
tgagacaaggtcttgctcttttgcccaggctagagtgcagtggtgtgatctcagcttgctgcaacctctatctcccaggttcaagtgatcctcccacctgagcctcctgaatagttggggctacaggcatgtgccaccatgcctggctagttttatattttttgtagagacagggtttcaccatgttgtccaggctagtctcaaactcctgggctcaagtgatcctcctgcctcagcctctcaaaatgctaggattacaggcatgagccaccatacccagctaaatattcttaatcatttttatttaaaatgtaaaaaattatgtgttcatttctactggattactttaggattgaaataaactagttcatcagacttagaacctggtcacctttgattgccatactctttcaagcagttggatagataccaagaaagaattgatggtgctgttaaatatatccagtatctctcttctcccagcaaagtgcctgcattcgtgaggatgattgctcccgagggctccttggtgtttcatgagaaagcctggaatgcgtacccctactgtagaacaagtaagcttggcccccagcagccattgcacccctccaccctgagaatgagagggattcccagtaccagtgtctttgagaaggtttacactgagcaaggtcttccttgggttcttggatagtcactgctagaatgatggcagaggaagggctgcattgggttcctccccctagaactttgtgacaggcataagttcattcccacatggcagccactttggggtcctagctgactatgctggctccaggggtaagccaaaagaaaggtcgtttacactcagaagggtgttttggtgtgtttcaacagtattttacttaaattgctacataatagaggaggaataggacagacttctgaaacagcatcctatcatttgctaaattgaccttataaataatgttttgcttttgtgacattattattctttttagcattatttttaaaattagattattgttcatattttatttgtactcc

SEQ ID NO: 29442 - DNA, 1048 bp, Homo sapiens
catcagttgttgaacatttgggttgttttcacttttggctgttacaagtaatgctgctgttaacatttgtgcatacttttttgtgtgtgtgtgaacatgttttcagttctcttggagatatatattgctgtgagtgaaattggctgggtcatatgatcactctgtgtttaaccttttgaggaactgtcaatcagcttcccgaaacaactacaccactttataatgttatcagcagtgtatgaaggttccagtttctccacatcctcattatcttttttattacaagcattctagtgtgtgtgaagtggtatctcattgtggttttggttttgatttgcattttcttggtgattaatgatgttaacatcttttcaagtgctttttggtcatttgtatatcttctttgtttgaagaaatatctgttcaaatcttgtacccccactttctttttagttttttttttttttttttttgggagacagggtctcactatgtcatctaggctggactgcagttgcttgatgatagctcactgtagccttgaactcctgggctcaagcaatccccccacctcagcctctcgagtagctgggaccataggtgtgcaccactgtgctctgctaatttttttttttgtagaggtggggggtctccctgtattgcccaggctggtctccaactcctggtgcttaagctatcctcctgcttcagcctcccaaagtactgggattacaggtgtgagccactggccttggctgcccattcttttttttttttttttttgagacagtttcactcttgttgcccaggctagagtgcaatggcgtgatctcggctcaccacaacctccgccttccgggttcaagagcttctcctgcctcaacctcccgagtagctggtattacaggcatgcaccaccacgcctggctaattttgtatttttagtagagacggggtttctccatgttggtcaggctggtctcgaactcctgacctcaggtgatctaccctcctcggcctcctaaagtgctgggattataggcctgag

SEQ ID NO: 29443 - DNA, 1703 bp, Homo sapiens
agaaacagtctttgtgaatattgacaaaatctgaaagttggttactcattgcacgggacatttgaaatgtctggtttccttgaatctcaggtgatacatcatctcatgggataatgagattttgtccatattttgtttgataacttagagtgagtgtttgcccatggtaattctgaacagatctagtacttatgtatttttactgtgtgctggtcactgggttattggaagtgttttaggtgggagtttattcattcctcacagcaactttttatagtgaggaaactgaggtccagaaaggtttaacttaccacatgtctcactgctatttggtagcagagataggacttgaacacagaccaactccagaacctgccctcttaaccactttgctcaactaaccactttgctctacgtctgaatcctgtggaagagttattttccatttcctgaagttaactccttgggagtttagagaaaaattcttccaaaaccacaggtttcaccatctcttactttctctgaagtctttaacgtctaaagtcttcttccaaaataaagctaaacttaacaaggtatttaagattcccaattgtataagtccatccagaacaaaaacccttggctgtaagcaatccagtctctgctgtcttcctaacataaactgttcagcccaccctgagcgtttttttcagccccttatgctggggcctctcataacctgcttggttttctgagtacacctcagaactatcctatgcagaggcattccatggctgattttattcacttcgatccctcttccctaaatccatcatatttgtcatttcgactcattttgatacctagtcatatatttccatatgtgcatgtttgtcttgttgtatcctgttttccactaaagtttgtttctttgataataacttagtagtagatggcagtgaaagaggaaggaatttactgggcagagaattttggagcaagacaaagaaatgtgttgtaactttcagatggtatttcagagaaaagcttgtagctctcctgagacctcactgtacgaacacactgaccagtcctttttgctagtttatttgctcacccttcttgaggaaagtcagctttattatttcttattctgcgtaagtgttacactttcgccatcttcagtcagtcctgattgatggggaatttataaagctttgccaactccagaaccaccttgtttcccaaaggtcgaaacagaagaggtttttattgaaaaatagttattttaaaatttcatgtggttccaaggtaagagttcatttttgtaagcaaaaggagtcatttgccaggaacttaaattatgtttaaaaatgaggaatttaaatcacttgaaaatgaaaggattgattgtaacatacttcttcacattcagagagcatcttgcacatgtaagaaattaataggctgggtgtggtggcttgcctggaatcccagcactttgggaggccaaggcgggtggattatttgaagtcaggagttcgaaaccagcctggccaacatggtgaaaccccgtctctactaaaaatacaaaaaatttagcggaatgtggtggcaggcacctgtaatcccagctacttgggaggctgaggcaggaggattgcttgaacctgggaggtggaggttgcagtgagccaagataatgattgtactccagcctg

SEQ ID NO: 29444 - DNA, 1037 bp, Homo sapiens
ggtggctcaggcctataatcccagaacttgggaggctgaggtgggagtattgcttgagctcaggagtttgagaccagtcggggcaatatagtgggacctcatctccacaaaaagaagaaacaagccaaaaaaaaaaaaaaaaaaaaaagtactaccagtatttatctaagggcagaagaccagtaatggcttttaagagtccattttgtcattgtctccctagttaattacaggtgggggatcttttgcctctattctcttcatattgaaatgaatcatactcatgttttgtggaactccttaaagttgtagctgtcatgatcagattttttttatatttcctcagcttaactctgctacttgatttacagtgacccataacctactcatccttggtttatagtgacacataatcttatctctttatagaaccttaaattttatcattattttcgcttagaatacagcatttctttgcttctgttgctggtttgacttaagaaataaggcagtaactctgatcaatcaattatccataaggaaggtcttttcatggtttctattaatttgttagtaccctaagtatatctgaaaaatatgtctattgagagaagattttggcattccagatggtatagtctatatatatttaaagttttgaatttgcttatatatactcagctttctttttctagcatttttgcatttacctgttaattgaagtataccccaccacatataaaagttcctcttaaagacactggactcttcctgggggttctaaaataagccaaaaagtttgatgtataaaattttttattggcctctgatgttctgtttagatcactatcctataagtaaataaatttgaaatagattcaaaatgtcctctggttgaaatctaagagttggaatgttgaggaagtgtttgatacattcttgcatggaaaagaacagtttgaaataatgtgtaatacataatacattacatgtgttttgaaaaaaatcagaaaaaaaaaaagcctaaaagaggtaca

SEQ ID NO: 29445 - DNA, 1034 bp, Homo sapiens
tcacctaaagaggtaagcggtgttcacatttgacgccttgtaactacctggcttacttatgatgcatgtaactagctaacttaactagtagatgtgaagtacatttttaatttcagtttgataatatattgcattttaattctttggcagaacctcctcctttatttgtaaattagaaaaggattatatctgcttataacaaaaattcagataaaaacttagtccctgctccttgccatcaaatatttgtaacacagagagaaacactagaagcagcttagagtttatctttctagatcattttctgtatatattcaaaggaatttttaaaacatagcgatgtattacttgtatcaattttagttttctacaacaaatggaccatatgaatggttttgcagtttgctttatttctgatgaacatcttccatattgttatttaatatctgtgtgattctttttaaagctaagtaaaatttcttctggacatagtatagtttacttaaccattccctacgttgtaagtccatttaggtattttagaattttctagtttttgtctgttataaataatgtttctggccaggtgtggtggctcacatctgtaatctcagcactttgggagacagaggcaggaggattgcttaagcctaggagttcgacaccagcctgggcaacacaaggagaccccatctctagtacaacaacaacaacagcaaaaaaattggccaggcgcggtggctcacgcttgtaatcccagcactttgggaggctgaggcgggcagattacgaggtcaagagatcgagaccaccctggtcagcatggtgaaaccctgtctctactaaaaatacaaaaattagcctgggtgtggtggcgcacgcctatagtcccagctacttgggaggctgaggcagcaggatcttttgaaccgaggaggtggaggttgcagtgagccgagatcacaccactgcactccagcctggtgacagagcgagactccgtctcaaaaaaaaaaaaaaaaaaagaaattagt

SEQ ID NO: 29446 - DNA, 1066 bp, Homo sapiens
tgtgagcagtgcgctggcttcctcctgcctcaggaatagagcccttcatcctccctgaagggaagattcatgagcagcgagggaagattcacgagcccagcccagctggcatttgtcatcattccagagacatgagccacgcccctgacccctctgccccttggctgctcttcgcagaccctctgtggcctcacctctctctgcatgcatgctgggccctctccttttcccgccaccacacagactgtgtgctttggagaaaatgaaaatgttcccgaagtaggttaataaacatcatctgaagaataaaccaataaagacagagtgaggtgagaagatcctctgctgagagctaggctgtcagtccaactgggtcccggcagccatgggacagactgtgagaaaagtgagccagtgccacctgctggagccccggggtggtgcagctgtgaagcccggagccgcagcccccaggaggggccacccaccatcacaccacctttagggacacagcggctgggagggcacagcaaaagcccctatcctgccaagtgggaggcctgatgccctaccagcctggtggctttgtgcaggtctcttgctctctctggtccttggttcctcatctgaagaggaggagtaacctcacaggccctgagccggtgaggccgccgtggcaggcctggctgtgccggcagaggggtgcatgtgtgttctactctgggctgtcttcattcctaaatgggcagcatggcccctgccacggctcacgctcctgccatgtgggaagcatgtttccacccctttcaaagctcccattctagcaagcgaaaagcactgttctctagagcccagagagctgaggcaaagagaagtcagccagggcgaaaggcctgtggagatcagagcaatactatatacactctaaagtgctgccttgaggagcccccggccctctgtggccgttcttctacaaagcagtgaaggactagattgtcgtgacagtgtaggaaggtggacggcagagagcaggtcatccctcacactccagtgcacacctgttagc

SEQ ID NO: 29447 - DNA, 1011 bp, Homo sapiens
tctgttaggttggagtagtagtgagatggctgcatctaagatcacgcactcatccagatagcgagcatgtgagtggtgactgcagaggacattgtgctagacagaggggagcaaggataaggacatccagactcctatccagaggtgctcacaagagttgaagagatgtgactgaatttgcaccatagcgttctagaatgttagggtgttttactgtacttttaaaatgattaaagacaatgtaaaggattaattctctaatttcctggttataaaaagtaaaacctgtgttgatattgtgatttgcaattttcaaagtacttattatagctcagtgaatttgatccttaaaataaccctgtgaggtagaaactatcctctttatagagaggaagaaattgagtctctgaatcttgccaaaagtcacacagccaattagtggcagagttaggaacacattctcttagcgctctccgggtctatgtctcttagtcttagaattctgtacttgatcttagccaaaaggccgagaagcaagtagtcttagaattctgaagtttggataaatttaaaatttgatactgagtttccagcatgtaaatatcagagtcatcttagacagtgtggcatgagggggaaaaaaaaggaaaatatcagagtcagaaaagtctgatggcctcactgatggaggagcctgttagagcatcaggacaatgtctccgttaggaatggcaattgtctggtcctcagaatgtctatgtgagtgggcatggctccttgaggagcttgcccagtgatgatctgagcctgggacactgaaccatctgcaaagagctatcgcccttcagagagtgtggcgctctcttcccctcaggctcgtccatttccgggatgccttcaccatacctgttctcactcccatccttactcaccatgaggcacgagggtggtgaattgtggttgcctgatgacaagaggagaggctttttgttttaataaaaatcagcactt

SEQ ID NO: 29448 - DNA, 1050 bp, Homo sapiens
agagcacgattgctacattgctcaagctgttactgagaatgaattctgacaaaagaagagaatttgggtaattataaaaacacaaaataggtctgtgtgacagtattctgctcatgggtatcaggaagaagaacagatctcttcccaacccttccccctcccacagacatggttactcctctattctaggcggaattgttgagtattcgatttgtgacttagaactcggaatatttgctatgtgaaagacatacatgatctggtgagccaacacttactgggcacttactttgcctgaataaagcagatgtctgccttcacgatgtaccttggaggcattactttttaaaaaagttttaccttcccagggagaatgtctagtaagaatagtgaatgttaagtctcacataaacccagatgaaacgagatgttcataatctgtttctttttcttgaaatgcatttttattaggtatgtcttccatcagtttcagaaaaatctggaagtagagcctacattaaatgcaaaattatttaaatgaccaaaaattatagttacttaagaagtactgaagagactcttttggtgtaataaatgaatcccttgtgcctgtgttgatgtggcttttcttggtgagtcagaagaggtttcgtggttgtggaattaactgtttgatgtgggaggtttgttttggtattaaatggtcctttatatggcaaaaataatctaaccaaattcttggacttgtcgtgaaaagagtcctgtgtattcttatgtcagagttgataggaaggagagattgtgagtgtgaaaaagagcacactgctacagttgtaaagggttccttcagtttctaggagacagctactcttttcccttagtagaaatattaatgagtgatctccacaatcaatttgaacctttattctataatcataccacccagatcatgaaagaattatgacataatgcagtgtatatatgtatccgctttcttactgttccctttcagtgagacgtaatgaaaaatgcatgcattttagggtcttt

SEQ ID NO: 29449 - DNA, 1192 bp, Homo sapiens
attttctccctcctttacatggtcctttgccctatagctaaatgagagtctgattagcaggctaactaaataatatattaacctttttggatcttcatccaagaagtttacaaagcatgactaaaatgaagtcttttgtgcaggtttgaagaaccctaatatttatgacttttagacaagaaaatcactaggatatcacactgtttcttcttttaagtacatgaacttaatagtctattctctgtatttaacatctagtcttaggaaactaatgcagttccacttttctagatattcaaataacagcttccattgagaatatatgaaaaggcctttgtgatccctccagcacacatttgaagtggcttagaagtcacaataataatgataaaggaatgacacttattgaatgcctccagtatgtgaacactatacttggtgtagcttcttatgcagcgattcattgtttaatttaataattcagaaagatagggcttattattcctgtttagaaatcaaaaacccaaagaacagagaggttaacttgtcaaagatctcatagtaagtgtgtggcagagctggggtgtgggcctagagctgtcagaatcaaaagtcagtgctcttttatgttacaccacctctcaaaagaaaatgtctaaaattatggagaaaagagataaagctgtagcatttctaagtgagtaggacaatgtgacattgtaactggaaattgagcatttctctttacccacagcttattttcatcctcgttcactcatccctatttcataacggctgtacttaagcacacatacagacctaatgcaaggtggaaacgtggctgctcatacactgccacctgaagtctcccctcttttccagcatgaaatccacaagagacacaagtgtttaagactcttcagcataattagtaatttcatggtaacttcaaaaagtagcttttttactgagaaccagtttctgcatgttgttcccgaccgaaattcttcttaaggctgtctctgacacagcagaaaatacatttgttgaattagatgaaagctggaatgcaacttttggttcatattgctgactaagcctgttctcaacttgactttcaaatagctttgttagctcctgaatacaggctctcagttttcaacagatttctgaaagtggtcctttatgccat

SEQ ID NO: 29450 - DNA, 1047 bp, Homo sapiens
accaggagtcctcatcatttagacatttaattttctttgaatgaaagcatagatacatggctgtgtttctctagtgttccctgtagtgtctaacatttatgagtatttaatacatttttatcataattaatatcccaaatggattgggattttctctgggggatggtataactggaggcttaggaatctgtggcaaagattaagtgtttttttaatgaattactgtttggctgtgtgtgagggcatcctgatttacttaatcattatgttccttgtgtggcagggtagtctttcacggagtgatgagagtcaggctactgtttatggtattggacacatggtgtggaaagagcataggcctcagagttagatggagctggatttgaattacagttccagtgcaatatggaaaatgtggacagtttcacttttcttgcaggattaatatgagaatagaactactgcatgtaaaggaccaggcaggacagtctcctgataaagatagctattactattaccgtttagacagagatattgaatccatgtgaccactaaaataagcaggttgccctactctctgtgtcagtgatggtttgcatattggctgatatcctatcacagtgtattaattcctaatagttgttgagttcagttctaagtgcctagaagagaagagagtgggatgtctttctctggggaagcttgcggtttaatccgggatacatagggataaactatttgctgaagtctatgcaacagacacatgctttggcattcagaagagagagagtgcccctatgggaaggggaagtcaggatggattttatgaaaaggtttacacttgagaggaatcatgaagaatgggtgaagttttgacaggcagaggtaggtataaggagtgggatcaaggtattaacaataaggcaatgaataaacatattttcttttgcttttttgtgttttcgtttttaacataacaataacataatcaaatgacctttggaaggcacaacatcagtctccttgtgatgagtgaggcagagataa

SEQ ID NO: 29451 - DNA, 1034 bp, Homo sapiens
tggcaaacatactcttaacgtgggccccatgattcctgcctttcttcatgcccttgtgtgatccgtttcccttgagtatggatggatcctgtgacttgcttctaaccaatagaacatggcaaaagtgacagaatgtacattattttgtgtatatgattatgtaagattgtagccctcattttgctggagtctctctctcccttgctggctatgaggtagcaagtagctatattggggaaccccatgtggcaaagaacttcaggtggctttgaggagctgagggcagtctcccctgacagccagcaaaaaactgaagctctcagttctacaattgcaaggaactgaatgctgtcaacaactgcacaagcagggaagcagatcctccccaaattaagcctccacatgagaaccaggtctagctgacaccatgattgcagccttgcagaggacccagtgaagctatgcctggactccttactcacagaactgtgagataataaatgggtgttattttaagctactgaaactgtggaaatattgttactcagcaatagataactaatacaatgtctcagtggagcaaaacaacatacagcaattagaatatctgttctggctaaatgcttagcatctggtaattagatgtgtaattgtgctttatcaaacaatttttctctctcctactaacattcctaaggaaatgggaaattgctattttctacatggaattggttcatcaccttaattgtcttattcctgaaacaggtgtcctagataaaggacaccagatgggatccagcagctgcagtaggaaaactctggaatcacagagactctgttgagtgtaaccttgtgtgtaatagaggacaaagaaaaaataaaagaactcttaaagattttcttgagagtgttcaaaaggtgtcagtggtgtctaaagtatagtgataaatggttcaggatgaatgtttgtcatcccttttgaaactgagacacttcacaaaggtttactggcagaaaatacaaacattttctaa

SEQ ID NO: 29452 - DNA, 1094 bp, Homo sapiens
attgtgggggtctgttctgtgcatcgtaggatgattagcggcatcactgacctctgcccactagttgccagtagcaactctcctaccacaagtcgtgacaactaaacatgtctccagacattcccagatgtccctggagggaggaaattgccctagctgagaatcattgctatagaggatgaaaagaaataacatataaagtgttttataaactgttagtctgtacaaatattagtcagtctcgtgggattttcccgccaaaatccaaagcccgtgtagaagggaaggtttaatatcaggcttttgtgagtttttatttctttataatgtcaggttttataactttcttgtgaactttactatattaatttagaaagccatttcttttcattttccatttttgagatatagtggaaaaatgtttattcatgtaggtaccatgtacacattaaatcttgaacctagccacttgtgtaattgtgcttgttttctataaaataccttctgttactgaacagtgagaccttttcagagaaatctctttgggaagttcaggctataatcattcaggatgttccactgctgtggccaactgtggggatgcaaaaacagatcaaatctagttcagataattaagttctaaaacacagatgtttgaagctcatcaaaatagattatagaagctgaaatcattatagtagcttcctgtaaacgtttaacaatgaatagtagaagtaaatattttctcaatttcaatttcttcttttgaagaagaaaccaaggtatcctttccagagggactttgctggcttcacccaatgtggagtaaaagtttctttttcacatcctttgcttcttatgctactgtataaattcttctctgaaaggaaggagcctattgcagtaagcacattggtatgttctcagtgagtatttgtgggatggaaagaaggaaggaccaaagagcaagcagacaagccaggatgctgcacaacatgctggctctggccgcccctctccatggaacacaactgttgtgttcagtgtcatgctgagagcgtctggacagaagggcctttcagttcctggatatt

SEQ ID NO: 29453 - DNA, 1072 bp, Homo sapiens
gagcagttccctgctgtgatctacagacatgagccactcttgtattaggtttatcttgtgactgtaggaggaattagaagagttaaagatgcaaattatatattttgacctcttcagggatttggacttaaaatttaaaaataggactccaggctcaatcccctgccttgtgtttaaaaacaaaaacaaaacaaaacaaaacaaaaaacaaacaaaccttagtctcagatgttctgattttctctttgtgtttctgtgtattaaagaacttatccgtgtattcagtccatgtattaaagcatttatcccatgtgttaaagcatttgtttacatatctatctcctgctgtagactgttggttcttcaagtgcagagactatgtttaatttatctatgtattcccaccttccagcttctctttctagcacagtacctatacgtgctagatatgtagtcagtagttgtggcatgaacagattgttgaaagaaaagaaaagattgttgaaagatactgactttagaacatacctaaataagtacttggggataacttgggcatcacccaagttatatactagtatttattataattcatacccataaaacacttgatacatttttcatcagtacaggcttcccacataggtgcacacatctctcttaaacattttgccaaaacctcacacacagaattgagtaatgaggttagacttcctattaggtcatttctcttggctgaggaggattaaaatcctggaattggaatgaatgagaactaatagtttacaattatataaaatttttctgcccatacagaaaaaattttggttcaactcacacttgacttaatgttcagacccttcccagctgctactataggatatacgtctaagggaaaatatcctatttctctcgaacctcccccagtctctctctgtattctaaaacatctgtgtaattcagggaaggcacctggatgaatctggcatggcatgtaaaggaaatgtggaggaacctcttttgaagaatctcctctgatgtccaggagaataaaagggttgttttcttttct

SEQ ID NO: 29454 - DNA, 1019 bp, Homo sapiens
attaacattccacacattagattgtggtacgtggctcaaaaaggttaaataaatcgcttaaggtcacagattaattactaatcatatgccaccctatatttgtgaatcactttacacttcagttagtaattcatacatatcctatttttgtttctcctaacagtgatagagccaggtatagactccagttctcacatttccagttttgtagctgtacttctgaacctggtgttggcaaacttcttctgtaaagggccagatgataaatactttaggtttttcaggcccagtggacacaactaaccaactttgccattgtagtatgaaaacagccatagataataaataaatagctacagctgtgttctaataaaactttatttacaaaaataggggtgagtatgatttggctgactcctgctctaaaccactaacttccaaactgctccttacaaaaggccttttatcgttcccatctgtgtctcctttcagtctcccatgttttgaaagttggactttgaaacaaactcaatattgaatgataatgagtgcatactcccatgtttaattaattagaggcataaataaatgataaccaaaaccagtcatagccatctttcttaaaagctgtgatcattgagtcagaagtagctttgtgatacccagagttcaatttcttattaagggcatagccacctagctgatgacttgaaaattatataactctcggctactttaccacttctttctttagcttctgtagtgccaaccacagaaaggggccttccttgccatcaggttgtgagatgaattctctgatgtctgcatctctaggcttgcatctcagccactgtttccagtcacttaagggtttgtttgtcagtcagataactagaatatagttggcccactatatccatgggttctgcatctgtggattcaaccaactgctgtttgcagatatttgagggaaaaataaatggttgtgtctatactaaatatgtacagacttttttcct

SEQ ID NO: 29455 - DNA, 1031 bp, Homo sapiens
ataaattctttatattgcttaatgataccatcatttacctggtcactcagataggaaacctgccctttgatcctggactcctcttctgcagtccctcttctactcagatactaggacttggtgttacctccttaatattttaaatatcacacctagctcctccctatgtggagtaatcttctacctgttcctaccacaatacacagttaagtcatcatttttcatttaacaagtatatattggatactatgtgccaggtactgtgtggttggtgctgaggttacagttgtgactaagacagcaaagttcctgaccccatggagctttaatctgcatgtaggagagagcaaacaaataaatgtgtaatgtataatatgatgttagaaaataagctagtgcattgcagtaacatttcattgtcacctagtggtgatttaggcaatttgcagtctttgtttattggaatgtgaataaaatctctcttgaagattccatctataattaaagttaaataccagaactataactatttatctgagttttatatgtgcaaaaaataaatttacttcaattgatttggaagtctgaacaattgttttcattacattgttgaaatatattccttaaagaatttgattgcatatattgttttatatgattgctttttatttaagctatatttagaaaatgtcccagaagtggaaatatgtagtcaatatatactccccctcaagagtatttataattttcttttcatataatattttgttttcagtccattctctgaaatatctgtgtaacctttctataggtatctttaaaatgatttgagtgtttcaggaaaaaaacaaactatagctactgagttgagtgaatactggagtacttaaatcccatctcagtatttgacaggaaggatgtatatttgggtgtttttttacccattttatgctgttcttttgggcctgctacatttggtaatgaatcagtcaacatgtttctaaaaccagcagctgaaccatgtaattaat

SEQ ID NO: 29456 - DNA, 1047 bp, Homo sapiens
actgtgaatagtgctgcagtaaacatgggagtacaggtatctctttgatatgtcgatttcctttcttttggatatatacccaatagtgggattactggatcatatggtatttctatttttggttttttgaggaatttccatactctgccccaaagtagctgtacttacttacattcccaccaacagtgtacaaaggttcctcattctctacatcctcaccagcatccgttattgcctgtctttttaatacaagtcattttcttgtattttatttcttatattatttttagagacagggtctcactccatcacccaggctagagtatagtggtgtgatcatagctcactgtaacctcaaactcctgagctcagacagttctcccacctcagcctcctgagtagctgagactgtaggcatgtgccactatgcatggctaatttttttgatttttggtagagatggcatcttgctctgttgcccagcctggtcttgaacttctggcctcaagcaatgctcccacttcagcttcccaaaatgctgagattacggcatgggccattatgcccagtcttatgtgtctgtttttttgctttttgttgttgtcattgttttttaccagtaccatgctgttttgattactatagctttatactaaattttgaagtcaggtaatgtgatatctccagccttgttctttttaccctgaattgctttggctattcaggttcttttctggttccatctaaattttaggagttttttttctatttctgtgaataatgtcattgacattttgatagagacgcattgaatctttactttctttaactcttacattaatctctttctctttaccatcagcctgtacatatgttcaagtctctcgtattttttttttttttttttgagacggagttttgttcttgttgcccaggctggagtgcaatggcatgatcttggctcactgcaacctctgcctcctgggttcaagcaattctcctgtctcagcctcctgagtatctgggatacaggtacctgccaccaca

SEQ ID NO: 29457 - DNA, 1065 bp, Homo sapiens
atatgtaatagaaagacttttaatcccattcttttctagatggttaaaatagactcctattccattagctaaatagaatggatatagtagtatcttggagttagttcaaaatgtgtcccctttaatgcaaaatgttatagtacaaaattacaactgctactggttttctacttcttccacttctgcttcataaaaagtgaattgtttagaggcatgtttatgtcctgtgatattatgctttaggacatgtgattgccctgaacaaagcacaagctccactagttcctaataaattattacatctttcacatctgttcccgtcttttctctgaagtgttcatccaagagagcacagcatcaactgaaaatataagaattgtgggaagacattttcctgataaatgcatagacagttgacttgttgtgattagaggaatatcgcaggagcagagggttggagctgaaaactgactttctgcctctactgccagtgtctccttttgtccttttcctcctctccttgcaatttcctctgagagaaatcatgtgaccatgtcaccatagtttttaatgccaaatatctaagtgtctttaaaatgcagcacaacacttttaaaggcaaatagtgaagtagtttcaactgacatttccattatagctgttcttagtggattctaaacatcatacataaatgtggctagccaattctttttaaaaaaaatacaaaccattgagctgtcttttcatatttaatgcttcatccattgaacatgcaacacattttttcatagaaacatacattgatctgaggttatctacaatagtccatactagatttttctagcatttatattttagaaataaagccatttctcatagttttgtaacatacccgagcatttctgggctaacatcagttactctgttatctctagtactctataagtccaaactgaagaaaaatgttaaactgccaccattattgcaattactgtcaaattgttgttttacttagaagtgaaaattgtgttctaatattgtgtatacactatttggtttttcatc

SEQ ID NO: 29458 - DNA, 1047 bp, Homo sapiens
aggtgaatcataatcattatcaatttgacacctgtgggtttgcatgaacagttactgaccaaaagaaaagactatttttgactttgtgagaaaattgagccttctggatttcctttaggatgtagctacaggaaattaattagatgatttttgatgacatcatcctgaccacagcactttctctgaaaacagtgctatttttcttggacctttttgcagacattttctacactatgtgctttattatataatttgcaataatgctaacgtgaaatccatgcaaaggcttgtggtgtgtgtgtgtgtgtgtgtgtgtaagagagaaagaatgtagttgaggtaattattttacttctaatagtacaggagagtgggttaaaaggtaaaaagcattacattttagcagagaaacaaatcctcttagggagtattaagttcatgaggggaaggcttggcaacttttctggggtgtgtatcttacaggcttttgggaaacaaataggattgctaaacagtaactctcaaatcactgaagagtgtaggacttggaaatgcttgcgaagaatggagacaggacatcaatttcttgattgtgttctttgtactttgtattataaatcggctgagtctgactttttgggcctgtagtgagttataaaaagctctttttcttctgctgataaaataattaccacctcaaaagaaattgtacacccagggaatatatgtatatatatgtataatgtatgataatgtttgcaaatcattctgccctcagctgtttcatcttttccaactgtaattttcaaagttctactttatcatcactccatctattatatttttcattcttctctttcagtcataacattttgtagtctcttcatatgtagagtagaagcaacttgagaataggaattaggagatctaaattcaaatcctggttttgccgctagaggccttctatcatggacagacctcttgtggaagctctttgggctgctagttcatcacctgtaaaacaggaagaccagattatatgattgt

SEQ ID NO: 29459 - DNA, 1018 bp, Homo sapiens
aagacagaggtcttgctacattgctcaggctgtagtgcggtggctattcacaagtgtgatcatagtgcacggtggccttaaactcctggcctcaggcagtcctcctgcctcagccccctgagtggctgggactacagacacacgaatgcatagcttaataggttgtcttttctactgttgctctcagatgcttaataggggaggtggtatcttctccacaggatttttttattctgactaaccttctgtctactttaatggcttcaaaattaattttaattgcccacagaggccttcctatgagttaatatgaattgtcagaagagtacataaattacataggattagagatagtgttctctattcaggaaatctgatatacaaatatgctggtaactccaaagtattttttatcagtctgatttgtctcttgagcttcatactctctacccacctgcctcctggatacataccttcaactctgttgactgagccctcaatctgtgcctatttctgcattcaccattgtcctgttgcccaaaccacctcctcccctcactctcatatttggttagttacttgattctcttcttctgtattagaaatctctttcctgcctcctcccatctcttttacctagactgttgcagtaccctcctctaagaacttttcagagcttttaatagatattcttatgcaagtggaggagaaaggatgtatactacttgggtctgtgagcaaagtctgaagctgctgctgtgagtagataatttctttccaatataggatagtggttgagagagtgaaattagatagtcaacaagcttgggcttgaattttggctctgccatttattaccatgtgacctaaaaattatatagctttttttttttttttgaaacggagtctcgctctgtcgcccaggctgtagtgcagtagcgtgatctcggctcactgcaagctccgccttctgggttcaagccactctcctgcctcagtctcccgagtagctgggact

SEQ ID NO: 29460 - DNA, 1043 bp, Homo sapiens
gggattatttctattttgtgtaagaggaaactgaggtccagagaggttgtgacttgcctaaagtcacagtaaggtatagaaactgagatgggaactcaagcctcttggctcctttccagtgctctttttctgtaacttcagtctgagagagtttgctctttgctttctctgcagtattctttagtaccattcaggcagatggatgggcatttgttcagtcgtggtaatggacatggattatgttcccatctgtttggttgaaaatcagtgactatactgagcaatgtccatttaaaatattaaattgcatcaaaacttatgacatttaaagtgcttttacaatttagttaagataacaatttcatctgtttctatgtaattacaggggttttgaatcatttcaatttagcaggctgaaaaaatatgacctctggctacatggccttttcattttatgggtgtgtacatgtctgtgtgtgtgtgtgcgtgcacatgcatgtgtgtgtaactgatgaacttgggaaggtttcattaccttctgctctgcttttccaaaggccctaattgtctctactgcaacccccaagccttctcctcctgtctgctgacagcagtcaggatttccatgtgacacagagcagcagattattgattttgttttttgtcagggcactgtgtgtgtcatttgaggtggtcttgtgggcatttagttcatcagtgattatgcacaggacccactttagcttgagctaggaaggaaatgtcaaacaggaaaggactgggacgattcttttaagagtgagcatcagggaatttatactagagagaaacactgacctgtcacttctctttcagcatttcactttgatttccagttgacatgtttaaagagcctgacatttcatttctctgtgttcacttgagcagggagtatgggatcagaagccatcgattggttagcagtagtctataactcttaagtagcatttggtcatgaatgaaaggtccgcatgtttgtaaggcagctcccaaacaactggata

SEQ ID NO: 29461 - DNA, 1015 bp, Homo sapiens
tgcaaattggcccatctacatcactatcctggtggacaggtacagtttttccagtccctatttcatgggcagaccttggtaactcttggttttattcaggtggctcattcctaccaagcagcttgcatgaagcctgcagcctgggtacctcttgctgagggggtatcagtgggctacccccaagtggttgaggctaatgactgactctaagtcctcctgcttcctgggagctttattggctccagctcctgcttacctctctgacttttatttcctcattgtttctggcacttaggaatttccgtttcttgaacatgagctccgaaatgtagcctaagattattttcatatattctgctcattctttgtttttagatttggagctgtgcctttccacaatagccctatataccatatttgctgtactgactgcaagcatctgcacttaccgggagatatatatatatatatatatatatgtatatatctctgtctaataggttcttagaattttcgattaatcaggttcttttttcagccctaggatattactttgcacatagttggtattcaataacaagctattaaataagggataagtagatgagatctaaggcattggttttcagttttgaaagtttatagatcattggtgaaaatttaaactttattattgcttaattttgtaattttcttctgccttatttttcttcttaaatgaattctgtgtaacctgttaattaaagtgaactgaattagagggtgggttgtagaggggagaatatctagaaacgaacacacagcagagtattcaaaattgtatcatgaatcagtgatccaaagagggaggtaagtatcaataagccactaaaagatattcttagacagaatcagtgaaaaatccccagggacccttctgaaagaagagagcagtgttatcagctccctgtgtatcaaccatttgtgtctcttcgtgaaattctcctccttatctttaaagcagactttgataaaa

SEQ ID NO: 29462 - DNA, 1058 bp, Homo sapiens
tttattgcagggtatcaaggaagtaggtctcctgatttcaagtgccttattcacagtgttctacccaggatcccagaggaagctgcagacttagttaagtgagcaggattctagcactgtgctctgcctctcttctctgtttgcatttaagcaggccctttttaatctgttttttatactggaattctggttaagattttgtttgaagaaagatcctggctgcttcaagatgatgatgatgataaagacaaaaggaggagagagagagaaagaggagaagagaggagagagggaaagaagagaggtaaatattttggcttagtactcagatgttttagaatgagacctgactgcaagctctatgtcatcttggataaattacttctgggccttgattttctcttctgttaattagagatgtggcagggtggggtggggtagggaaggtttaaagtagattatctcaaagtgtatggtatttttataatgtcatgtatattgcttggaatggagctatctgagctctgtgccctgaccctgccactctcacatccccaggccaaatggtattgtgaagttatctaatcctgacattgataagacatctttcctgtgtctcagaattaatcaaaatgcccagtagggtagcctattgtgatctataaacacagcttctcttgttaccaacatgcacctgcttggcatttggcagatggtgcttggacttaccatgaatcaggttatgtttcttgatatatatccatatacttactacttgttacttgacaccaggtgaatgccactgaatccagaaaggatttttcttttcctccaaatgtgttagatactaagaaaaactgaagcatatacagaggcatttattttctaacttcaataaaatatgtctcatatgaagaacatggattattggatttgggctaagtggattattagattaagttgggtagctgttttccttgacccaatcactaaaccaatttgcttgatcaatttaaaatttgatttgagaggctatcacagacaaaggttgtgtaaat

SEQ ID NO: 29463 - DNA, 1069 bp, Homo sapiens
ttttgtggccttttctttcttcttctattattatttttttattatttaaggaattagagtcttgagtcttgttctgccatccaggctggagtgcagtgccaggatcatagctcactacatcctggaagtcttgggctcaggcgatcctcccgcctcagcctgccgagttgcttagattacaggcatgagccactgctcctggcaccttttttttttaatatgcaacttacattcatgaacagcctggccaacatggcaaaaccccatctctactaaaaaaaatattaaaaaaaaaattagctgagcatggtggtgggagcctgcaatcccagctactcgggaggctgaggcaggagaatcgctcgaacctgctaggcggaggttgcagtgagccgagatcgtgccactgcactccagcctgggtgacagagcgagactccatctcaaacaaacaaacaaacaaacaaaaaacttaatatttgtatatcactttgatgtctgaatctttgtctctattttccaatgaggaaacagagtcagagaagagaagcaatgaactcaaggctaaatagctggtaaatgacagagtcacaactagatcagtgatttgggaactcctgtttaagtgttctttacactacccatattgcttcccagagaactattttatttgtgtctacatttacatactgttcaccaacaatggactttatattttttcaaggcaaggataatgaggaaccctatctttgtatttcacttagtggcgagcattcaatatataggtattatttacatgatatctatgaaaggaaaaacataatttttctgttactgtttacttccccaaattgagggtgattattgagtaattaatacatgtttgtttaagatactgttaaatggcaattctttcttcaaaacatggatgtgcaaatttactcttgagacattgtaattttgaaagcaaatgtcttctctgtaggtaaatttactgcattttcttttcagtataaagctttcctagaatcacatcaaatggaactgctacttgccaatttcaaggaag

SEQ ID NO: 29464 - DNA, 1067 bp, Homo sapiens
gtctcgatctcctgacctcgtgatccgcccgcctcggcctcccaaagtgctgggattacaggcgtgagccaccgcgcccggcctggtgaagccttcttatagaaaatgggactcgagcggggcttagaaagtttggaagattttggcagacttactggagggaaaaagtgtttttggcagaggtggagcaaagaacagaagtaggaaaatgctgaatgtgatcagacatagtgagtagagttgtgggtaaagattgcatatgggctagtgcatggggatatttagtgaaagataaagttggaaagctaggatggagctaaattgtagtattttaaatatcagactaaataatttgattcattccctatatagaggtaagccagttaaaattttgaggcatgaaataacctgatcagaggcatttggaaagtaaaaaattcacaataagtgagtgcctattacttatacttctactattaataaaattatatattttatattattttatttactcctcatgataatcctgaaaagtaggtattataagtgtggagagagtgtatgggaactctctgtaccttctactgaatcttgctgtgaacctaaaactaaaaatgtaaactgtaaaaaagtatattaaaaattaacatctattaaaagtagatattattatctacatttacaagtgaacaaactgaagccttgtaatcctagctacttgggaggctgaggcaggagaattgcttgaacccaggaggtggaggttacagtgagccaagattgcgccattgcactccagcctgggcaaaggagtgagactctgtctcaaagaaaaaaaaaagaaaaaagaaaattgcaaataatttgttcagggtcacatagctggaaatgacagctcaagtaaagcctatacctgtgtaatttttttttttttttttgacggagtttcactcttgttgcccaggctggagtgcaatggcgcaatctcggctcactgcaacctctgcctcctgggttcaggcaattcttctgcctcagcctcccgagtagctgggattacagtcgca

SEQ ID NO: 29465 - DNA, 1074 bp, Homo sapiens
tgtgaaaagaccaaatctacatctgattggtgtacctgaaagtgacggggagaatggaaccaagttggaaaacactctgcaggatatcatccaggagaacttccccagtctagcaaggcaggccaacattcagattcaggaaatacagagaacgccacaaagatactcctcgagaagagcaactccaagacacataattgtcagattcaccaaagttgaaatgaaggaaaaaatgttaaggacagccagggagaaaggtcgggttacccacaaagggaagcccatcagactaacagctgatgtctcggcagaaactctacaagccagaagagagtgggggccaatattcaacattcttaaagaaaagaattttcaacccagaatttcatatccagccaaactaagcttcataagtgaaggagaaataaaatcctttacagacaagcaaatgctgagagattttgtcaccaccaggcctgccctaaaagagctcctgaaggaagcgctaaacatggaaaggaacaactgataccagccgctgcaaaatcatgccaaaatgtagaccatcgaggctaggaagaaactgcatcaactaaccagcaaaataaccagctagcatcataatgacaggatcaaattcacacataacaatattaactttaaatgtaaatggactaaatgctccaattaaaagacacagactggcaaattggataaagagtcaagacccatcagtgtgccgtattcaggaaacccatctcacatgcagagacacacataggctcaaaataaaaggatggaggaagatctaccaagcaaatggaaaacaaaaaaaggcaggggttgtaatcctagtctctgataaaacagactttaaaccagcaaagatcaaaagagacaaagaaggccattacataatggtaaagggatcaattcaacaagaagggctaactatcctaaatatatatgcacccaatacaggagcacccagattcataaagcaagtcctgagcgacctacaaagagacttagactcccacacattaataatgggagactttaacaccccactgt

SEQ ID NO: 29466 - DNA, 1050 bp, Homo sapiens
tatctttcctgacctattagcagaggggagcaatgtggaataatgggaagaacattggataataatgataaataagttttgctaccaaatagctatgtgatcttggacaaaccacttaacctctctgagtttattatttgtctgcattagtcatagttgtgaatatttttcacattcttagggcttctatatgaaatttataaatgcctttcctgattttgcttgctttgatgaaagataagccatagttcatatccaaatggttattagaccttgggtgcatggtgtttaaaaatattgttgctgttatttgaatatattttgtaatgtaaataattaggttgagcagcatatgtcaggggtaaaacagtcctacaaggatgtgtgggctgtttacacaaagtttatataaatacacagtaacaatgagtattggggttgttgctggtttttttttttttgtttgtttggtttttttttttgagacggactcttgctctgtcgcccaggctggagtgctcactgcaagctctgcctcctgggtttatgccattcgcctgcctcagcctcccgagtagctgggactacgggtgcccaccaccactcccatctaatttttgtatttttagtagagttggggttttaccgcgttagccaggatgggctcgatctcctgacctcctgatccgcccacctcggccagttattgctgttttataaggaaaatgttttctagtaccacacttgtctccctggaagggatagaagaaggagggaaggaagtagggaggcagggaagagaaagaaagaagaaaggaagggaggaagattaatttgctctctctttgtaaaaattatatatggcagatatttgtatgtgttaaaaacaaatcctgttgccatatccatgaaaatacatacatatgcatgcatatctctaaattgggttaaaggagcattgtcaggcctggttagacatacagtacaatgtacttttgatctccagatttttaaattgaaactcatgttcctgtctggggatttgaaatt

SEQ ID NO: 29467 - DNA, 1025 bp, Homo sapiens
ggaaggctgttttaaaaattgcctgttgaagatgaatatctggtgaattctcctcttggttgtagatgaggatggcttatcagattgttgtgaggctaggtgaggcaaggcaagggatggagtgctttgaaggataatatatggaccaataatacagtgattttggtaatatgaaacaacaagaattaaaaacttattatctttgaactgatagtatttaagataaatttatcagtttgtgtgattatagaaatttacttttctagttatgttttaggctgataatacaagtttctaggctgggcgtagtggctgacacctgtaatcccagcactttggggggccaaggtgaagtactacttgagcccaggagtttgagaacagcccaggcacctcgtttctactgaaaaaaaactagccaggtatggtggtgcatgcctgtagtcccatctacttgggaggctgagatgggagggaggattacttgagcctgggaggtcaagactgcaacgagctatgactgtgccactgcactccagcctatgtgacagagcaagcctgtctcaaaaaaaaaaaaaaaaaaacagttttagtctcaacttatacaaacattgtacttgatagggctcagaaatgagctgggtagctggagtatacaggcagggatttaaattttacagagataatgcggggttcatggtattaagagtttggcagcaatccccagaagttaagaaatttcaaacaaaggctgacaggagacagttggctggagaatgaaaaagtctggtagagttgaagtatatcatatattaggatcaacaccattgcaatgaatgttcattgccagatcactacagttagaaatgtaaaaaaaaaaaaaaaaggcaaaataactccccaaacaactgttttgatttctgtagtccatgtttaagtttaaaaacacatatatctgaaccagttattgtagtcctgttattttaaattgaagtaacaagaaggatatagaagtgataaactgg

SEQ ID NO: 29468 - DNA, 1019 bp, Homo sapiens
tgttatacgtgaagcagacaaaatgggcatttgcgagacaggatactatcatttacagttaaagagtcatctttgatgggctgccaggtatgttggaagttgaaggcatcgatttaatgtttctcctgaagcacttgggtaagggagctgaaggaaaagcaaaatgagccttcatggagacatcaggctaagggtggtatctgtatagaggacctaaaacagaaggtaacatgaataaatgttagcaaaactttgactttagatcctggcgtcatatttaaacaagggtgcagggcaattgttcattttatgagttgaactgtcactatggaatccacctgcccattctctaagccacatcttcttctggacatcagtattattaatattctgaggaggaaaacggctttattcataacggaatcatctgtgatgaagacaaaatgttttggaccaatcgtttttccatgtgtcagccttgtagatagtcgtgttgggtctctagcgctggttacaatagactattggccaatagcaaagactggtgatcatgttctgtattccctctataagtctggcaagagttggttgaggtaaacttttgtttacttctcctggtttgcttaattaacagattaagcccagtaaggagatacaaaagcacaacatctttagcttttgagattggctacttccgtaggttaaattaccttctggggactgggagattgtatagaagttagataggcctcttgctgatttctgacccaagagtaattagacttataataaaaaagacatcttaaatcttgctggtaagagcatgattggaaatgaaacttttgaaattcgtttctagtttcacagatggagttaaacagaggcatagacttactggagaaaagttgtcaacgctaatgatagcaacagttaccatttactgagtgtgtcctgtgtgcaaagcctacgctgctttacattttaacagtactgtgagagttttagaatgactgtttgag

SEQ ID NO: 29469 - DNA, 1030 bp, Homo sapiens
aaaaaaaaacacttagcactttggcaggctgagatgggcggatcatgaggtcaagagatcgagaccatcctggccaacatggtgaagccccatctctagcaaaaatccaaaaaattagctgggcatggtgctgtgcgcctgtagtcccagctactcgggaggctggggcaggagaattgcttgagcccgggaggcggaggttgcgctgagccaagatcttgccactgcaatgcagtggtgacagagcgagactccatctcaaaaaaaaaaaaaagaaaaagaaaaagcacaaaggttaattttatggcatatgaattatatatacacatatgtatgtttccatatatgttttttatatatgttatatataacatataaacacatataacatatgtatatataatatatattaacgtgtgtacattttttaaagtggtacaaggagcaggtgatggaaatgacagaaacttgttttggcttatttgttttatttaagaagaactttcaaagagttagaatggtctcaggatatgatgctttgctgatggaagttgtgattttctgttaatagacatagtcagctctggattgtagggctactgttgatgggattttggcatcaaataagagattgaattagatgactgctgggttgaatttctttgtctctgaaagatgcacttctctcggctctttaataatatgagtcagtaaacaatagacatgattatgagagtgatctcttttttagttttaagaactgtagtatttaagaattgttatttttcttctcatgattatcactaatttttcacagcaggaaaagggcagagtgaaactcccacattttgaaggtggatattgtataacattacaaggaggacaaggaagcaacgaaaagagtcataaattgcagctggaagcttggaactgattcctctatgctgcagtagctcagaagagattcagccttaagtttagtgaataatgaaacatgatctgaagaaattctatgcaagatatactgttg

SEQ ID NO: 29470 - DNA, 1792 bp, Homo sapiens
ttactcaagatgaacatttagtcatccagccaaaagctttcatctgtcttcttttataattaaaacaaagtctattagttctgtcaatcagcagtcatctggggtgatgacaagggctgtacaaacactggtagcagctgccaagcaatcaaaaatgtaacttttcaaaatcaaacttgctgcataggaaaaaaatcagcctttcatgataagattggtaactcaattgtttaacttccgataaatctgtgaattaataccctgtaatatggatttcaagatcttttccttttatttacaatcatctgtagccctttttcttgagaagcagtgagtcttagtctcattttagagcctctgttgggaaaatagcattctcaggtatctagctatttatgttacttggaagaagtaaaacaaagagaaactatatagtcttgtacttagaatatgattctgagatttttatttaaagtgaaatagtttcttttgtcatgatcagtttgctcataattgagcgctctagtttaattagcatgtagacataccatgcctcaaaggtgtttgttttcttatttagattgtcgataggctgtttagcatcatatgctttcagcaagagttctaaatcagcagtttgttaataatgccctcagtaagaaaatactaaagttctcttttggtatgtaaatttagttcaattaaacaagtatgaatgaaccatctactttgggcaaggaattagggctggaatggatacagatatttacataggagaggttttatttattaaagaggttaacttcttatcagatgatcaatgcaagcaacctagtgtaatacaaggcagaatatgagaagcatattataaagtactgtagaacatggaggagggaacaattcctgcttgaggaatcagagaagacttcttggaaaagatagtatcttaatttgtcatgaaaaatggatagaattttaacaagtagatatggaggaaatattgacagagtgagaaattgcagtttcagagagttatacaggattcttagttatgattccttatgtaataggggttctttggctcttaggttcttcagagtgacagtagattcaacaaaatgttaattcttaaactgtctggtcattataataatctaggcctagggatctttaaaaaatacacatttccagactctgctcctacagagtctgtctcagtaaatcttgagtagggctccagattctgattttaagctctttgattttgttcagccaggtttggaagataaccttctgcatgagttttcattgtttacacaaaaatacctttcttcttctgattttcccacttccaaattcaaagcaaatggacatgtttcagtctatgtttagttatttgatccttgaaatttcagtgttcaagtggtattgatgtttgttgttagctaataataggcacataggtgctcaatatttaataaatatttgttaaatagataaaaatatactaaaaaaatctcaaggttatattggagagtactacacaataaattcctttaagagactctttctctctgtgtgcctctttttttgtctgttctatgtttgactccagtcagtatatgaagctcttttagaaaagccctgcaggttctttgtgacccacactttgagcatcactgattgctaagttcctataccattattaagggcagttagataaagcaagtcatattgctgagaatttatgtaagtttaagcgttttttgtagcatgtatttttgcttcttca

SEQ ID NO: 29471 - DNA, 1035 bp, Homo sapiens
atcaggttaattcatatgagttgagtggtttaaaaaattttggcctttgcagatgtagcattcaagatttaaattgctctagtgatcccaaaatttgtgattttgctgaagcatacactgtaagttgtttaatgagtgaacatagctggctccccagcaacctcatatcaaaccattttataactatgcccacatttggattactgctagtgtaatccaacttctgcctgctgtgcaccacccatcatcctcctctttgtcataatggcctgtgtgctatacagtgactgtcatcaggacttggaagcattgctctgattttgcacaggcaggtaaggttaatgtaactactgtaatgatgcaacttaatggactttagagtttatttgcatgcccagatttattttagtggcattataaattactttagtccagtagtattatagaactatagagggctgaaacggattacttaaaattttatcatactttactgaattttgtggggaaagctatgtgctgtagtatcatttgcaaatttgtttttgttgttgttgttgttttcttttttcttttttctttttttctgatacggagtctcgctctgtcgcccaggctggagtgcagtggtgcaatcttggctcactgcaacctctgcctcctgggttcaagcaatcctcctgcctcagcctcctgagcagctggtattacaggcacgtggcaacacacctggctaatttttatatttttagtagagacggggtttcaccatgttggttaggctggtctcgaactcctgacttcgtgatctgcctgcctcggcctcccaaagtgctgggattatgagtgtgagccacggtgcccagggatttagaattgtccagagatctttaggaatgtcaagaatctacagtagtttttgactgttaatctaaaaacttttacatgacagatacatggtatgtattatctgtatttcttcattaaaaaaccaaactctgctttcactattttaagtgaagaagtaggtgactg

SEQ ID NO: 29472 - DNA, 1032 bp, Homo sapiens
actgttgaagggcagataagtttgaggtggtatgaaaagaatctctaagtgagatgctgcctgtgatagtgtgaactgtagtagaatatctctaggtattgaatgaaagtatggatttttgcttggttacttttttaatggggtactgttattcttttggacctctaatggggaaacaaaaggccatttctgaacttgattagaggggaggtcaaggaaggtcgttgagtctctcagcccttgtcttgccaagtagcttaggtaagaagaggaatactgagggggaaagagcaggatctaagtcttgtcaaaatagactagttagctcttacatggtggatcaccgagtggttcccttattcctagttccttaggaactaggaagtaagaaacttgggaagctgtacagatagatctcttggggttagaatgtaactattttaggaatttagaatggtctaatccaactcctgagcaaaccaactaaactatataaagatagattcagaaaatggactatgtaagcctgactttgtgtgtgtttaaatattgtttagttttgttaaccttggcattttaagtctttttgaaaatgttaccagctgtactgaagataaccaaaggaaggttttgttgttgttttccacccccactaggttgggccattcattgaacaaatatttactaagtgccttttgaattttctttctttcttttttttttttttttttttgacgtggagtctcactctgtcacccaggctggcgtgcagtgttgcgatctcagctcactgcaacttcggcctcctggattcaagtgattctcctgcctcagcctcctgagtagctgggactacagggcacacaccaccaagcctgactaatttttgtatttttagtagagatgggatttcaccatgttggccaggctggtcttgaactcctgacctcaagtgatccatctgcctcaacctctcagagtgctggggttacgggcgtgagccaccgtgctcagccaaaattttgttgaggg

SEQ ID NO: 29473 - DNA, 1035 bp, Homo sapiens
aaagaaaaagaaccttaaggagcatttgattttgcagactagtaagcagagtagcagaaaggtaaactggttcccttgggatcacatagctattcagaagctggctcttgacctgggtactttaagggggagggccgtatccactgggcttctctccttctgcttctttaggagtttgcaatctagggtttggtttgtttataagaaaagtctccatctcaaaagaataaaaaataaataaaagacaagacagttttatagacagtatattttgaagataccgagaaatttatttgctttcagatacattttctataacttatttttctaaaattcctttgtgctgaggctttaaaaatcataggaaaatgcaaatttgatagtaacatttgtgtgctctttgttatctttgctggccagtcatccagcaagatgttgagaaacaggatccatataaccacttgatgtagctggtagggaggattcatgaaacatcaagaccatagtgactgtgtgaactgttctgacaggcccactttggtggggaccctgggtagtcaagaaacaacattaaggggtctgtgttttgaggggacaggagaagaagatagttgagaatgaagatagaggatgttgaccacaaacttcacatactttataatttcaagggaggattagctttaggttactgtagatgatgcaaaggaccaagagaagggaagaaaaattaatgactactatcaataaaggtagaataacttaggtgaaaagtaagtagtttgtcagtttacacaaatacaaaatagatctcattgataagtaaatcataactgcatatgcttgtcattgttctaattatttctgatgctagcgtggttctcaagaaattttaatgaactatataaatgctgtcctattcatagtattcatgaaacaagcaatttagaagaactgggctattatagaaccaatatttccagtaaataactgtaaatgtgggcaaattgtgctaatttgagcagaactcggtgactt

SEQ ID NO: 29474 - DNA, 1028 bp, Homo sapiens
tacaccttctgtatactaagcagcatttttagagaagtcttgtgaaataagcttgaaggcagttgtcaaagctgcatataagcttttttgctggtagatatctctcaatttgaactattaaagaatgaaatttatctatcttatatctggttagtaagccaatggtcattcatgaatgcacccatatttccagcaccatttactttgtgagaggtaatattttagatttacatcatattgggggcctgagacttgtagaagcacagatgttgaggcaagcccgagttacggagcagctgacatttggaataggggcctggtagagttgggagccgggaggtctttgtgggaactgattgtttggacacacactcttccaaaaactcaatgtatataggcttgaacctataaagatggtagaggggagtagggaaggatgaaatccaggagtattagatattttgggagctgtgtttatgaagtagagattttcaggcataagtaagactgttgtttttttgaagagaaaatgtcacagtgagtgatggtggatacatgatcattttggtaggcgttgagtctttactgcttaataattagtttttgtttttgtttttccaacagagggtggaatggagagtagagatggggtttcaccttgttggttaggctggtctcgaactcttgacctcaaatgatccgcctgtctcagccttccaaagtgctgggattacaggcatgagctaccactgccccatacctgcccatttttttaggtgaagttttctaaaatatattacatattttctgccttcttaaacagaaggtactaagcatgatttaactttctcctgattactcagtattattatcacaagcatgaattattctactgctctaacacagtaaacctttaggagcttttaaggaatgtagaattatttatttctatactaaatgatcccagattgatgttttatttcttttaaaataattttatgtcttctttgtatggtttttatttttct

SEQ ID NO: 29475 - DNA, 1028 bp, Homo sapiens
aacgtttctaaatgtgggactggtccctaccctaggacgtcgagggagaaagacagctttcttcaagttgttggccgctgtacatttggctagggctcctttttgccaacttgtctgactgcccctaactgttaggcgaacccagttgttcactgcataacaggcctttttttttttttttttttaaacttcaaatacctcatttggccgtggtttttattgacattcttctgaaggaaaacatagcaaactgaatgtgctgtggtcctctccagccttgacctgtctctgttagccgctgcctggtttttacttgaactagctaaactgactcttttctttgtggcacgatgtgtgatactgtgttttatatcagaactgaaatagaaatcatgtgtgaggtgcatgagaagatattgtgcatttgttttattgctagagaatctaacaaaccctgccttagcatagcctggcgaattgaaaggttttctttgatatctaattgatggcattttgtcctctgaccctgtgtcttttctacttcatcctgaagtcaagaatctcttatatattataatagttctcatcacagagcttctttcagtgagattgattccattcactttggttgagagaactatatattccccacccccacctccaaccccaatacagacagaacgaggaaaactcatagaagaaaccatataattaagcaatttaaacagatgctgcgtattcctaaagtcccccatttcttctatatttgtaattgcatgtttatgagtagttttaagatgtctgcaaactctacattcataaacgtctgctttttctattttacccaatatgcagtaactcatgtggttatgtctgtggaaacccctctgggtactggtattgcttgaaccacggaagtattattcttggcagtcaggtggatttctggactctggaagattctgtttcaagtgttaggattcactctgcagtatttactcactctgtgatgcttaaattgctatacc

SEQ ID NO: 29476 - DNA, 1030 bp, Homo sapiens
agagatggggtttcaccgtgttagccaggatggtctcaatctcctgacctcgtgatccacccacctcggcctcccaaagtgctgggattacaggcgtgagccaccatgcccagcctattttggtaaatatttttatattacctttcagaaaccaattttaaaaaagattaggcctcatattcaggaacatatcttagatgtttttgtctttaccacattctgatttgtttaagaactttaattcaggagagattatctaggaagttgttgaaaagtaggcttagatacatttgggatttttcaaattgacccatttcagagtggtttgtagatataaatttgaaatgaagtacatactaccttcaaggtaaaatatactttcttaagttttgaacttctgtttggatgaatttattactttatctgttttattttatttttgtatctgtagaaatcctcagatgttgctctcatattcatttaaatgtattgtgttattattttggattgtactctaagctttttgaagtcaaactttaaaacagattttcatatcaaattaaggtaaaaacacagcaaacatattttatacctagtaaatccaaataagttgactgagattttagaaaaaataagagttccataaaataagcagcatttcacttagcgttctaagttagaaaataaaatggaaaaaagatacacatttataatatgcaaaaattacttaaaaataattaaataaagaccacgtataattttagataatgaaaatggcaaaacttcatttagagttataaaagggaattgaataaatggacatatattctgcccaagactatttctggacaatacgatgttaattagaatatcaaatcacatttttcttggaagttgacatgattaatttgaaatttatgtggcagaatgaatagataaaaatatgaaagattattttgaaaaaataaagctaatgatagaggggattaatcctaccacacaataaaggataattttaaaaaccaataat

SEQ ID NO: 29477 - DNA, 1028 bp, Homo sapiens
gagaaaattaaacgtctcccttatgttaagccactattactttgaattatttaggacctaaatctaactatgattaatataatcaggataaggcataattttttttttttgagacggagtttcgctcttgttgcccacgctggagtgcagtggcaccatctaggctcactgcaacttccactccctaggttcaagcgattctcctgcttcagcctcgtgagtagctgggattacaggcacacaccaccacgccggcctaatttttgtatttttagtagaaacggggtttcaccttgttggtcaggctggtttcgaactcctaaccttgtgatccgcctgcctcggcctcccaaagtgctaggattacaggagtgagccacggtgcccggcccaggataaggcataattttgtgcctcctataaagttgggaaattgactgtttctggaattcagattttttaaaaattaaaattgaacttctggttctcttctccttatctaggtctaacttattgtactctggctgtttgcctatatgcagaatttatcctgattgtgttttaggaagctagctgaagaaaatatttttctaccaaatgagacaaaccagtttgtaaacctaagttagtaaccagaaaatgtaaatctatgatgttttatagttctgcttgttatatatgatcactggacacacagaggtacagaaatccagtaagaaagtgaagttttgggggagtctataaaaatggaaagcatctggtgtgaagtctgtaaaagaccacaatatcaggtcatttcaagttctttcgtgagttgaaatctggcttaatataaatggctttcaaggagtattgcttccttctgttctggaagaggacattaaagcagtgaagaatgctgcagttcagttagatagatgtaaaaattctgggagcattaacagtggggtaagtatcatcttttccagtattgaaaatgaagtgataacagagggaaaaacttaagagatagtagaaaaagtagagat

SEQ ID NO: 29478 - DNA, 2374 bp, Homo sapiens
gctaaagaatggttacacaagtcagtctttaccattatgctttataaagataatagcaaccatttaactaaagaaatgtcaatgtatttttaaaaagaagagtgatagggaaatcaagaagaaactcatacaaggcggagaattgaaacgtgatagatagatataatgtttgatgtaaattaatagaatgatagatacaaatagatgctcttttgtgtttcttagtttgattagtgtatggtatcttattgaggggcttttattagctattcaggaaaggcagaatctttgaagaaaggtttgtgatattgtatcattcatttatcaatcaatcatacatcatttattaaatgttgaagattcaaagatgctttgagcacagtcactgcactccagagactcaaagatattctctggctttgaatagacctttctttaagagatatatcctaataaaggtcagaacatgaagcattaagtttttaccctcgcaaaagagctgtatctgatactggcctggcaaaagattggaatattatgttaatgttcctagtgttctttctcttgttatacagaaatcacactccactgcttctaaggttcagtggattagaggaaaatcttaaacctaggaagattaattcaaatcatatattaacctatttgatcatttcagagtattatgggataatttgtaattagtgacgagcatttggagttcatgagtaatcctgtttgagtgattgctcccttgttgtgccctttcatgctccctgttgtttccaagtgataaatgatactttagttatttattgttcaggacactctgcattttcttcaccaaataatacaagctcttcctagtttatgttaaacatgcatttttccctcctaggtcttttgtcacagagactgttctaggaaattatatctttatttctgatgattttagctgtaacatttcaacctggattaggtttttattatactgggattttgcttttctgcatcgctaatcaaagtttttaatgacattttgccttttgatgtgaattgaagattgaggtacaaagagttccagcacctaatgacctattccataaaggtactacatggaaggataatggttttttggaaaagagttgttctgcatactgttatgaaaactaaagactggtagacttttaataattattcacaaaagtacaattttccaagcgttgaaagatgaaagtattggtgaacctgctcatttttcattgttgaaaatggactgctttcctcattctgttaaggtctgggattcatgttggtagagtatagtttttgtactgagcgtctaagataggtttgatttgtgaagcatattttggcttctctgttgatcctctaaatctgtaggccttcggctgaaatgtggagaaaatctgtgcttgtcatctccacatttcgagtcatctccacatttcgagtctaaccttctcttagtactcacttctcttgtgttgttcttcacctgctaaaacctcctttttctatattattgccttactgatttttgccttctcagacggctgttttacgttccagtttcttgtaacttccttcttacaaacgtacttttcttggactccaattctttagggcaaaatgtaagtttttcttacattattttgtcaaaaaacgcatgctgattcagtttatgcagttatattagagaattctattattggataaaaataaagttacactttaagacagggcattctacatacaatacctaaagctacaagggtgactcctatggtagaaatttggggcactgttttagaccttggaggcagatgcatttttttttggagactgtgagttatgattcttttcaaattacattgcatagcttcttcttgggcttgcttatatcttagctaagactctggtgggcttaagcaaaatgttgaatttattgtcatgaaacactggtatctcatggaacccaatagcaagatgttcaggctaagctgcatgaaaacgtgaaagaatgaaatagaaagtagttaggaacccagccagccacctcttagtctctgcgtttaaggccacattgtctctatattagtttcctgttgccactgtaataaattaccacatagttaatggcttaaacaatttagatttattcttctaaaattctaggctgagtgtggtggcttatgcctgtaatcccagtgctttgagaggtcgaggcaggaggatcacttgaggcccaggagtttgagactagcttgggcaacatagcaagaccccatctgtaagaaaaagaggaaaagaaaaaaattaactggatgtggtggtacatgcctatagtctcagc

SEQ ID NO: 29479 - DNA, 1005 bp, Homo sapiens
ttctcatctatttacctaatctcattctgtaactttgttgggctttacaatgattgtcatatgaagactttctgcattttgttaatcagaatctagaaaaatttagactattgtaaattataaccaagtatccagacttggtgttttccatactaaagtatatccttttatgtatgttctacaaagaacacagagtcattgtttaaaaaaacacaacttttgagttttactcatattctcttttcagtttatatccccatatgattaattattagcaatggtttccgtattataggcatctctgaaaatggggaaatatctaacagtaagcccagtgttactctgaaatgtagattgtaactgcttttctgtgtaaattaataatgaacaaccaaaatttctgtggtatgtcttctgtcatataaatgacaggaataaaagttcaaaaagaaacatttcattcttttaaaagtatctgtcttgaaatagcttgattttatgttgagttgactttaaatatgtaatgcaatatatcacaaagaatagaataacagaatagcatagtagttaaggcatggggttatggaattagacttgaacttgcatcccatctctgctatttgctggctgtgtgaccttcagggagtcatttaaccttgataatcatcagtttattcatttataaaatgaggatgatcaacctatctggtataataaaccccttaaaaatagggcctcacatacagtcagaggtgattattctttgaaattaatgattttgaaaatagaaaatacacaaattaccttctcttttatcagctgtgaacactttacacagtaaagtgtattttttttctgtatttttttccttcttggtttgcttttctttctacccattctcactgttgtttcatttgataggaaacagtcttagaaagaattagcctgctaatgaaatgccctttcctccttgagcttctggaacctcagcttttgacttggttc

SEQ ID NO: 29480 - DNA, 1090 bp, Homo sapiens
tctccacatcctctccagcacctgttgtttcctgactttttaatgatcgccattctaactgatgtgagatggtatctcattgtggttttgatttgcatttctttgatggccagtgatgatgagcattttttcatgtgttttttggctgcatagatgtcttcttttgagaagtgtctgttcatatccttcgcccacttgttgatggggttgtttgtttttttcttgtaagtttgtttgagtttattgtagattctggatattagccctttgtcagataagtagattgcaaaaattttctcccattctgtaggttgcctgttcactctgatggtggtttcttttgctgtgcagaagctctttagtttaattagatcccatttgtcaattttggcttttgttgccattgcttttggtgttttaaaccaaggcagtgctctctttaagagaaactctctaaaagtatcttttgtcacctaacttcggtaagaagaggaagagagggaaagagatgggatggagagaagcaggtggacaagaaggaatgacaaagttgaagatttcctagattattcctaagcttaaaggcttgatagttttatttccccccaaaaaacttctcaaataaacaaacttcttgaatatcacaaaacttcttgaataaacagcttaaactactgtatgattgacttaggctttaggcaaagaggcatttctagtgatatcagaggaattttttaagtgcatagtatataatggtaatttttatttgacttctatctattgtggaatatcagccattttttctctgactagagaagtattaagttagtggggtaaattgcttagaagacaaccgcaccatttactcaattaataagggagcctaggatctggaaacaatgcctgaggctgttgtcaggcctacacttctttgagaccatcttgtggtcctctattaaagtctagcagtggaattattatataaactttcaactgcattcagttcagcatttatttgtttatcttactatttgaatagtccaaataactgtgtgtggtggcctttagttctatccaccagtatttctgg

SEQ ID NO: 29481 - DNA, 1589 bp, Homo sapiens
tttttcagttttagcagttatctattgatttttagttactgaagtttaagatttaactcatacctcttgtatctaacacctacatatgtatttccgatcccctagccgcccactgtagttttattgtaattttggttagatgagtgcttcttatttctggctgtacattagaatcactagcaaacttgagtgaacaaatctagatacctgagactcaccctcacaaattcagctttatgtgttttggggaggatcctgggtatccgtgtttttaaaaaagttttcaattgcttctaatgtgcagccaggtttgagaaccactgagtaaataataaataaatcagtatttattatgactgtgtaaatgctttgcatagctgagctatgtagtaagtcattacttttcctttcttgctcatattttccccctagtgttaagaaataatttattttgtatttgtttagttttctatatacctttttatacgttcagtaaaagtatgttgaacttctactctgtgttagggatatagctgtgcacaagcagattaaaattctccttgttctcccagagtctaagggggaaagatgtacagtaaactaaaatacttaatatattagatgtcgataagttctgtggagaataataaagcaagaaaggagacacaagaatattggaagtggggagggattacaatttcaaatagggtcattagggaggactttatcaagaagatgatatttaagtaaaggcttgaaggctatgaaagagagattcacgcagatatctgggggtaaaagtgttctcagtgggattcataagtgcaatggcttgaggtgggatcctgcatcatgttcttgagtagacagaggcagtgtgtctggagcaagtgaggaggaggaccaagggttagactgggtaagaccttatgaggctattgtcaagatgttggctttcatttggagctagatgagaagtctttataatcttctaagcggaggagtgactttatctgacttagggtttgaaaagatttctctggcttctgcttggagaatagactggagaaggcaagggcagagtacggagcctgttggtaggctaaggcagaacttacacaagatatgatgatgacctggacaagggtggtaattagcagtggcattggtgaaaagcagtcaagttctgggaaattttttctttagctaccatattaactaattggaaatattttaaaaggtagaaccaacaggattttctgatggattggatgtggtatgtgagagcaaaagaagggtcagtggcgactccaaggtttttggcatgaataattggaggaatgggcttttagctaactaaaatggcaaagactgccaggggagcagatgtttttgagagagatctggagcttggttttggacatgttaagtttaagatatttattagacacctaaggggagaggtcggatatagcaatctggagttcagggagatgacagtgccagagatacgcatttatagattcatataaagtgaataaacacaaatgaatggagtataaatggtaaaggggcccaaggactgaaac

SEQ ID NO: 29482 - DNA, 1034 bp, Homo sapiens
tatttagcaagcactcactaaatgcctattacgttgaaatactgcactaggtgctgagggtacagatttaaaagacattggccatggcttcaaacagctgtctttctaggagagcttacaggtaaacaccacatcattataatacaatagaggaagtgtggaattttatatatatataggtgtgtgtgtacatatacacacatatgtatgtgtatgtatgtatatatgtgtatatgagatgaatgtgtatatatatggctacacaaacagacacacacacacacatagctatataggctagtataggaatacctaggaaaactatataactcaaaattacttgtgattaataattacctgttatatatctcacttttacttgtttttaaaaaatatgcttatgaagacagttactagaaggatatacctgaaagaggttactgaacaatttggtttagatttattacacagatgagagagaaaataatttttttcctttaccatattcatgatcagattactgtagaacataggaaaagaaatgtatgttgttttattgccaggtttatattaaagatcaaagtctgtaaatgtagcaaatataacaaattattgatttacattagtctattgactcaagcgtaattgtgagtgaattggagaagctcatctttcactattgatccattctttagctggtgtatttgttcatgagcccaactccataggaaatacttttttctgaagcatgaattacagtagacctgacacgctttcttgtgagatggactattattattaaactgacaatcgtgagatcagttcttggaatctgtcacaggctgctactgactggagctaatgactacttattaatttttgccagatacttccattatttatcagcatcttgataatctgtaatatgcgttaaagttcttagctaatactattaagattggctaaagacaatattaaatgtgaaatgtccttgctgagaataataatagattaatatttttatgtaacatttt

SEQ ID NO: 29483 - DNA, 2338 bp, Homo sapiens
ttattttgcagacctgtttatgtgattgcttcatagtgtcactggtctatgtacttcagtgtgtttttgtagtggctggtagtggttttcctttccatatttagtgcttccttcaggagctcttgcaaggcaggcctggtggtgacgaattccctcagcatttgcttgtctgaaaagaatcttatttctccttcacttatgaagcttagtttggccaggtatgaaattttgggttggaaattcttttctttaagaatgttgaatactggcccccactctcttctggcttatagggtttacactaacaggtctgctattagtctgataggcttccctttgtaggtgacctggcctttctctttagctgcccttaacattttttctttcattttgacctgtgagaatctgatgattatatgtcttggggttggtcttcttgtggagtattttactgggtttcttgcatttcctgaatttgaatgttggcctgtcttgctaggttggggaagttctcctggatgatattttgaagtatgttttccaacttggttccattctccctgtctctttcaggaaccccagtcagtcataggttcagtctctttacataatatcatatttctttgaggttttgttcctttttattcttttttctctgttcttgtctgcctgtcttatttccgaaagatagcttcaagctctgagagtctttcctcggcttggtctattctgctgttgttacttgtgatggcattgtgaggttttcatgttttgtttttcagctcactccatcaggttggttatgtttctctctaaactggctattctggctatcagctcctgtattttatcatgattgttagcttctttgcattgggttacaacatgctcctttagctcagcaaaggttgtcattacccaccttctgaagtctacttctgtcatttcagccatctcagcctcaccccagttctgtgcccttgctggagaggtgttggggtcatttgaggagaagaggcactctggctttttgagttttcagtatttttgtgttgattctttctcatctttgtgggtttatctactttcaatttttgaggttgctgacctttgaatggattttttgtggggtctgttttgttgatgttgttgttttctgtttgtttttcttttaacagatagaccactcttctttagggctgctgcagtttgctgggggtctgctccagaccctagttgcctgggcttttcccatgcctggaggtatcaccagtgaaggctgtgaaacagcaaagatggcagcctgctccttcttctgaatgctctgtcccaggggattactaatctgttgctggcccgaacatgcctgtaggaggtgactggagacccctgttgggaggtctcacctagtcaggaggaatgggatcagagaactgcttaaagaagcagtctggctactttttggtagagcaggtgtgctgcattcgggggacctttccttgtccagaatgttcgtgttctccaaagctggtagaccggaacagctgagtctaccgaaccactgagatggcagccacccctccccccgggagctctgtcccagggagagatcagagtactgtctgtagaacccttgctggagtgactgaaacccctgcagggaggtcctgcctgtgagggggaatgggtcagggtcgcaattaaagaagcagtctggccatgacctgacaaggcagctgtgctgtgttgtgggggatccttcctcatccagaccgtctgtgttctccaaagctggcaggctggaacggccgagtctgctgaactgcagagatggtggctgcttctccccacaggagctctgtcccagggagagatcaggactctgtctttagaaccctggctggagtggctgaagccaccgcaggaaggtcccgcccagtgaggaagaatgggttgaggtccccttaaggaagcagtctggccacgatctggcaaggcagctgggctgcactgtgggggacccttccttgttcggactgtttgtattctccaaagccagccggctggaacagctgaatctactgaaccacggagacggtggccacccttcttccccgggaactccgttccaactcaggccgactccagcctgttgctgtttggcggctggaattccaagccagtgggtcttaactggcttccagtgacgtgccgtggaagtggggcctgcagagtgacactgcttggctccctaaattcagccccagttcctaggggtatgcatggttggatcttctgccttgcgggggattctggggctgaagtaggtaaaacttct

SEQ ID NO: 29484 - DNA, 1045 bp, Homo sapiens
gttttacatttaagtgtttaatccatcttgagttgatttttgtatatggtgtaaggaaggggtccagttttaattttctgcatatggctagccatttctcccagcaccatttattaaatagggaatcctttcctcattgcttgtttttgtcaggtttgtaaaagatcagatggttgtaggtgtgcaggcttatttctgagttctgtattctgttccattggtctatgtgtctgtttttgtaccagtaccatgctgttttagttactgtagccttgtagtatagtttgaagttgggtagcatgatgcttccagctttgttctttttgtttaggcttgtcttggctatttgggctcccttttggttccatatgaattttaaaatagtttttcctaattctgtgaataatgtccgtggtagtttgataggaataccattgaatctataaattactttgggcagtatggccattttcatgagtattgattattcctatccatgagcatgaaatgttttcccatttttttgtgtcctctctgatttctttgagcagtgatttgtagttctttctgaagaggtccttcgcctctcttgttagctgtattcctaggtattttattctctttgtagcagttgtgaatgggggttcattcatgattggtctttctgcttgcctgttattggtgtataggaatgctagtgatttttgcacattgattttgtattctgagactttgtggaagttgttttttagcttaggaagcttttgggctgagacagtggggttttctagatacaggatcatgtcatctgcaaacgaagataatttgacttcttctcttcctatttgaatatgctttatttctttctcttgctctattgccctcgcgagaacttccaatactatgttggagagggggcatccttgtcttctgctggttttcaagggaatgcttccagcctttgcccattcagtatgatattggttgtgggtttgtcatagatggctattactattttgaggtatgttcctttaatacctagttt

SEQ ID NO: 29485 - DNA, 1025 bp, Homo sapiens
aaaaaataattgaggagagcctttaatacctctttgaaaataattatgaaggttttttactatttggaagatcatagaatccaccatatagtaatttttaaatattttaaattggatgtttaactttaaattagaaaaaacaacattattgaaagcttttctttaatagaaaaattgctttgatttttatttcataattgatttaaaatattagttacatgaattattatttacaacttgcatagtaattttcatacatctccataataaaaattcactctgtaatctcttctataaaaagaagtaaacagcacctgccagagcactgtagcaacgagagccatcaagtgtgtattcacttcgttattcaaaacagcagtgaaagagttaataaaagctgaatacattacaggattacaaagatttttatttattaggggatagggagggtatggtatatatgggatgaaacattaataacctctctattctgcaagactgacctattgctttggaactactcttttagccccacagagactgtgaaacagtgttttggtggtctataggaaaggttcaacttggcaaatgtagtggtaagtgatgtcactgaatgcataccatatgtattgagagtcagtgaatgctattctctctgctgcgcacaggcatgtgtaagtgttggaatggaaaaatcatttttatgaaaatatagagaagtaaaacaagaatgttctgtcctgagcctgatcagatcaccagtagctgccaagagtgaacactccgtgtaaggttttctcttcttaattctccagcttccggccttttgttggctctcaaaagtagtctattcagaaggccttattcagcatgttctttcttgatatgatatgaacaccaaatgaaagttccattttctccattaaagtaaagctgggagaatattttagtgtgcatggtttgcagcagatggaaatgattaattgatttagctaacttgccaaattgttctctttcccagtaga

SEQ ID NO: 29486 - DNA, 2204 bp, Homo sapiens
aggtatgttcttctattcctaatggacccaggttactgtgagggttcctggatctgattgttaaaaattttcagtcatcttctttgttaccttccgcttagtatattatcaatggcttgcttcctgctacacttctccctgctctctttgactatttctgatctgctattgcttagaaaacttcataaccaaggttgtaaaaattatcttaaaaaataagaatactgtcttaggatttcagagggtggctagaaattgaggtccagaaaaattaagtgacttgcccaatgcacatgcacagcctgtcaacacagttgacaagaaaaacagaatcttctatgtactatactatagtctttaatttttttcatcatttaaaatttttagtccctgaatgatggcctaggagactgtattgagtacagcatattagtcatgaagacctttttactactttcgtaattgatagatgaattctgtctttttactatcttcctaattgatagatgaattctgccaaacatgttacttccacataagtttgtctgtgtgcttacacttatttaatcttagatactaattctttgtatgtgtttatacttatttagccttatatagtaattctttttttaaaaaatagagacagggtcttactctgtcacgtaggctgtagtgcagtggtgaatcatagttcgttgtaacctcactgcttgagggatcctcctgcttcagcttcctgagtagctgagactacaggtgtgtgccaccatccctggctgatttttgtatttttcatagagatgaggccctgccatgttgcccaggctgttcttgaacttctgtcctcaagcaatcctcgtgtctgggcctcccaaagcgctgggattacagatgcgagccaccatgcctggcctttgtatactcattttcaaaaatttaagtctatcatctgtgatttgagaataggtatttgttaatataaacaaaccagataacatctcagttctccaaaccccatgcagctcaacactaaagcagtcttcatgaatctgaagtttttgtgcagagaaagccaatgataggaacattttaagatttctgctaagaattgctgagcatgatatatctagtatttatagtagatatgccattgatgcttaataaacatttgaaaaaccctctctaaaaactgcagaaaaaagatgcacacctgtaatcccagctacttgggttaaggtaggagaattgtttgagtctagcttgggcaacatagtgggaccttgagtgtaaaaaaaaatacaataaataaaataaaaattttaaaaatgttaaaaaaattaaaacttcggacaagagaaaaattgcttaataatcactttgaatgtgtttgcgtttaatatattatgaagtattgatgtaaagagttgtaaatattttcaccctacagccctaattagaatagtcagaatgttgctttaataagtacttagtaaacatattcaagaaatttaaatgactttatgaagttttttcagttgggatgaattgtaggactccatcgggaacagaaattcttgaagtctgaagactgagacattctgtagcttaaaagttttcttaccacgaaaatagccttgccattggcttgtatactgaattaattggaagttcgctggccataattctgtcttcctaggatctgcctagagttttctgtctgcattcctttttttgagggtgaaggggagtacctgactatcttttgtaaagatttttcttttcctctttagattcctaataatgctgggtatgccaaatctttaatgatgctctgtgtagcctatagttgggcaaaagctgactggaagatactcttcagcaacttgatttttttagtatttaggacttactaatttttatctttggaaagacagttttatctttagctctaacaattttatctctagctttaactttgcagggacatggatgaagctggaaaccatcattctcagcaaactatcacaaggacagaaaaccaaacaccacatgttctcacccatgctctaacttgagctttatacctttattgtaagtctttttcaatttgatcagtctgatatagaggaaagctggtgggctttagatttggaaacacttggtttgaaaacctagctctgcgatttactaactgtgcaaccctg

SEQ ID NO: 29487 - DNA, 1889 bp, Homo sapiens
tgtaagttttaagggggcggaagaaaaaagggagaaaggaggaaaagggattgaaaggaggaaaagggattgaaaggaggaaaaggaagaaaaatatgagattattaatgtgaagctcttagtactgtgcttggcatttattaagcattttataaaacgtattattattgccactgctattattattaacattaaaacatacctgttttctatgggatttctttaggacctgacttttaaagatcttaagctatttagattctggagtcaggctctactgtgttctttgctaactgtgtgtgcatgaaaaaataacttaatctttctgagagtctgtgtccttgtttataaaattgaaatgatgatgcatctctctcactgggctattttgaggcttgttgagacaatatataaaaagggccaagcacatggaacgctctcagatactggttttttcctcgtctccacctcccttgacatccctttgaaagcctgagagagcagactagagctctgactagttaaggcctcagtagtggatccccatgactgcccagagtgagtatgggagatcttggtccagccctacccccatttgtttaataacttaatttatcatatggatgtatatagatttagaattgtgatatccttttgctgagttaacttatagaattattctgaaatactattatcactgtgactattattactattcttaattatttctattaaattattgctctgactatgaatgtctgcctagtaatgctgcttttgttaaagtttgatactgatgtagctgtgccagctttcttttggtttgtgtttacatgttacatcttttgctattttttcacttttgatctctctgtgtctttatatttaaagtatatctcttgcaagtcacatattgggttttgttttactttttttcaataacagctttgttcagatataattcacataccataacgtctacccttataaagtacatacttcagtgatttttttatgtattcatggagttttgcatgcatcaccactatctaattccagaagatttttatcattccaaaaagaaaccctttacccattaacgatcactctccattctccctctcccctgcctttaccttccagcctctgacaaccactaatctactttctgtctctgtggatttgcctattctggactttttacataaatataatcatacaatatctgggcttttgtacctggttttttttacttagattgtttttcaggtttgtccatatggtagtgtgtattggtacttcataccttttttagtattttattcttgctgtgcttcagttcattattgtccattgacctgctttttagttcatcactaatctgttgttaaacccatctattgagttcaaatttcagtagttgtttttcagttctattatttacaattttaatcctctactgcaattttcagtctttctctcagtattttctgtgtctcagttttttttttttttttgagacggagtttcgcacttgttgcccaggctggagtgcaatggcacgatcttggctcactgcaacctccacctcctgggtccaagagattctcctgcctcagcctcctgagtagctgggattacaggtgcttgccaccacgcccagctaatttttcgtatttttagtagagacagggtttcatcatgttggccaggctggtctcaaactcctgactctggtaatccacctatctcggcctcccaaagtgttgggattacaggcgtgagccaccgcacccagcctctccgttttcttaaacgtattaatcatggtactatgaaagttcttatttactaactctacttttttagttacctgtgattctcttgtt

SEQ ID NO: 29488 - DNA, 1506 bp, Homo sapiens
gcacagactccattttgtagtacttatgtcctatttttaggaagcctcatggagtatagataaccaggctatttaaacaaacttatttataaaagaaaaaatgaagttctcttaagtttaaaaattttcacctttccctagagtgatcttaatttcagtcatctagtttaaaaagacctgattgtttctgcctgaaagatttgtactagggaataactaatgaaaacaaaacttaggaggctggatgaggtggctcacacctgtaatcccagcactttgagaagcggaggcagagggatccatttgagctcaggtgtttgagactagcctgggcgacatggtgaaaacctgtctccataaaataatataaaagttagccagatgtggtaatgtgcacctgtggtcctagctactcgagaggctgaggtgggaggattagttgaacctgggaggtcgaggtacatacagtgagccatgattgcaccgctgcactccagcctcggtgacagagtgagacccgtttcacacacacaataaaacccccaaactttggattaaaagaaatttttaataatggcacattttagttatagatcattttaaagatatactaagtatgaagaaaaatcacaattcatataaccccagcagtaagcccaatgaactttttttctatcaataataagtcttgaacacattttatggttattgaaattaacaaaatatgattttgaataattcattattgcatgaatctttgcctgtgattatttcttacctagaattagaattacatggttaaagaatagtatgatttttgtggtcaatgatatgtaattccaaattgccctccaaaagtatatacatgaatttatattttcatcaccaacatatgagagtgcctgttttactgtgcatttgacaatgctggaatttataattttaaaaacttcctatttttatgaggtaaataatggtttctttgtcaatttgtatttctttgatttgttgtgagggtgacattttgcatatatttgtttgataccattaatttttttaaatactttttttgtatttttggtagagacaggttttcaccatttcgccaaggattgtcttgaactcctgagctcaagtgattctcccaccttagcctcccaaagtgctgggattacaggcatgagccattgtgcctgtctggataccgttgaatatttttttttttttttttttgagctggcttctggctctgtcgcccaggctggagtgcagtggcgcgatctcggctcactgcaagctccgcctcctgggttcacgccattctcctgtctcagcctcccgagtagctgggactacaggcgcccgccaccatgcccggccaatttgtttttgtatttttggtagagacagggtttcaccgtgttagccgggatggtctcgatctcctgacctggtgatctgcccgtcttggcctcccaaagtgctgggatcgttaattttttgagc

SEQ ID NO: 29489 - DNA, 1046 bp, Homo sapiens
acaagaacggcctcacacagccctcttgtcctgatgcaaggtctgacactgtcgaccaccttcttcttgatactctatccctgggcctttgtggcttgttcttttctgattcttctccccatttgactgtcctttccatctcctctttctctgtctatttctttcctttttttttttgagacagtgtctcactctgttgcccaggctgatgtgcagtggctcaatcacggttcactgcagcctcagcctcccaggctcaagcaatcctcacgcctcagcctcccaagtagctgggggtacaggtgcatgccacaacgcctggctaagttttgtatatttttatagagatgggttttcaccatgttgctcaggctggtctggaacccctgggctccagcgatccacccaccttggcctcccaaagtgttgggattacaagtttgagccactgctcctggcctctccacccatgtaggtgttcctcaagaatctattcctgacactttatctcctagcaacctctacatttcagcacctgtaagctcatccagttcaaatctaccccccagcctgtcagcccccgccttcctctccttgccgagctccagtcctcaattcctaacttcctgccagacatttccactaggacaatctgatgttgcatcaaatttagtatgttcacaatcaaatttaccaccttctgcagaacttgacctcaggcaggactgaagtctgggcctgtcaacaggcagtctatctggcaagttgaccttcctttcacatagtctcacagtagacagtccataatatattggggtgaatctacctcagttatttgcacccactgagcagacaagcaggtagtcaaaaaaaagttcacacaagttctttaaaatattcactttttgattatgtaaagcatgcacatagttccaaataaaaaaggtacttggctgggcacagtggctcatgcttgtaatcccagcactttgggaggccgaggcaggtggatcatttgaggtcaggagttcgagaccagcctgacc

SEQ ID NO: 29490 - DNA, 1089 bp, Homo sapiens
gataataataaaaaactagtgcatttgaattatgtgacataagagagttccaaaagagagcagcagtattgggtggttagaaatatagattaatgacccacaattttcgtatctagtattcttgatggagtgattgtagtgctaagaaactatgagtaaatatgtctttacttaaaattatttaatctttagcgagtatttaactgttggctctggttttgcattgtttactttttttttttttaactagggggagttaaatgatacatgtctgtagagttattttatgctacttttctttaacatgcctcagcattaaaatgtccttaagaatattgcatcatatcattaagagtctgactatggaaggaatgcgaccgtattacagtgagtaaatttttcatgactacagcccatggatgttaaataaaaaatgacagcttcttggatttgattgcagtataaaattgtgactcagaatactagattcattgactgggggtagaaagaggacactttaggacactttgtatgagaagcagaaaatgttttgcatactttataagggagagacaaaaatcttgagtgtagttttacatcgtttattaatggtagaaccactttgttgaaatgaattaagtgtagagtcttgtaccacttcaccttcattcattcagctgaagtataggaggatgattcgtgcttaaatgaatctttgcctgcatttgtgcagggaaaaactttggcagtcccaatcactggactgcacacagccatggaatattgtagcattactgccatgttccatgtgtatgtgtgcataagacacacacacacacacacactcacacacacacatacacacatgcagagagatcttaaaaatcactttattgaagtataattgacatgcaaatattataaaacatccatttaaaatatatagttcaatgctcaatgaacctaacaaatgaacccgtgcaatcagatttatatatttatattttgactgtgcagtcaagatatagagcacttccatgaccccagaaagttccctttgcccttttctagtcactccatccctgtgtc

SEQ ID NO: 29491 - DNA, 1046 bp, Homo sapiens
gaattttgggattttttttctcgttccgtgaagatttatggtgatattttgatgggaattgcattgaatttgtagattgctcttggcaagatggtcatttttgcaatattgattctactcatccatgagcatgggttgtgtttccatttgtttgtgtcatctgtgatttctttcagcagtattttgtagttttccttgtagaggtctttcgcctccttggttaggtatattcctaagtattttattattttttttgtggttatcgtgaagggggttgagtttttgatttgattctcagcttagttgctattggtgtatagcagagctactgatttgtgtgtattaattttgtatcctaaaactttgctgaattcatttaccagttttaggagctttttggatgaatcttgagggttctctaggtatatgatcatatcatcagcaaacagtgacagtttgacttcctccttactgatttggatgtgctttatttttttctcttgtctgattgctctcgctaggacttccggtactatgttgaatagaagtggtgaaagaggacatccttgtcttgttccagttcacagggggaatgctttcaagttttctttgttaagtgtaatgttggctgtgggtttgtcgaagatggcttttattacattaaagtatgtcccttctatgctgattttgctgagggttttagtcataaagagatgctggattttatcagatgctttttctgcatctattgagatgatcatgtgatttttgctttcaactctgtttatgtggtataacacatttattgacttacatatgttaaaccatcctcatccctggtatgaaaccacttggtcatggtggattatctttttgatatgctgttggatttggtttgctagtattttgttgaggatttttgcatctattttcatcagggatattggtctgtagttttcttttttttgctgtgtccttccccagttttgttattagggttatactgacttcatagaatgatttaggaaggattccctctttctcta

SEQ ID NO: 29492 - DNA, 1164 bp, Homo sapiens
ccattcaggttgctgcaaatgccattatttcattcctttttatggctgagtagtattccatggtataaaatataccacattttctttatctgctcattgattgatgggcatttgggctggttccgtatttttgcaattagaaattgtgctgctataaacataggtgtgcaagtatctttttgcataatgacttcttttcctctgggtagatacctagtaatgggattgctggatcaaacggtagatctacttttagttgtttaatgagtctccacactgttttccctagtgattgtactggtttacattcccaccaacagtgtaaaagtggtcccttttcactacatccatgccaacatctattattttttcattatggctattcttgcaggagtgaggtggtattacattgtggttttgatttgcatttccctgataattagtgatgttgagcatttttccatatgcttgttggccatttgtatatcttcttttgagaattgtctatttatgtcttcagctcactttttgatgggattgtttttttcttgctgatttgtttgagttctgcatagattctgaatattagtcctttgttggatatatagattgcgaagactttttctcactccgtggattgtctgttaactttgctgattatttctttctttttttttccttttaaaagacggagtctcactctgttacccaggctggagtagagtggtacaatctcggctcacagcaacctccgcctcccaggttcaagtgattctcctgcctcagcctccctagtagctgggatgacaggtgtgtgccaccacacccggttaatttttgtatttttagtagagatggggtttcaccatgttggccaggctggtctcgaactcctgacctcaagtgatctgcttgcctcagcctcccaaagtgctgggattacaggtgtgagtgtctgtgccagacctctgctgattatttcttctgctgtgcagaagcttttaagtttaattaagtcccatcaatgtatcttattttgttgatgcatttgtgtttgggttcttggtcatgaagtgtttgcctaagccagtgtctagaagggtttttccaatgttgtcttctagaatctttatggtttcagatcttagatttaagtctttgatt

SEQ ID NO: 29493 - DNA, 1492 bp, Homo sapiens
ctgacgaatgcattgctggacttgtagaaattaagtgaaattatacaatgtttatcaaaagtaaaaaaatcaaaataaaaacgatgacaaaattacagctaaaaattatgaactaagactggaacagtaaaaaatgatcatgaaaggtagccttggaggtaaatgtttatatcagcatggcagtgggaagccttaggtaggtaacaagataagaaagctgaatatgaaattctagccttaagccagggacacttgaagggaaccagagaagattgatagagcccatagttcctggaagaagcaaatataaattctctctctgaaggaaaaccttcttcatttaccacctaggattctctgtttaagatcaactagatttgaagtcacaatccaagatgaccaaatacagaaggagacaaatcattattaaggagttggctgaaaaatacaacagaccccaagaacttaagatattgaagggatcaggtatagaatattaaataactatgcataaaatatttaaagatacaagagaggaactcacaaaaatgagcgagcagcaagagagtatcaaatatgaccaagaagatttgaaaatgtaccaaatagaatgtctgtacatgaaaaatgtagttgttggaataaaaacctccagattggttaaatagcagcttaaacctagcttcagagagaattagtgaactagaagatggtttgaagaaatcacaaagaatgtagcacagaggcagagaaatggaatatatgacagagaggttaggagaaatggaatatgaaggtttaatgtaagtctctagtcagaatcccagaaagcaagacaagaaaatgcaggagagacaatattggaagagataatggctgaaaattttctaaaattattgaaagacttgaatttatagatatagaaaagctcaactttgacaaagcagaataattaaacccacacctgaagatactgtaggtgaaactgtgtctggtaaccagcctccaagatgatcccgaatgattctttctttcacacccttatattgtcctcactcacacttaatggggctgaatttcataactaatagggtattgtgcaaatgaaggggtgtgacgttggaggttaagtcatgaaaggcattgtggcttccaccttgcccattcttggatcactcactctggatgaagccaatcaccatgttgtgaggtcactcaggcaacccatggaaaagccctactggagaagaattgagccctcctgccaataaccagcatcagcttatgaggcatgagtgagctaccttggaagtgtatccttctgccctggccagcccttcagatgattatagctctagctagcatctcagctgcagcctcataaaataccttcagccagaatcagccagctaagctgcttctgagttcttgagccacagaaactgtggaataataggtgtttattgttttaagccgctgtgttttggggata

SEQ ID NO: 29494 - DNA, 1072 bp, Homo sapiens
gtatagaagagagaagactgaggactgagtcttgtggcacttcaacattcagaatttaggaaaagatgggaatatcagcaaaggagcctgaggaggagcagcgaatgtggtaagagaaaaaactggagaacgtgatatcctagaagctaagtgaaggagagaatgacccgttgtgtcaaatactaagattatgtcctgaagaaagaccactttggttataggatggatgatggactacagagaggcaagactgtaggtggggaaatagatgctgttgctctacttaggggagaaatgataaatattgtcttaggccggggtggtggcagttgggatggagtgtggtagataaattcagcaggcagaattagtagacttggtaattgggtatgggctgaatgttataggtcttaagtttaacttcgtaaatgattgaactttaaaaactatagtactcgaatgagtaaataaaaaactgaagttactgtggctggagtactttcggattctttggagactgagatttttagtattatttgaactgatcttggttgtacaagtttggctaagtgaaactaatgacattttaactgacattttggattagggcatatcaattgatctttgtagaaaaactgtttctaagcatatggataagataaagatatctaggggcatgcatgattaatgaaatcatgtgaaccattttcaagcagtcatttttgagcaggccctctacatatcaactctttttgggtcatcattcacttggaaataaataaaccgaaattctctcttttttttttttgagatggagtcttgcttttgttgcccaggctggagtgcagtggcgtgatctcggctcactgcaatccccgcctcccgggttcaagctattctcctgccttagcctcctgagtagctgggattacaggtgcccgccaccatacccagctaatttttgtacttttagtagagacagggttttgccatgttggccaggctggtctgttttgatctcctgacctcaggtgattcgcctgtcttggcctcccaaagtgctgggattaca

SEQ ID NO: 29495 - DNA, 1060 bp, Homo sapiens
agagggcacaaaaaattggaatgatattccatgtacatggattggaagaatcaatattgttaaaacatccatactacctaaagcagtctacatattcagtgcaatctctttcgaaataacaatcacattcttcacagaaatagaaaaaatactcctaaaatttatatggaaccacaaaagacccagaatagccaaagctgccctaagcaaaaagaacaaaactggaggacttcaaattatactacagagccatagtaaccaaaatagcatggtactggcctaaaaacaaacacatagaccaatggaacagaatagggagcgtagaaacaaatccgtacatctgcagtgaactcatttttgacaaaggtgccaagaacatacattggggaaaaagatactcttcaataaatggagctcagaaaactggatatccatatggagaaggatgaaactagacccttatctcttgccacaaaaaccaaatcaaaatggattgaagacttaaatctaagacctcaaactatgaaactactaaaagaaaacattgggagaaactctctaggacattggagtgggcaaatatttcttcagtaatactccataagcccagacaatcaaagtaaaaatggacaaatgggatcacatcaagttaaaagcttctgcacagcaaaggaaacaatctagaaagtgaagagacagcccacagagtgggagaagatatttgcaaactatccatctgacaagggattaacaatcagaatatataaggagctcaaacaactctatgggaaaaaaatctagtaatctgaattaaaaatgggcaaacaatctgaatagatatttctgaaaagaagacatacaaatggcaaaaaggcatatgagaagctgttcaacatcattgtttatcagaaaaatgcaaatcaaaattacaatgagctatcatttcaccccagtaaaaatggcttttatccaaaagacaatcaataacaaatgctgttgagtatatggagaaaagggaactcgcatacaccgtttgtgggaatgtaaattagtaaaactg

SEQ ID NO: 29496 - DNA, 1034 bp, Homo sapiens
gttataaaattattaatcacatttagttttctctgatttgtaataagtccaatgaaaggtacacttcatatatttgtattatttatacaaaatagctgaaaattgtatagatatccaaagaattttgatctcatataaaaaatattggttgaagcactttctatatatgctttaaatgtgtcaggtactcagcattattagctaaacatcaagatccaaggcctagtgataaacaggcaataatttttcaggtatgaggttcattcctgtcttgtttcccatagtgactatgccaaaagatcagtctttaaactttccttttccttttcatcctcttacacagggtcttgctttctgctttacagagaaaagaaagatcatcaggttttaatttcatctgtttcctgtcatccccttatactataaatatgtatacatttgtattcacttgatgtctatctttccatagatagaaatctatggagtcttgccccatcggttgttctctcactctatctttaatctttctatagattctttttaaaaatctatatattattgattttattacttttatttgtaaaactgtgtccaatacagatgtaactaaaacacagttaaaattgatctttcttactactttctttcttttttttttttttgagacggagtctcgctcagttgcccaggctggaatgtagtggtgcaatcttggctccctgcaagctctgcctcccaggttcacgctattctcctgcctcagcctcccgagtagctgggactacaggcgcccaccaccacgcccagctaattttttgtatttttgtagagagggggtttcaccatgttagccaggatggtctcaatctcctgacctcgtgatttgaccgcctcagcctcccaaagtgctgggattacaggcatgagccaccgcacccggcttcttcttctttttttttttttaattgtaccttaagttcagggatacatgtgcagaacttgcaggtttgttacataggtatacatggggcatg

SEQ ID NO: 29497 - DNA, 1020 bp, Homo sapiens
agcatccctcttgcctcagactcccaaaatggctgggattacgatgtgagccaccgtgcctctcccataaattattttttaaagactaagcaacaagatttaattatgcagttattttatttgaaggttctatggcagttgtaagctatgttggctgatcaaactgttaagtgcctagcacattgtaaaccttcaataaatatttgttgaaaggaagaatggaagaattacagctgatgacccatatttttttgtggactgaaagaaatgaaattagttggatggttgccaaattgctgtattccgagggacaaatttgttacccaataacaaccggagtttgttactctggtttcagagaacctggggaacaaatgacttttaaccttttggtcagtattttattgaaaataggacctttatacctcatcatactcataactgctttaaagtctcaatctagagccttcttctaattgacatggtactagggctacccttatttggacccctcatggactaagttactttttttagaaaaattatttttagtagagatgggggtctcgctattttgcccaggctggtcgtgagctcctggcctcaagggatcctcccacctcggccttccaaagtgctgggattacaggcatgagccaccacgcccagcttgctcatagactgaattacttggattttgtggatcccatcataatcagatcagctttgctgaaggttcatgagccattgtgccaagctgattgtggacattcagcaaatggtgtcatagcaaagcatttctttcagatgggggagggattaaaaagtttattctaaaaactagttaccaaaggttcagaatttgataatgccttacctgctcactgataataataaaaccgtccttcctacatttgatttgtataggcaaaatataggctaaattatacaatttagaagtagggataaagaacttgccatttatggctattctttttctttaatccttactagtcaaaa

SEQ ID NO: 29498 - DNA, 1037 bp, Homo sapiens
tgaagcttagtttggctggatatgaaattatgggttgaaaattcttttctttaagaatgttgaatattggcccccactctgttctggcttgtagggtttctgcagagagatctgccgttagtctgatgggcttcccattgtgggtaacctgacctttctctctggctgcccttaacattttttccttcatttcaaccttggtaaatctgacgattatgtgtcttggggttgctcttctcgagcagtgtcttagtggtgttctctgtatttcctgaatttgaatgttggtctgggttggggaagttctcttggataatatcctgaagagtgttttccaacttggttccattttcctcatcactttcaggtacaacaatcaaacatagatttggtcttttcacatagtcccatatttcttggaggctttgttcgttccttttccttcttttttctctaatcttgtcttctcactttatttcattaagttgatcttccatctctgatattttttcttccgcttgatcgattcagctattgatacttgtgtatgcttcatgaagttctcatgctgtgtttttctgcttcatcaggtcatttatgttcttctctaagctggttattctagttggcaatttgtctgaccttttttcaaggttcttagcttccttgcattgggtttgaaaatgatcctttggcttgaaggagtttgttattacccaccttctgaagcctacttctgtcaatttgtcaaactcattctctgtccagttttgttcccttgctggtgaggagttgtgatcctttggaggagaagaggcgttctggtttttggaattttcagcctttttgtgctggtttctccccatcttcatggatttatctacctttggtctttgatggtgtctccaagtggacgtccttttttgttgatgttgatgctattcctctctgtttgttttccttctaacagtcaggcccctctgctgcaggtctgttggagtttgctggaggtccactttagaccctgtttgcctgag

SEQ ID NO: 29499 - DNA, 1115 bp, Homo sapiens
atttttgcatctatgtttaagagagatactgatctgtagcctttttttttctcatgatgtatttgtttcgttttggtatcgaagtgattctgtccttatgtaatgagttgtaaagtattctgtctgtattttctgaaagagtttgtgtaggattggcattatttcttccttaagtattggatagaattcaccagtcaagccatatttatctttatctgtacttttctttgttggaaggttttaattatgaattcaatttctttgattgatgtagggctattcaaattttctaattctttttagatcagttttggtaattgtttctttcaagtaccttttcatttaatctaggttgtcaactttattgggataaagttgttaatattcctttattatcctttttaatatctgaagaatccatagtgatgttcgttttatcattcttgattttttttttttgagacagagtcttgctctgttgcccagtctggagtgcagtggtgtgatgtcagctcactgcaagctctgcctcccgggttcacgccattctcctgcctcagcctcctgagtagctggggctacaggcacctgccaccacgcctggctaattttttgtatttttagtagagacagggtttcaccgtgttagccagcatgcattcttgatattgttaatctgcccttttctggtcagtctacctagagatttatcaattctattcatctttctagacaatgagttattagtctcattgattttctatattgtagtgcattttatctttcactgatgtctgctgtttattatttccttttttctacttttttttgcatttactttgctctttgttttcatttcttaagaagagaacataggccattgactttagatctttctttttttttaaaatatgagcatttatagctgaatatttctctttaagcactgtttttgctgcatcttacaaattttgacatgtattttaattattattcagttccatattttccaattttccttgtaaacacattattgatccatggattatttagaagtttgttgtttaatttccaaatatttgtgttttcttagttatcttattgttgatttctaa

SEQ ID NO: 29500 - DNA, 1014 bp, Homo sapiens
ctgcccacctcggctttccaaagtgctgggattacagctgtgagtcaccgcacccagccttcctcccaattttatatatgggaaaacaactaaggcacaaaggttgtcttcccgcaaaagaccaagacttggggcttcaactgagaggtattatagtccttttaaacttgatatttagaagaggacgatcaagaggaagttggttatgctacttgctttcagtatacatcgttcagaggtcagaagccataagggagagaaatatctattagataagcatgtctgagttgggggctgtggtgaggactcagttgtcaatgatgacaaccagtaatttttggttctagaatttcacatcaaatgcccccactttactggaagcatattgaggaactttgataatcttaaagaagccagtgattttcttttgaacatttctccattttcctttattttcagccttctactagtcgaaagcggccccgtgaaggggaagccgagggtgccgagaccacaaagcgcccagctgtgtgtgctgctgtgttgtgaactccgtggtttgaacacgaaagaaatgtaccttctttcactctgtcatctttcttttctttgagtctgtttttttatagtttgtattttaattatgggaataattgctttttcacagtcactgatgtacaattaaaaacctgatggaacctgggctttgtgcttctgcttgataatcggttctttagttgaatggctttattatttatttatttgagatggagtctcactctgttgcccagcctgaatgaagtgcagtggtgcaggcttggctcactgcaacctctgcttcccaggttcaagcgattcttgtgcctcagcctcctgagtagctgggattacaggtatgcaccaccatgcctgttaatttttatatattttgtagagacagggttttgccatgttggccagcctggtcttgaacttctgacctcaggtgatctgtctgcctcagtctcttaaagt

SEQ ID NO: 29501 - DNA, 1069 bp, Homo sapiens
ctgccttgagctcccaaagtgctaggattacaggcatgagccaccgtgcccgcccacaagcctttttaaaaaaaaaatttaattttaattttaatttttgtgggcacatagtaggtgtacatgtttatggggtacaacgcaagccctttttaatggtagctgtcacctactcagtgtattgctcccttattggtttattccatttatttatattgagtaaccaagaatattaacatgaattgagtacagtttgtggatatgtgaaaattttgtttcctaaaaaaatatggccaggcagggtggctgatgcctgtaatcccagcactttgggaggctgaggtgggaaggtcactttagcccaagagttccagaccagcttgggcaacattgtgagatcccgtctctacaaaaaaataaagaagttagctggttgaagtggcatgctttgtgcctatggtcctagctactcatgaggctgaggtgggaggatcacttgagctgaggaggttgaggctgtagtgagctaagatggtgccactgcacttcagcctgggggacagagtgagaccttgtttcaagaaaaaaaaaaaagagaaaagaaaagaaaagaaatatggcatagtatgttggtgtttgttcatttttatatgctatttcagacaatagttttttcaaagacaaagtctttgcattgaggaataggttaactcacataaacagatatatatttgtatcacataaatagatatttacaaatatatatttgtataggttccctttaaaaatattctcaggactgcaataaccaaatatatcattttggtggaatttttgtgtttatttggtatgttctcaaaacattttctgttacccatttgaatttttattgaaattgacaccttacatttctgctgtgtgaagagttgtttattatcttaaagtgaaatgaaaggttaattgttctaagttgcttttttcatttccctgctttttaaagatcttctcaaacaaatttgtaaactttaccccaacagttttctatgattttggagaatatggttgtgtgtat

SEQ ID NO: 29502 - DNA, 1081 bp, Homo sapiens
ggtggtttctcatttctgattttataacactcattatgtattgataacatttgtatggtatctatttgtgtattattttttatttttatttttgtgtgttatttcacacagtcattttaatttatttttattttatttctttgtgagacagggtgttgctctgttacccaggctggagggtagtggcacgatcagagctcactgtggccttgatctcccaggtcaagggagatcaggcatgcagcaccatgcacaactaatgtgtgtttttgttttttagagttggggttgcgctgtgttgccagggctggtcttgaactcctgggctcaacccatcctcctgccttagcctcccaaagtgctgagattagtagcgtgagccaccatgcccagccaaatatttctttttttatttcctgtgtgtgtgtgtgtgtgtgtgtgtgtgtgtgtgtgtgttagtgtcagagtcttgctctgttgcacaggctggagtgcagtggtacgatcttgactcactgcaacctccacttccagggctcaagtgatcctcccaccttagcctcccaagtagctgggactatgggcttgaaccaccgtgcctggctaatttttgtattttgtgtagagatggggtattaccatgttgcccaggctggtcttgaactcctaagctcaagcaatccacccatctcggcctcccaaagtgctaggattacaggcatgagccactgtgcctggccatgtgtatagtatttcattgtgtatatatacaccacatttactttgtccgttcattcatttatggacactttggttgcttccctatcttggctattgtgaataatgctgaaatgaacatgggagtgcagatatctcttcaacatactgatttaaatttttttttggatatatatccagaagtgggattgctggatcatatggtaattacaattttagctttttggggaacctttatactattttccaaaatggctgtactaatttactttcccaccaacagtgtaccagggttctcttttcttcacatcctctccaacatttgttattattcatctttttg

SEQ ID NO: 29503 - DNA, 1483 bp, Homo sapiens
gatctacctaaagtcatgcacagtttcactcaagtgtctgactccagatccgcttgcctctaatctctcatagtaacttgttgacacattttctccagttgtcctgtcttgcttaaaaagctgtggggaagactcagcctggctcaggtagtattagaccagcagtccctggtgtggcatactcagttttggcattgccttcctggtatgttttaaagaaaactcatcagaacctttgtatcttttttattttccttgagacagggtctcgctctgtcacccaggctggagtgcaggctcgatcacggctcactgcagcctcaacctcctggactcaagtgatcctcccacctcagcttcccaagtagctgggactacaggtgcacaccaccatgccctgctaattttttgtattttctgtagatactggatttcaccatggtgcccaggctggtcttgaattcctgggctcaagcaatctacctgcgttggcctcccaaagtgctgggattacagacatgaaccaccacacctggcagaacctttgtatcttgaaagctgtgtaaatacaatcagtgtgggtatcttagtccctccttatcagcggtagtagtttcacttaccaatggtcagctgcgatctgaaactattaagtggaaaattcataagaaatagtcaattcatggctgggcatggtggctcaggcctgtaatcctagcagtttgggaggctgaggtggacctgaggatcacctgaggtctgcagtttgagaccaggctggccaatacggtgaaaaccctgtctctactaaaaaaaatatacaaattagccgggcatggtggtgtgcgcctgtaatcccaactacttggaaggctgaagcaggagaattgcttgaacccaggaggtggaggttgcaatgagccaaaattgtgccactgcactccagcctgggtgactgagactccgtttcaaaaaaaaaaaaaaaaagaaataatcagttcataagtcttaaattacatggttttgcagtgcttgtgttcatgtcacccttatatttaataatggccccaaagcaaaagatgctggcaatttggatattgtaaagagaagctgtaaagtgtttccttttactgaaaaggtgaaagatctcaatttaatatggaaataaaaaaatttgtatgctgaggctgctaacgtctatggtaagaactaatcttctatttgtgaaattgtgaagaaggaaaaagaaagttgtgcataatttatatagggttctgtactatgcgaggtttcaggcatccactggggggtcttggatcttatccccctctgatggtggggactactatagtgttgtttcctatgttctcctagagtagtagcctgagtttggggaggaagagaatgccctcctctccctcccttttttttgttaatccgattaggtcagcagtggatgttactttgattttactggtggttc

SEQ ID NO: 29504 - DNA, 1406 bp, Homo sapiens
cagaacatctccccatggattctggcggtattgactcttcagattcagaggtagggatcattctgacttattaaagagctatataaccagttaattccatctgtttgatgcttgacatccctaactagacagatgagggttgaagttagtttttggtggggttggaggtgaacatcaactaccttcctagttccaggtaatatagaacatggagtgaagtgtagataaatgggtctggtgggtcccgaggtcatcttatcacataatgactaatttacattatggaacccagtacaaagtgttccagttagattttccattgtattctgacagttgtacttcatttaatttttgcctcttacagtctgatatcctgttgggcattctggacaacttggacccagtcatgttcttcaaatgcccttccccagagcctgccagcctggaggagctcccagaggtctacccagaaggacccagttccttaccagcctccctttctctgtcagtggggacgtcatcagccaagctggaagccattaatgaactaattcgttttgaccacatatataccaagcccctagtcttagagataccctctgagacagagagccaagctaatgtggtagtgaaaatcgaggaagcacctctcagcccctcagagaatgatcaccctgaattcattgtctcagtgaaggaagaacctgtagaagatgacctcgttccggagctgggtatctcaaatctgctttcatccagccactgcccaaagccatcttcctgcctactggatgcttacagtgactgtggatacgggggttccctttccccattcagtgacatgtcctctctgcttggtgtaaaccattcttgggaggacacttttgccaatgaactctttccccagctgattagtgtctaaggaatgatccaatactgttgcccttttccttgactattacactgcctggaggatagcagagaagcctgtctgtacttcattcaaaaagccaaaatagagagtatacagtcctagagaattcctctatttgttcagatctcatagatgacccccaggtattgtcttttgacatccagcagtccaaggtattgagacatattactggaagtaagaaatattactataattgagaactacagcttttaagattgtacttttatcttaaaagggtggtagttttccctaaaatacttattatgtaagggtcattagacaaatgtcttgaagtagacatggaatttatgaatggttctttatcatttctcttccccctttttggcatcctggcttgcctccagttttaggtcctttagtttgcttctgtaagcaacgggaacacctgctgagggggctctttccctcatgtatacttcaagtaagatca

SEQ ID NO: 29505 - DNA, 1050 bp, Homo sapiens
gccacagaagctgtgcctgaagggtgagtgtggagcttgcccctccggctcacagccccggcagcccctggctccttggtctctccggttggtgttaaagggccctccactgccacctctcatgggatggaccctgccaacctggcctgggtgtgcagggaggggttccccttggtaccaggagagctgctcacttagggcctggggctcaaggagctgtaggtgccggcagaggggcagagctaggctgggaggagcccagggcctgcaccacccacttgcaaccaccaggctggtgccctgcagctgtgccagttgggccacagcctcccgagtgctgacccacatggtcaagaccaggcagaagctcccagagcccctgtctcgggctccccaccgactggcagctgcactatccccaactccccacttctgccccaagggtggtcactgcctgtgatacattcctcagtgtcgcctctgagcccaggcctcctgccacaaagactgggccgagagatggggctgggtaagcgggtgcgcctcctgtttgggtttcttcggggtttctctgtagtgtctgctgccctcctcctggcctcccaggtttcagttgtgtctgacagagcattaggttttcctgttactgctgtgtaataataaagaaagattcggcttttggcaatcacggacacttttttcccctccaccgaatgtcaggattgaaagctgcctccgagtggttggggatggttttctgaccctacggtaactagatctaatatatatcatcagaaaatatatattgtatgtttactcttattttcagaaagagaaaatgaataaaaatgatgacatcaagtgtgtccccagccagtgtgtcaggcccgaggctcttctgggcaggagtcccgggctgcagggaccccagggtcaaaggctccagtggtatgtgcggcagcagcccctcccgtggcactctgaggacagcgccttccctccatcctatccttggcaaactgactgctgcggcctgctgctgtccctgac

SEQ ID NO: 29506 - DNA, 1071 bp, Homo sapiens
tatggactccaaagtaccaggcagagtgggaaaggacgtctttctttttagtttttattttttttgagatggcctcagtgtattgcccaggttggtcttgaacccttgggctcaagcaatcctcctgcctcagcctcctgggtctctgggactacaggtgcacgccaccacacctggccccccttatttttgcctccacagtccaaaggagtgttttacagacagaaacgccctgctccagctgagaagcccacctctggcaaacaccccacataggaggggcccatcttagggaccagctctcagaaggctggtggggagtgggcctgcctaccagcctccccattgtggcagaggattaaagtgtcagatggggcctctgggagcggtagctgcttcaggcccctccccaccgggtccgctacactgggtgtcagtgggaaggttgcgtcatggacccagccagtgaggctaggactccctggggacccctggcagcccctcctgatgattcttcttcctgagcacgctcatgatgagcaaactgagcctctaagaagttgactgaaggggctgcttccccaaggaagcctgggggccagtaggtcctgacccttgggcagaccggggctaggggtggctctaccacttaccctcatgtgaccctggaggccacagaagtgcaccaggctccgagaggtggttccaatggttgcctctagcaaacttactgtgtgctgaatgcttcctgggcacccaggccctgtggcaccggctttgggagtattgtctcacttgagccacttgatggcccagcaaagtcactgccatcacccctttttagtaggtaatgacacctgggctccttggacagctcacatagcgagcagtagtggagctcccaggaaagcctagtgtgctgagccaccaagcggacctggggttccccaaatggtctccctctgtgtcccaggcaggctgatggcttcttgggcagagcacaggctggggtcagacagcccaaactctgattctcagcagcgccctcaccctatggggtctgacacaggc

SEQ ID NO: 29507 - DNA, 1035 bp, Homo sapiens
ataccaactgtgccctggtctcccaggtatgagagtgtgattgccacactgtgtgagaatctggactccctggatgagcctgaggcccgggctgccatgatctggattgtgggcgagtacgcggaacggatcgacaacgcagatgagctgctggagagcttcctcgagggcttccatgacgagagcacacaggtgagccagcgagctggccagggtgtgagtcatgactggcagctcagccccactgtggcccatactgccatgaaaccctcccttcctattacctcgtaaacagccctgacagacagatgagtgatgtgcgcgtaatggacaccgccccttttcctcctcactgcagtacagtcgagtcggggacacgtgagagtctgtggtggtgtgcgtggaaggcaggcaaaagttcttcattttgttttaattccatagtcatattttaataggaaatatattgacttggtttaaaattgatacaaaagcatatatagtgaaaagtttccctctcatcactttgtaggacacaaattctcctcccagaagtcatcacttttttgatttcttaggaaagttcaggagatcatttaggaatacaccagtagacccacagatacacacacatgcacccatccttcctatacacacatacacacacatatgcaaccaattcttatttttcatggtgcttctgttccatagtcatggcagacactgaattagcaagtactgaaccatagctcctaggagaaatatagagtttagtttctgtgagcatctagacccaacgtttttgtcaattgatcagttaataacctttttaaatgtgtgtttctgtttaaaaacaccttagttaatatatattgtcaattcattgacattgaactcatggccatggatactgtaattcatgccttagcgaagcttatcaaggacatgttttctctgaggcacatcacagccttctgtgcttggggacactaggcaagcacttcagtgctagggagcattttaaacaaggaaatc

SEQ ID NO: 29508 - DNA, 1039 bp, Homo sapiens
accacatctggctaatttataaattttttggtagagacagggtttcaccatgtttgtgaggctggtcttgaactcctgacctcaagtgatccacctgcctcagcctcccaagtgctaggattataggcatgaaccactgtgcccagccctaattaaggcttttttatttttatttatttttaattcatttattattattactttttgagatggagtctcactctgttgccgaggctggagtgcagtggcgtgatctccactcattgcaacttctgcctcccaggttcaagtgattctcctgcctcagcctcccaggtaactgggattacaggtgtgtgccaccatgcctggctaaattttgtatttttggtagagacagggtttctccatgtttgccaggctggtcttgaactcctgacctcaggtgatccacctgcctcagcctcccaaagtgctgggattacaggtgtgaatatatatatgtatatatgatggtatactactcaaccataaaaaggaatgtattaacagcatttgcagtgacctggatgaaactggagactattattctaagggaagtaactcaggaatggaaaactaaacattgtatgttctcactgatatgtgggagctaagctatgaggacgcaaaggcgtaagaatgatacaatggactttggggacttggaaggaagagtgggaggggggtgagggataaaagactccaaatatggtgcaatgtacactgcttgggtgatgggtgcaccaaagtctcccaaatcaccactaaaaaatgtactcatgtaaccaaacaccacctgttccccaataacttatggaaaaataaagtaataaaaattaaaaacaaactagttttattttttgctttaacatgtttactaatatagatgtaatttatttagccagtctcctattagtgtataatcagtatattttctgttgttccaaattataaccaaaactgaggtacatagatttcatatttgaatatttctgtatatacctaagtatttatttag

SEQ ID NO: 29509 - DNA, 1108 bp, Homo sapiens
ctggtgggcggatcacctgagatcaggagttcaagaccagcctggccaacatggtgaaaccccgtctctactaaaaatacaaaaattagctgggcatggtggtgcgcgcctgtaatcccagccactcgggaggctgaggcaggagaattgcttgaatccccgaggcggaggttgcactgagccgagatggtgccactgcaccatctggacaacagagcaagactccgtcttggaaaaaaaaaaaaagatgtagaaatgtaaaaatatttgagaattattacatagttgcagatatagtttgctaactccaagaggaaacacattttattttttgtgattgtcctgatgaaactttatccccccacaacatgctgttaagcttggttcccatcataagcatattccccctaagtggacttttactgattttccatggataatgcagacctccagtataaaagctattcctccaggtctctctgccgaccactgagtatcccagggataaggattttaagagtaagagctaagtaataaattcctgcccctagcagggccgttcattttacggatgaaaacctgatccttgctgggcgtggtggctcatgcctataatccaagccattcagaaggctgaggcaggaggattgcttgagcccaggagttcaagaccagcctgtgtaatatagtgagtccccattcagaaaaagaaaagaaacctgagcctagcaaggagaagagaatggtacctttggtggctgttaaatcaccaccgctaccctcagtccacatcagtcctttgaattccaaaggcaggtactctctagctcagaggtcctcgaacttcagcctgtgtgggagtcacccatcctggcacctgattagaaacacagacacccaagtcccattccaaatattctgactcaattgacctgagatgcaccaaggaagtgtatttttttatttttattttttgagccttgctctgtcgcccaggctagagtgcaagggcgcaatctcagctcactgcaacctctacctcatcggtttaagtgattctcctgccttagcctcccaagagctgggattataagtgtgcggctaattt

SEQ ID NO: 29510 - DNA, 1081 bp, Homo sapiens
aattagtaagctttcacatggagaaaaccttagcttgctggcaaataaagaaatgacaattacacttctatcaaagtagcaaatagaactcatggagagagccaaggtggaccagactctggggagtccgcagctttgtggcacagtaaatatgtcaaagtccttggagagaccaattataggacctcacattctgcaagctggcaattccacttaggacattctggaacagttggtaccagaatatactctgcagcattcagattaataggagacatctgagctagcctcaggggtgcagtggggaggctgccatggctggcaagctgagtcttagaactgcgcatttcccctctctcctctcttcccagccaaactgcaggccgctgtggtgttgaaccctggctactcctccatcccacctgttttccagctctgtttgaactggaaaggggagaaaaccaacagcaacgatgacaacattcgggtaagacccagctggggatgacaggaggagcaggcagagctcccgggggaggtggccgtggcagaacccactgcagctgaggacttgggcactgccttaattcccaaaacagaaggttgtgccaggatttgcagaatttgctggagcttgtgtggtgtactagaggaaagagcccagacctacttgcctaccttggggtccacaggtttccccacttagagagtaaggagaaatacctaccttgaaaggttattggcttgggctcctataaaaaatgtgaataagctctgaagcattatagaagcactggaatgacatgaggaatgacatcactgcagttgttaatcagcattgcagctgttaatcagcattgcagttgttaatcagcattgctgctactaagtcaaacatgccatggaacacgtttttaaccaacatcttctgacttaggtcttattttgagactgcttccctgcacacctctgttttcctggctgtgggcatatgaggcagggaaagctatgggtcagaatcaggaagacctcattgtcttgatgagggggcctgaggacaagccagtctagcttgatctga

SEQ ID NO: 29511 - DNA, 1049 bp, Homo sapiens
tttcatttctattttacatgggaggaaattcaggcttagttgcaagcccagtctgagcgctgagcctgagctctttgctccttccttcaccgctttctagtaccggacatctcctccttctccctcttcataacagggctgaggtgtcaccctcaggttgtaaagggcagggccacagggcctcgctccctcttctgcagtccctgcactcactttagaggcattgaaagctctgattcttcatacctcttctggcatctgactctgccagggctccctgctgaagtcctgggatgttgtgtttgggccgttgtgctgttgtcccacccaagccgcagcaagcctggcactgcccgtgggatctgacaccctcaagacttggtgctgagctgaggaagttgtctgtagttctaagacagttccagaactgtaaggaaaggctgaactctttggtatcagagtttctgtcctcactaccccactttcttctctttctattcttcatgtcttttaaaaaaaaaattctgaagaaactgaatatttcagatacagttgaggcctccctatcccactttattccctttctcctaataagtgaccactatttggattttatgcatttgctttccatcctttccccgctacacccttttttttttttttttcagtagagataaggtcttgctttgtcgcccaggctggagtgcagtggcacgatcatagctcactgcaatcttgaactcctggactcaagcaatccttcttccaccttagctccctgagtagctgcgactacaggtatgctaccatgctcagctaagattttttgtttttgtttttgtttttttgtagaggcatgttcttactatgttgccaagcctggtctcaaactcctggcctttcttccaaagtgctgggattgtaggcatcagccatcatgcctggcctctcccctttcaaaatttaatttaacttattttttgagacagggtcttgctctgttgcctagactggagtacagtggctcagtcatggctcactgcagcctc

SEQ ID NO: 29512 - DNA, 1050 bp, Homo sapiens
tgcctcccagttaagtgagacaatggcagccatgtgcttggtatagtgtagaatagagaataagcacttaggtgagagtcattgtttctgggatgtggacaggtgtggatttctgggtgagaacctctaagacaactggcagaggagttccatgtggctttaggccctcagtttgaatttctgtgctttggtgtgcaccaaaaaagagaggcattcactgctagtttcaggtgatgctggtttaggaatttgtacttaagttctctgttctcagtaaatgacggaaaaaaaagcttaagtgtcccaccttgtttcccttcatctggagcaaggacttttgcccttccacccttagtcagcaaggagctgggcagaggtgggagaaatgcagccccagagctggcctactcacactgcttagcagctttcctcagcagctttcctaacagacttcttcttgccccccagataagacgttatctgtggcaatcgaaggcagtgtggatgaagccaaggctctgttcaaacctccagaggactcccaaggtaatgtggtggttgggattcgtcccccagggacaccaggtcaccatccaagggcagtcctggtctttggagaactagctggactagttctgtgtagcaggaagcttgacttgaatgtcttagcaccctggagtagacaggaaagagagctcacttcccggagtcacaaggtgcggcccgtggatttcagccctgccactcactagctgactgaccccgaggaaggtatttaatatttcagagcctcagtttattcctttgtgaaaacagatagtaacacctcatgtaggattgttatgtggattaaataaggtaatgcacatacagcctttagcataattctcagcacatagtaccccctcaagttatgcatgcttctactactattattattatttgtgttactattattaccacagccaccaccaccatcacaaggaggggcttgtgttccatctaaatgacatcaaaaagccctttgaaaaaaatgagttatacgtcatt

SEQ ID NO: 29513 - DNA, 1089 bp, Homo sapiens
ataccacttagatatagcccagaaagcccctggcaggaaccatgtggtcagatgctggggagggactgagaaattatgctgcttcagagctaggagcttaagacagaccccttaacaagtcctcacagggacgagacgcggactgcctacatcctccaggcagtcgagagtgcatgggaaggggtggacagacggaaagccacagatgctaaagacccatcggtgattgaggagcctaatggggagcctaacggggtcacggtgacagcagaggcagtcagtcaagcatcatcacatccggagaactcggaggaagaggaggtatgtgtctgagtggcgcttttccctcttcgcttgtccctccttggccctatctgagaggctggggcagcaggaaacctcccttctttgcttttatactcagggaaaaagtttttttggggaatagacagcctcaagcaactggtcagctctgtgctgcctttagagggtcccaagctgggggcatgctggactgtgtgtgaggagagagcaagttgcttcaactatcgaagccttagcttcccctctataaaatgaagagacgaaactttccatgaacgtttccatgagcccttcccggagctctcctctaaatagataaaagtggagctcctttggttgcaactgggaacagtgccaagtcccatggtttggccttcttggaagcccctccgtggggctccaggattccactgaacaagtgtagaaacctcggatctggtgccttctctccaggcttttccaggactggccgaatctgtggctgtcttgattggccaccaaggccaggactctcccctgcatgttgggaggcagcatgataagagagatgaagaccacacagactcaggcgaggcagctcaggggtgtgacctggttctgccacttggcagctgtatggccttaggcacgtcactcacgttgaaccttggttcctcatctataaggtggggacagatgtagtgcccacctccatgaggtgttgggattcccagagctatcacatggaataccctgagcctgactggccttcagtgctccattaac

SEQ ID NO: 29514 - DNA, 1018 bp, Homo sapiens
ctgcaacttccgcctctcacgttcaagcagttcttctgcctcagcctcccaagtagctgggattacaggcacgcaccaccacacccggctaatttttgtattttcagtagagacggggtttcgctatgttggccatgctggtctcgaactcctgacctcagatgtgatcctcctgccttggccccccaaagtgctgggattacaagcatgagccactgtgcctggcctaccgttcttttctaagtcagaggggttgcccaagcactgggtttataggcttagatcgggcagctttccccgagcccagaggacaagagttggggccctgagtcaccctcatcccatggaaccagcctcctccctgcacaccagaaaagctgctctcttgtcaggacacctggtttattttctctttctatcctctgcctctgttttgtgactgtacaggtctggatattgagagcagcttgaagcagttggctgagcggcgtactgacatcttcggtgtagaggaaacagccattggtaagaagatcggtgaggaggagatccagaagccagaggaaaaggtgcggctaaagtggaacctagtgccttctctgccccccgtcttccatacttggtcttagttccagaagcattgtggctttgctttcacttgcaggtgacctgggatggccactcaggcagcatggcccggacccagcaggctgcccaggccaacatcaccctccaggagcagattgaggccattcacaaggccaaaggcctggtgccagaggatgacactaaagagaagattggccccagcaagcccaatgaaatccctcaacagccaccgccaccatcttcagccaccaacatccccagctcggctccacccatcacttcagtgccccgaccacccacagtaagccagcatctaccctggaactgacttttttagagcttcattcttgaggtcggacactgttggctgagaagtgcagctgccttttagtggggcctgagtgttggg

SEQ ID NO: 29515 - DNA, 1175 bp, Homo sapiens
aactcaaatgttcatcaaaggagaattgcttcaacaattttatgttgtaatccatgtgatagaatactgatatattttttaaaaaagaggttagctccacagaagtgacaggaaactgtccacaatgtgtcctgaggccaaaacaagttgcagaacagtatgtaaacagtttgtaacttttttgtaactacataggtaaaaatacttttggctttacttctttgtctgcttagactcccagattctctgatgataccactctggtgcttgtcctaatgggaaagtttcctgaaatcctgcgatgagtttgacagtttcaaaattccttcaaacatacagtgaatgacagacaattcctgtgaatatgtgtgtgtgtgtgtgtgtgtgtgtgtgtttgtgtatgtcctgttttctatttatttatttaagataacctgattgtcatcctcgcgcaggggccatgctaatctctgtattgtttcaattttagtgtatgtgctgacaaagcgagcactgtatgccctgtttattatggaaacatgtaatgcttctagatggaagatatttgataggataatagacattagcagtggtttcctctggaaagagaaaatgggcatgcacttggcagagaaagcttccacactttggcagaggaacaggctgcttttaatctaaccctgtttctttgagaagttgttccatttcagccaaacaccgcttcaggagaactgaatgtgaaaacaaaaacactagttctgccccatccctatcccggtcttctctcactgttctcagcaagaaaaaaaatatcctgtatttaatcctaagacttaaccttttcctgaccctggacaaaatgcatagtttagacaaagggtagacacaccacccactctttcctcatggtgaaggtgttagtcatctatttttcccctgtactagaggtctttcagagccaatagtccctctggcaagagtgaagcttcatctctgccctggatgatagagtcttagcaaccagaatcagccatgctggaggagaggtcctttgcattcattgcaccaagtactaggtcgataatggccctgcctagcaagatacttggcctcagaaacaagaaaggggttgatcagagaaccacaggccagagggaagtggagtcattgcagct

SEQ ID NO: 29516 - DNA, 1050 bp, Homo sapiens
ggattgaaggatcctggggtgaggagggggtaattgtgtcctaagagggtgagtttatgggctgggtggccagcaggtcccagggagctgagtctcaggacaggcagctcatgtctgtgtacccgtgtgggctctccctgtccctgtaggagttttggtggggaagtgtcctgggacaaatctttgtgcattggggccacctatgacgtcacagactcccgcatcacccatcagattgtcgaccggcctgggcagcagacctcagtcattggcaggtaggccctcaagggtcctcgtccggatttctgggtatcctgtctcaaaggccctgcgatgcagcaggaccctgagttgccctctgtgactcgtttttgcctgccactctgcgccaggtgctacgtgcagccccagtgggtgtttgactcagtgaacgccaggctccttctccccgtggcagagtacttctctggggtgcagctgcccccacacctttcaccctttgtgaccgagaaggaaggagattacgttccacctgagaagctgaagctgctggctctgcagcggggagaggacccaggtgagcgggatgggactgggctggccttgacccctgggcccacgctggctgtttcccttagctgccaaggtggaaagctccagggaacaggcagtaggagcagaaagccctttgaagtcacctgtagaataaggcttaggagaagggacatctacctcctggggtcaggtgttatttgacgttcaggatgactgagcagaagaacatgctgcattgtcatcagagtttacattggaggcgacagagctcaggactgggggtcttggaatttcctctgatggcagctgggctgtggggaggtgcaagagagggccacaattgggacatccctgaactgcccatggctaaagacggcagggtcagagaggatggggcctgggcctgttgtcaccctgccagagagacagtagattcccagggcattcagaggacattggctttctctaggaaacctgaatgagtcagaagaggag

SEQ ID NO: 29517 - DNA, 1026 bp, Homo sapiens
caagatcatgccattgcactccagcctgggtgacagatcaaggccctgtctcaaaaaataataataaaaataataaatgcagaaggaattatagaattagaaaaaaattatatttgccaactcctaatgaaatactgtaatggatcaaataatcaccaatagttaactaagtgatggggttgatggggaacgtctgaaaggatcaggctgacatcagctgattctacctgttgatcttagcatcacaaaaagtgcaacaggatataatgtgcctccccccatgtgaccaaacaggaaaaacagcaccacctatgattatttttataccacctccctccattcaaaaaaactaaatctgtttagtttttagtttgaacagtacttttaaaatgcaggagacagaggaacatgctaaatggcagaaggagtcagtcagtcaaatccaaaaatagaaaaatctacatcctaacgacaagttttattcaataaatgcatggcctaggaaaaggaggtgaattggaaaatgttataaagtttcgaaagatgtatcaaccagatacagtgtgtgtgaactttattttaatcctgattcaaacaaaccattaaaaaaatactgctgggcacggtggctcacgcctgtaatcccagcactttgggaggctgaggtaggtggatcacctgaggtcaggagttcgagaccagcctggtcaacatggcaaaaccttgtctccactaaaaatacaaaaattagccaagcgtggtggcagacgcctgtaatcccagccactagggaggctgaggcaggagaatcacttgaacccaggaggtggacgttgcagtgagctaagatcgcaccactgcactccagcctgggcaataagagtgaaacttcatctcaaaaaaaaaaaaaaaaaaaaagtccgggcacattggctcacacctgtaaccccagcactttgggaggccaaggcgggtggaatcacctgaggttgggagttcgagaccagcctgaccaacatggagaaa

SEQ ID NO: 29518 - DNA, 1042 bp, Homo sapiens
cttcattgtcttctgacttcctttggaggctctcagtctaatctgttctcggtctaattggccttcctttggagatgaattttcaggatctcactctgttgcttgggctggagtgcagtgatgtgatcatagctcactgcagcctcaaattcttgggctcaagcaatcctccagcctcagtctcctgggaagctaggactacagacacataccactttgcctaatttagtttttatttttatttttttgtagagatggggtctcttctgttttcccatgatggtctccaactgctggtctcaagtgatccttctgcctcagcctcccaaagtgctggtatgacaggtgtgagccactgtacccagcctaatttatgctgtttgaaggtaatttaaaaaaatctgcttgtaagattttgttgtcttagtaatcttgcagtttcactatgttgtatttagctgtggatatctttttatttaccataattaggatttgttgagcttaactttgtatattggtgcttttcatgatttcttgaaaaacttttagccataactcttccaagattgcttctgttccataaaaaattcttttctccttctgaaatagatcagacatatgtgggatcttatctttcatgtcttaacgtccctttgatatttttcacctctttgtgtctctgtgttgtattccaaatttcttcagatctcacttctgcttcactaatactctcttcagctgtgtaatctgttgtaaaactattcactgaattatttttagtgattttaaaacattttcttgaaatttgtttagtatttttgaatatttactcttcacttattttcaagctgcctttctgtttctagaaatatattaaacatgcttattttctcttctgtatctgataattttgctgtgtggaagagttttctgtctgattctgctatctgttatttctggttgcccttgctcatgggtgcttgtttccttgtgtgtttggagattttatactgtgagctgctcattttccctgcagtttcat

SEQ ID NO: 29519 - DNA, 1057 bp, Homo sapiens
tgcaggattggagcacattccccctaattgttatgcagttagctggctggatgaattggttgaggggttaaggtagataactttaatgtgagaggaagcaaaatctcagagcacttcagagaacaactgtttccgagaatgagactgtcaagtggcaggaattaagagttggatttgcagctcctctagatctgccacttgaattccattttggggggagtgttaccatggaacattgttttatcagggggagtattttgggcttccctgatcatggtgtttcctatttggtggtgattttgtggaatgtgctatgagctcattttccttttgaagaaatgtgttactctatgtcagaaactatgactcagatacctagagagagcctgggcaggtagtaaagcaggtgagtgtatggagaacaggaaaacagagctgatgctgtgggtctcgtcttgggagtggctgctacacagccccagtgattactgctatgctggaaggaaggactaatgaatccagaatattctgagtttaaatcattttagtaattgactatgtaagctaaacacacatttggccgattctccttgtggctcagatgtctgcagagctgtttctggtgaggtctatgccccctcattgtgggagatcagggcagctctgtggactacccagcctcagactggactcttatctcctttcctatgtaagacatggaggccagggcttgaaagaaggggggctaagaggttctgtggaaagaaatccgcaacttccacagaagcaggtaattgaattcagacttacaatttaattcatctgtgttgattagctgtgattaaatttgttctggttctgtttagatctgagccttaatcatagcaaacttgttcaggtagggaatggtaggccttccgtcattacgtagcaagccagtgggtttgtctgcctttttggtgtggtatgtgagttcattctgcatacttgagtgagagaagcgtggcagctggaaagagcaggcttctaggagaagtaggataggaaaatatagcct

SEQ ID NO: 29520 - DNA, 1050 bp, Homo sapiens
tgttgttctggttttgagtgaagccccaagagaaaggtttctatttctgaaatgctcacttccagctgtacatacctttggatggaataagatttagtggaattggagtttgtgcaaatggaattgtgagtcacgtttccagtcttgtcgtggaaatgtgttgttttgtttgagggagggtggtggtttgatcagtcagcagcatcagttgggccttgtgtgcagttgtgctttgggtgtatggagaagaaagagagtacttccgaagaaatcaggacctggtatccggactttgtgatttgtctttcagggcaggaaccaaatggtaataacagacacttaccatgtgccaggcacacgaataatctcatttaatcctcatgatagccctgtgaggttgtaggtactattattttcagatgaagaaattgaggtttataagggtgaagttactttcccaaaggcattaaaaatgcctatgtgtagagcgctagggtaggaaccaggtctttctgactgcaaaatggagctgctgtgcatttcacttaaatgacaagctaaggttcaaatctcacttccgctactacgtctctaagcctcagcttcctcctttgtaaattgagatgataatgcataccaagtaggttaagaattacatgctatcattgctgtgagagcctggtttctgcctttatttctcctcctttgatgtttccatggcagattgctggcctgattcagtggatctgggtaggggctaggaatgtgtttttcacagatgaaatgaatcacctgtaatcatatgattctaatgcaggttatctaaatcccccaaaactgaagtctcctagaatcaggggaagccctgacttttcatctagattgtagatcagcctcctcctacctggttctgtcagttctgtggcctcagcaagccatttcacctctctgaatgtctgtttcttaatggcctcaggcaagccatttcacctccctgaatgtctgtttcttactctagaaaatggggttctaatctctgacatttataga

SEQ ID NO: 29521 - DNA, 1059 bp, Homo sapiens
aaaaaatgctcaggccagatggaggtgcctttccaagccaaagcatgtatcttacatctgagtgtgctttctcaggaatggtaacagctaccgctggaaaaatagggcttatttaatcaatgcacagatgctaaagcagagaatgggcctcttctccaagtgatgttgaaggtacaaatcgtaatggtcaagtctacttggaagacgttttttaaaaaagatcatctctgctgtctcctactacatttggtgggtaaatttcagcaaggaagtttagttcctgacactcagaatgaagttggatttcaatttaaatgaaaaaggacccagtgtgtctttattctgtgctcagtacaactcctgttatgctttgggaaatgtccagagaggaggagatgggggtctttgctttaagaacttagtctttaattggagagacaattaatgcactatggataattagagaacaataactagatcttgagggaacagtcaagacagttaaggattaaatggtgtgatagaagcactaagcaccatagcattttggaaaaagacttgatttacttcaagtaccaggagattgggattcttggctaagggatctttaaccctacacttttctaccacagggccttgttaacacattcaacaggagaaatcagtccgtggaatctttttttttcacccaggctggaatgcagtgtgctatctaggctcactgcaacctccacctctcgggctcaagtgatcctcctacctcagcctcccgagcagctgagactacaggcacacaccaccatacctggttaatttttgtatatatattttttcaccatgttgcccaggctggtctcaaactcctgagctcaagtaatctgactgccttggccccccaaagtgctgggcttacaggctgagccgatgcgcttggccagtaataatcttaatactataaagttcttgttgttagttcatgggggaaagtattttcttatctccacttctgaaactgattgataactggacttggaaatctttccaaacatcagatgtagt

SEQ ID NO: 29522 - DNA, 1448 bp, Homo sapiens
gtttgataaatggttatctcagctctgaattttggaatgatggtaagtctggaattacagattttatgataatcttggaagaccatgaactggacttcagaatttcagttcttgttccagcttcaccaaagactttatgggataataatagtaacaacagttaattgcttcatatcagtcactattttaaacattgtccaaagcaatctttacaggaagcctttgggataaggattattcctattttgcatttgaggaaactgaggttcaaagagattaaattacatggtaatggctatatagctgccaagtggcagacttaaacggtgccaagatttaagacagtgggatttatctggccacagtagttggtgcttttaaccattaggcagtgcctactgtagtcagttttaccttcaagagcctatttgcttgtctataaagcaaagggtatacttcacagtttaaaagtcttcaattttagtttatctcaatgaatctctaaggactctgggatatttctcccttctttttccccctttgctattttatagcttattgatagatacttggcactgccaaggaaaggaaagaaaccagttaagtcatttgttggggaattttctgggactttgacttacccatgttgaactggaaccacctgcttgcatgaacatttgagggttggagtatcattttggaagctctggaatttcttacctggatcacaaattcgaccttagaagttgttctcctttttgatgtattagtcctaccagaagacagtataaaccctaaaccaacaagataagttttttatttctaatttcagaagatttttaaaacattgtggtgacctgattggaagttcatttatagagaaaataaattttaaaattctcacatgatgtgacttgtagctcataaagatggaagatgaaccacctgtgtgtaaagtggttcagtaagtcatcttcagagaagggaagatttgtctctcttctcctttgttctgttaaaatcttaggaacacgagaccatttcatggtgtctgacatctacagtattgcgaattaggaaataaatggtcctttgcttacttctcattaaatgtagacttagaagcagtgaccagatgagaagtgtggaaatcagtgtggtgcagtgaaaagaccgtgtgcttgcaaaccagccaaacctggacttgagtgtttcctggctgtgtccttggacaggtcaagttcttgaatctcagtttcttcaactataaaatggggctaatctgacagtttttacgaggattatatgaaatgatgtttgtaaagttcttagctcatacggtggtacacagtaaacattgtgtgaatggtgagtgttactctataatagtttatataaaccagaagttggtcactgtggtggcaacttgtttggtgctagtcattagg

SEQ ID NO: 29523 - DNA, 1047 bp, Homo sapiens
ccttcaggaccatccacacgagactcagattgtctgaattgagctatcgcaacttaatgctaaaagctccttaaagctacagatttatgacatagttccttccaaaatattacatcataaatcattgagaagattaaaaaaaaacacttgaagaaattgtagttttaaacatctctgcatatattttggatagctactaggttactttaactgtcattaaggagcacagacttactgaagctttactggacagaatcctgggaaatcgatatcattataaggttatatttcccagttagcgggtgaagggctggagaccttattgcagtcatggctttcacaaattacagcagtctgaatcgagctcagctaacctttgaatatctgcacacaaattcgtaagtatcctctaggtgccactgaggtaaccagtaactcgttccttgatattatatggaaatcgtttccccagaaaattttgctttttcactttttgagatgtatcccactggagtgaaatgtgtcactggatatcttgagctctgtattgaagaactgagatcagtgaaatacttgttgctaatccagaagaatctgatttttgtttattggatcaaaattttctaaatgcaaactttagttatttgaagtcaatatgttgagttgtttcattcaagtgtttataggaatccaacaaatactgctctattggatcgccaaatgttggactattttagtatcaaccgtttcccctctgtagtgacaacgtcctaaacagttaggtttataacaagtgtttactttctaacaagaaaacagaagacatttaaatgacaactttcaagaagaaaatttttattttttcagaagttggcattatcttcctggcagattgctcacatccaatattatttgtatatgctaaacaggaaacggcaacttgtttatatctctatttagatagtctttccccaaaatttccacagaaacatacagtgttcatggttcttgagttcatgaaggagtaatctaatcactccaacatgg

SEQ ID NO: 29524 - DNA, 1035 bp, Homo sapiens
gaagaaagacgcggcgcgagcgccaacggccaccgggcgcgcgccgcggcggccgggcctgcgccccaagagctggatgccagagcaggagaaagagccgccaaccgatcgctcgatcgaccgcacgcccgttccttcgccctaccagacccgggagggggggagggcgcgccagggcttcttcgatttaggggcctgactccccggcgacgagacaagatggctcctccggtccgcaccgcagctaccgtcccggctgcgtcgctcggcccgcccccggtactgtttctttaaatggcggagagggtcaggaaagcaggaagagaggcgcacgctgtcacgtgacaggggcgggaccggccaaccaagatccggtcacatggggacacgcagcccgccaatcaggaggctgtacatcagggcgggggcgggaggagctgcagctttgtgattggctgaatgctccgcggaggcctcgggggcttggggcgtcggggagtgtgcgaggtggccggggctgtgtgcactatcggagacaaagcggtggctgtggtgtctgtgacggcggcggcagagcagctctaaacgccgaatttcgtgttgctgaatcctgtcaccatctcaactagcgcggcgcgcgggcggcgcgcgggcggcggcggaggcagcggcggcggcggcggaggcggcagcagcacatggttccaagagcgctctgcggctgttgggttccaattccgcggggagggacaaaggcagttgtgagatccgggtagtgcccggtcaggtggtgcgctcgccactgccctcgatccggtccttggaagccgggagtagctcctcttcgtggggaggcggccacgggaccgaggcccgggaagggcctgggaggctgaggctgttgtctgagggacgtgggggcggggcgcggcctgcccgaggtgctgtgggcgggtcatttgtgaggtgtttatgtgggccaagtgtgaggtaatctgaccaccaccctgaactgggtttggtccggctttgaaa

SEQ ID NO: 29525 - DNA, 1045 bp, Homo sapiens
acaggtgctgggctaggcagtctccctggaggatgacccagggtgggcctgctgggatctgtctttgccttgctgccttctctctctctgtctctgattctctcatcacagagcacattctgactcaggtagtgtgctgattagcccgggcagagtaggaggagcccagagggcagtgggggcaagcccggtggcctgggggggtaacctgcactctctgccctttttccaggtgtgggttgggagcagcagcggcctgccgcccctggaacctcttcctagcgacctgccatcatgggactttgcccagcctgctttgtggaggtcgtcccattcggttcctgacaccgccttttccctttctctaaaaaaatcattcccagcccttgaaaacctgggcccagcacactccagcaacactctcttctgcccagccccgccgggatatctgaggcagggctggaccaccccagagggcagcagggcctttacccagtggcctgttggctagcctgggcctccctggagagggttgacagtggaagggaacaggaggggcatttggcctgagacccctgcttttgggagaggctagcagggtggttcctgcccagcatgcccagctcctccctgggtgactcggagtctttcccatgtcagagcccccaaatgggggtagcaaggagcacctttctggaaccccctatagcatccaagtttctttctgggctctcttgccttttcccccctttcacagatggcacccctgggcatctgtccttgcctaggtgattttggaggttggtgccttcctgggaactagccaccagcttatctgcttcccttcccctggcatcacttcccataggcctggggtttctagactggggcctggccacccctttccccactccacgagtgagtcggcctccagagaagactggcacaattccaactagagtcaacccatgctgccctctgcccttcccactcagatctagatcctgctttcatttctggctagtgaagtagacttttgtgtttt

SEQ ID NO: 29526 - DNA, 1068 bp, Homo sapiens
ggtgtacctggtagtgggcagtatcggacgtgttctccatgttggtgagcgatgtacatgctgtagctttattattctcatctataaatagggccattcatgccctcataaagttgttaaataagagtgatgtgtatgtaaatacctggccccatgctggcagggagtggagctttagtactattttacttcttacctaataggtgtgagtgtggaaatgggcaaatagtcaagttggcagggaagcagagcctcctgcctgccccagtgccacctgaactcctgtagtgttcttatgccactggaactggctggcaggggccagctctgacctcagagaattgtgggctcactctagggcaggaggagatcgcagagggcggaacggtggctcatacagccatgcccccaggtggcccaggacccacctgggagctacctccaatggctttgagcggtcagtgtgtggacaagcggagggaccgtgtctcaagaatatgtggaactcagcggggcatggtggctgacgcccgtaatcccagcactttgggaggcaggcagatcacctgaggtcaggagtttgagatgagcctggccaacatggtgaaaccccatctctactaaaaatacaaaaattagcccagtgtggtggcaggtacctgtagtcccagctacttgggaggctgaggcatgagaattgcttgaacccgggaggcagaggttgtggtgagccaagatcattccactgcactccagcctgggggatagagtcagactctgtctccaaaaaaaagacatggaacttaaacacaaggctaaacttctgggctggaaggaatcgagggatggccgactcaagatacctgcagccctgcatgaagctgtctgccaggaggctctacctaaaagcagttttgttttgttttgttttgttttttgagacggagttttactcttgttgcccagactggagtgcaatggcacgatctcaattcattgcaacctccacctcccaggttcaagcgattctcatgcctcagcctcctgagtagctgggattacacgtgc

SEQ ID NO: 29527 - DNA, 1023 bp, Homo sapiens
gctagtgagtgggatgcaaaagtcatcgtcaggacaccagcatcacctcttcatatcctcctgggagccactggcatggagcagccgccgatgggaaccgtcagagttctagggacatttccaagtcagtctattagagaagagtgagtggcacgtcctggaatgttggccaactctcctaggtttcttttgcttccccatttgctagtggatggggagatgggttgggggtggggggtctctatgtgccttgcttttgcaggttgacagtctatgccacactggagcagaaaaactgacatgagccagagggaaaagtgtgccacggctatgttctaggcccactgcctcagacatagcattgagacgagtgaaatacacacttggtcatccacggaggcttccaaggccatggccaaatacagttagaagagagccaggcttccgtaccagctctgaatgatgctaaccagattctgtcattctacatccactttgcccagactgtatagacacgacctatgtttcacctcaatacctctcccttcctgggacagggttcttagacactaaatgcttctctctgacttttttgcttaagggagtgggatgagtagtacattttgcccttgtccaggcatgtttaaggagctcctactggacaggttgcagactagcagtgagtcaacagagccctgtttgccagctctgttgccagtatagatgcagtgatgtggcggctatgtttcccagagacaacagtgggcacagctatagtgtcaccaacatggcagagatagtttcaactgtgcctgttacaggtgtggcactcgaaggaccagaagcagcggtttggaacatgggtaactgggagcagaggactggaagaaacagagctgggctccttccctgtcctgacaatgtaggagaggagttgttgtgaggccagccctgcccgtcgttgaaattctggacctaccctctagctaggtcccttcccctgctccaaagttgagaaggggg

SEQ ID NO: 29528 - DNA, 1052 bp, Homo sapiens
ttttaatttgcccttactattgctgtatttgacaaattagacatcaaataaaaagccttaatattccaaatagcttaggagggccttgttcattgtgtgtctctaatgtagaatcattgtgtgtcagtaaagtggactggttcaggcgggacgcagtggctcatgcctgtaagcctagcacttcgggaggccaaggcaggtggatctctttagtccaggagtttgagaccagcctgggaaacatggcataacgttgtctctgctaaaaaatacaaaaattagtcaggcatagtggtgtatgcctgtagtcccagctactcaaaaggctgagatgggaagattgcttgaacccaggaggcagaggttgcagtgagccaggatcacaccactacactctagcctaggcaacagagctagaccctgtctccaaaatgtttaattaaaaaaacaacaggctggctacggtggctcatgcctgtagtcccagcactttgggaggctgaggcaggcagatcacgaggtcaagagatcgagaccatcctggaagctgggcaccgtggctcgtgcctgtaatcctagcactttgggaggctgcggccggcagatcacctgaggtcaggagttcgagaccagcctggccaacatggggaaaccctgtccctactaaaaatacaaaaattagctgggcatggtggcacacacctgtagtcccagctacttgggaagctgaggcaggagaatcgcttgaatccaggaggcagaggttgcagtgacccgagatcgtgccactgcactccagcctgtcaacagagcaagactccgtctcaaaaaaaaaaaaaaaaaaaaaaaaaaccccacaggcgtctgggtgcagtagctcacgtgtgtaatcccagcactttgggaggccgaggcgggcctgaccgacgtggtgaagccctctctctactacaaatacaaaaaaattttagctgggtgtagtggcttatgcctgtaattccagctactcagaggctgagtcaggaggatcccttgaacctgggaggccgggg

SEQ ID NO: 29529 - DNA, 1068 bp, Homo sapiens
aggtgatccacctgcctcggcctcccaaagtgctaggattgcatgcataagccaaccaggctgcttttatttatttgtttatttatttattttttgaaacagtctcattcttgtcacccacgctggaatgcagtggcgcaatctcggctgaccacaacttctgcctcccggattcaagcggttctcctgccttagcctcccgagtagctgggattacaggcacgtgtcaccatgcctggctaatttttgtatttttagtagagacggtttcaccatgttggccaggctggtcttgaactcctggcgtccggtgatcctctcaccttggctcccaaattgctgagattacaggcggtagccaccacacccagctgaatcttcttttctactcttgcgcccatcttgcagaaaacaaacacccattacaagtgaaaaactataaatagtaacacacaatcgcttgtaacattatctccttcacaaagcactaaacagccagcacctaactctgatatgtagagaacacagaataaatatatttttagttaatgaataaattacacaggtatcaccagatatggtttatgaacccctgccttttggcaatgtagaggcttcaaaaattggcatttacatacttcagctttagggtttatagaacttaaagtgaactgggaaggagttcttggggtgtgatcactgagaatagttggaaataatttcgtcaatatcattgtaccttctaattgaaaataagagaagaaaaagaatttgagagttaaactactcatctcaagaatccctaaagagtggccaggtatggtggcttacacctataatcccagcgctttgggaggccgagacaggtggatcacgaggtcaggagatcgagaccatcctggctaacaccgtgaaaccccgtttctactaaaaatacaaaaaaaattagccgggcatagtggcgggtgcctgtagtcccagctactcgggaggctgaggcaggagaatggcatgaacccgggaggcagaacttgcagtgagccgagatcacgccacggcactccagcc

SEQ ID NO: 29530 - DNA, 1042 bp, Homo sapiens
tctccagaacttttcttatcatcccaaactgaaactcagtacgcattaaatagtaactcaccattctccccttaccccgtctttgacaacaaccattctactttctgtctctatgaatttgactactctaggtacatcattcaagtggaatcatatggtatttgctgttttgttactggtcttaatatttttaaaagttaaatattccaatcatgaaacaaatatttcaatcatgagaagttaaaccagtaaaataataataatttcctgtcttaggatcgtgtcccaaagttattaaaacttgtaactaggccgggcgtggtggctcacgcctgtaatcccagcactttgggaggccaaggtgggcagatcatcaggtcaggagatcgagaccatcctggctaatacggtgaaaccccatctcgcctaaaaatacacacacaaaaaattagccgggcgtagtggcgggtgcctgtagtcccagctactccggaggctgaggcaggagaatggcgtgaacccgggatgtggagcttgcagtgagcggaggttgtgccactacattccagcctgggcgacagagcgagacttcgtctcaaaaataaataaataaataaatttgcaactaataattttgggatttgatcaagatcaccctgctgagggtgaactatcttagaacaggcacagtggaagggacagctgcaagagccaagctgaattgtgaaagaatgtattcagttctgaactccactcttgtaggaggaaggtcaaaatctgttacgcatgcaaaggttactagcaaggatgtggaatagattggtcttatttaagaactgtgcaccaaagataatcagagatggacatgtgacatcccacatggatgatttagcattgagaactctataccatgcttggtttttattgtttgtttttttggtgcttacatataagctatagagtgttaaactttttacatatttttttccccataatggtagatccacctgggttgaatatgttgtaaacactttggttctag

SEQ ID NO: 29531 - DNA, 1079 bp, Homo sapiens
aatggaaatggaatagaaagggtaggagaaactggcacttctgtaagtacatcttttggtatagttctaacttcatacttgaaaaataactaactagacaactgggatgtgagatgggcccaaagctgaatagaaactataacaagtgagtcttaactgtattacaaatgaataacaaaaccaatggggagggtagcccacattactttagcaaacagtaattcgactatatcctcttaaagaataaagtcaaaaaagaatagaaaatattagtaaatttgtttctcacaggggtaggacttagccatttctaaacaaaatgcctatatgtgttctaggattggggaaataagtaaatatatgtggataatgagagccagttttctctcagagaaataaattacaaaggaggggtggcaaacatgaaccctgacccaaacatgaactccatgaattggagttatcttttttttttttttttttttttttttttgagacagtctcactctgtcacgcaggctggagtgcagtggtgcgatcttggctcgctgcaacctcctcctcctgggttcaagcaattctcctgcctcagccttccaagtatctgggactacaggctcataccaccaggcctggctaactaattttttgtatttttagtagagacggggtttcaccgtgttagccaggatggtctcaatctcctgacctcgtgatccgcccacctcggcctcccaaagtgttaggattataggcatgagccacggcgcccagcctaacatggggttcttaatatatacacatagaaatggaaatacttgagtgtatacgatagggcctagaggtagcaacagacaccttgtagcaatgagcacacctagtcttggctctaaatacttttttccgataaaagaaaccaagattccttggagaaatggctgttccaggacaggagagggaaaaacgcaagatgtgcccggagcaatttgtggccaaatgctcagaaaattatggggatatatcagaaggacacagcagccaacttgaaggggctcccagtggccaagtatgggatgatt

SEQ ID NO: 29532 - DNA, 1004 bp, Homo sapiens
taacgagctggtttagtagtgtcttgtgctagcctgggtagagagagctgaagtatttagtaagcagtaaaggaatggaatcccactttatccctatcctccctcaaagaggaaaagtcagtatatgaaattttccagagttcctcagtatatattcattcaacaaatatttgccgagtacgtactatgggatagcatggggatatggcagtgaacaaaaaaggtaaggttcatgcccatgaaaacaaacagaaaaccatctttattttctcatttacatcaggtctatccttggatgctttaggcatgtcttattctcttctacattggcaggcccttcacgtttaaattgagaattgttcataaggcagtatttgaattgagatttgattgagagctgtctaatctcaaacgttattaaaggttaaggtatttatttttctacaaattcattaaggagaaatttttggtgccagataatgctggcatttaaagtagaacttattttcttcgttgtagccggtttgaactgaggcagccttcttctaacctatcaaggttttaaacttttatcccttcctgtgatttgtgtcagggtgaatcatttgatgtaaaagacttgactccataatctgcatctgtcctaatgctgtcatctggagtagagactcagccagttccacttgattcctccatgtctgccgtggtacaggaattatactctgaactcccagtaagtgtctccagagagcttcatgctgaccctgagccaagtgtgattccagatgtaaaacctggagcctcaagctctcttttaagtcagaatagggcattgcccttggagctgcagaggactcatgtggagagttgttgtgaagaaacctatgagaccttggatcatgggagtgagcctgggcgatgtgggctagtggactccacagcaggaggttctgtggcatctgggatcttggatagggcaaagagaagcgagagcatggagccaa

SEQ ID NO: 29533 - DNA, 2056 bp, Homo sapiens
actatttgtttaacttgtctgaatctcagtccatctccaatttgggttctgttttcttagaattgtcatgcgggctaagggagcatttgtgtaaatactagttatatagtaagcttttggtaagctgttgctattactattacttaatctgttaaaaaagaaaactaatatcttgcacagagaagcatatttttccatgcatgcccctcgcagcctccatcacaagtgttcaaccatcctttctcactggagtggaagactccctcccacttaggggttagagaaagagacacttccagtccccttagatcctgctgttcaatactttcccaaattaacaaagagggcctcactgaaaataatcagtaaaaaaaagacttagcttttggaaacaggtctgtgctcttaagagaaagtgagacctgatgccagacgccagcacttcctttgtccacagaaggtatcacttcttcctgactggttagagatgccctctcccacttccctgacttactgtagtgacaaaaaatcttccatctgcacatccttcccacccccccaagtgggcgattccatattcttcctgtcttttgctctcccaagaaaatgaagactctatacctttgaggagagatctcttccctcttgtatatggaaaatgacacagattgtttcttttctccttttcctttataaaacagaggaaaatcttttatacaggaagcctctgtcagtagaaatcaggagcattttccagtttcactccttacgtggagacagggatcctttttctggatgttattaaagggaggaaatgggaaatagtccttgatgctttagagattttctgcacgctccatgttgaagcgcttgccctgtttagtgtatgaacttccctgcctcacttttggtttgtcttgggattttattaaaaaactcttctttctttgtttctcaagaagaggcccattctccaaattccctcttggagggaatggctacaatgtctgaatctttggaaaagaaagcccctttctcaaggtgaaaagagtgttgtgagcttctgagggcctggtcattattgtgagtattgttcctgaagcaagcatggcagcgcctagtgttattaacagcccctatgcattggaattaaagggaggggagactttcagattcgggattattgaggcacacggttttatgttctgttttttttttgcttgttgctgtaaattttgtacctccagaacttttgttttggggagtgtttgaatgactaaaagttgccactttgtcaggtttttagtgttataaaatgtattctgatgagattgagagcaacaatgttaatccttcactggtaggtttgttttcctgtttttgtttttttttttttttggtgggataggaattaacactgccaaattacctgaaagcacactaaagaaacgcttaccatctttttttgtatgtaaagtgttcttaaattacctcaaacgccgttgagtaattgcagaggggattagtgggagctctataccaccattgttggtgtctgtaggtgtgcttttctgaaacaaagggaaatagaaaagttattctttggagtcttaggatatttatgggtgacaagaccctttgagcttattttgatgaacatgtgaaaaacaagcccgggaaagttcacttaactttcacttaacacactcaagactctgcatctagtatgtgagagcaggataagggaccctggcttcctgatgaagagaccagcagttaagactgctgggagaggccaggcgcggtggctcatgcctctaatcccagcactttgggaggccgaggcgggtggatcacctgaggtcgggagtttgagaccagcctgaccaacatggagaaactccatctttactaaaaatacaaaacaaattaggtgggcatggtggcacatgcctgtaatcccagctactaggaaggctgaggcaggagaatcgcttgaacctgggaggcagaggttgcggtgagccgagatcatgctgttgcactccagcctggg

SEQ ID NO: 29534 - DNA, 1033 bp, Homo sapiens
acattcccctgagtacttctctgcattttgtcatggatttgattaatcatgaaggcaacaaaatgtattttgctactactattcccatgcattcacatattgagaaaggagtaatgaagaccatcttgtggctatttgtttacacatcccattctctttcaagttcctagagggcaaatgttgactttgtgtcccacaaactgtcactgcactctgaaagattctcaagtacgtcttgactgagcaaatagatgaactcagaaacacattaaagggaaagttggctttcattgggtttttttgtggaatgaatttgaatgtagcctacctttctgcagtaaatctgaactgttcatttaagggaaagctaactggtttggactttgtggctcttgttccagatgcgctggtagctatggagaaggccatgaagagagacaagattatagtcaatgatcggcagttggcttgtgctcgaatcgcttccccagagggtcaagactatctgaagggaatggcagctgctgggaactatgcctgggtcaaccgctcttccatgaccttcttaacccgtcaggtacagtagaagttgctcttctgttccgagtcattcatgatgatgttaagtgctttaaaacatagtgcagtccaggctggacacggtggctcatgcctgtaatcccaacactttgggaggccgagggggggcggatcacaaggttaggagatccagaccatcctggctaacacggtgaaaccccgtctctactaaaaatacaaaaaattagcttagctggtcgtcgtggcgggtgcatgtagtcccagctactcgggaggctgaggcagcagaatggtgtgaacctggaaagtggagcttgcagtgagccgagatcgtgccactgcactccagcctgggtgacagagtgagactcctgtctccaaaagaaaaaaacatcgtgcagtccagtcaaagcctatggtgtttggttttggaaattcacatagttaactttcaaaataccagagaagtgtc

SEQ ID NO: 29535 - DNA, 1028 bp, Homo sapiens
gttctccttcaagaacttttcttcctgcatcatccctaaccgtggctattccatctgcacacgatccctgagtgctcttgtcagctacctcagcttcagctgccatctgcatgccaacagactcccgagtcacctttttccttcccagagcatcaggctcttatatccagttatgtcctctacatctctactttgtctcccatggaaacctcagagcctaaacatcccagaccaggctcagcatcttcccagacaccctcacctccctccttctcctcctcctctgcttcctcctgtgacctccatctctgcagcaggaaccaccagtcatttagttgcctcaaaacagaaacctgggagtcatctccccctcctccatgtccaaatggtctccaagtcttgtcaattgccccttgttaatgtttctctgacctgtatctttctctccacccatttccactatcttggacagctctggtaaagtcaaagcattcccaagaattaaactctgtgcttaaagcttaaaataatccccaacaggacataaaaaggaaataaagagatgagaaactcaggtccagaagggcctcccaaaacatggaaaggagggtgcactccaaggattaaaaaaaaaaaaaatgacacagacgagaataaactgaggtttgcaaaaatgctgagatcaagggaaaaggacttttctccttatgtttggaatgagaaaacttgcagtaacagtctcgaccaagttgatgaagcaaaggatgtcatattcatagctgagagagagaaaaacaaagctggtacctgtggtacgtttaccttctcttgggagtgaagattgtcctcctggagacaagcaaagagaacgttcctagaagaaagctggtaaggaggctgtcaatgagctcagtgttgcttgaaatctacccaggcccccatggatgcaattgctggcctatcccaaattatacttcactcctttgttcttttatacttgtggtgcctactctatgctgagaattgga

SEQ ID NO: 29536 - DNA, 1071 bp, Homo sapiens
taaagcattccctgctcccactcactcttctcaacacttctgttgttttctcagacgatttatcatctgacattgtcatgtttacttaattgttcagttgtttaccatctgcccccttcactagaatgataatgaaggctgagaaaagtgcatgttttcacagctatatttacactgtaccaccagtgggagctggggggaatctggcacataaaaagcactcaataaatagttgtaaaatgaattcaaaagtgtgctatgtcctggaacaagttaactctctgggcttcaatttgcccattgataaaataaaggagaatgaaatgggttgtatcaaaggattctctttgttctcacattttctggatctctggatccacaagttgcccttgggatggatggatggatggatggatggatgatttctgggggttttattgaagacacctgggacagaggagttatcaggagcaagatggaggcagggaaagggggcaaataactccagtcagaatgtgcttcttttaccccaagtgagagagaggcatgatcccctctttcctctgtgcccaccccatggaccacctttacccatggctgcaccaggggaggtggcagcagcagctgcctgcccaccaccgggagctccacccaggagataaaaggagccgaaggaatgtgctggcaaagctgacgtccctgtcttctcaagggtgtaaatgggtttcctgctcccacaggttcaaagagcacttcatttcacagcaaaagtacagctaatgagaaacagattgtctggctccagctgcagctctgagagcccaggaggcaaaggaaagcccccaagaacctggatgtgaacgtgtgtactaagggactgtttcctcccctttctctggggccacagagctatttcaacggcaggggaaggagttgcagagaggtgggggtagaggcaagagcaatgtccccactggcagttaagaggagcccttgggagagggcttctgagctctgggtcttccaatcatgctgagttctttttaggcctgggcgccaagtcaggcaatg

SEQ ID NO: 29537 - DNA, 1025 bp, Homo sapiens
atggaataaaaacaaataacttagaaaccacaaaaccacaggctccctaagggttctcccaacacaggaagtttgaagttaattagattgattaattaaatgagacaatgtatatgtacaaaggtactttgtaaccctgaagctagacaaatgatacactgttatattgctgatggtgatgacttgtagattcttaaatttactaatcagaggaaaacagcaagaggaacccgaaagattcttgtgattcagcatttcctcatccccccaggatcttgagaaccttcctcagtgacccttcccaaggtccttctcagatatctgctgcctctctggggatgctttgatgatgtctaggtgagaggaaagggccttcggaactaagggtgaaaagcagaggcctgaggggcctgcctggactgggtccctctgattcccagcctattgatcaccacaatcccaactcccaaaaaaaccctcctgaaagactcagaagctgaaaggacagatcaagaaaactggagaagtgatcacggcgtactggaatgaaaaacaggcatggagcacgtggggtctgggtgaagtcgctgccctgtttctctgtgaccttgggcaagtcacttcccatcccagcagataaattgtgggtgataattaccagcctccaaaggtgcctgcaataacctaggcagcctcccccctaacctctccaaagcagtgcttgtcgaagtcacccatgaccttcttggtgctcagtccggtcatcgaggtgcaggctcgtggtcctgctatgttcttccagcttgtgggtctcagcaccatctgcacaactgacagctcccacgcttttgccaccgccaacctagaactctcatgaactttttttttaaacaaattgtatttttattttaagttctggggtacatgtgcaggatgtgcaggcttgttacaaaggtaaacatgtaccatagtgatttgctgcacctatcaacccatcactgaggtattaagccgagtgtgcatta

SEQ ID NO: 29538 - DNA, 1027 bp, Homo sapiens
tttggcattggagcgatatcctgtgtcctgtcctaatgattcaagaggaaaagaccttgaaaattacataatccagctccccactttcacatctgtggaccaaaatgactacaacggccttctaacctgtctggctcctttcatagacacatcctctaggtctatttctacacagtggccaggtagaccagatatccctcttgtctctaaccctccaatggcttactttcacaattggcttcaaatcaaaattgatttcaacatggcccttcatgatctgacccctctctgcttttctaaacattctcttacaagaatcttgttctaacttcctgatggagctggccatccctctgttcttcaaatgtgccttgctttttcctaccttagtgcctttgcttatacacttctctctccccatcctttatgtttcagcctaaagatcactcctgaaagaagtgaaattgtctctgtttgctgatgacatgatcttaaatatagaaaatcctaaagattctacaaaaaaaaaaaaacctgttagaaccgataaacaaattcagtgaagttgcagggtacgaaatcaacacgcaaaaatcagtagcatttttttatactaacaacaaactaactgctaaggaacttaagaaatcaatttcattcacaatagcaccaaaaaatgaaatgcttaggagtaaatttaaccaaggaggtgaaagaccttcttactggaaactataaaacattggtgaaagaaattgtaagtgacacaaataaatggaaaggtatcccgtgttcacggattggaagaatgatatgtccgtactaaccaaaatgatctgcagattcaatgcaatccctatcaacattccaatgttatttttcatggaaataaaaaaatcctaaaatttgtatagaaccacaaaagaatctgaatagtcaaagcaattttgagacaaaagaagaaagctagaggcacttgaaatctattacaaagctatagtaatcaaaacatggtactgacaaatac

SEQ ID NO: 29539 - DNA, 1058 bp, Homo sapiens
tagcgccattgcactccagcctgggcgacaagagtgaaactcagtctcaaaaaaaaaaaaaaaagaaaaagaaaagaaaagaaaaaaagactctagatactgcccacgaacatgcagatggagtggctactcgtaaccaaggccataccatttactgtgtggaggggggtgaggcagttccagatcaattcctaagatcttgaatgcagaaatcacatactaactcatttaatagaaggcatgaaaaagtatgtggtcaagccagttaattatgacaagattagagaaataactcaggggaaagattaaaatcctctgacagaaacacaatccagatccttaattttctgggaaaacaaggtgatatggtttgactgtgtccccagccaaatctcatcttgaattgtagctcccataattcccacgtgtcatgggaaggacctggtgggaagtaattgaaccatgggggtgggtctttcccatgctgttttcatgataatgaataagtcttatgagatctgatggttttataaaggggagttcccctacacaagctctcttgcctgctgccatgtaagacatgactttgcttctcatttgccttctgccatgagtgaggcctccccagccatgtggaaccgtgagttcattaaacctcttttctttataaattacccagtctcaggtatgtctttatatctcacacattagcagtgtaagaacagactaatacagaagggtactgggtatctccccacaaggcccaaatttctgcccaaagggtgaagtatctgagatgtgtgtttattcctgggacaaaaaccttagcccaggaatagaaagagaccattctggcactccagcccactcagactaagaaacagttaagtgcctttttgggaatggccagattctgccatatttgtattcccaggtttgggatcatatcaaaaccactctataaagctctaaaagagtgtgatcacaagcctttgaattgggacagaacctcacaacaggcattcttaaccctaaaagaaatgctgggaacatgtccc

SEQ ID NO: 29540 - DNA, 1050 bp, Homo sapiens
acttgaatgtgtatatgaatcgtttgtgagggtctcaggaaagtctgactctgttggtgctgcctgcgattctgcattttctaacgaacccccttgtgatacagaggaccacacataacactgtctccttacacctttaagaatccccttatttccagatatttatggagccttaacagcgtgtctggcattcaccactagacactacagaaaccctcctgtaaacaagtgattggttcattttttaaaatagttgctgggggtccaacagctgtgccagctgataattattcaaaaatgaataagacactatccttgccctcatgagaggcagatgggtgtgtgagtagtgacgtacaggctggtaaagggaagtggtgcccaggatgtgatgggagcttgggagaagggtgctcactccaggccggggatcatggaaggcttctaagacagatgacacctagtaaggaaaaaattattctaacacctgttaaaacggtaagtgagactctattcaggactattgccacaataggtgtcaagacgagagagcgcttggattcagctctgaatacagcaaggatagctggagatggatagccaaccagtggaatgagggggtcagtggatgcaaaattattcagaggacacatcaagggttgcttggttcttgctaaactgacttaccaggattattgctagaggcagtccaagaacttagaccccaaaggtggggtataaagaatttgatcaggccagacatggtggtttacgcctgtaatcccagcactttcggaggctgagatgggagggtcacctgaggtcaggagtttgagaacagcctgaccaacatggtgaaatcaccccatctctactaaaaataaaaaaaattagccaggcatggtggcacatgcctgtaatcccagctactcaggaggctgaagcaggagaatcacttgaacctgggaagcagaggttgaagtgagcccagctgagatcgtgccattgcactccagcctgggcagtagagcgagactccatctcaaaaaa

SEQ ID NO: 29541 - DNA, 1992 bp, Homo sapiens
ttaaacagctatgagggacagctggagacaagagggcttctcgtagtctcccaaagtcacataggcacccacacgcatgtacacacacatgtgtgcccttctttgcctctcactggttgatcacacctgtgtctgcactggccctgctgcttctcatcacacatcactagctcactggttcatgcccacacaccttgccaggaataagctaaaataagaaaatgatggtgcatctcagacccaggcctctgctttctctttaacccccactggctgatccacttcttacgagcatccacgagaatatgagtgcatgaccgtctgtaaaggacccaggaaggaaaaaacactgtttataagtgccctgtctcgtggcaggtgctgtgctaggccctgggcaaatgttatcttttttaggacaacctagtcaaagataagtgcttttattcccattatacaagtgagattaaaacacagaagttaagtttgcccaaaggtcatatgtatttaagtggcagagctatcgtgtcaactcaggtctttgtcatttccaaagaggcctcttcacagtcccatcctctctaccgcatagggcagttacaaatagattcctccattccctatacacttactgagtgcctaccgtttgcctggcactgtgcaggacctggaaacgtaaccatgaacagaggctcaccccagacctcaagcccagcagggctgagaggtacatgcacaggcagccaccaccagtgagcgaaacagtctaggatgaaccagtcccaaagaagatgcagacccaacatgaaggggagcatgaaaggagacacatcaaggcccatggaggtggggaagggaggtacggggaggccggtttttctaactggctatgcactaaatcttgagagaaatcagtgctgttccagggtttctgaaacagatgcacactccagcacaggtttctttatctcctcctgtccccttttaatataactttcataggagtccctgggaacttgtatgagaaccacatggatttcttacgactcaggtttgattaaacagtgggctctctgacatttgatgctgcagaacagggctgtggaaacccagggctccgagagctgacaagtctggttctctcccagcattctgacagcagccccagtgccttcagccctgcgattcccaatagtttgtcacttgtcagcattggcctcagccatttattgcaacaccgcaaagaagtcagcacgggcatttctgttacaggcgtggaaacctgagtggcagagatggggaattccccaacccctgcccgaggagtaggggccacaagaggtcccaaatggttaccagcatccagtgggctgaaagtcagtcatcctggtgagaaaagagagagtagaaagatgccttcagaattatgggatgggcttcttgaaataaggctagtaggagtggtcattagtgctaaatgcagagataattcaaacaaggtgagaatggataaatctgttagacttgacagtgaggggacattgctgactttggccagatccacagagtcaaagacagattataatagtttgagagactcatgggtggtaatgaaaggaaatagccagtataggaggctcagtataagccagtgacatgtaggatcagtacacatgttcccaatctcataatactctttgttttctgacctccgctccactttgctcattcaaggtggaatctgccatgtggatgagattgcatttaaggagcataggtacacagatcgtagcctcctgccttctccctttttgccattcctaaccactctcccactactgccttgacccatgaactcaaagaagttcatttttccagttgcaaggttgggaagacagacacaatcactgcattaacagacttggtcccaatacatcttgtggttattgatctttcctgcttaattttaagctggtgcagacttcattaata

SEQ ID NO: 29542 - DNA, 1057 bp, Homo sapiens
gagcttggtccagcgaacatctctttttgtctgccagtctattgctttttctgtagcatctatgaaaacataccctcctcaggcaggcacgcgatggctctcgcctgtaatcctagcactttgggaggctgaggcaggtggatcacgaggtcaggagttcgagaccatcctggccaacatggtgaaaccccccccctactaaaaataccaaaaaaattagctgggcttggtggcatgtgcccgtaatcccagctacttgggaagctgaggcaggagaatctcttgaaccagggagtcggaggttgcagtgagccgagattgctccactgcactccagcctggtgacagagcaagactccttctcaaaaaataataataataaatagaagaaaacataccctccttcttctggttttggaccagacaaccttcatataacccaagaaagattattgcccagtcttttaaacaaatctaagtgatgatgatgcctagtgcttatggaagtgtttgctgcgcgccaggcactgttctgagtgcttgagaggtaggatctcatttcctcccccaaagtccctgccgtgggtagtattatcaccttccttttctaaatggggaactgtgggaccgagaccaggagccgttggcccggggttactcatctaggaaagggaaactggggtggaaacagccagtctggctgcagagccaagtgcataagcaccatgacaactgcttctgtgaatctccagtgtccctttccagctccccccacatcatgggacggggtgtcagcagctggagaaagcactcggctaatggaaggcttagatggctgtgtgaagagtgcatttattacagaatagtacacaattcggattgataggagccatggaagtcatatggcccaaaggtcccatttcacacatgagaaaactaaagtcacacagtatcatggtccaatgacattttaaaaaaatcctttatttactgccattggtcagcatgaattatgccaatacctagtgagtgcctgcctagatccaggtaccatgag

SEQ ID NO: 29543 - DNA, 1028 bp, Homo sapiens
tttttttgacagagtttcactctgtcacccaggctggagtgcagtggcgtgatcttggctcactgcaacctctgcctcccgggttcaagcgattctcccgcctcagcctcccaagtaattgggattacaggcatgcaccaccacacccggctaattttttgtatttttagtagagatggggtttcaccgtgttagccaggatggtctcgatctcctgacctcgtgatccgcctgccttggcctcccaaagtgctggaattacaggtgtgagccaccgcgcccggccagaaccgactttttagagttgagtaagttgaggcacagagagattaggcaggttgcccatggccccacaggaaacaaggagcaacgttgagactggttgtgagtttcttaggatatagagaagaggcactttaacagaaaaagcagggcatggggagtcaggctgacctgggtttggctttaattccttccagttactacctgtgtgatctcagataagtgactcaacctctgtgcttcattttcttcaactgtcaaatggagaataaaaacttttgtggggccaggcgcggtggctcacacctgtaatctcagcactttaggaggctgaggcaggcggatcacttgaggtcaggagtttaagacaagcctggctaacatggtgaaaccccatctctactaaaaatacaaaaattaccaggcatggtggcaggcacctataatcccagctactcgggaggctgaggtaggagaattgcttgaacccgggaggcggaggttacagtgagccgagatcatgccactacactcaagcctgggcaacaaagtgagactctctcaaaaacaacaacaataacaacaaacttacatgggatgttttgacagtagctgaaaagttgcatgcaaagcacctagcttggtgttggccctgtgttacatgcatagtcaatatttgcactctgctctttccttgacccttagtattagacacagaagtacctggttcattcctttaggcagca

SEQ ID NO: 29544 - DNA, 1035 bp, Homo sapiens
aatgtatcatcagattcccatacctgtttctaccaaccacatattcagcctggtttcaaagtttatttctggtttccaagttctttggattgaatctatactactgattggataagactgaggaaatgtatgtgttaatggaaatggcaatgcattcctattgcagttgttaatctttccgaagattccagactctgatttttaatggtcttcatttattctaatgagttaacgtaaccacagattagtaaacagggactatcgatcttcacagagcgtaaggaaggaatttacacgtagtaagggcccattgttgtactaaaatcaccactgacttttcgttcagcattgactctgcaccaggccctgtgctaagtgcttcctgtgctttctctcatttaatgcccactacatcgtttgtaaggatcgttacaccatttattcaaaatctcactatttgtcggcagcaaagtcaagactggaacatggagcattccgtattgaaagcagaaggctcctgcccctgtagtgccttaagtatgtggtctgttgaaatcttcactccccacctagaaaaaaaggaaaagaaggaagaaagaaattacacatagtaatgttgattactccctaaagtaattaaccaggattgtgtaatgaatgacaacagagacagacctctctgatgaggtgacagtttagccgagatctgaagcgtgtcctgaagccagccacacacttggccagagaacaagaatgtagcagccctgatgtgggctccagcttggcctgttctggaactgacaggtgggaggctggaaggaggaacttgagttgagactggggagctaggctagagcttcctgggccatgatacaatgacacagaatttgcattttgttctgtaacacactggcaaagacggcacttggctgagaatatccatgagcttttgaacagtagcaatcatgcaatgtccttgtagggatctactgaatgcaggacgatctttctccctagaaagaaagaaagaaacaa

SEQ ID NO: 29545 - DNA, 1040 bp, Homo sapiens
cagtaataacccctagactagcgttttctagactaattccagaggtcactgcaagggatgtgaatatgtgtttagaaattgtgaacagaggccaggtgcggtggctcacacctgtaatcccagcactttaggaggccgaagcgggtggatcacaaggtcaggaaatcgagaccatcctggctaacatggtgaaaccctgtctctactaaaaatacaaaataaataaataaattagccggtcatggtggcacgtgcctgtagtcccagctactcaggaggctgaggcaagagaatcgcttgaacctagaaggcggaggttgcagtgagccgagatcgtgcctgcatactgtgtctgccctttggagattcatatgtgcatgttagagatcttataaagtctggaagtaaagaaagctattacacccagaagcatttcccagttttacttgatcctagagctacggaaataaattagggacaaactgcctgtagatggagtctgtagaataatcccactgaaagatgtgtgctattctaagaacagttcttctgacatcgtgctcaatagaaatgtctactccctactttcttttgtactgtaggttctcattcatctttctgctgcaaggatgtagacactgtcttaggtgctataacagatgtcccatagactgggtggcttaactacaaacatttctcacagttctggagcctgggaagtctaagatcaaggtacccagccattctagtgtgtggtgaggacttactttcttgtttgcacatggacaccttctcattgtatcctgacatggcagagagcagggaaagaaaatattctgtctgtatatcctctttttttgtttttgtttttttgagacagagtcttgctctgtcacccaggctgaagtgcaatggcaatatctcggctcactgcaacctccacctcccgggttcaagcgattctcctgcctcagcctcctgagtagctgggattacaggcacacgccaccacacctggctaatttttgtatttttagtgg

SEQ ID NO: 29546 - DNA, 1050 bp, Homo sapiens
gtcagtaactacctctaacttggggcaatgccttcaaatgtgaaccttctctttagtgagccgggaagctgtatgggattcccaggtactatggcatccactatcagattgatctgactctagttggagactaaaatcagaagcgttgcagcagtgtactggataatgaatggagtgatgtagttagaaaacagttggcctacaaataattctatttagagtagtaatagtagttatagaaacaacacatgtttactgagccgttttcatgttcttggcactgggctaaacactttacatgcactatttcatttaaattgcactatttcattaaaataacatctcagtcctttgtgagagacgaatgaggtggaaagaaaataaggacaaaatgacagggattcctctttattctctggtagggaagcggggcaaggttcatggttgatgttccatggagcttctggcgtgaataaatgaagatggataagacgcagtcccagccctttagtaatgtgaacttggtaggaataacttacccgaatatataaatatgatgtaatattgcatgatgcagattaatcaagttatttataatttacaatgatccagttgagggagcaagtaattatgcctaagcagagcccccctagctccagagggaaagtgcttctggagtcaggagttggaaaaggaggagaaagtggccagggatacaaggcggggaaaccgtgttctagcaaaacagtaagatgtgcatgtgaagtcactgccttccctgggacaggcaccctctttagagacagcaacaccacccagcccagccccatctacgcttgttcatgtccacttagcacttccattcatctgagcgcctgcagtgtggtgtttgcttcttgtttctctctgccactaggatgtcagctccctcaagccagggctttgttttgttcattgtttctattagttcgctttcatgctgctgataacgacacacccgagactgggtagtttataaagaaaaagagggtttaatggactcacagttcc

SEQ ID NO: 29547 - DNA, 1034 bp, Homo sapiens
tgagtgtctttccatgacaggtatgctaggaaggaaacacattaaaacaccatccagtagacgaccttagggaaggaggaagaacaggagagaaatggacttgcgccgtgttccacagttgcattcaggaagcatgtcagatggtaccctcagcagacacccgtgacggcctcccttgatacagctccaagaaatcactttgtacagctgttggaaatggcatttctcagaaatgttcctgtgggccccttatgatatctgttagtgctgtagaatgaagtaataggaaacaggacatttgtgagggattggtgcatgattaaaaacgaactgtgggaaattcgcagtggactggtacacttctctctgtaatgaccaattagtggggatttgcaaatagtgatggctcagcctgcctatctctatggcctgtgaaatgctcattggtcttcccaatgtttacatggcccatttgtttccggcctccaactcctggtaccaacaggctaccaggactgaaggtacctctgctctgaactccactcactcaaaacatgcagctcctgtctacaggaggaaaacttatttttgcgtagagctttgtcaatgatgcgtgctgtcactcatctctcatgatgaccctgggggttggaaagataagtatgattacctccacctcacttaagttaaagtgtggggttgaagagcatttgcttaagattagactgctaacaagtgctgacgctgatatttgacttttcccttcccaaaagaaatggtatgagatagaggattgtataattcagtagacatggatgtagtggagatcttaagggaatttgaaagatatggaccacagcccctggggaatgactgttggttaccactgttgagttgcacttgaattcaaaattcctcttttccatggctttggatcccacaggctgtggtctaacatctgttgtttaagaatcacttactcaaccattgtggaagacagtgtggcaattcctcaagaatctagaaccagaact

SEQ ID NO: 29548 - DNA, 1027 bp, Homo sapiens
aaaagttttaaaagttaaaaataaataatttttaaaacagaaaaatgcgtatagaataagaatataaagtattttcatacagctgtacaatgtgtttgtgtttcaagctatgtgttgttataaaacagtcaaaaagttaagagccaggcacagtggtgtgcaattatagtcccagctactctggaagctgagacgggaagattgcttgagcccaggacttcgaggctgtcgtgttctgtgatcatgtctgtgaataaccgctgtactctaacctggacaatatagcaagaccccatctcttaaaaaaaaaaatagacagttggctgggcgcagtggctcatgcctgtaatcccagcactttgggaggctgaggcgggtggatcacgaggtcaggagattgagagcatcctggctaacacggtgaaaccccgtctctactaaaaatacaaaaaaattagccgggcgtggtggcaggcgcctgtagtccaagctactcgggagactgaggcaggagaatcgcttgagcccgggaggcagaagttgcagtaagccgagatcacatcactgcactccatcctgggcaacagagtgagactccgtctcaaaaaaaaaaaagagatagttaaaaaaaattttaaatttgtaaagtaaaaaagttccagtaagctaagtttaattttttattgaagaaaaatattttttataaacttagtatagtctaagtgtaccatgtttataaactaagtgtacacagtagtgtactataatgtcctaggccttcacattctttgaccactcactgactcacccagagctacttcgatttctgtgaactgtaatcatgatgagtatcctatacaggtgtaccatttttttctcttatattatatttttactgtactttttctatgttaagagatagaaatactcaccattgtgttacagttgtctacaggattcagtgtagtatcatgtatacaggtttgtagcctaggagcagtagactctagtatatagcctatgtgtg

SEQ ID NO: 29549 - DNA, 1089 bp, Homo sapiens
atgtatgttatctgttttaatcttcactatacctgtatgaggtagatgttgttagtattctatttaacagaagaggacgatgaggcccagaaatcttaagtcatgaacctaaggatacagggttaataaataccagacctgggacgtgaaccctggtagttgggcccttgactccttgctcctaacaactgaaagtatgaattaacatttcaatgcctgttttaataactttctacacaaataactaatggcccattcacatcatcccctgcaaatgttttggggtgacaacttgttaaaatttaatattcagagcaatacagccccagctatttgacaatttcagatataaatctaccttaaagatgtacaagtacaaattatgcaatttgatttttaagtgcttttctagcaatataaataataaagtgtgttggaactggcaggtatagtacattaaattgagtgcaattaaaacactgtgatatttttaaattaacaagaaaaaaataagtggcgaaattaagaaacctgaatctgtctttgcagcctcctccagctgataactgggtggatgattgcagagggtattagtaacatttatactctggatttcaagtgtgatggttgtcacatttaacacaaagagcacttcaatttcacttctgcataacaggcagatgacatttcccacaacataatcttttcagttttttttttttcctaaagcagatgataagggggtattctgagaagacatctgagttgaaataatgacttgccttgtggataatgtctcaatgagacatctgaaagtcaagattctctttgttagacgcaggaataatctgcatctttcacactcatgggcggccttcaccctctccaaaagctaacagtctgttcattggaaaccaggaagatggtgcaactgttgaggttgtttttcacgaccttcccaaaggtttgatatggacagagtgagatctgctctcagccggtagttattgtaaaaataaaggctgatcaatacaaatttgtgcatcaaaggtctcttctgccccccaccccattctggagttagaaatc

SEQ ID NO: 29550 - DNA, 1033 bp, Homo sapiens
cgagaccagccaggcccacgtagtgaaaccttctctactaaaaatacaaaaaattagctgggcggtggtggcaagtgcctgtagtcctagctactcaggaggctgaggcaggagaatcccttgaaaccaggaggcagaggttgcattgagccgagattgcgccactgcactccagcctgggcaacagagtgagactctgtctcaaaaaaaaaaaaaaaaagaaagaaagaaagaaagaaagaaagaaaaatactgaatagatatctaccctctgacccttcagttgcagttgtagttatcgctggactatgaaactgttattgcaaaaacagcccaggtattcatcactgagagaatagataaataatttgtgttccgttaatatcatggtatgccactcaccaagcggtcagtaaaaacagattagcaatacatgaaacaacttgaatgaattgcagaaacttgatgttatgagagaaagcttacccaaagagtatatacttcaggattcctaatagatcgagtttggggacaggaagaaccaatctataacaaagcttaatcaataagggattgcctatggtgggaggatgcagatattgtcagagaaggagcttgagggaacttcctcatcactccagaacgttctgcatcttgaaaagtgtttgggttacataggagtatgcattgtcaaaattttcccagtgatttgtgcatttcattatatgtaacttttaccatgaaggcggggaaaaaacccataaacattattgaatcctggttaatgatatacatattaaaatgcctaggaagtaatgtgctgctgactatcttactgttttgaaatgcattaaaaaaccaaagatgtgttgatagatggatagaaggataaatatgatagaagcaaatatggtaagagggtcttggtacatcacaggggcagctatatatatgttcattgtagaattctttcaactttactgtgtatttggaatttttcataataaaatattagggaaaaatctgaaaataa

SEQ ID NO: 29551 - DNA, 1031 bp, Homo sapiens
gggccgagttgggacttgaacctgtggcttctttcctagccttgaagctcaccccttataccaggatactcttgctgctttctaggagctcccccttcctgtttcctcctctgcagtgcagatggtgccatgagagggagctttccctctgttctcaggccctgacgaggtccctcttggccattggaggcggtaccctggaggcttgtgtgggggtgtgggctgagccgtgtgatccatgtttgctataatgggaagcagctcccagaagagaaagacatgcatttgtatgcagccagtctgatggggttgaaataaactcagcactgatcaaacgacacacagccagcacattgcagggaagacaaaccaacatggaatgctgatttttctcactgtcatctttagaaaccttctttcttgtcgcccaccggggcagttaactgttaggagccagccctgtgttcaaatccatttattgatggatgtgttttccatttatcatctgtgggactcttgggtgatgtttcttttccgagctccaattctttcatctataaactgggcatgttaatggtaactcatagatttttagagttaaagtaatgcaagtgccttacacaatgcctgcacgtattaaacattcagtagtaggtaggtgctattatcatcatcgaaaacattatcatgtttattgccttattgacttggatgaacacggtagtgtatataataaagtagccagtctagaatctggcctgtggttatctgtaataaatgaaagctgtggaaatagtgtgggataactcaaagacctgaataattcagcagatacaatggagttggaagattctagggacttaaattcttctcccagctctgtctcaaaataactgcattgccttggacaagtcgctttgctttccataacttcactttcctcatcagtgaaatggggctgagcattgtgtggtattggaaaagaataactgaagtgcttagttccatgctggaatgaagtagagacgtga

SEQ ID NO: 29552 - DNA, 1050 bp, Homo sapiens
tggctcagtgcttggcacaggtggctgttcacagatatttttagaagcaaggaaaggaggaggggaggagtatatcataagacatttggcatctcctgcctttgctgagtaaaggggaaggaatttaggatttgtacggtgaatattgccacgtgtttacgagtatttatataatgctaatatttcagttgcagggaaaaacttgtcctgaagatgttaaagctggaagtcagtgatcttctacacctcctggaattttatagctgtgtgctctcaggtttagagtcaggaggggaaggcccagggccatgtgtcatttcttggcagagcttggcttaggactacttttcatccattccctgttcttttccatatttcccagttttcccatttttgtctcaatctgtctgcctgtctgttgcactctacccatctacttatttacctgtcggcttccactgtgctctagaatgttgcccactgtgatcttttgggcaagttaatgtctcagggcccagtttcctcaactggaaaaaaaaaaaaaaaagagtagctgtgaaaataaatagtgatttataagcgctagattttgggggctggagaatccttccttatggggggcagggaggctgtcttgtgaactgtatgacattttgcagctttccgaacctactatgtaccagcagcatctctcccctgatttgtgactccaaaagtgtctccagacattgccaaatgtctccgcggcaggggggcaaattgcccttggctgaaaagtactggcacagagtaagcaattattaaatattgttttaaaaaaaacactgtcattatgactattctgcagttatttaatttatctgaaaagtgttcatttggtgcttactgtatatactgcagagctctgagccgtgagaggcaagtggaaaatgtaagcctgatgttcttgctttctaggagattacgatgcggttcacagtcacacacctgtggatgggcttccgagggggctttgaacgttttgtttcaacctaaatttagcaaaaggac

SEQ ID NO: 29553 - DNA, 1038 bp, Homo sapiens
gccttctcctggctgagaagggccaaagcttctttcatgatcagcctttgtccttcctggaagaaggagtgaagggacactgctacctttgtaaactgatgtcctgcttttaggcagggcagagagcttttgttctgtttcttctcagttgtctcttattcaaaataatgcttttgctaaagtgacatattttgggctggcagattctgatctcctacaccttccaagttccaggaacatgttttggaggacttctatggttccttccaacttcgatattatgtgtttccaggaaacaggtgtgaggcattccatggtagccagaggtagcatggaagatgtttccttttgcctatgtctctgaaccccttactctgaaggggcgtgaccaccgactctcccagtttaaacagaggtgggagaaggtctttgtgatgactttccacttagtttatagaccagtcctataccagagctgaggccaggattattaggaaagagaagcatgaaccccaaactcctctccctcattgaaacatgaaagctaaacagggcttccatgcaatttcccaggacaaagagaaacaagcaagagagaaagcaaaaagccctcccgcagatgaacaaagagtgtttcaaagcacaatactactgttgttttagttcctctcgtaaaactcttcagtggtctctcactactaataggatgaagtccagcatcaaggcctctcatcaccagtgtcatccctcacctctgcaccagctcccccatcccatggtctcccattctctgttcctttgaccacatcagtaccctcttctgccgtccttgtaggcaagctcatgttcgtctttcaagatccaacacatcactatgatatggctagaattgtgtctcccacaaaagatgttgaagtcctaaccccctggtgcctgtgaacgtgaccttatgtggaaagagggtctttgcagataatcaaactaggatgaggtcattaaggcggctgtaattcaatttgactgtgtccttgtgcagag

SEQ ID NO: 29554 - DNA, 1080 bp, Homo sapiens
ctcactattgccatttagcatacttgctataatagaagtatgtatgccggtgttcaggaatccagaaaaaggggcacctaagtatctggggacatccaagaaagctttcatggaagaagatgcctcctgggctgaatcttgaagcatgactaggaataggccaaggagaggagtcagaagaccacgcttgagtcctgccattgttgggctctccaggaagcgatggtcaaggtctgtgtgctgagatcgtatgccagatgtggtgttagggatcggcatgtttaacccaatcagtcagatgatcccagtaggaaaagcaacacagcaagtctgaaacactgtatcataccacacagtgcctcagctctcaaatttctctattggcttttgagccctgcagaaaatcagctgtgtctttctacattcagggggtccttctccgcttctgtactcataccttgaggtgctctcatctcatcccccgcctccttccatgccctcatctttggctctcagtgattctgtattaatagcagcgattaaactgcctcatctcatcagggaggagatattaatcttcatcaggcccaaggaagagcttaattttttcctgctcttctcctctccccaggctgccccactgagctcaggcactgtcagctgcaccactgtctgtgggacatttagtgatctgcttctgcagatgcgtttcagtgagttcacttctctgactccctcccttagcctccctgcacccagagcttcacaggctgttattgaagaccactgtcaggagagggagagaaggggaaaaatactccctcaaatagaaattcccaacttcattgtcttgcgtggctgcagggtaaattagaccaggacagtaccgcagctgaaagctgtaggttttttggtttatgaaatcctattcagcccttggagaagtatgccttttttcatgctatgattctgcagttagctgtgaactgaggatgtcagatgcccaggggcaggaacaggagacagggaggctcgagagttcatcaagaaattaggatggaaaagagctattcccaaagc

SEQ ID NO: 29555 - DNA, 1060 bp, Homo sapiens
gtaggagagtctcagctccctccaccagaaatgtttgcaactaatccaggtgactaatatttgatgcttcagttgttggtctttctatagatatttatattgctatcaacctgtgccttgaaggttaaaactggcttttgggcctctttaaaccatctcctgtgctttgcacttagtgggagtgcattcagtagttgaggtggtgttcctatttctgacacttaatttgcatttttaacctacccaagggagcttgttattgcatgatgtatcaggtgagctattgtcaagactgtaatctaattaaatgctggggtccagaagcctcagtgcttataatgttgcagcgtttattccacacgtgtggccttcgtgctcagagtgctgcttatcatccacacagcagacatattttgacaaaggcttgccttcttttatgaatcccaaactagtagccttcacatttgcaattttccttctatttaatgaagtggttccagatcattctgtgacaatcgaaggtaaacattgctctgcacaaggcctactcttctgggattcttccatgcctctttcacatttctcaaactctcaggcccaaatgtcagatggtgtgggatttggagagtcgggaatcctgagcatatttgagttgaaaattcacacagagcttgagtgagtgaggatggcggtggcgggggagggcatgaactgtttttgcttttatttaatggcgcacctttgagaatgatcttgtggcttttgagcaggttgcaggacttcaaggtctccatagtggtttggtttgcacctttctttttggatgtggaggtttcccctaggtggccagctgattttttggtgcctccatttatgccctaaccccttctttttctcttagatcattgcataccgagcacatatttattaagtaccaagtgtacgtctgatactggactagagtccgagaaagacactaagattaagacatagtttctgtcctgatgaaaattgttcttttgttagtcttaggtgataatgacccttttctgaagataat

SEQ ID NO: 29556 - DNA, 1048 bp, Homo sapiens
cctgggcaagaggaagactagcagctcccaggtacgccaggcatccccattccattcccatcacagaggagcatccacctcctgggagtggggatagtaggactggagcggacaggggctttgcagtcagaacactcagggtttgaaacctgtctgttccacttaccagctgggtgaccgtgggcttgtctcttgccttctcatgtgtaagtggaaacaacaataccgtcctcacagatgtatttgaaagtctaaagaatgatgagttttgcaggcaactgacacatattaagttctcagcaaattgcagatacttgttttattcctttcgtttttgaggagatcatgtattgataaacttcagatctgtgattgcaaataaaatagagtattaaaaaaatctgttgcggcacatagttgttgctcagtaaatataaagcaaaggcataatttgcacgcacttggactggattcacagccagcggggcatgatggaaaaagcacaaaatgagaactgagagtggctgagtggattgctcagggtcactcagctggtatgtgaaagagctcactttctcattgaatctccacaacagccttgtgagtcaagctgggctaacgttatctgtctcttagagaaaattaaaacccagggaaggtgaatgtcttgtgcaagtcaaattactggattgtagaataatgaacttcatcactaaatagccatgtgacaagtcgaggactccctttcatcatctgtaaaatgggggtggtgatatctgccctgactacctcaaagagttgtggtggaggtcagatcgaagagcaataataagcctggcttctatatagagaatgatctatggtggacaggaatttaggccagatcaccggctgggtagccaacatacttttacagagaagcagtgaggtgacctgaacttagatggtggtagtggcaatggagatgaggcagaagtggctgcctggggataggttttggaggtagaggttttaggccttggtgatgtttgggttgtgaaggagagag

SEQ ID NO: 29557 - DNA, 1078 bp, Homo sapiens
ctggtctcgaactcctgacctcaggtgatctgccctcctcggcctcccaaagtgccaggattacaggtgtgagccaccacgcccagccttaattttaattttaacctgtgtgatgactatatagctgggctcactttatgataattcactaagtatttcacttaggacttgttcatttttctgaatatgttattttagttttcaaaaaactatgcaaatcttgatggtagcagaatttgaagtgattttgtaggttttgcattgtttttagatgagaggaattttcttaacctttgggatatgtgaatctatgtcattgttgggctttgaagttcaaatgctttttaagaatgaaacttttctttagagatcattgtttaacacttctatgtaatgacattggcttttttcctttctgatataccatttggacagatattcaccctatgagagtggatcacagcactgatttcaagatctgaaatttactcataaaaaccctaatctgtatgagtgttttcatcagttggaaacaagaccagtattcttaccagctcttgcaatgacacggctctaattaatactaaaacaatattactgcttgatattgaccccaagccacattagataatattctcctttgtgttattcaacaaacatgcattttcataaaatccttattcctggaaatggaaaaaaaaaaaaccttttattattgtattgtggaagatatagaaacacaagaaggaaatgtactatttaaactataacaataatggaaactgtagcaatcgtttctatttatcgcatgttaaaccaagattggctgcatctggcttgcacttgtgttgggtttggcccgcctactgcttttaccatttttgaatttgttgctaatggttaaatattgggagattgcacataagaagtcatgatttttggctttccctaaaaaaagtgaaaagatctgcaaaaccagaccctcatttcatcatagtagctactggctggagctgagtactggctgtccatgtgcacagtgctcggatgatccattttgtcacgatctccatccttc

SEQ ID NO: 29558 - DNA, 1056 bp, Homo sapiens
tcctcagggctgaatcagagcaccgctctgctccttgtcagcccctctggcccatcccctaatccccaccatactgcctcgcattatctggcatcctctacccagccacgccagattcttttaagtcctggtgtacatcgccctctgtgggctctgctcttcccacctgttctttcttctccctgacaccctctattgctcttacttccttcctcttctttgtctggctgcctagatccttgggtctcagctgaaacacaattaattgctcctgacccttaactagcaggcttccttggctccctatttacctaactccttgtatgtacccttaatactcagggctctttatttttcttgtttttataatcttttgttttcacagcagatttacaagctttgggaatggagaaagcgggtctctttagctcgcccttccacctctagcacctactgtagtgccgggagaagatttggtccccaaatgtttgttcaatgaatgagtgaacgaacacatgtgccctcctccgactttgagtactgacaggtctcatcattgcctcctggatccactgtggactccttaccatgactctggggtcttccacaattgttttttccccaacctatactgtctgtcttcagggtataataccctgttgaactacctgaggaaactatttctctgattcttaattttcactcttgcggtcttactgcccactattcagttcttttttctgtaaccctccctcccagccaacaccttcaatgcccatattcaatgtcattttcccctaatgccagatcccatgtggaaacatctatgaccagcagtcatcaagagatattttgcttgtttgatgtctttctaaccacttacctatgagtttcttgagagaaggaagtgttttattcgtcgttacactcccagtgtctaactgagcactcgctcctaatgtgtccttagtgaatgttccctgggtaggactgtggtattgagggacacaggaaccgctggtagggaagggctcttggtgctgtgagcatctgtga

SEQ ID NO: 29559 - DNA, 1038 bp, Homo sapiens
cactctttggcagaaagccaacccaaattgatttttggtgaaaagggaatttgatagttaataggatttgtaagttcagaggtagggcaggcttcaggcagagttggatccaggggcttgtagctaggtctccctctatccctttgttctatttttctctgccttggtttttctcagggtgactttatctacatagaggaagtttcaggcttgcatcctgtcctcaccaaccccagtagaaagaggattttttccttttgctaattcactaatattgcctctgattgaattgcctgtggtaactcctcctgaaaccagtcactgcggttatgggaggggagtgagggaggctggtacttttttgttaactttaagccctgtgcctatttctggtcacaggatgatggagagttgcttaaaacacgctgggtgagattgggtgactgggatggccaccaaaggcaaatggcatggtttcccaaaaggaagagattagaagttgatctggattatggagaattcataactgtctgtgtttatggttagatgtgttgatggtcaatttgaaggcagcttagaaccatcgtggccggtggagtgaatgtgatcactaactttgagcaatttcaccagactggcagatagattatgggaaactggaaagatcatgaaaatactttgaggcaacatgacagactgggtgtaggtgctgtatctatcaacatgatcctttagaatgaaccccacacttgggaccaaatcacgagctgcatttagtaggggctgggtgatgtgggcatgttaacacagtattttagctaggatgacagaggcaacagatttctgttactgagtgtcagttagtgtgcattcgggctgccgcatttgtatttgtggactctatgctgtaaggacaatctagatgaggcagcatgcttaggaaaatccaggtgagtgacagtgcccgttcaaatctggttatgtaagaaatggtgggaagaattgaggatgtttaccttggagaagcagaggctcagg

SEQ ID NO: 29560 - DNA, 1044 bp, Homo sapiens
gtaatcccagctactcgggaggctgagtcaggagaattgcttcaacccgggaggtggggctttcagtgaaccgagatcgtgccactgcactccagcctgggccacagagcaagactccgtctcaaaaaaagaaagaaagaaagaaaaaaaaagattaacgtctcctattttttttaaccctttttttaagtcaactgtggagaataaggtaagttttgtaagagtggccattgtcttatccaaggaagcctattgattcttcatgagagaatcattttctggtgctaaattttgagacataatttgtttcataggggtagtctcttttgaaaaatggatatggtcccttcaagaagagcagtagcatattgaataatgtgtttggaggagtttttttccatccgcccctccacccccaccccacccttctggtagatgtaagagtattctttcctttttcaatagttcttccttttccaagatacacagccttgaggcagaatcagagcacatcttccccacctcacacatgatttgtggttatcaaagcaaacaaacagtagtgtctgtactgtccttagattttgattggtcgaacagctatagtcaatcaatttattttagtcctattaatactacatagcatctcatattgttgtttgataatcgtattttggatttcatttgatctcttgcaatccttgcaacaaccacgagtgcctgatattgccatgggctttcccagaaaaatgacgggaggctccaggataacaaatcagttgccaggctcctgcagcttgtatctgcagagctgatgcttgaggccaggtttcctgactcccagagctttgtaaatgctgtgaggcccatgtgaaatgcagactgtgccttggagtttgcttgttatataacagagacaagatgggcacaattcgggtgacaactaatgtgtcttgactgcagagctgtatgaaaatgggtggttgaggactgtgttggatgcctcagggggccactgccccgatctgtgacaccacagtggtt

SEQ ID NO: 29561 - DNA, 1031 bp, Homo sapiens
catgcatatatacacatatgtatgtatacacatatatgtatatacacatatgtatgtatacacatatatgtatatacacatatgtatgtatacacatatatgtatatacacatatgtatgtatacacatatatgcatatacacatatgtatgtatacacatgtatatacacatatgtatgtatacacatatatctatatacacatgtatgtatacacatatatgtatatacacatatgtatgtatacacatatatgtatatacacgtacacatatgtatgtatacacatgtatatacccatgtacacatgtatacacgtgtatatacatatatgtatatacacacacatataatatacagtatatatactgtacaaatatagtataaatacgtacaaatataaactgtctatgtgtgtatattatacatatatgtgtatatacatatgtgtatgtgtgtatgtatactatatggtatacatactgtatgaatatatggtatatatattgtttatgtacaaatataaactctgtatgtgtgtatataaataaaataaagattcattttgtgcatattagtacctgtgactgtctcctgaaagcagaacagacttctttgagggtagaatgccacttttattctaacttttcaatacattattgatcttgcaccggagcacctaaactctgaactggtttaaaaagtgaattagggcactagaaatccttaccttccatttttgttccctcaaatttaagcgagaagttagtagttctttagttaacttccaggagctcccacgctatacacaggccatatggtgacaaatagacattctggagtcagattgctgggtttatatttttgttccatcatttactggcttgtgacttcgagcaaattgctttatttcctcttctatacattggggatagtattaactaatttacagggttggattttagtaagacaacgtatgtgaagcactcatgtatgtagagcttggcattgcagaaagatactgctcagta

SEQ ID NO: 29562 - DNA, 1030 bp, Homo sapiens
aagactgggtcactgtgcttaaactgttgatgcaaacaatatagtttattctgaacatctgttttccttctgggagtctacaattttggatgcctgcctaaccagtcctgggtgaaaaccctaggcacggaacctctaatgagcttccctcgtaaacatgttttcacacgtgtggtcacagctcattgctggaggaattaagtgtgtcctgtgtgactctactgggagagaactcttgaagcttgagcctggttccctccagactttgcctcatagaccttcttcctttgctggttctactctatgtccttttgctgtgatgagtcatagccatgagatgctgtaagtcatagccacatctacatgctgagtctggcgagtcctcctagtgaattgttgaacctcacctcctctgcatttttggttgttggtgttgttaaacagccagtcatatcatcttacggagctatgaattccattagcatttactggattccagctatgtacaacatacttgtaaaactccagtttgccttagaaactgagtcaaaccaccaaatgtgtccaggagtaactcgttcccaagacatttccagatatcaggcaatatggaagctacagagatgaagtctctgaagctcaattgagataggaaatgtaagttgtatagaagttgtatagaagcagaacccctagaacattgagggaaatgagtgctctaccaattccataatgtaatagtagcttttattaagaggagggtcatgaatgctgtcttgggggagttagagaagtgactttaaggcattggtggactttgctggtgttgagaaagaatattttgatcttccttggtatccgtcgtcatcttttagctttcatttgtgtgttgatctatccacccatcttcctgtccatccaattgtctgtctacccactcacccacccatctatctgtccagccttgccaggcagcttgttacattcatgagctttgattatgtgttaggctgtgttcaaggcactgaag

SEQ ID NO: 29563 - DNA, 1056 bp, Homo sapiens
ggtcttgggccccacctctatataccaaatcatgattttaccacttcctaaatacagcatgctcttccacgttgcgaatatttgggaaatctttttttccttggaaagctgttaactttttctccctgtcagactcctagtaatccttcaagactcaggttttgttggttgaactgaagctcatgcaaatgatcacttaagaggtgctgagattggcatacttctccagagtgcctggctttagtgtagtggaaattctcttcagccacgagcgtcccacaagggagcctagtttgttcatgtctttacttgctctgctaaattatgttttattaatgtgtgtgcttgtactgttgctcaggctactgtgctaatgactgataattgccttaatgagctatttgtaagaaatacagtaataccagtagggatgaaaccagaccccaccacagctggtggtctaatagccttttgactgactttatggaggagcagactgcagggttattgcagttaacataagcaagagctcagaatcacccacttttccctgaacacccaatttacccatcttccactcacgcattaatcatgtttatatgagtcgggggcaggttaggttatgctgcagtaacaaatctcgcatagaacaaaaaaatcactttgggaagccgaggcgggtagatcacaaggtcaggagatcgagatcatcctggccaacatggtgaaaccccgtctgtactaaaaatacaaaaattagctaggcacggtggcgcacacctgtagtcccagctacttgggagactgaggcagggaaattgcttgaacccgggaggcggaagttgcagtgatccaagatcgcaccattgcagtccagcctgggcaacagagcaagactccatctcaaaaaaaaaaaaaagaaattcatccctcaccctgtactacaagtccatcacaggctactcatggcactgctgcatgctgtcttcactctgggatcctgatagtgaggcagtctctatcagtactcttgctagtccttaagatagagagaaa

SEQ ID NO: 29564 - DNA, 1065 bp, Homo sapiens
tttgttccaacatatgtgtaaatggggatcttctctgccaggggttgaggaaaacatgcttttttctcgctgatatggtttggatgtttgtctcctccaaatctcatgttgcagtgaaatccacagtgttggagatggggctggtggaaggtaattagatcatggggactgattcctcatgaatgggttagcactgaccccttggtgatgaaacagttcttactcatgagaaatctggttgtttaaaagaatctgagacctcctccctctttcttgctcccacttttgtcatgtgacgtgtctgctcctcttttacctcccaccatgattgtaagtttcctgaggccctctccagaagtgcagaagatgtgggtgctatgcttcttgtacaagcctgcagaaccatgagccagttaaacctcttttctttataagttactcagcctcaggaatttctttctagcgatgcaaaaatgaactaatatcctaaattatttcttgactttttggtgggtctatggactgggctatttctgaagccactgtttaggtaaaagcattggtttctatcagaaattctacattcacttcctctcctggcaaaggtttttctattatgggagtagttcattcctttcatttttttcctccctgatataaacaaaaaacgtggagagccgtcacgggtaagatggattggattaattctgcagacacaatcagggagacccaggagcctttgggggagtgagggagatgaacatcatctcaggaagaacttttaacctctggaactccccaccagtaggacggactgttccagaacgcagtggtgatctactgccaaagatgttttattaggatagaaatcgctaaaggacaattatttatttatttatttattttgctggggacagggtggagtgcagtggcacaatcatagctcacactgcagcctcaaactcttgggctcaagtgatcctcctgcctcagcctcccaagtagctgggactgcaggcatgctcaacaacatccagctaatctttaaactttttgtagagatgg

SEQ ID NO: 29565 - DNA, 1031 bp, Homo sapiens
tcaaaatttgcgtttaatacatttaacctacattacagcatagtttagcttagcctgccttaaacatgctcactttcattggcctgtatttgggcaaaatcatgcaacctaagcctaggtatattaaatactgtactgaaaatgaaaaacagaatggttatatgggtactcaagtatagtttctattgaatgcatattgcttttgcatcatcataaagctggaaagtcatccaggtgcagtggctcacgcctgtaatcccagcactttgggaggctgaggcgggtggatcacttgagcccaggagttcgagaccagcctgggcaacgtgacgaaaccttgtctgtataaaaactagaaaaattagatggtcatggtagcatgtgcctggggagtttaggctgcagtgagccgtgatcacgccactgtgctccagcctgggtgactgagcgagaccctttcccagaaaaaaaaaaagctgaaaaatctaagtcgaattatcctaaatcggggactgtctgtacttaccttatatctagggttgctgtaaagatgaaggagggcaatagatccaatagtactttaaaagtggtaaaatactagatatttgcaagaaaagatgctagaacctttcacaccaaattttgactgtgtgagaaataaatcaacaatgtagtttcacagctccaagctaatagagattaaactatattactctcagtattttgccaaagtgagttggtcttcaaaaatagttttaaaagaatgtatgtataaaaagtttttaaagacaggaagtaaaactgcaacaggatttcttattcatttttatgaccatttttgtcttttaaaaactaggtccctttttatgcatggattctattatttttcctagattttacagtgaggggatgtgcattttcttgagggggtgccgatttggtgcagtgctgctttgcatatattattaaatcaaatagttttataattgaatatgaagtagggcaaaatcctaaacctagttagtatgggt

SEQ ID NO: 29566 - DNA, 1008 bp, Homo sapiens
tcttggacagctctcttctgctgtcccctaaaccccctattcctactgagatcagaggccatttgttgtacatagtcatcgcccaggtgccagcgtagggctgggtgcccgggaagcctccagtaagcagcacagaggtgcggggtgcgtctcaggatgccaagacttgatcccgactccatcatttattattcctgttctcttaaccttttaagcttcagtttctttgtcttaataaaaagggggcatgtgaagagatgacagtagtccttcatggttttgctgtaaggactcactgagcaaaaaacgtgtaatgagggcaggtatgggctttattaatttttgtatcctgaggttggtattcactacatattcatcagaatgatgatgaaaaagtaaggaacccccccactctgagtttcatttgctccacttcgaaaactaagatactggtgttaatctgtggttcctgggggcagagggctgctcatcagaaattccttgagggcctttcccagaagcacaggaccaagccccacctctgaaattctgattcctgccatcttggctggaatgtggcatttgggttctgaaacatgggtcctggggattgtaccacacagccctggtgaggcgtgatgggccctccagaccctgaggtctctcgcctgatcctttctgggttgggcaggttgggggcacatggagtggctagcaaatggttagggttctgacagtttcccactccacccctctaccttccacccgttcttcaaggcccactttatttttatttatttattttttttgagacggggtcccgctgtcttgcccaggctggagtgtggtggcgcgatctccgctcactgcaagctccgcctcctgggttcatgccattctcctgcctcagcctcccgagtagctggaactacaggtaccgccaccacacccggctaatttttttgtatttttagtagagacagggtttcaccgtgtttgccaggatgg

SEQ ID NO: 29567 - DNA, 1042 bp, Homo sapiens
tccagaagcctggtggggaccaagtttataccgccagaggccacaatgtaaggtgaaggctttttgtttgtatctgttgggtgcccgttgttttcctagtgtcatttctaccttttcccaaagctcgtgcgtttgtttccatattttaaaaatgactatgatgagatgtcgttctgaaattaggaagtacagtaatacaacattattatcatgatacaggtttgcatttataaggtgagctcccttggggctagtcatttttattttttttaattatactttaagttctgggatacatgtgcagaacgtgcagttatgttacataggtatacatgtgccatggtggtttgctgcacccatcaacccgtcatctacattaggtatttgtcctaatgttatccctcccctagcccccgaccccctacaggccccagtgtgtgatgttcccctccctgtgtccatgtgttctcattgttcaactcccacctatgagtgagaagatgcggtgtttggttttctgatcttgtgttagtttgctgagaatgatggtttccagcttaacccatgtccctgcaaaagacatgaactcatccttttttatggctgcatagtattccgtggtgtgtatgtgccacgttttctttatctagcttatcattggcatttggattggttccaagtctttgctattgtgaatagtgctgcaataaacatacgtgtgcatgtgtctttatagtagaataatttataatcctttgggtatgtacccagtaatggtgagagacaggactagctggatttcctaggccaactaagaatccctaagcctagctgggaaggtgaccgcatccacctttaaacagggtgcttgcatcttagctcacacccgaccaatcaggtagtaaagagagctcactaaaatgctaattaggcaaaaacaggaggtaaagaaatagccaatcaactatcacctgagagcacagcgggagggacaatgatcaggatataaacccaggcattcgagccagcaatggctaccctc

SEQ ID NO: 29568 - DNA, 1191 bp, Homo sapiens
attgttcataatatttgtcagccccaaacacaatgctacctgccaccctccttggtaaaggggtcaacctatatgcaggcttgcgaactcactgttcccaccaaatgactcatttaggttgaaaacatttatttgcacaaagtggagttgtgtcagtgtcactttgaaaagaaaaagacgccaatattccctaccaggatgttctgtcatgaaaacaaacagatgaaacaaaatctacttcgaggtcagagtgagaagaagagaaggtccggctgaaattatctgcagtcttgctggagggaacaaatggttgcagctcatgggtatagtggcattttacggctcccagctgtgccttcccttcttgaagatgggtgaaggggagtaggttctgggctagacttggggctatggagcaaaagcagagggagcttgtcctgcacagacgtggaagcagaggtcactgaattctgttccacagtagaagtcagcagtactttatgataacagtgcatccaaacgtgttctgtctgctgggctgggcctgacacccacggctgtgactctttcagaaactgcgaaccaacctgtgggtgggccagggatccaggtcaggagcagaagtaggttaaaggtgatcgagagagacatgtgagagagtgagcgagagatagaggcctgcaggataaggccacatcaggagtacagtccaaatataggcagtgattgtgaaacccagggactgtgggctaaaagtgctgtagattctgaaagtaggaagaggaaaaatgtggccacgggcctctggggaaagccctgttctgtgggctttggccacttaaatctatatgtcttctgctgctgtctcaaggcagtgatgcagccctgactatccttctgcccatctatccattcatccatccatcagtccagcatttgagtctctattctatgcatggtactggggatagtgtggtaaacagggcaccatccctaccctcaaggagcttacagtcttgcctggtaaaatgtacagaagcatgcatttttgaaacaagtaaaggaagaagacttaggcgctctccactccaaggccacctgcaccttgcctatgtagctttccccagcaacacgaagccagcattggtttcttaagttcccttcttgtctttatcatgtatgtacttagta

SEQ ID NO: 29569 - DNA, 1066 bp, Homo sapiens
gattacagggtaggctgcttggatccggtttggccctctcctcttgaatgaggagggaattgggcaagccgcaggtagaccaggtggccccgatagatagtgaccgaactggtacttgagctgcatctcctcttcttgtctagccatcttggtgttctaggtaggacatgagctaggtcctaccaaagacttgggcactttatttaagttctctcatgtaatcctactaacaacgttgtgaagcatgcactatttttacttactaaacaaaaaaggagcgatcgggactagaggacttgaaataactttctgaggcccagcctgctggtgcgaagtagatccagtgattcaacgtggctccatcccatgacatttagctgtcagggagctgcaaacctatgaaacagagctttcagattttggaaatagaaacgcaggcagcatagtgccacttgctgcctcctgggaaagccccttgtcgtgaataatagaaccagcgctagaaggcacgttgctcaggccggcaggtgagtccgagggctggggaggggttttctgggcagtgggacacctccctcttagggggtttcatttgtccagggccagtgaaaggctgtttggtccctctgctgagtgaacagtcccagcccacaggatgagtcagagcagagtccagaacagaaggcagagggcatgtgtgcaaaggccatgtttatcccaggcatttggatcttaagattcctgttcatgatgattaaggttttatacataacactgtttacagactgctttatgatcatttatgagtgtcacctggcaacagctgagttagccacatccatccaccgtggggtaattaactctgggcccacccagagcccagttcattgcttgtgcattattgagcctcctccccacaccctcattcattcatctatccatccatccattcattcattagagccctttttgtcagatgccacctttgtgggtagctttgtggttggcatttctttttcattgctgagaatacgtaatatgctggacatgttggtgttcctgttag

SEQ ID NO: 29570 - DNA, 1036 bp, Homo sapiens
gagcttgcggtgagccgagatcgtgccactgcactccagcctgggtgacagagcgagactccgtctcaaaaaaaaaaaaaaacaaaaaaaaacaaaaacaaaaaaaccccgcaaagataattgatagcatttgcgggtgtggcaaaggtgttagtacctcctctcctctgttaaagtgctattggagactttcattcagccatatttggcctcctggttacagtactgccctgagggctttgcagtgttagcctgatgtctggagaacctgccccatgtgccactgttttcatattcaggctcatgaagatgatcactcacttaagggttcctatttccttaaccttttgtagtgagacattgtaacttgtttcctgaaaccgcaaggcttaacatgagtgaaatatactctgtaggtgggtctttttcaaaataaggtccatgggtctatattctgtatgttttatgagagggaactatttaaacaaaactgttcaaattggggtttatattttgatgaatctgaaaaacaaatggctgtgattctttgctgtgataatttgccatggaaacatatttttgtaagactctgccttttaaccacacttctcttctttaaaaagggtcaagttattacccacatttgataaacccaattataattcttatttctttacctttcatttctcaaaaatcctttccaggtgatgaggtttagaccagccttcccacacagatgctcacctttcctctgagtcctccagctgctcatttggagagctggaggtgacttcgcctgggggatttagtgcagggacttctgggggcaccagggcccgctacaggctttgagcaagttgcttgttgagctggacagtaagccatgcagcgtgttgtgtgtgcagagcttctttttcggccccggggggctcgtaactgtgttctggaaacctggtacacaagaaggcatctggaacgtcagactctccatatgggagcctgtcagagaatgtcgtcgcgttttggcctagcagcc

SEQ ID NO: 29571 - DNA, 1051 bp, Homo sapiens
agagaattgggagtgagcttttaagggggagacagtttcagtttgggaagatgaaacagtgctggaggtgggtgttggtaatggttgcacaaaaataggaatgtgtgtgattctaccaaactgttcccttaaaaatgggtaaaattgtaagttttatgtgatgtgtattttactacggtgaaaataaggtatctctggcaggcagactctaagttggccctcatgatcctcatctcctgatctgctcttgtgtggtccctttcacttggggtgtgcaggggacttgtgacttgcttctaataagaccagagcagaggcgaaggatgtcacttctgtgattacatttccttatgtaagaccccatcttcatagcaaacttgccctgaaggatttccttcttggcttgatgaagttggcatgttgggggagcccatgtggcaaggaactgtgggtggctttgaggagcagagggtgacccctgcccacagccagcaagaaggcaaggacctcaggcacaaggaaatgaattctgccagcacaggagggagcttgcaggtggattcggccccagagctccctggggacaccttggctgtgtagccttatgagattcatgaaccatagacacagctaagccatgcccaggctcacactgagctataggaactgtgaaataatgaatgtgtgctgttttgagccatcaactttgtgacagtttgttacacagcaatagataactaatatgtagcctcccaggagacctgcctgagtccattccatcctagttttctactctggtcacctcaggtctccatctcctcctcttgtcctctgtgagtgggcagatggcctgcttttctgttttctgtttatgctcaagtgcattcatagttagagccaatttgtcctccttgtgccttcctgctctctctggtttccggtttgtgtgtcccatccagagaccgagggtgccaactctgcccacctctgtagaggtgtactctcctccccatcccccacagcacccccacttgcctctccaatataaggc

SEQ ID NO: 29572 - DNA, 1030 bp, Homo sapiens
tttgtgtgatccaggcactagcaaaactttatgaacttgcacttggcacgtggtgttggttatatggttcaggaagccctactgcttctccagtagtggtctgatttaatccataccaaggggtgcttgttctgggtcttagcttttgccattttcctttttcttctgcttggaattatctataactcctttggaaatacagcatttttgagctcattaaatttgttaatgtgtgtattatgttgagaaagcactcagttatttagagttgcttcattccctttcccttcatctctttgccttccccaccttagagtaattgtgcttggttaaccaggaaaccaagggctcctggggatgaagaagaggccagtctttctcttcttagccctgtccagagatctcagaaaatttgcagaggccctgaaggtaaaagcaaatggttgcccactaatcacctgaggcagtttttcaggagttttctgtctaccttgcacttttctctcataggaaatttgggctctgacagttaagagagatggcagccaatgaatgggataggaaaggccccttccttagcagtttgtaagaaaaggtactgaggtgtgctttacaagtattatgccttttgacagctctctaagctgagtagtttcattttacagctaaggaaactgaggcttggagaggttatttgctcaagcaataaagcccagagactggaaatgaattttgttttcagaatatttgcttttaatctctgtcctataatccaacaacccaggtgtcctaatactggaaatatacatacccctgggaaatacatgaagacttttcatggagtatgcagatgtggatacttctaagaaaataaattttcacatctccagcctcacatatgtgcccttccctgaaattgatcagcctgagatgatccctgtctggtccacggttctcccaatcctcctttcatggttatcctccctcattttgtttatttttatttttatttaattaatcaatttattta

SEQ ID NO: 29573 - DNA, 1030 bp, Homo sapiens
aatcaccaagatttagaggttagtgggttttcaagagtggcgaggaaaggaatcaaatccccctggcaggagagagaggtttttaacgggaagatcggattgctctggagtgagcagtagctgctgacaagtgtgggccctcctgcttcacttaatgaagtgtgctggggtgtggattaactttttgatgtgagccaatgcagattcctttggcttttaaaccatacctggaagggccttagaaatgaaatgaaaggtttttttcatctcatcataggtctcggaagtgcttccatctcttgggaaggttgtgacgaaggtttcctttgtttctgggttcctgagctgcgctttaaagttgatgcacagtgcagggagggtgcgtcctgtagtgtcgccatccttcagccacctacagtagcaggacactaggggggactagttatcttttccaccatcgaagaagaaaacaccagggcccatgttactgtggtttatcttgagggttcatgagcctgtggtttatgttgagggttcgtgagactgtggtttatcttgagggttcctgagatgaactttttgggatctagtacatgcttgcactagtgagtggattctgagtgcctaagggatgggcctgctcacatctaaattgtcatttggacaactcagaaccagttaactgcaaaatgttatgtgacattctgaaaagactcagttataatctctaagtatttaaggactacaaaaaggctctatcctttgaatattagaccatcctaactttaagttccctaacagtttgtaatcaacacttttggtgtttggtttttgactgcatattccctgcagtcatcataaaatcacatggcttcaaaatgtctctgcagtggactccatcaaacttaaaattccccttaaaaatacattccgtatacttagagatgttaacataacatttgacggtgtagttgcacttccacctcagacgctgtctgcacttttaatagtatgaaatcattaatgtcca

SEQ ID NO: 29574 - DNA, 1050 bp, Homo sapiens
catacaaagccttcttcgctccatcttcccagctgacattactctttcttccccctttccatgtagttaaattacttatttattcatttaaatttgtattgtgtctctcctacgtgccaagatctgtgatgaacatgatgacagaacagagttatggttctagctttctcaagtttatatcctttgaagttgtgggtatctagtaacttttccaccctcccctggaagattcctaagagccacttgtcttacatgaaattgataactcagacaggatcatcaggacaagaaaaacagatcttatatttgtttatattttattttatgtattttattttatttgagatggagttttgttcctgtcacccaggctggagtgcaatggcgcgatctcggctcactgcaacttccacctcctgggtttaagcaattctcctgcctcagcctcctgagtagctgggattacaggcacctgccaccacgcccagctaatttttgtattttcagtagagaaggggtttccccattttggccagactggtcttgaactcctgacctcaggtgatctgccatcctcagcctcccgaagtgctgggattacaggtgtgagccactgcacccagcctgatcttatatttgaaaggagctttggaggtcacctggtccagtgtccaggggtctagactgagaggaccccctctgcagtcttcctggaatcacccaggctttgccttggcttatctagcctgtcatctgcaggggacagtggcctttcctacattgttcactgtagtaacccccacatctggaccatgaggtgctcagttaacaattgttgacttttggacgaatgaggaactcttgattctaggaggcagcctgtgccttgattggacaactgtaacttttaaagaaaatccatgacattgagcccaaatctgccttcctataacatagctccatcattctgagccctactggcacagaatggcagctgccaacaaagctgccctctccaggttggattctaagacaactgtagctcctttt

SEQ ID NO: 29575 - DNA, 1005 bp, Homo sapiens
tgggacagccccccagttcatgaggcctggctattgcaatatttactagtagaggaactctatagcaagatgaagaggaaaaacaaacaaacaaacaaaaaaaaacacaaaaaaagaaagaatacttttttatacctcactatgttctttgaatatgtatttttcctttaaatttctgcctttaattcttttgttccaaagattgtgcatttttttctttttttttttaaactgtggtaaaaaaaaaaaaaataatgcatttccatgtctgtatgtccgtgcttagcttattctatcaatcacggaagaggcagtcaaggaggaaggagagacattaggagccgataaatgcatctgatcagaaatcagcagacagaattaccaaagtgtatctggtgctgaatgactgggggacaagcagaagtggaagagatctttctgcaacaggatattcttctagtcttctgagtttctggtctttgacaggcaattctggttggctgtggctggaatccacatgctgatagataggaatttgtgcttacaaagcaggagaattaaaaagacgctttcctctcctcttccctcctgtcttctccgttctttttacaatcatcttacacgcacagcctgagacagctggcatagtttttggaattatagtattgatatttccaaacgtgctctcagacagtggataataaacacctcattaggaaaccgatctcagaatgaactctggagtatgaaaaagatcatttctttttgttcctgtaacctagcattccttctaggcttcttctcctttaattgaaccacagcttagctcatgtattcttttattaacaccctgctctcatgtccataagattcaggaatttaggacccagggacagaaaagtgaataagccagtgaccagatttcccccagatgtcttgaggattagaagtacaaattgttgacagccattaaagagggtgaggaagggaaaaggaatattagaa

SEQ ID NO: 29576 - DNA, 1069 bp, Homo sapiens
aaagcaaatccttgcatatcgtagggcttaattttttattggaggaataataacatgcagactgatgcagtttgaaacattttcttcccatgtgtgtgtctatgtttgtgtcagtccctgtgtctacatgtgtgtacgtctgtgtgtgggcgggtgtgtgtttttctgtacacctggggggagaggtatctgtaaagtcagttctcttctctcctgtagggtggatatgcagcctacagatatgcacagcctgctactgcaaccgcagccaccgctgctgcagccgctgcagccgcttacagtgacgggtatgtacagagacagtggtgagctttgggatgcatgagagctgttccatcccaaaatgtcacccattttcctcccttcaccatttccacagcagctcttagcacatcgggcatcttgccagcctgggctttctgcagacctcttgatggcctctgtcatgcctaaagcacaaggcaccgactctgtcctccactccctctttcttgttctcatctcttctttgactttgactccagtccctctcttcctcatctccaactcctttcttttccattttatggaagtacttcagatttttttcagttattgcatttgggagtagaaatagaaaggttttttcctattccttgtaattccagtttccttatgataatccaagaccaagtgactcacaagtcttaaagcacagtaatccctttaatttttttagatcatacacttttctttatctgtctgattgtgtttcttctttccagttatggcagggtgtacacagccgacccctaccatgcccttgcccctgccgctagctatggagttggcgctgtggtaagtatataatataccattgctttataaaaccatttcattccttcttttacccgtagactacagaagatctagggaggtagtaaattcagcctttcatccaccatcaaggtattaaagccacatagatctacctggaagtttcatgtcaccctctttatttgtgtgttattataatgtgagccacatggcctagttaagggcagcagaa

SEQ ID NO: 29577 - DNA, 1025 bp, Homo sapiens
attaatttacttgtgagatgatcagcaggtttaaagtcttttattattgtcgtgtcatttgcatacataaataacaggactagcttaaccttaaaccagctctttcccttttctgcttttcttctcatttcacatccctctttagatcattagagctgtgatttagaggttaataagctttctgaactgtacattttcctattttacctactttgagagaacatgaccttgtgatagccaaataaggaaccgatgccagcaaagagtgtgtagtaatgagaaaacgccagatatttagttcttaaaagccattggaggaaatgagtagcataatcagcaacccagactcttcttacagctatttgactatcatagatttgctgactctactagccatagtaatatggactccattatttaaactgtctagctatcactaaagttccatgattggtttgtcacatattatttaaaatgtggacaaagtgatataattgacaaagtacaagtttttgagttttgaagtcttttatcatgacctctccagatggactttttctgaatgcaagcttgatttagtcgctcaagtcatcaagggaaaatttttataagaaaaacttgtcagcatgaaatgattctgtggggataggttaaaattgtctagaaatactttctccacccttactttccaaaatcaataagaggtcctttttagtgaactgtttccacagtctaccagagattcacaagcaacctaaaaaagttaatgcactttcagaatgcactcagaggttttgcgttttgcaggaagtagagatgggatgatacagttcttcgaaatacaggtgactcacctgtactacttagcataggcctgtaaggtatgccttaatttaataactacttgaaggaacctcagctatgatttggtccaacctcctaacttacagatatatttctcagagacttacccagaactacataaattattaatagtcaggcataaaacccaaccaatccatatt

SEQ ID NO: 29578 - DNA, 1035 bp, Homo sapiens
atgattccatagcaacaaataaatcctttgctactgaatggggaaaaggagtgaagatggcaggttttgtttttaggggtttctcagtgtcagcctaaaatgcaaatttttatagagtggtctttcatgagtcagttgtaccaaggacttcctcatcaaagatgtgacatttctcttcaccttttctctgccagataatgtcaatatgacatatttttttttgtattcttacggaggaataagtagcagcagagaagcttgttggctgctacttagttaaaatataaagggaaggaacctcctttgtatgtccttttctgacagcaaaattggcttagccttgaggtgtactaatttagcattcattcattcattcattcatagaccaaatggatgtaccattagaagttctccattccacagagttaaaacatttttattagacaaggtatgttgaagtgggcaggctccaaaagacactggaagggaactgcttcagaaattaacttttgtttggagtttgtagacatttaaatcacatgcattccatcatctccatcttatgccattacttacttttattttaatccttttttctctcaacttgacctttgaccttcaacctctgacatctctttaaagaagtgaatatgcagtattatttcatcaagaaatactcaaatgaaacattaaaaggaaccttttggaagttttacacactaggaaaattgtttgtgaaatgtcttccgttgtaatccaagagaatttactgtcatatttgcaaagagagactactcaccagaaacatgggacttccttattttgtaacattgctgaattactttataaagtggttgaatttagtcctgttcaatgtagtcgtttcagtatattgaccaaacttgagaacccattctctaccaagtctgtgtcaggtatatatttgctcaaagatattttatctttatgtctaatcatatcaatttctgtgcattacattgaacactgatttcccatgttttctttttattaact

SEQ ID NO: 29579 - DNA, 1085 bp, Homo sapiens
tacttcaaaaattctagtcatacctctcactttcctaatcatggactttaattctaagaggtatgtattaattccctatgacttctgaacagattaccacaagtcgggtggcttaaaaccacacatttattatcttacagctctggaggtcagaagtccaaaatggctctcacaaggctaaaatcaacgtgttgggttcttcaggaggctctaagggatcatctgttttctccccttttctatcttctagaggctgcccacatttcttggactatagctcccttctgtcttcagagccagcaatggccagtcaagtctttctcaggctgctttactctgattcggactctcctgtgtccgcttttcacttataagcacagtacagtggccacgttggaacactgtattacattgggcccaactggataatccaggataatctctctatctcaagatcattaacttaatcgcatctgcaaaatcccttttgccgtgtaaggtaacatattcactggctctggggattaggatgtggacaactttgggaagccattatttggcctattgcaaagtctgtttatcttcaaagcaaagaaagaaatcttcttacctttatgtttcatattaaagagtcccaaaacatcaacaaggctttcttcctcctatcaccccagggaaaagatgcttataaagattgctttatttttatgtttttggtatcttgattcgcatttcctttggtgtataagcatctttctttataaaacacttttaaaacatttgaaagtgaaattttgttccagaatgttagtcattattgagaaaatcttatccaagcagacatgaatgttaaactttgacatttgctgactgtgaaattgcagtgctcatcataccaccttccattcttttggatgcagttattgtatcactaatgttctttcaacacatttcagaaaagaaggttatggaagatacttagcaattagatttgaaaaaagatagaaggattttaggactaatatagtttagtaaatagaatactgaactgagatttgaaaaggcttagaattttctcaccatta

SEQ ID NO: 29580 - DNA, 1182 bp, Homo sapiens
aataaaacattttcctttttccgtgattcttctattaaaccaaaccaagatgtcttactgtagaaaacttgggttattaatacaagttttttgataaagatagtaggtgattcagtccaatggaacagcatgatttctgttttgctctttccatttttcagttttttttcacatttcccaaagtctggtttgaaacccaagtgaagtagataatcaggtatgactccaatactcagagggaaatataagccaaaaagatatctggaaattttctgcatataccttcaattcatttcatccaagcattgattaaaacagttttgtctctttttatatatactttccccctaaataatcattgtgttttgtgtaaccctctagtcagctatttagctacctaacagtagagtttaggcttcgtgtctttagtttttgtttgcttttctgaatgttaaaatgtttaaagaattaccaaagagagtggttatttaaaatattcttgatgttattgtagaaatattaaagtggtgaatagcatgtagcctatagaagtggtaacacagttatatattgattcggatagttgttcacaatctattgctaagttaaaaaataaaagcaatatatgctttggcaggctgaggcaggcagatcacatgaagtcaggagttcgagaccagcctggccaacacggtgaaaccccctctctactaaaaatacaaaaattagctggacgtggtggcaggcacctgtaatcacagctactcaagaggctgaggcaggagaatagcttgaatccaggaggcagaggttacagagagccaagatcgtgccactggactccagcctgggtgacagttcaagactccatctttttttttttttaaagcaaattatagaatgcatctgatgtctatagttacttatctctacatgcctgagggaaagcctggaatgctgtgtactaaagcattacgatgataggattgcagattatctttattttctgttttcccttttccttttgtttatattttctgctttttatatagtgaatatactttgcttgtgtaaaaaaaaggagggtaacagccttctatagtatattattctacttactaggatttgctttttaaatctgagactgttctaaaaactaagagatgtagttaggaaaattcc

SEQ ID NO: 29581 - DNA, 1067 bp, Homo sapiens
gggttctagataattttttatgtctataaatattcttgagctttatctacagcacaactgcgtttcttagaaaaagtttgatcctttcgggtcttgggttgtttgtttgttttgttttgttgtttgttttttgagatggagtctcgctctgtcgcccaggctggagtgcagtggcgcgatctcggctcactgcaacctctgcctcccgggttcaagcgattctcctgcctcagcctcccgagtagctgggattacaggtgcgtaccaccacgcctggctaattttttgtctttttagtagagatggggtttcgctgtgttagccaggatggtctctatctcctgacctcaagatccgcccgcctcggcctcccaaagtgctgggattacaggcatgagccaccacgcccgacctcaggtcttgttttttaagctttgttagacaggactagagctgtgtttagtctctggttaatttttcctggccactgaggcaagactctttttaaaactctaatggatgctccttacatcattaggttttccactctggctgttaagaacaggattattcttggcactgtgtgagctcctagtactgttccctgtatttctttcaggtggttctttccccagcctctggaagtttcacacatagatgtggcagtcatcactcaactgagtacttgagatctttagagctctctttctctctgcaactttctccagtaccgtcccctgtgctgtcttggcttctccagacttctaggtctatcttctcaattcatggaacccaccaggttctgcctgggtccttccttctctgctgcagcctggaaactttatccatgtgataagttggggcagttgtaaagctcaacttgcttgtttcctgactctggaatctctgtccttccttgcctactagacaatgtcttgagtgctgttgtttcatgtattttgtggtttttttagtagtttcaggtaaaaagaaaaatctgtttcttttttttttttttttttgagacagattcttagtctgttggccaggctggagtgcagtggcag

SEQ ID NO: 29582 - DNA, 1048 bp, Homo sapiens
tctttgtagctggaaggctgaagtctttcacctgagctgctgccagttcgctcttctgttcctgggtggttgggagaagagaagagggagggtattttatgctttaattaaagacagataagagagcaggtatgttttgctttgtttcattttctcttttcctgtttttgtttgtctggtttttgaaaggagttggagtagagaatctattctgtgattttgctaagcatatcccattttctttgaattctggaggtcctctcagcatttagtctccattttgtggcactgctttaaagtgattccattcggttgcctgccagtcatgctcccttgccactcgaaccttatcccacccttcatccacggagctgcagccacactgtttgttttggcacactttccactttctatgggctttgcaggatttggggagttggaggataggcggggattgtgggttggagactgaatttatgttcctttacaatgaaaaaaaaaagcctcactttttccagagatttggtttctttctgaattcttctacattgctccatatcttcagttataatcatttcttcgctgaggccaagattgtctcttgaaaagtattgcttttctaaaaattacttagctttcttgaaaagataaacagaatttcataaatgaagctatgatgaaatccgagcaatcttgactcattaaattgttttttccgtcttagtcaccccctaatcacacacacttttctctttcttttttggcccccttctctattttttcctttatctttctccttagctttgcaattgagtctaggtaagcttaatatttgacaacctattacttaaatttgtattgctacaggagacatcttcatattgaacagtaatgacattcctcattcctctcagtgataaggcataagctcaaattcctggttttgttcctccagttttctgttctcccctgagaaattccaaactctgatctacacagattgccatatgtaaacaattttatctctctcaaatttgaacttttcatc

SEQ ID NO: 29583 - DNA, 1057 bp, Homo sapiens
cattctggactatttctgtgtttatttgtggccgagtgtaacaaccatataataaatcacctcttccgctgttttagctgaagaattaaaaaaaaaaaaagaaaagaaatactgctttattttttaaaaaaaatttacataaaagataaatcctgtttctggattctctttttgcttgggagatgatacttgcttaaccttagagccctcattcaatttttattaactggcaatattagagggtaacagctctcttcttgcttagcaattactgaaggcttttcaatgacttgacttttcattatttattttttaaactagtgaaagaatgatctaaaatggaaatttttatgatgagttttctattgcctcttggaacatttccccttagtttctagaggagctggtaagtgtagtgtgtgtgaccattaagttagagtgcacatgcttatgcacacttaatattgtggtcgtaataattagtatttaaagaagccataagtttaggaatgaagtagaagaaataaatggaaactggaaagagagattctggggtgcttaataattctaataataaaatcacctgttttatcaggatgtgctaaatattgaagaaaagttatgagtttttgcccatcctgaaattatacaactggcaaggatagaatatcaaatttgtgaattttcagtattccagcgtatttgttttgttgtatatactttctgtgttaatgtaatgtacatagttgttagtaatctagggggaaaacaatcaaaggaaataaccagctgggccaagtctttcatttgtcctgtggttgtgttgtgttgtgcctgcgtgtgtgtgtgtgtgtgcacatgtgtgtgtgtgtgtgtttgagccagacatccaatcccaacatttgataatgacctgtcacataagctttctcaatatagaatgtctatactggtggttaggcctgggttttcaaagttaaacggtttattacaatgtaagagcgatgtatggatgtgttttcactgttttgctacttaggttctttgcatcttcaga

SEQ ID NO: 29584 - DNA, 1095 bp, Homo sapiens
agaaaagaaacagatgtcctctgtattcctggcttttgtgaatagtacacgattatgcttaatctttttatcctctgtttctatttctgccttcttgaagcaaggattcctcaaggttctattttcagcctttgccttctatctgtctgtgtctcccctccacctcccatttttcttttgtctctacttttctttttttggagtacatggttgatgtataataaatgttacagactgcatcagtgtgggagaggaatctcaaccccattatggccatggctatttctccttttctctttgatcttcgtgtctaaccctgacctctcctctagctgtaccttcaaccccgagtacctgttataccttctctaccattacttcaaaccagtttatgcttcagatttgtctgtattagcagtgttattcttatttggctagttagctagaattagaacctttctcttataccctacatgtggacagtcttcaattactgtggatgttgtcttcgtcatctcttatatatctataccttctttattcctactgctaatatgtattttttgcattagtcatctgtaacctcttgtaatggtagctgctaattggtttccccacctttaggttgttccctttttcattcttacctgcagccaccagagccattttcacaaaacgttatttatgtagcactcttttcctcttgctcaatctttaaagatcagatctgaaatacgtagcaggatgtcctagtccttccatagtgaacctacctacttttcttgtcatttgccaccacctacccatagtcaagtaaactggtcacacaatcccttagtcagtcagtcttgcatatttctttctctttttttccttttggagacggagtctcgctctgtcacccatgctggagtgcagtggtgcaatctcggctcactgcaacctctgcctcccgggttcaggcaattctcctgcctcaacctcccgagtagttgggattacaggcgcacgtggccacgcctggctaattttttgtattttagtagagatgggtttcaccgtgttgcccaagctggtctcaaactcctgagttca

SEQ ID NO: 29585 - DNA, 1033 bp, Homo sapiens
ggaacctgagccaactctgaaccctcagccattttttgtcagtgcctcttttgagcttactggatcccaattccttttttgctttgagtttgatggtattcctttccatgtggctaggaaaagtgagaccatgccttgtcatcttacaccaaagcccttgaataagaacagctcagattaagctagtctgatatattcttaagacctgaccatttggatcttgacctccatctgcagcacataataagtcttttcccagtttctaccttgaacagcctttattttagtttcataatttctgtacccaggacttcaccatttccctgtatttccattgttgcatattgaggttatgcagtctgaagctcctctgaactgtttttcagaatgcctttccttctgcttcggaccatcagagcttcctagtttcctctattcccttctctcaccttcacatttcttttgttcccctttcctccaaccatagagtacacattacttgggaaaacccgattatataatattttagagcataggtcttggaaacatgtttatgcactgtcaaagttgcgtttccattcatctgtctctccccaggtaattagcataaatgaaaatagtgaccttttagaatatctttcaagggtggtagccaacataccaacccaggatactgctgagtaggagccagctggcatgaagaagcaaggacaagagtaaaccttttaagtgggcagtttcaaaagtatagaactaaatggaagcaagaaaaatgaggggagtgtggatatggtgctaattctaatgtggcaaagattttaaaataatacagaggcaatccagaatacattgagagccccagtgaattgttttctttaaatttcatgtcatgtgtagtcatgtttctcaatggacaaatggttagtggaccaaatgacattttttactcatccctgagtaaaaagtccaacgaatatagttcattagactgctgcttgttgtctccaaacagatcctgaaagttcaaatgact

SEQ ID NO: 29586 - DNA, 1098 bp, Homo sapiens
aatggtggtgataattataaagttgctgattatcagctactgatttttgaatgccgactatttgccaggcttaatactgctacgggagggggtcagggaagtgctggatagagaaaggtgacccctggctagggctccactcctatggacctaggtgagtagaggcactccagctttcatgcccaagtgttgcatttttcaagaccatcctggcctgccatgccccccatcctgggcctataaaaacccgagaccctagcgggcagacatacaggcagccagatgtcaagagacgaacaccagctgaagaagatacaagcagctggatggtgggaggacgtcaagggagcaagccggcagaagagcacaccgacagacgtcagcaccctggcaggccattgacgggtgggacaaggcggagtttggctggggcagtcggaggagagccgaggccactgagcagccgaactctagggctaaaccatctcccttctggctcccacattggtggaaaaatccttccactcaataaaactttgcactcattgtccaagtccacgtatgatccaattcttctggtacaccaaagcaagaacccgggatacagaaagccctctgtccttgcaacaaggtagagggtctgattgagctgattaacacaagtcgcctatagacggcaaactaaaagagcaccctataacacatgcccactggggcttcaggagctgtaaactctcacccctagacactgtcatggggtcggagccccacagcctgcccgtctatatactcccctagaggtttgagcaacggggcactgaagaagcaagggggaacaagagaacctttcctgtttcaataccaagcattttacagtcattaacatgtcgaattctaagagcaaccccagtaatggacaggccattctagctatgtaaactcttcaaaggcagcacttggtacagtgctgggcacttacttgtcaggatttggtagatgctgaactgatttgaactctagcatcatcttgcttaaaattgtcattctttgcctacccttgccctgcccagctatggatacagaggttttacaaatttg

SEQ ID NO: 29587 - DNA, 1193 bp, Homo sapiens
cctcttaaacccacgcagccaggtttttattgcaaccacaccactgaaagggctctagtccaagttgccagtaacttgcatgctgctaaatctagtggtctggtctcagccctcatcttacttgacctatctgtagaatattctatcactgatcacttcgttctctaattcactttcttggatacttgacttgcaggacatcatactttcctgattttcttcccacctctttggaagtttgtactcagttttaaagttgtaatattttgagccaagtcctttcacctctttttttgattctctttcatccactctcatggctttagttctcagctaaccaggaaagttttaccagccgggtaaaatgtttttttcctttaacatatattaagttttcttttcttttcatttcttttttttttcttttttcttttctttcttttctttttttcttttgagacagggtctcactctgttgtccaggctggagtgcagtggcgtgatcttggctcactgcaacctctgcctcccgggttcaagcatttctcctgcctcagcctcccaagtagctgggactacaggtccatgccactacacccggctaatttttatatttttattagagacagggtttcaccatattggccaggcaggtctcgaactcctgacctcatgatccacccgcctcggcctcccaaagtgctgggattataggtgtgagccactgtgcccggccctaagttttcttataattaagaaataagaataaagggatagtgaaaaaacaactgcattagacattaaaaaaaaatttcttcctttttttttttttggagacagagtctcattctgttgcccaggctggagtgcagtggtgcgatcacagctcagtgcagtctcaatctcctggattcaagctatcctccttccttagcccctcgagtagctgggtgggactacagatgtgtgccaccatttttgtatttttatttatttttttgtagagacaagtctgtggctgtgttgccacaggctggtcttgaatgcatgatctcaagtgatcttcccacctcagcctcccaaagtgctgagattataggcgtgagccaccatgcctgaccaaaggttcttccccctcctccctgccacccgagacggagtctcactctgttgccaagctggagtgcagtggc

SEQ ID NO: 29588 - DNA, 1067 bp, Homo sapiens
gcctgggaggcagaggttgcgatgagtcgagatcacgccactgcactgcagcctgggctacagagtgagaccctgtctcagaaaaaaaaaaaaaaaaaaaaaaggattgtgggagaagatggcggccgctgcacaatcccgggttgtctgggccctgccaatgtcacattctgccattactgcaatagccacatccgtgtgtcacagcccactccattgccagcttcatcatgccctcatacctcatgggaaaggtgaatgttcctcaagtcagtgggattgtggccactgggtttggagcaacaggattcctgggccgatgtgttgtcaaccaccttggacgcgtggggtcacaggtgatcataccctatcggtgtgatacatgtgacatcatgcaccttcgtcccatgggagacctgggctagcttctgtttctggaatgggacgcgagagataaagattctatctgacgagtagtggaacacagcaatgtggtcataaatcttgttggacgagactgggaaaccaaaaactttgattttgaggatgtttttgtgaagattccccaagcaattgctcaggtgtccaaggaagctgaagttggaaaattcattcatgttgcacatctgaatgtgaatattaaaagctcttctagatatttgagaaagaaggctgttggagagaaagcagtgagagacacatttccagaagccattatcgtaaagctgttggacatctttggaagagaggatagattccttaattattttgcaaatatgtgttggtttggtgctataccccttgtttccttgggctggaaggcagttaaacaaccagtatacgtcgtagatgtatccaaaggaattgttaatgcagttaaggatcctgatgccaatgggaaaacctttgctttcgttgggccaaatcgatatctcctctttgacctggtgaagtacatctttgctgtggctcacagcaaaggggtacttcctcccgtaccccttgccaccttttgcctatcagtgggtagcaagagactttgaaataagcccatttgagtcctggac

SEQ ID NO: 29589 - DNA, 1050 bp, Homo sapiens
ataactgggagtaagagctctaacaaatcacttaattgcctttcccaagaggctagctttgagatggaccgctttctccatgtatatatacatctagagcttagtttagacatcatagaaggtaaccaccattcacagaagtttctgggtctattctctgaatgacatcagtagtagcagtgttttggccagtgcacaagtacagtatgtgtacaccaactcccaaaccctatctctgtcgtttgttgttgttttttacttttttcttgagatgagagttttactatgttgcccaggctggtctcaaactcctgagctcaagcaaaccctcctgcctcagcctcctgagaagctaggattacaggctcacatcaccacacctggcttcatttgttatttaaagtcttggtaatgggcagaggtagagtgcagggttatttatatccagggtaagtttttcagtgattttttttccagtcttgattcagttttgtcagtgaataggtatgatttagtggaaatgatcttggagtcttaaaaacgaacgttgaacttttggctctttattcactagctgtgagaccatgagtatattatgtaaccactttgggcctcaatttcctttgatctgtgaaaaagataacagggcctgtcttacagagatattgtgaagatgcaatgagataatgcatgcaaagttgtggcacataatatgctctgagtaaatagtagcggttggtggtgttacattgaaaccagcaagtgggagaggaatgttcactgttttgtcttccagggtggtttacatcccctaactggaaagtggcagccatatctacgccttctcccatgagtcgctactgctgcatgtggccagtgcctctgtctagaccagcttctcagatttcggtgtgcctgagagttacctggggcttttgttatcatatgattttgattttgtaagtctagggtggggcctgagattcttcaaatctaaggagtttccagttgatgctcattctgctgttgctggtccatgtgtcacatttg

SEQ ID NO: 29590 - DNA, 1044 bp, Homo sapiens
agattgcttgaacccaggaattcaagactagtctgggcaacatagtgagacccgccccttctctaaattttttttttttttttttaattagctgggcgtggtggcatgtgcatgtagttccagccacttgggaggctgaggtgggagaatagtttgagcccgggaggtcaaggctgcagtgagccatgatcgcaccactgcactccagcctgggcgacagagtgagatcctgtctcaaaacaaacagacaaaaagtaaaataagaaaattagctgagagtaggtagtgaagagtgaatgagggaggtttgaggagaagcaagaaatagtcattttggggagtaggaaagctttcaagggcagctttggtggattgcttggcatcgttgagtgtccatttgaggtttgtgatcatgaatatatagtgaagtcagtcagcttggttatgtgatttttcttcagcaacattcagctgattgggcataggcactagaaaaggcagacaattggatttaaccaggattggagttgtgtcaggtggcagtgatggagaggacaaatgattgagggtatttgcaagggagagattgtaattatggaacacggcatcaaaattggacaaagagggtgcagaaccggagtgggtagataatggaaaagtggttgggatgggaggacttcatgacgtcaaaaattgtagggaggggataccagagaaagctagttagaagtaagggaagttctttgagagtataattgaaacgtaataaggaaagatgggtcttttaagatgatgcagcttttcttctcttttttttttgagacagagtctcactctgtcgcccaggctggagtgcagtggtgcattctcagctgactgcaacctctgcctctagggttcaagcgattctcctgcctcagcctcctgagtagctgagactacagatgcaccaccacacctggctaatttttgtattttcagcagagatggggtttcaccatgttggccaggctggtcttgaactcctgaactcaagtgatccgc

SEQ ID NO: 29591 - DNA, 1052 bp, Homo sapiens
gagtttggcatgtactaattttaaggaacattttgatgctgcagccattgcttatatatgggatagaatggtaaagcccaaatggatttgtatggattaaaatagattaccttctcagaaaataatgttatttcagtttttttccgctagttcagaagaccctcaacctcctttgcatgcattcagacacataagttggcattacaaatgaatcatctagggaagtgggagtacttctaattctccaggaatctcacacagtaaagctgcttggatatggctattcagaacagaaaggtatagaaatggacaatggtatcccttccattggtattccttctgggcaacaaaaacccttaagctgtctgagtctgtttctcacacttctgttatcctgattgtagccctttaaattgtggagcaaattcttggcatctgtctgcctgtcagctacctatctctgacacccctggatagcttgttttcttcctatgagtatatgtgaaatttgtaaaaaagcatctattaatttaagtatcctgttagaagcctgcgaaaattcaaattgggcaaacaataaaattgcttaaaccgtgtttctcaaagttaatttgaccatagagtacttttcaaaatataatgaattgaataacacagcatcagtatgactcacgtacaatgtgtgtgtggattaaagtcaccagaagtagtgttaaaaagatgaattaatggcttcaggaagtgacttcattggctttttttcaaactttaaacattttggagaagttaaatcattttaagtataaaagttaaagagattcagttatattttgtttaaagagcaaaaaatcatgactttgttgaaattaagtaaatatttatgattgtcaatcatcaaaatagattacatttgtattgtctatgcctttgggtacaggttaaaaattatcttctttttctgcctaaaaaagaaagtaaggcccggcacagtggctcacgcctataatcccagcactttgggaggccgaggtgggtggatcacctaaggtcag

SEQ ID NO: 29592 - DNA, 1029 bp, Homo sapiens
tttgggattaaagaatagagacaaagaggaggcatacggagcctctgccacttaacttcctggagctgatttgcttgtgctcagtattgaggaatctttcctctttgagtgagtgtagagtggttttgggtcatttgtagtctacacagtttctgagagatgatctgtccagcaattccagattgtttagggtgggcctgggagagggtatggcttactcctcgtttctggtgccgtattaaggtgaactagagctgattcatgtactggttgagactgtaaaaggacttccaggtttagtcattctgcaggaggctttctctttggtttaactgtagctcttcatccctcaccctggtttacataattgggactttaaaatttcattgtggctgtaagaacaaagggaatgcacttttcagcagctccttactgaccagtcgtgtggagtccctgtagtgtactcagggagagcggctgcctctctgattctctgcataaaacaaaagtattttgtacatagctttgaaatgggagagagaaacttctgaagaaaaaaagagttgtttggggtaataagattttgaggaggcagacacttcctgcattctcccctggggaaagaatctagctacaattgaagggcattgcctcaactaatttagttaagtggccccgtcctggattaataacttgggcagacttcccaatggatttggcagggtattgggtttctctctccccaaaccctcccttctctctgccctgcacatgtgtgctaacataattacagaaagttacaaggggatggggctgctcttaaaggaggtggctcagaggagagaatgtgattgtgtagtcctgtcatatttccgaaatggcagagttcgagtaaaatggtagggtggaagcaagcaggctggtttctctctgtaatggcaaagggggaggagggttggtggcagtgtcgatttcaagcacctagagcacacgagcactgggtactaattttgtgctagagaaatatta

SEQ ID NO: 29593 - DNA, 1051 bp, Homo sapiens
ttcaagcaattcttctgcctcagccttctgactagctggaaaattagccaccatgcccggctaatttttgtatttttagtagagatggggtttcactatgttggtcaggctggcctcgaactcctgacctcgtgatctgcccgcgatggcctcccaaagtgctgggattacaggcatgagccaccatgcccggccttatcagtattcttaataccaacagagtttcacattgtatttgacactatttacaaactcagtttattccctctgtgtgaatactagccatttctaaaatgaaatgcaattgtgatttaaatttcacatatcattatgctaaatgctgttcactttttgttccatggtcctgaaacaattaacctgtttggagataagctgcagatacaagcacacagagaaggggacttaggaaagctggaggaaggaaaggtctgtcttgcctacatatgggcttaggaaaattttctaactggaaaccttgcctcaagtctgagtcacactagtgggactcttggccctagggtgggaggagaaaagggagggaaggaagtggctatgtcagtttttgtcaacagagggcacccagagcaaagcaagtgttctgtgacacaacagaatctgcccctctgccccagatgaatttaccagacaggcacagaacttcttgcagtggattctcttgtccatctcttcatttgtctgatctgtgtctgcattctcatgttttctcccatgctggaaccagaatattctaaatgcagtgttaataattgttatttgctgactgctttaagtggaagaccaattccctcaatgtgctggggtgaattatcccatgttgtaaggttggccttttgggtggatgtgcagtattagcttctaatttaattcagtatccagtgagcatgtattcctgaaatacttttgatgtgaaagagcacttcatacctgtataacatgttgtaagaagactttgtaagtcttattgcctagagcagtatcctcaaagtgtggcttcaaatccagccgcatc

SEQ ID NO: 29594 - DNA, 1049 bp, Homo sapiens
tacaatgtagtggtttagattcctagttgactgtttgtgatttgtgcatgtgcttaggcgtgttcccaggccttgattaaggctagaatgttttatggatttgcagtatttttaaagtgggagaatacttatgtgcatcagctctagggtttttatataagaagagcttaagagcagcaatctgattagaagagggccttgttctgcacagcagccttactgtttttgcgaagattatttatatgggatggctcttaggggtttcctagaaagtgatgggggtcctaaggctcctaaggctggcccctcgctcgcttttggtgcaacaactttatgtctgttataaataaggtgaccatataaactttagcattcaagttggggcacttttgagaataaaaagtgatgccaataattagtttcaaacagtcccaggtaaactgggatgtatggccatccttctctaattgaagaaatacagtcagtgttttcttaaccaaagtgatcagaactagtaggccgtgggttaatctaaacaattggttgaagtggggaaatattttaaacttttattttaatatagagcatttttaatttaaacaaatatatgcttactctttagtttcctgatatgaggtcaagatccttatatatagatgtgattgaaatactacttgaattttttgcataaactgtgctcccagagcatcatctgtgagttctaatttgtttttttttttaaagaggaacacggtcttgatgacattcagagcaatttgggtgaaactgtctatctagatttgtatggttttcccttcttgcccggtcttttacagttatcctgcccacatctaatttgagcctaagttttcagtgtcttgacttatttttcacaaagcattcacattagttattttcaaggaaattttctaatttatttcattgatgtgtgtatatatatatatatatatatatatataacatttaattatataattataagaacttacgacttctataaactggcaggtgaataaacacaagtgatt

SEQ ID NO: 29595 - DNA, 1018 bp, Homo sapiens
ggtacaatctcagctcactgcagcttccacctcctggactcaagccatcctcccatttcagcctgtcaggtagctgggaccacaggtgtgcaccaccacacctggctaatttttattatttcttatagacccagggtctccttatgttggcccaggctggtctcgacctcttcccaccctggcttcccaaagtgctgagattacaggagtgagtcactgtgcctggccagaattttatttattatttatgtacttcaaaatataattttgtcatgattgaattttattttatttttttaaaatgcaagaacaaagtggatttgtaaagaaaattgaaagaactgagggtgttagccaaacaggaattgatgacagcagagtggactatctggctgtatgaagcatacgttgtcatacctgggctgtgtgatacggccttttgttccgaggctgcacatctgtacagcatgtgactatactgaatactttaggcagttgtaacacaatgtatctaaacatggaaacatgtatctaatgtatctaatttatctaaacatgtacagcaaaaatacagtataaaagataaaaatgatacacaggtatagggcacttgtgaatgcagcctggagaattggaagttgctgtggatgagtcagtgagtgagtgtgagtggatgtgaaggcttcgggcattactgtacactactgttgactttatcaacactgtacacttaggctacgctaaatttttacaaaattatttttctttaacaacaaatttgccttagcttactgtaacttttttactttataaactttaaaatttttttaactttttgattcttttgtaataacacttagcttaaaatataaacacattgtatagctgtacaaaaatattttatttgtattcttattctataaggtttttttaagatttttaatttttttttttttttttttttttttttttactttttaaacttttttttgttgaaagctaagacacaaacacacac

SEQ ID NO: 29596 - DNA, 1035 bp, Homo sapiens
ttttctccctttcctactacaaggctctgacctgcttggagcccttattacttggtcacaattgatactttgtccttcagagtcacataggacatagccactgcgttgattcagtgctcagctatcaaatatggctctgagaaggaattacttctctagaatgcaaagtgggcatctgagccagagaatgaagccctggtccatatttagtcattatttagggagagtgaggagtaacaatttcaaaattagagtttggattaagcaaagaaaatactagtcacaaattggctggtgtatgaggtgagtagagctggatttttaccagaagtagaaacctttgtaggaactgcctgtggttcaagaagttatgtatattttatggtatatctatgattatgaaaggataattttctaaaagtttatgttcttcctctggggattgttaacatctgttaatatccacaggaattttactaataataatgccaacttactcttgattcagtccctttgacacagggacccaaactaatttacattaattttgtcagtaattcttataatatccctgtgtgggagctgctttttagatgaggtatgtgagaatttgttaagtttacatagtgggtcagtcccttggatggaaagttggacccaggatttgtgcttccaggcttagtgtgtttgatcactgaagtgtgcagtctttttacctaattctcctccccatttattcttcctatgatggaggaaatcatatcaaggaaatagcaggagaattccatcttctaagaggttaaagacttttctgccttgaggcgtggagttcccaatccttggcttaggatggaaggaaacagcggaacactgtgatgttcagctgaaatgacccaactgtttttttgcatagttttttgttctctttttaaaaattctcctgttgggaggaggtgaatgtgagaattttctctctgccaatcttatatgtgaggcaggtggcttggttgtttttaatgctcagcagatatcact

SEQ ID NO: 29597 - DNA, 1044 bp, Homo sapiens
gccattattcttatcatggagactatgaggagaacaaatctccataatattaatttttttccccccttttactctgtggaaatctaactcaaagtaaggcattttaggaaaacctaatttgggttaggtagaaaatctaaaagatgttgccttgccttctcttagctggtcatatctctcaattctgaacctggccttagtaaaattcttcaaagttcaagtttgttatgttgtcttatgaccatccctttgtaaatctttgttctccctccatggaatgctcttaccttcctcatttacttaaatgaactcctgctcattctccatggcatcttctaaaagtagcctttccttctgtgtgctgtcaccatacctatatacaccttggctatattgaataccacgcatagctctatttatttgttctttggggccagccttttgagattatcgactggtgtgtggtaagtattcagtaagtattggaagaaagaatggatgattgaaaatattatttgaaagacaataactattttctaaagaataaaatctgattataatatttgacatcagtagatacattttttttccagaaaaggtgattgtttgccttaatttccgagtaaaaaaggatatatgtttacaacagggtgtatgttgtggctgtaggagagaatgatgctaactggttcacatgggtagcagacacgtgaccttggcctctttagcatggtcctctaatcagctgatttaattttagtggaatccctgaagaaatgctctggttctatatgtggaatgtagaaatcataaatctaatgtatagatcctgactgcattagggtttgtggattaaaaccaacaaatagactgtgtaggtattatgacattataactgggccagtgtaggcattatgacagtgataatttttttcatctcaaatattatgaaattaattccagaatgttatctgaagttttgtcatttcatttcagcatgtaatttctcaagccaattttaatttaaaaagatctgagtagaat

SEQ ID NO: 29598 - DNA, 1021 bp, Homo sapiens
ttgcagttctggttttctctttaaccacaacattgaaactcttttctccaaaatcaccattaacccccttgcgactacatccaatgaatattcctttgtgtcatctttgtccttggaatgccgctcttcccctggcttctcttgtaccatgctttttagaatttctccctctgtctgccagtgcatttttgttatcccttcctcagcccaccacttaaaaattggtgcttgaaatgattctattctaggtctttttctttttaattcttttaagttatatatatttctccttgggcaagctcatctattgctaaggctttatttatcatctatatgctgacaacttccaaattgctgtctgtagcctagatctctttcctgcacttaggatgtctgtatccacctgctcagtgtgcatctgtgcttggataccccatagttaactgcaaacacaacatctaaaactgattcctccttatctgctctttttaagaagagatggagttttgccatgttggcaaggctggtcttgaactcataacgtcaggtgatctgcccgcctcggtctcccaagatgctgggattacaggcatgagccactatgcccagcccttatctggaatttctgcaaaattctgtccttgtgtaactcagcaaccagtgccaccatttacccagctgctgaagctactgttatagcctcttaaatggtccttctgtctttaatttcgtccctcccatcccacatcattgcgttgcagtaatttttttcagagtgatccttctgaaacaactctgatcatctcactgtcctttagtcccactaaaagactttggtgatctggctcctacctcatctcccaccccttgacccgctcatgcatataccatgcagcttcacttcattccctctataacatgtctccttctaccctttatggcactaacccttacctttgagatctcggtttattggtcttaataaacctttgggaatcttttactgaatttctaagatagg

SEQ ID NO: 29599 - DNA, 1090 bp, Homo sapiens
tgttttgtccattagaggctttcaaaaatttttatcaacatttaagtgcttaatttctacagtataccagggctggcagtaggtaggcaggtgatattttattcacataccctatatatttgcacattttgattgctcgttctgttaattaaggagagaatttctcttttgtagctgaaatgttttatgctttgaatccactcaaagacaaattattctggaaagcttgaactaaacctggtcagatgcttctgagttatgagagagggattgaaataaactttttcagctaaaaataattttgctcacaagttaccaaaaatggctgactagaaatgcttttaagatacttgtctaagctaccataagctaaaggtcaagaaaaaagtttagaacacgttatgagaaacgattggctctactttgctaaagcttttgccaaacctcttattctgtaatgaccacatgagacaaaagctggtgaaagtggtatgccttagattcagtggggacctagagattttttcagtggaacacatgtgctgcctatctcttctgacgacgaactagtacctgtggaaggcactagggttaggtgaaaatgggacacttcattctgaagctgttatacaattgcctatgccaattaattatttaaagcttttatcttctgttgcagagcaatttttgccctcagaatatttgtcagtcctcacaaagtgccaagtgatgggtatttagcatgtggcattgccgtcagtgttctgtcattttgtttagacacttctttgcatctcactgaattgcagaattaagaatcgttcacatttatgggcagcacgtttttgcagtatggtcatttatcattggagtttatattttatgcttccttctagactcttagtgtgctttcacgattatccagaggattcctttgcagcagcagtgtatgccactgattggtggtggtagccttgagaaactagggaggcatgttgactttccttaaggttgcttagtattgtagaataaaatcttgaattagagtaaaattcagagagagctgtttttccccgtaaacatcattctt

SEQ ID NO: 29600 - DNA, 1046 bp, Homo sapiens
aatctttcctttttttttcttttttctttgagacagtgtctcattctgtggcccaggctggagtgcagtggtgcaatctcactgcaacctccccctcccaggttcaagtgattcttatgcctcagcctcccgagtagctgggattgcagttgtgtgccaccacgcccagttaattttttctgtttttagtagaggtggggtttcactgtgttggccaggctggtcttaaactcctggcctcaagtgatccacctacttcgggctcccaaagtgctgggattacaagcatgagccactgctcttggcccctattttttgttaaacctctaggagaaaccattttagatcagaatcaatccattcatccatcctttcttcctaatctctcttcctttttctctaaaagggaaaaagtgctaacattttaaacactttggttatttatatttaatgtaatcctctcttattgtgtaacagccctcccccttcttttgcttggagacaaaatttgattgaacaaaatttgaatgtttaccacatgttaaacattgctagatgctggggttagttacagagttaatggaatgttcttataaaacttgagttttggggaaggtttatggaacaactataaaattagaataaaaatttgataacacaatggtttgataagggtgtgagtaaagaaataggaactcatattgctgtggtggtgaaaagtcacataacttccatgaagaagtatttatcaatgtctattaaaatgtaaaatgcacgtattctttgactcaacagttccacttccaggaatttatcctacagatgctcttgcatctgcgtataagaatatacattatagcattatttgaagtagcagaaggttgaagaaacaaaaatgctcgttgacaggaaatctgctaaataaaataaggtacattcttgatgagaaaaaaaaaggtacattcatacagtggaatatcatgtagccattaattaggcagctctgtatgaacatagaacactctttaaatatatcaattgtgaaa

SEQ ID NO: 29601 - DNA, 1024 bp, Homo sapiens
gagaattctgagaagggaatgagagagagcagcctgtaatatatcacttccttctgacatgtcctgcacttacgtggcatctagaaatttctgccaaaaattcaaggcacaggacacatgataaataccacttatgaagtagatgacattcttgaattgtcaaatgatggtgatggaataactgcttaaaaacctgttttcccaagggtggaaaacagcctttgaggtttagacttccacatgggtgtgttcagccataagacgtgggttttcttagggacttaggtccccaggtaacaccttggtgtgtgggatttttcccatgtataggctggttccttggtttctccgttgttgaagaagagagattttgcactgggtattggatattttattccaggcatgtggtttttgaggaggcatattgttgatgtattttttttttctggctgcattgatttttgtcagattctaactggaaataccacaagcaaagcatgatttatcatgagggatgggtggtgtggccgtgggactctcctagctctggggattggggtggaggcagaagctatgtgagtaaaactagaggaactacagacagggcctggggagactgggggtgtctgaatgtggcctgcagcagttgcttgagttggaatacttttgggcagaggctcatagaaatttctttcaattgcttttttttttcttttaagaagctttttcccatacaaattggaattgtttgaaggagtgggccttaattgttgccagccagagtgattttcaaagcagatctatatggatttcacttaggggttactttcagggggtatgtggcttgttctgagacaggaggacgttggttccattttcctggaagttgttgggactcctggatggccctgctctatttgtcttgggccattaggcaagtggaaaagcagctacatagttagccctgttgcatggagtttagtttcataattcatcctctcagggatttttatacagtcacact

SEQ ID NO: 29602 - DNA, 1028 bp, Homo sapiens
tcaatagttttcatctttgttttttttggaggagattcaagtcccagcttgttttaaccaccttattttatagatggggaatcagaagtccagagaagatggtgacttgggtaaggccacccagttagctaatagtaaaactagaactagaagcctggtcttctaattcctattcctgtgctgtctccattacaccactcttggaaatctctgcagtgctaaaagacttcctgtgctctgctccctgcttttcaagcctctgcctgacttcctgtgttagggacagagctgtacttaagcctagcatgtttgttgtatgcttcttggtctcctttgcagagtttaccctgttacttctgttgatttaggtaaagtgaccctcttggtgtttatttttgaattcttttgttttgtttgcctgcttttattttccattagaactctgtcaggcagagggattgtgagaagtaaaagctcagggccatggcaaaaaagacaggaatgtgggagacttcaggtgaggtgagctaatattggatgataaggagggaagactggatgtaggtgctggtgagcaggttctacttggtgtgtgtgtgtgtgtgtgtgtgtgtgtgtgtatgtattcatttatcatttctgtcaatcctagttaatagtgagacccccgtccctttccctcatttactcctggggcctattatctgttggttgccttcaaactggctaaagatagtgatatttggaaatggagcagtgtgtagggacttcgcaggggtgtgcagaggaaagagtggttaggtccttgggggtacaaattggcagctgagagttatccctccgagaatccttttttcacttcttgtattttattttctttctatacattctcttttttttttttttgcccaggctggagtgcaatggcacgatctcggctcactgcaacctccacctccacctccacctctgggttcaagggattctcctgcctcagcttcctgagtagatgggattacaggcgtctg

SEQ ID NO: 29603 - DNA, 1071 bp, Homo sapiens
caggagcagaatgtgaagaactttcctctatataaagatcagcatttattcaggccgggtgtcgtggctcatgtttgtaatccagcactttagagggcagggtgggaggatcccctaaggccaggattttgccagcagcctgggctgcatactaggagtgagaccttgtctcaaggaataatgttttgttttgttttgttttcctgaagaaaagactactgagagccagtaagactgaaagaatggacatcttcatatcctgttagtttgagtgtgaatttgtacagttttcatacagagtggctctaggtataaaaacttttgagatgttaatagcttttgacctagtcattctactcttaaaagtatcttaaggaaataatctcaaatgtgagcagttttacgtgagggaggatattctttgtagcataatttatatgaagaattagaaacaccctaaggtccatcagctaggggaggacagcagaggggacggggaagcatcaggagggctcggcagccacagcaggggctgggccggcatctagcaggatccaggtctttgtgggacaaagaatcttagagaagcaacggggacacaggctgtccactgcagcaccagtgagttcaccaagacgaagagttgagcacagagtgtgagacagggatttgcaatgaggagtcatttaccatgagcgtgtatacatgactcaatattgtatatttaagggagtagagcacagtaattgaagacatgggattgaagcagaagtcctggctctagcactattgtgaaaacacccataagttccctaacttttgtggattcctctgtgttcaaatgggaaagtggtacccatctcctgtcctgtgtgtgatcatcgaatgagatacatgtcagaggccatgcacatcacagacacacaatacacactggctatcatcaactagttatcatacatgttcccaggcccaggtcattgtcagaatgttccctcccatctctattcctgtgtatagactctgtagtttctgtaatgatcagatggctgcccctcctctgattatctt

SEQ ID NO: 29604 - DNA, 1048 bp, Homo sapiens
gcggagggcatccaggtcagtcgtagggggtgcagctgggaacacaacagtgtccccattgaatgttcagagtctaaaggggagacagaggcccaaagagccacatacaggtagagctccctctggaaagcagagtgctcagggagcctggggagggttgggggccgccgcatggaccaggcagctttgggtgggtctctgaggacaggtgacttgcacatggtggggacagtgggggggacattccagggcgagggagcagctgagtgaaggcctgaggctggggatgggagtgggaggagtagatgggctccaggaggcaccgaagcagggcgtcagtgggtgcctggacctaaggtgactgtggtggcagggagcggtgaggaaggtggggtccagagcatcagagggcctgtgtgccctgctatggggtttgaacttgaccgtggcttttcactgaagattcctcagaagggtgcagtgccacggctgaggcctgtaattcagtgctgtgggaggcagaggcgggagaatcacatgatgctaggagctcaagacagcttgggcaacacaggagatgctgtctctctgaaatgaaaaattaacaaattagtcctgcatggtgccgtgtgcctgtagtcccagctacctggaaggctgaggcagaaggatcacttgagcccaggggctctaggctacagcaagctgtgatagccccaaagcactccagactgggtgacagagcaagacagtttctcaaaaataaaatgaaaatgacgatttctcaggaaatcatttcgactcctctttccctgcccaaggaggatgccccacaaccacttggagggagatgctttgctgagagtccctgtcctctgcatctggagagcttggctcagagctgaggtgggagggagggctcctcttccaggtcgctcagttggacaccggaattgaccagcctgcaggctcacccatggagtacacactgtgtcctagtcaagcctgaggggcagtatccagcctcaacccccagcagaggctccag

SEQ ID NO: 29605 - DNA, 1035 bp, Homo sapiens
gcccgtcgtaagaagccgggtacacataggtgtctagcaaaggcctccctacgtgatccctagatgccagtgagccccggggaatgggtggtcctggttagggcttgttggccggaccctctgaaggagggtgttccctctgagccaccttgtctgtcatgcagggagcgccaggcagcctgcaaacaggtgcgtcggaccgagaagaagctgaaggatgtgctgctgcaggtggatgacgagcggaggaacgccgagcagtacaaggaccaggtgtgggcgctggtggggcagtgagaagggcagcggggctgggcagcagatggggtgacaggcagggcagtggggctgactggctgcacgcccagagcccctaaccggggccacgggccacacgtccatctccgcaggccgacaaggcatctacccgcctgaagcagctcaagcggcagctggaggaggccgaagaggaggcccagcgggccaacgcctcccgccggaaactgcagcgcgagctggaggacgccactgagacggccgatgccatgaaccgcgaagtcagctccctaaagaacaagctcaggtgagccgccctgcccacccgcccctttgcctcggcacttctctcaaaaggtagcttgttcctcaaccagagcccacaagcaaggcacgaatgtcaccaagaaaggactgcacaaagcaatccctgccccttctggctccttgcctttgaggctttagcttagtgttttgaacacacagtaaactctaggtagtttattcccagctgtcctaaaagtctattgtcttttgaattggaagttgcttgaggccacctggcccagtcctggcacatgttaggtgcctcagttaaatatctgcaaaacgaatgtgagcctcatgagcaatgcctacagaggttaaaaacgctcctttgcgtttctcagggagtgttaacactcaagaagtagtgaatgtttgaagcagaggatcttattctctgagattctcatttcttacgtgtttttttgtggg

SEQ ID NO: 29606 - DNA, 1031 bp, Homo sapiens
gccaccgaagatgccaagctgcggttggaggtcaacctgcaggccatgaaggcccagttcgagcgggacctgcagggccgggacgagcagagcgaggagaagaagaagcagctggtcagacaggtgtgcatggcctcctgctaccccatgggtgcccaaggctgccttggcttcacgcaggcttctgttctctccttccacctggattgtgttagggccccttgaccacgcctcccctcccatattccttctttctagcctcctgtctcggggttcagtgactcactttcttagagttcttatggtcagtaatccccactggtttcccgaggccccatggatcctgcagaactggcctgaggctcctgagttcagagctagggcagggtctcccagtgggtccagcttcccaagttgttgatgttccttcccccaggtgcgggagatggaggcagagctggaggacgagaggaagcagcgctcgatggcagtggccgcccggaagaagctggagatggacctgaaggacctggaggcgcacatcgactcggccaacaagaaccgggacgaagccatcaaacagctgcggaagctgcaggtaagggtgggcggggcccaggtgagggtgggcggcacccgactgagccaactacatatgaaggtgccagggctcggcccagggcgggaacctggcagggtggcacctcctgggaaggtcctgggtgcttccagccccatctcactgacagagactcagaggctcagaggtgagtggaaacatgatagtccaacagcaaacttgcaaaacggtgtatgactgggtacataaaacacagaagcaaacaagtacaagcctagacatgggtggagttcaagaaggtctcacttaatgcagacttccagaatcacccgggtcctgacacccttcagccttctgggctctggggcgatggttccaagaagcagcccggagtgtgggacacatacttggaaatcttcacctcactaataattaaagaataattaacacg

SEQ ID NO: 29607 - DNA, 1029 bp, Homo sapiens
acctggagaagcagatcgccaccctccatgcccaggtttggaggcctgggggaccggccggactctgcaggctggggagctgctggccgggcactggcctgggcactgcaggacagccctgcccgctgggccggcccattgctgctctccccctgggaagccaaccgtgctctcccacatcagtgctctcaaggaaaggaatccagggatctgtggacttagatgggggacaccactattttcactattttacacctttattttcaccagtctttagctgaaattcagcattgcttccattatggatgtaggcagcaagccatggtggtggcagtccctgtgccgtcatcatctgtagaaatggccagttaccctgtcagggttgtggccgagctccttggcctcatgggtcccaggcctgcgctgtttgttatctgatgtgctatctagcagcacgtggcttcctgagccatggttttttagaatgtgtgacaactgcatttttctgtactggttgccctgctgatcccatgtttatttcatgcctgttacaacattgtcatgagaaggagtcccttggcctctctagactgcgaaggggtccgtagcctaatatggtttcagagcccctgctctagatcctatcttgggcctccatgtgccaggccagaaggcctgaaccacctcgggatgggctgggagtccattccacagtcagggtaggagtagcccgcgagcgtgcctgattgtgggtttatctccaagtgcaaggatggggctgggtgatggggaccccgtggacaccctacagggcactggccctgctctctgggagcagtctccgtagagcaagaggcttggtgtggatgtgggctgggagcccccacagcgggcctgggggtcagcctcccccgggcttcacacagtagacagatgcccctttgcagaagctccatttgtctcgcccctgtggagagggaagtgactgggggaggcggtttcataactgggcagatccctggtgcccct

SEQ ID NO: 29608 - DNA, 1045 bp, Homo sapiens
aggtgagccagggcccggagcccgcttctcctgggccctgctgtgcgtgcagtgagtcccagaggtgggctgctgctccctggcaggatcctgtcgtgagggagcgacgtcctccatccatgtagaactgagtctggccagctcttccccacctccttctcttttccaccctttgcaggaaaggagacttccccattttaataccgaaatgcaggtcatcatcatcctgttgacttttgctcctagtaactgccggccctggtgctatttgctacagttagaggagctatgaaaagaaatgtaaaagaatcagccagagacctaggatattacaggaactttgtggaaatgaaacacggccgtgcgttgctgtgtgcgaagacggcgacaccttcctgtttctctaatgactgtgctgagtgtcagttgctgtcgggacgcagccctttatttcttgggccatctctgtttattagcagctccctgcagcgtcccagggaagctgtgtgaacatggctgtccctgggtgacagatgaggatctcaggcaattagcacttagtccaacctgaagcacgcccttgagtgattgaaacggtcctacacgagtttccattcactttccggaaaacaccaaggcttccttgtctcattcagccgaagaaaagagtggggtgggatttgcctgtgtcttctttccttaggagagtttgtgtaaagaattctgtgtctgttgcattgtagaaatgatgttaatctctcgcctatattccaggcatgtggaatcgaggcaatgggtaaaatgaccaggcttctctttccttcctcagatatgagatcctgactccaaactccattcccaagggtttcatggacgggaagcaggcgtgcgtgctcatggtgagttgagctgctgtccctgcctctctggatgggcagccccttgtctggggagtgcccacgtggccagggcccaccttgctatatcagtggtcggtggatgcccaggctgtgtcccttctgatgctccgcgtctgactctgccg

SEQ ID NO: 29609 - DNA, 1047 bp, Homo sapiens
atttccaaaaagatgaaactgacacatactcagagaaaatgtgaacattctaaaaagacaaagaaaaaacaaaaattacttgtcttatgactaaaaagaaatagtaacattttgttgtccttccaggattgtttttctttgttcatattacctaaaaattttaaaaaagctgaaacccagcacggtactgtgtggccaccatgccatgtctagagccaggctcccgttgttggccatgccttgctttgaggctttggctctgcacgagacgccgcagagaacgtcttgatgcctcgctccccttatcctcaccacttccttcttaggggtggaaatgctggatcaaagggtcttcacgttttctgacttttccatgcatggggttagcctgtgctccggagaccctgtgagcacacatgtccccagcgcagcttgtgactcctgcctctctgaccccgccaggtggattacaaagctgacgagtggctgatgaagaacatggatcccctgaatgacaacatcgccacactgctccaccagtcctctgacaagtttgtctcggagctgtggaaggatggtacgccctttgcccttcgccccctgcctcctcttggctgcggctggtcatcttcccacctccacagtgggccgagctgccaaacaaggggtacacatgtgccccctgacataggccaggtggtctctgccctctgtagctcccatgagagagggctcctcggaccgaaacaggaggccactgccttgcgcacacaccgtggccgggtcctcctgggcggagcgctttccgtgtgtgggaaagtcaagggcagccccgagcctcgaagcccagggtcccagccccgcgccatgttgcattcccgcctctactccttggtaggctggttgctttgagtggttctttttaattctttctgttggtttctccttttcctttgcctgggttttgctttaacctctctgttgcagagatgcagagcactcagagagcctatttctatcatcgctttcctattctccacctagaac

SEQ ID NO: 29610 - DNA, 1142 bp, Homo sapiens
cttgtcttgtaaactcagtgtgcagaaggctgctgggtccctgggactatcttcctcaaggggctcctcctacatatcccatctcatcatagacatgcagacgcaaagcatgtgggttggcatctcccgtggcaggatcacagggtacttgttgagggcagcctcctgggcagaccccagtgcactgtgaagtcagactctggccccgcgggtcagcggatgtgcacttttcatcagacccactgagggtttcactaatgctggagaaccaccgcgatggatccttgggtaaaggtgtcagccgcagcctgggccccagaggtttctttagaagctagaaatcttcaacagtgctttgcttctcctggggagtgtgtcgcccaccgtctgtgggattcaggggattctgatgtccgggctttggcttcttgaagggtggggtgcccctcccagggtgcactcacctgtgctgatgctgcgcttcctccaggcaggccccccgggcattctggccctgctggacgaggagtgctggttccccaaagccaccgacaagagcttcgtggagaaggtgatgcaggagcagggcacccaccccaagttccagaagcccaagcagctgaaggacaaagctgatttctgcattatccactatgccggcaaggtgaggagcgctcacggggaggtgctggccagatcttcacaggagaggtggagtcgaggctctctaggaccaggagccgggcagctgctggggacgcaggggtgtgacctgagtacggttcttgcacaatgactcacccagtaatgtggccggtgacagcatcatcatttacacagcttacagagccccttcacctgctccatgctgttagaagcctgcggcactccaccgcggtgcccaggctggttgtcatcatgcattatcgttgggcctgtctgccaggtgcagagctttggctaaaggcatgtgctcagagtttgaatagagctctgccactcataagctgtttgacttcgggtcagttacttaacctctctgatccttggtttcctcatctggaaaatgagaatgaccacccaccatacaggattatgtggattaaacaagctcttgaggcccaacatgtggcatgaatcag

SEQ ID NO: 29611 - DNA, 1022 bp, Homo sapiens
atattagccatgtaccatagtgtgtgcctggggtcccagctactagggaggctaagctgggaggatcacttgagcccaggaagcggaggctgcagtgagctgagattgcgccattgtactccagcctgggtgacagaatgagactctgtctcaaaaaataaaaaataaaaaaaaaaaacaatgtattactcgatcacaatattttgatgattatatttcaaaataactactttctttgtaatctattggatgcaatttaaagcactattctgaaaaggctttaccagactgcccgcggtcactggctccaaagagtaaatgttgcccactgctgggtggataaagggaaggccaggagcatccgggctctaaaggcagcggcatggaggtgcccaaggaggcccttcctgtatccctgccccaccctccttctcaaggggtgtctgggcctctttagtgcagggttggcgtctctctgacattgttttctctccttgcagctgaactcgtttgagcagctgtgcatcaattacaccaatgagaagctgcagcagctcttcaaccacaccatgttcatcctggagcaggaggagtaccagcgcgagggcatcgagtggaacttcatcgactttggcctcgacctgcagccctgcatcgacctcattgagaagccagtgagtaccaggcttgctttgacctcacacctgcctctggcttttcccttccggggcacccgctcctcacctcagctctgtgttggttgtggaggtgtcttaactccccttccttttggtgccacccggaggatgaagccccaaggctgagatccagtgcctgggaggcctgggtgggtgcctccattagaggagatgctctgggctgcagctgtgggctgggcttttcccagctgccggaccaggtgcatatgtggcgggggccctagcatcctgttttcagtcccagaagaccacccagcatcctcctgaaggctgggctcgataagcatttctttgtcttaaaga

SEQ ID NO: 29612 - DNA, 1083 bp, Homo sapiens
gtttagggtggtatggccgtagactgctgccttattttgatgagattgggcgcgtttagggtggtatggccgtagactgctgccttattttgatgagatcgggtgcatttagggtggtacggccgtagaccactgccttattttgaagcatcactttttctgtaaatcctttagtgtgtcctcattttatttcaaaagatctaagtttattgtccccatattgttagatattaggttgtttctacttttcatcattttaaataacaccacagtgaacatatttgtgtacgaagatttttttttttcccccacatacttagggctgttcctctagggggaggactctaaaagtgaaattactggggcatagggtatgagggttttcagatcctttgtatctgacaccacgctccccgggtgtgccccgcaggctgactttgccatcgaggccttggccaaggcgacctatgagcggatgttccgctggctggtgctgcgcatcaacaaggctctggacaagaccaagaggcagggcgcctccttcatcgggatcctggacattgccggcttcgagatctttgatgtgagccttgcccttcattacccaccctgctgcctccttggcctgttggttgccttatccttggttaagaaccctgcttctcatggtcctgcatcgatctgagttggccatctcctttgcatgaagactttggttgggtgtggggttgtttttttttttttcttttttaaaagatagggtctcggctgggcacggtagctcatgcctgtaatcccagcactttgggaggccaaggccggcagattgcttgaggtcaggagtttgagaccagcctgaccaacatggagaaaccccgtctctactaaaaatacattagccgggcgtggtggcgcatgcctgtaatcccagctactcaggaggctgaggcaggagaattgcttgaacccgggaggcagaggttgcagtgagccgagatcacgccattgcactccagcctgggcaacaagtgtgaaactctgtctcaaaaaaaaaaaaaaaaaaagtcagggtctcgctttgtc

SEQ ID NO: 29613 - DNA, 1040 bp, Homo sapiens
aggtggggcggggggctgtggtctcccccgtgctctctagctccccatgtcaggggcacctctgatctcttgctatcctttcttacttagggcaaattcattcgcatcaactttgatgtcaatggctacattgttggagccaacattgagacttgtatccttgtggttcgttgggataagagtcctggatccggaggggaggcatgacctctgtagagaagaagctgcctcctgattccagcactttcccctttatgggcccatcctgacaccttctctgtggagctaggggactgtcaggatcggctagtgcaaacccaacacagagcttagggctttccttatttacaggcaggataacctgtgctttgaatggcatggagctgttgaaagccgtctagtgtggctcccagaggtaggcgtttgggggatgccactctcctgcgtgccaccgtttagcctttgcttgtgggaatgttcttgttcccattacctgtaagaatgagacaaggctctcgaaggtgtgagctcctcttggacatgccatgccccttgaaggtgagaacccaggtagtttgcttttgctgtgttttgccattttgtgccattcttccttcctggtgaagttcagttcctttggacgagaataagaggacaatggaaggctggccaggcacagtggctcacgcctgtaatcccaacactttgggaagctaaggtgggtggatcacctgaggtcaggagttcaagaccagcctggccaacatggcaaaactctgtctctactaaaaattagctgggtgtggtggtgggcgcctgtaatcccagctacttgggaggctgaggcaggagaatcgcttgaatccaggaggtggaggctgcagtgagccgagatcatgccactgcactccaacctgggtgacagagcgagactctgtctccaaaaaaaaaaaaatgaggaaagtggagggcttgccttctccccagcttgtgttgctccttaatatttgcaaagatcttttggagaaatctcgtgctat

SEQ ID NO: 29614 - DNA, 1022 bp, Homo sapiens
aactccctagtttccttagccagcgttagttagtccctggtggcatgggcctgttgcacaggtgcgaagacagggcagtggctgacaggttagggaggggactggaattccgccaccccgctctgcggattgatagctggatgaccttgagcacccctcccttggcctcagcttcctcttctgtgaaatggggctgctctgtcctgccccgtgagtatggtggggatccagggataagaaggcacaagggtgcattttgtctaccacaaagcaccctggagttcacagtaggatttattgacattctcagtaaacagcctggagcccaaagtgggcctcatggatcccgtgctcactgcctgtcatggtggttttggacgcggcagtggaggggctggtacagaaagtgaagcatttatcaggacacagatgagatgagcgtgtatattttccagatccgatcccctcatttgcttttcctatgaaaaggaataaaaatgtgaggattagaggcaaggaggtagagggaagctggtgtatacagggtggagacactgtcccagggtgtctgtgccgccggctccctagtttaagtgctgctttcacatgggtcgtccagggccaggttcctagagctgagggagcttcctgcctgccgtttccagggccatggaagtaagttcaaactgaccaaggtttccaaagcctggcgggaaggccgcacttggatgataccggggcctggccttggttggagtcgcacactggagcccacccggaaacctctgttcctggcacgttggacatgctgacacggctctgccatcgtcccccttccaggcagggcaggctcggcagcccaggtcgctgcccggccttcactgcgtccctgggttccttgcagggcgagctggagcggcagctgctgcaggccaaccccatcctggaggccttcgggaacgccaagaccgtgaagaatgacaactcctcccgcttcgtgagtagcgcggcggcgccccggc

SEQ ID NO: 29615 - DNA, 1011 bp, Homo sapiens
aaggagccagtgggaaggagggtggagcttatggcagaaaggaaaagcaagatctctccacaatccagctgggaaccagctcctccgtaacttctgggtggaaggcattccttcttgctctggatggtggcttttctttacctgaattgaagtagacactggggcctctcagcctctgaacttaacaaggagatccataaaccccattgccaagagagttaatggcacagaacattcctttaagtgacgtttcaaaggaacatgtacaagtgcctttgacccctaagtccacagctgcctaaaactgatttttaaaacacttggatgtgaagtcacttgccctgacaagtgaccaggacaggcagtggatttcagtttacttctgtctggcccctggagagccatgggaagtgaactgcctgaggattccagagcgtttatgtggcagtcccgttttctgccacacgttgggtccttcacgggcacccaacagaatgcgaggcagtggagcgtgcagtgggaagggacagaggtcaaggacttggccatgcctaagcccgggacttccttgcctctcttggtagtggtgaatctggagctggcaagacggagaacaccaagaaggtcatccagtatctggcgtacgtggcgtcctcgcacaagagcaagaaggaccaggtgagtgctgcagcccttgtccctgtggccgcctgcttggccttggtgggatgatggaggaagagcacttagtggtcccggcttcagctttacaagaggatgctttggggaatgaagcagaggctgggcccatttccattgaggcagtggcgtggcctgtcctgggagtggtccagcggtagcaagcccattccatccttggcctcctagccttctgagttgctatggaaactggcgaggtcctggagtttgcatggcagccctcttggcttttgcagctcgttgctgtgtgtcctccccttctgaggctggaaggcagattccaagacttgg

SEQ ID NO: 29616 - DNA, 1027 bp, Homo sapiens
ctgctgtaaagttcaggtggaagcagctgtggtctgcaaaaggtctgcctcgcctaggaaatggtgcttctggatcccgggccagaccctctggggtctcccctatggggaaaggtgtgtatgtctctacaggagaactcactggttgaggaatttgacatgagcccagttatctccccagtgagtagaaaaagccccttctatgtgaattaggtagaatgccaggtttggttcactttcagtgactttatggtattaatattttaatgagttcccagcattttgggggaagcagatctgctttcattctaggcctaaacttgtctgagagcaatttaaccctttgctctgtgccagtctcccttcccacccgatccctggttcccaagggaagctgcaccagaggtggttggtcacccagcagccgctcagagtgccagtgagtgtgcacatgcccctcggtgtctgacctttttctgtaaacaatgaggggtagaatttttgtgtatcttcacgtctgagcatggctcttcgaattcatacgtaaagaggcaggcacagataatgttaactggcttgtcgaaaagcccgcagagagccagccccagaaagcagtctcctgatttcctgtcctggtgcctgttaccctggcacaggcccgtggggcattggtgcccctcattttctctggctggtcttgaaggaattcttatctccagctcagtggttggggggcactaggggaggagaggccctctctttccttctctccacattctccctgccccgctagttgtgtctcctgtggaactgtctgctttccaatgtctttctgaggaaaagtgccatgtttggcagaggctcaggaaaaagcttcaaggggcagaaaagctctgtttgaatcgactcaccgggacaggcagctgaggaaggagcgccatggaagccacagatgggatgactctgctgaagcaggaatgcacccagccgggaggccgccagccctgccagccgtcagcacacaaag

SEQ ID NO: 29617 - DNA, 1068 bp, Homo sapiens
gtgtcacccgtggagcctcggggtctgcaggctgttaaaatctgctcctgtcttttggagtgaagtcttagtgcatgctgcccccctggctttgagggaaacagatttgttctctgccacttacatcttaaaaggcacagccggaaagttccttttgtgctttttctttaaacaagaactagacaaagatttccttcctgagctggctgtgccttatgacatactagcatttattctgccaaacggggcagttggtggctctgtctggggacttgtaggagaggagctctttgacccttcctggggacctccatctgcctttatctgttcagtgtactggtttgcctgtacagtcctgatttatgcctgttgttccacagttattattaatagcactctctttcactttcagaagcatcccagtttggaggataaattatatgtcactcacctattgtcagactaagccagggattctcactcttggcactagtgatatttgaggctggatgattctctgttgggggtgggggatcttcctgagcactgtaggatttttagcagcatcgtggcctctattcacttggtgccagctacaccttccctctccagttgtgacaaccaaaaatattctcagacattgccatcaagtttccgtggggggcaagattattcccagttaagaactactggactaagcattgcagattagttttactttgagtgtcatctccgatcgatcagtagtggctgcctggagccctgtgctggcaaggatttgagactcgatgcaggaattctgagatggattagtgctgtctgccgtgggcacgggtggggcatcacagcatgtagtgccttggattaggccgtggaggtaggtgacagaaggtgccagaatgccaggaggttttgacattatcctgttactggatgccctggcggtccaggtggagagacgaggcatgtttatagacagagatttgtggccctagctacaaaacaagacatttggtgcctacacctgcgccagcacgactgagccaatgtcaggtgtcctgggagttt

SEQ ID NO: 29618 - DNA, 1048 bp, Homo sapiens
agtgctagaattacaggtgtgagccaccgcgcccagccagttcttctgtttttaaagtaaaaaaaaaaaaaataaggtgggggtgtgtgtggtgtttattgcacaagcattattgcaacaaagctggcaagaagcagatttgccctgcacctcatccaccgttttgcatttttctgggttttctgtccatatacacatgtattttacaaaattgtaagcagaatggagactgtgtgtgttctgagttactactataatgcaaagttcctatgtttcattggtcgccagaattcatattttaatgaccctcttatgtccactgaggagagggaccatttttcatgttgccagaaagttccacgagttttattgagtcttggaaattcattcagcaaatgtatccagtacatctattctagatctaggccagaaactgcccgctggtcaggatgcagatgaacaagaggtcccaggccctgtcctggagggggctcgcagcgtagacctaggaacatgccacttcactctggtgtggttgtgattgaaggggctgaggaggtgggggctgcttggatgcccaattccagtcaattccagccgatggaaaacaggtaaaaccactttgtcagtagtggtgagaaggcttagaaacaagggagctgggagatctgtccgggcttttggaggaagctcttcaacctgttcaccccgcctccgccgttgtgtcacttccaaggcccctggccagaaaacccactgggaggaagtgagggagagaagaagtctccaagggaccatgacaacagggaggcttgggaaatagcccccggcccttctgagggagaccctaccgagggtggcagtggagcaggggcagctgagggcaggggcagggggaggatagtggggtggagtggtcttccaaagtcggaaggccattggcaggagacttgggctctgctgaggcccctgccttttccaggatggtgtgagaatggtagcaacaagttgcaacagtttagttttgttgtaaagaggaagtttcaga

SEQ ID NO: 29619 - DNA, 1099 bp, Homo sapiens
gcctcccaaagtgctgggattacaggtgtgagccaccacgcctggcaccatgtttgtttttttaaaaagcagatcaccacccactaaattaattttgcaaacccactgacgtccatatcctgcagtttgaaaaacactgcaataaatattggtaggaggtagaagttttacccttagcccaggctgccagtcctggcttccttccctttgcctctcagctgtgccctgagcctgcttgtgactaagccagacccaggccagctcagctctagctggacagaggagccaccatgtagctgagagcccttttgtagcgcgccgagagctcagccttctctgtgtctctcaggctttccctgcaggagtcatcaggcagcaatgatgtggattctgtctctactgcaaccctcagcccagctatgagaaaggcattcttcccattgctcagatgagaagcctgaggccgatcagggtgaagtgactatggcataaggacaaacaggactggtccgcctgtgaaattcagaatgtgaattaggcaggaaaattggctctctagaaaatactgtggaagtgctgaataggattgataggtggctgtggaaaagaaagtgctagagacacagaaaaccgatacaaaaatgggcagggcggccaggcgcggtggctcacgcctgttatcccagcactttgggaagccgaggcgagcgataacttaaggtcaggagttcgagaccagcctggccaacatggtgaaatataaaatttctgtaccaaaaatataaaaaattagccaggtgtggtggtgctcgcctgtaatcccaagtacttggggggctgaggcaggagaatcccttgaaccctggaggtggaggttgcggtgagccaagatcatgccactgcactccagcctagctacagagcaagactccgtctcaaaaaaaaaaaaaaaaaggctgggtgcagtggctcacgcctgtaattccagcactttgggaggcccaggtgggcagatcatgaggtcaatagatcgagaccatcctagccaacatggtgaaactccgtctctactaaaaatataaaaattagctaggcgtgg

SEQ ID NO: 29620 - DNA, 1030 bp, Homo sapiens
aacctcccaagtagctgggattacaagcgcctgccaccacgcccagctaatttttgtatttttagtagagacagggtttcaccacattggccaggctggtctcgaactcctgacctcaggtgatccacctgtcttggcctcctaaagtgttgggattacaggcatgagccaccacgctcggcccagtccagactttttaactacctggccccactgcagacacagttccctctagtccttcccagagttacaagaagagaactccagtagccttattctgtcagggacgaattgtttaccccatgataatgtaggatatcataaattcttcttcaaaggttttagcctgtaatttgttaagtacattgagttctgagatcctctccaaagaaccaatgtatcagtatgttcagctcacctgttctttgttcttcattttaacttttaatttcctcattctttatgtctccttgcccctagtttcagtaaacaatcccctcctagcctctgtcacctgctctgacctgagtcacctttagtcacctggtccgtaaccatctttcctgtctaaacttctcaccccaccactctggcttatacccctgctctctttaaaatagccagtcagaattagcttagattgtgcggtccaaccctagcccataggggaacaacacagcagtagggggtacctgcatcagggataagaacccattcccctcccttgttccggtgtgctctcgccattgcaccatccatgagacgcactcttgtatagaagtaaaattgccttgctgagaaaatgtatgtttgagtgctatttcttttgtggcactgaaaatttatttctaacaaatttggggtctcatttgggattcccatcctcctctgaggagggtctagacctctcccatgaggaggcacgtcccactgccttgttgcggtggccacaggggtaaggaatcgagaccaaccagtgtgacgaataaacctatactctcagcaaggcagaaagaaacgggctggcgac

SEQ ID NO: 29621 - DNA, 1058 bp, Homo sapiens
tttgcttttattttggagccttgttcttccagagtgtcaaggcagccccctgccctggagcctcgtggagggtcatgattcatgacctactcaggttggacgtgagatgcccagaaaggtcagctcccagtttcaagggatggaagataccaggcaaggcctgcagtgaagcccccacacctggcattggcagctcccctttctgcacccctccccacatgtcccagcctggctcattctcctcattttgcttttgtgtagagtcctgcttcctgttcgccctcacgcgccagaagttgccacccttttgccagcaggggtacctgaggatgcagggactcgtgagtaccgagagcctttggcagcacagagtggagagcaggctcctgcgggactatgcccccacaggcaggcgcctggaggacagcagccagcagcttggcgaccaagagccactaggttcccccctggctccagggcctctggctcagtccgtcgatagcaacaaagaggagctctgactgtcccttcctaagctgtgggcacagtggccaggcctccccacctaggcccatggtcagtccctctttccccgcaacctcacactcccgccaatgcgtgattgccaaagaccactcagatcatggcagtgtctgcagcaaagccaccagatggcacgtgagggctgaaagtcggggatgcggtggtctcctccctcctgtcagggggcagaagggcatcctctgccaggtgggagctgccttccccagcccagtttgtctgcaatggagctgtcgctgagccccaggccagcccagttctgccccgtctcaagtgctcctcttccttccaagcccctcctcagatgggcctgcatcccgcctgtggagtgcttcacaggggaaacccatccgcatcttaagagtttgtggcaagcgctttaaaacaaaagctctgatatcctcaacaaccacaatgggcaggtgggattgttgccccagatgactgctgaagacaccagctgtgggatgtcaagtaattccagggacccccagctg

SEQ ID NO: 29622 - DNA, 1021 bp, Homo sapiens
agactactgttcccgacaatgccgtgggttaaattacaactcacctaaaaataatggataatatgtcttcttttttttttttttgagatggagtctcgctctgttgcccaggctggagtgtagtggcgcaatctcagctcactacaacctccgcctcccgggttcaagcgattctcctgcctcagcctcccaagaagctgggactacaggcacatgccaccatgcccaactaatttttttattttttagtagagatggggtttcaccatattggccaggctggtctcgaactgacctcgtgatccgcctgcctcagcctgctgaagtgttgggattacaagtgtgagccaccgcacccagctgataatatgtcttttcaaaaggattagcagggccaggcgccatgggaaggcgccagggccaggtatgggtgggaagacagagctggagcaggatgggaggcctgtttagagacactccaataaagcttggatctcagtagggaagctgggagccaaaaccctccaaaggaggagatagatgacatgcatggttttggccctagatagagtgggagagaaaaatctctgaaaatattcaaccagtaggccctgcttatgtaaatttggggccaaacttcatgagatcattgagctatagaaatcacagaagcaaatgcacaccttctcaagaaatacacttttaggccaggtgcagtggctcacgcctgtaatctcaacactttgggaggccgaggtgggtggatcacctgaggtcaggagttcgagaccagccctggccaacatggtgaaaccccatttctactaaaagtagaaaaattagctgggggcagtggtgggtgcctgtaatcccagctacctactcgggaggctgaggcaggagaatcgcttgaacccggaaggcggatgttgcagtgacccgagatcatgccactgcactccagcctgggcaacagagcgagactccatctcaaaaccaacaacaacaaaaatgccagggt

SEQ ID NO: 29623 - DNA, 1067 bp, Homo sapiens
actgcactccagcctgggctacagagcaagactctgtctcaaaaaaaacaaacaaacaaacaaaaaggccgggcgcggtcgctcacgcctgtaatcccagcattttgggaggccgaggcgggcggatcacgaggtcaggaggtcgagaccatcctggccgacatagtgaaaccccgtctctaataaaaatacaaaaattagccagcgtggtggcgtgcgcctgtagtcccagctactagggaggctgaggcaggagaatcgcttgaacccaggaggcagaggctgcagtgagccaagattgtgccactgcactctagcctgggagacagagcgagactctgtctcaaaaaaaaagaaaaaggaggcactaagagttaaagctgttcagtgggggaattggtcacctccaaattcaggtttcccagaatagcgacggccaagtcttgactcgatggccatctgactggaacaccacagaagggagcccacaccagggagaagctgaactagatgagtgctgagacccctcgcctctatctgagtcttctcagagaaaggccagtttgaaagcagccacagccaggcgcagtggctcatgcctgtaatcccagcactttgggaggctgaggcgggtgggtcacctgaggtcaggagtttgagaccagcctggccaacatggtagagactagaaaccccatctctacgaaaaatgtaaaatatgagctcggtgtggtggcgggcacctgtaatcccagctactctggaggcagaggcacaagaatcgcttgaacccaggaggtagaggttgcggtgagcctaaattgtgccactgcatgacagcctgggcaatagagcgagactgtctccaacaaataataatacaaaataaaaagcagccacagtagatctcagtccatgtgagtcttagggaaacgccagcctcacgttgttagcttcagcactgccttccgaaaccacaagggaaaagcctagttcctcttcctcatggcagcctttcaaatatctgcaggtggctcttgaacagtctgaccacagcccagcatagg

SEQ ID NO: 29624 - DNA, 2690 bp, Homo sapiens
gaatcgcttgggttcatgagttcaaatcctgaactcaccagcttgggcaacatagtgagaccccatctccaaaaaatgtgccacagcaaactcacaggagtgctgcaggatattttaaattttttagggaaacacagagacatcttgtcagaatactaatacatggtttgaccctaactaaataaaaggaattcttggccgggcacggtggctcacgcctgtaatcccagcactttgggaggccggggcgagtggatcacctgaggtcaggagttcgagaccagcctggccaacatgatgaaaccccgtatctaccaaaaatacaaaaattggctggacatggtggcgggcacctgtaatcccaactactagggaggctgaggtaggagaatcacttgaacccgggaggcggaggttgcagtgagccaagatcgtgccactgcactccaccctgggcaacaagagcaaaactccgtctcaaaaaaaaaaagaaaaaaaatttaaaagaaattcttgagtatttcttttgccctgtgtttgccatgaaccaagaaagtttgggaacctctgtcatgtgacctttgaccagtcatttcactctgggtccaacttcccacgtctacaaatgatatgggtagaaaagaggatctctctggggtccttttctactgtgtgtgcatttatgtaaaatgtcagactcagctttgcacccactgcaggcttccacccccatctaaggccaactctgcctgtctttcctatcccaccatgcctctcagatcaagacctcctggctacacctgcacttgagccaatattctccacttggctcactgttacacgtcctctgtgaagcccttccttaccacgcaacacatagtaaacacttggctctgctgtttatatgacacttctaaagtgtgtgtgtgtgtgtgtgtgtccgtgtgtgtccatccatcattccctgtctaggcgagcttttagaagagaggaattgtaagtcgttgagtgactgctgtgcggcaggctgtgcaagggaagggactatgtctttgtctcttaaatggtaagatttagtgcgtacctacccactttctaagcaagcagactagggagttccttctctgccagaggaggtcccagcaccttgggcatttggagcttgcttctgtttctctaacggggctctcctgcagcactgtaatggcgttgactggcgtcagaagctggactctcagcgaggggctgtcattgccacggagctgaagaacaacagctacaagttggcccggtggacctgctgtgctttgctggctggatctgagtacctcaagcttgggtgagattcctgtgcaggagctggcagctgatcttgtgaaaggaagggtctgggtagggaggttgaccctcccctccccgtgtactggacaattgactggcagagataaatccaggggtggggtagagatggaggggtcagttaggagacaaatgccaaacagcaggcatgctgaatggagtcctgaactagggcaatggtgtcaatgaaatccagaactgagaactcagaagacgatgttttccctttcccttgaaaatagcagtggactgccgggcgcggtggctcatgcctgtaatcctagcactttgggaggcccaggctggcagatcacgaggtcaggagatcaagaccatcctggctaacacgatgaaaccctgtctcaactaaaaatacaaaaaattagccgggcgtagtggcgggcgcctgtagccccagctactcagggggctgaggcaggagaatggtgtgaacccgggaggcggagcttgcagtgagccaagatggcgccactgcactccagcctgggcaacagagccagactccgtctcaaaaaaaaaaaaaagaaaaaatagcagtggaccaggtatcaccatttaattgacatttgatcccaagtgttgctgtctctgtgctgccctgctctgaccactgatatcccttcccctgttagttatgtgtctcggtaccacgtgaaagactcctcacgccacgtcatcctaggcacccagcagttcaagcctaatgagtttgccagccagatcaacctgagcgtggagaatgcctggggcattttacgctgcgtcattgacatctgcatgaagctggaggagggcaaatacctcatcctcaaggaccccaacaagcaggtcatccgtgtctacagcctccctgatggcaccttcagctctgatgaagatgaggaggaagaggaggaggaagaagaggaagaagaaggtgtgtagcagcccactttctgaggtctagagtgatctgtgggctagcacgggagcaagctctgtagccattgtgatctttaaccttgataaaacttcgagaattccctgagacttaagtatgaagaagcattcactttggctccaagagcttcttctagagcctttagatcacatcaagtggttggggaggatagcggtgttttagagaagcggctggactgtggcagaggtagaggaagatgagggaagtcccagattgaagccggtggtctagagggaaaagctccgctccgggttaaatagcctgaaagttgtctctcctgctccaccagctggtgactgaaggaaatacctgcccagccctgtgagcatctgaaaggcttaacttcgga

SEQ ID NO: 29625 - DNA, 1050 bp, Homo sapiens
agcgtggctgaggagacctcaggaaacttgcaatggtggcagaaagcaaaggagaagcaggcacatcatggccagagcaggagaaagagaggggggaggttggtatacacttttaaacaaccagatctcttgaatactcttaccacaagaatagtgccaaagggggaagtctgcccccatgatccagtcacctcccaccatgctcctcctccaacattggagtttacaatttgacatgcagtttgggtggggccacaaatccaaacaaggcagaaatcatggtgtcaatagaaatagaactgagttctcatctggaggttctgaaagaaaagccacttccaagcccattcttattgtgggtaaagttcatttccctgcagttagatgactgaggcccccatccccctgccagttgtcagctgggagcctctcttggctcctagaggccacctgcattccttgtcacatggccccctccatctccaagatagcaacagcacatcagatccttcttgtgcttcagatctctgacttcctccgtctccgacctctacacctagatttaagagactcatacggttgggtgagcccagccaggtagtgtatattaaggtaaactgatttgcggccttacatctgcaaaatcccttttgacatacaaggtaggatgatcatgggggtgatacttgatcctagccataggttctgcccgtagtcaaggggaggagactctgcaagggcaagggtcactgggggtcatcttagaattctgcccatcccaggcctcaaccatgaactctttgaaaatgatttctcaaatctactctgatttattatacttcccattgtttttctgctaaaacaccttccccttccatgtgtccccagtcccgtcattgcctctgggccagctgtccatcagcattgtctttcttccacctaagctctgagcctccaacatctccaacttcttttttacattattctgttttgctgttagcaaaatagaaggctttgctgtcttctgaatctgtcctggatttcactgat

SEQ ID NO: 29626 - DNA, 1032 bp, Homo sapiens
ggtaggtcacctctctggtgggtattgtggccagactggagcacgggccccactctatagaatccccagtgaccacatgagtttcttttttgctgcagttaccgcaggtggaagcttggagatgatattgaccttattgtccgttgtgagcacgatggcgtcatgactggagccaacggggaagtgtccttcatcaacatcaagacactcaatgagtgggattccagggtgagccgccatctccatcaccctcctggtgacaccatgtctctattccctacagtgcctgtttacgcaggctaggttgtataaactgtttcttatcccctttcgttacttatagagctacctggatgtttttttttgtcttgtgagttttttcctctgcttagttccttgctgagaaagagcatgactgtgtgtgtagaactatgttaagtgttaagaacttttctgcttattttttacgcaggaaccagttaactcccttcttccagtactttcttcatctctgttccattgtggcctcctgttgacttctgctccctgagcatctgattttttcctctccttattatctgggttggcagttttcctgtaagtctggccgctcttctttttgacctcttctttcattgactgagccactgccttcaatcttttcacacattttttgcaattcctcatttctttaactcatggattctaagatctggctcagaattgactcttcagaggcaccttgaaagaaacatgcttccttcacttttcctcctctatttccaccccacccctcccaatccgcccccccgcccacatcacctgttgaaagagcacactggaaggtttgccgctctggggccagcggccttttcttggatttttcctggtgagctccccaaagcattcagggccgtcgtgcctgtgtcgttttgccgtctgtgttaccgcgttactctggtctcacccgtttccctgttccgtttgcatgtcgtctttgctggctcccctcctttttgatcccagtggagt

SEQ ID NO: 29627 - DNA, 1332 bp, Homo sapiens
tttgtttttttgagacggagtcttgctctgttgcccaggctggagtgtaatggcaggatcttggctcactgcaacctccgcctcctgagtagctggtattacaggtgcccgccaccacgcccagctaatttttgtatttttagtagagactgggtttcaccatgttgaccaggctggtctcgaactgctgacctcgtgatccgcccacctcggcctctcaaagtgctgggattacaggcgtgagccaccgcgcccggcctccaagaaatacttgtgtagtgaattttcctctaggaactcgccttctaagcattttcagaaggttacaacggaagataaatgcataggtttttttatagaagtgtcgggcagccatctgctatacagcgccggttttttaattcccaagagggctatagcattatgcagagtgcagactctggggtcagactgctttggttcacgtttttcatccactagcatttcaactttgggcaatttcttcatttctctgtgctttggttttcttatctggagagtgcggataacattggctcctacctcacaggattgttggcaggactgtatgaatgaatgagtggtaaacagtaagaacagtgcctggcagtattcatgaacatttaacatggcaactttgggcctgaggtctgtggggacctccttggccctctggcagttcttctgcctggctttatgtccgcttgcactgcacacaggatttgcgttgatggcagaaaattgaaacaatgagaaaggaaaattgaatttcaggatatacttaaagatctttttttctcagcactctatatacataaatgcacttttgcaagtctgaatacttgtgtggcattatacaaagtgcttagaacaaggatcttgtttattttgcagatggaaaagactaaggtggctggacgtggtggctcacgcctgtaatcccagcactttgggaggtcgaggcgggaggatcatttgaggtcaggagttcaagactagcctggacaacatggtgaaaccctgtctccactaaaaacacagaaaatagccaggcggcgcttgcctgtaatcccagctactcaggaggctgaggcaggagaatcgcttgaactcggaaggcggaagttgcacgccactgcaccccagcatgggtgacaaagtgagactctgtctcaaaaaaaaaaaagaaagaaagaaaagactactaagtcttagggaagttgagtttgtatgaattggtgaaggtatatctcagaaccaaaacaaggttactatatttgaaaaaacattaggacattttatcaaatctgacac

SEQ ID NO: 29628 - DNA, 1083 bp, Homo sapiens
ccttccactggccgggccgtgggggtacgcccgctccgcccagcccaggcccgcgcggcccccgcgccacccggcgtccccctcagacccccgcgggtcccggaggccccgcgcgcgaggttggcaggtgccgggcgcgaagcggccgcgcgggggaggcgcgggatggcggcgggcggcgcagggtccccctctggcggtggcgcgatggtgcgcgccgcctggggagctgcggccgggggtttgaaccggccaacttctccagccggccggggcgagcgccagcgcggcgtccggggcgagtgagtgcggggcgggggcagcggccgggcgcctgggccgccggtcgggccacctgctgcccggggaaggatagcgttgcgagagtgggacggggtgccccgggaacccctgatccacctagggcagagggcagcgagctacgggccggactcgggcactctggaggcgggcgagctcgggctgcctggggaggccgcaggcgatggcgtgtgcgcggctcgcggagcttcctagccgtgcgcccaccccctctgccttggaaggaaaggggattctaagcccaagatgccatcgccccccatcccgggcatgctttcattgctctttcctggcgggatcgagtactgtaacttctaggagccagatccccgccccaggaagcgcccctacttggagtcctcggaaactcttgccccacccgcttctgcgctgggcccccgggccggctgggaggggcggggccggctttccagagggaatctgcaaacttatcccgctgcacgccccagcctcgctggcttgctgtaaacaaggaacccgggggagtgcggagggagaaagagcttctcccaggcctcaccctactgcacacaccgacttccttcctcacgcctgtctctctttcctggttcccacccgtgccaggtgacacgcagagctgaagccatggttcatcaggtgctctaccgggcgctggtctccaccaagtggctggcggagtccatcaggactggcaagctggggcccggcctgcgggtgctggacgcgtcctggtactca

SEQ ID NO: 29629 - DNA, 1043 bp, Homo sapiens
gcaacgacttcgacacctacatcaccttcagcggccacctcatcaaggccgaggacgactgagggcctctgggccaccctcccggctggagagctcaggtgctggtcccgtcccctgcagggctcagtttgcactgctgtgaagcaggaaggccagggaggtccccggggacctggcattctggggagaccctgcttctatcttggctgccatcatccctcccagcctatttctgctcctctcttctctcttggacctattttaagaagcttgctaacctaaatattctagaactttcccagcctcgtagcccagcacttctcaaacttggaaatgcatgcgaatcacccggggttcgtgttaaatgcagattctgactcagcaggtctgagtgggtccaggattctgtgtttctcatatgttcctgggtgatgctgatggggtcagtctatgaaccacactggagcaaccaggttctaggactttctcaatattctagtactttctgaacattctggaatcctccccacattctagaattctcccaacatttttttttcttgagacagagtcttgctctgttgcccaggctagagtgcagtggtgcaatctcagttcactgcaacctctgcctcccgggttcaagcgattcttctgcctcagcctccctagtggctgggattacaggcgcctgctaccatgcctggctaatttttgtatttttagtagagatggggtttcaccatattggccaggctggtcttgaactcctgacttcaggtgacccacccgcctcggcctctcaaaatgctgggattacaggtgtgagccaccgtgcctggccaattccaacattcttaaattctctcatccctccagggctccccgtgctatgttctctttaccccttccccctcttctcttgctcaggcctgcaccactgcagccaccgttcatttattcattcattaaacactgagcactcactctgtgctgggtcccgggaagggtgagggggtcagacacaggccctgcccctgccc

SEQ ID NO: 29630 - DNA, 1006 bp, Homo sapiens
gtaaagaatgtaactttctgacaggcctgggagccccgagttatctcgggacctcaagaggagaggaatttatctaactcatacaggttcttgcaggcataggtaaatccatggctgggctcaaagctttaaaacatctaatctaagataccttatgaaacaaagccaattttaaaaggagcctgtatggcaaataattatacttgctgcactttatgcaaataatgaagccaagtataataagactaaagcttattttgcaaataaattggtcctaccatgatttgtttttaataaaaaatgggagactggagagagaaaaacggtgtttcaaaaaatatggtacacctgtcatagattctagtctcatccattgtttttgagttttttgtctgcaatttagactgaccttgcttctttctgtgaaccaaacagtcatctcttgactgcttctcgtcagaaacaagagggatggataacataaaaatctggatcagtatctaattctgagcatgtattggaatcgtctagcaactccgtatcagctcatctagcaattcctgtgactaagaatgcctaacctcctgggaatgcagcccagtaggtctcagcctcattttacccgataagtcacaggcattcttgcccagttcatggaaagccttcttatttggattacttgggataattttacttattttactttgctgttgtagaatatattgctgctatactctttgtgtaagaatgcaagataagcttactcagtgcttccttaaattgaacacattaatcttccagatatcaccttttgttaggactcagagttacaaatgactctgaacacaccaacattttcttactcagttcctctctgcaccaaacccaagagactctaatagttaggcaggaatatcatcgcctctattcagcctgaagaagttacagaagatggatcttcatgcctctacaacccttaagattaaacgttccctcgtaaaagaga

SEQ ID NO: 29631 - DNA, 1019 bp, Homo sapiens
ggtaaaatagggctgagacctgctgggctgcattcccaggaggttaggcatttttagtcacaggatgagatgggagtcggcaggactggtatcataagatacaggtcataaataccctgctgataaacaggatgcgctaaacaagccggccaaaacacaccaaatccaagatggtgatgaaagtgatctctggtcatcctcactgctcattatacactaattataatgcattagcatgctaaaagacactcccaccagcaccatgacaatttacaaatgccatggcaatgtccagaaattaccttatacggtctaaaagcgggaggaactctcagttctggggaaatctcccctttcttggaaaactgattaataatccaccctttgtttagcatataatcaagaaataaccataaaaacagccaaccagcagcgctcaggggtggtctgtctatggagtagccattcttttgtttctttacttctctgtaaacttgctttgacttcactctgtggactcacctcaaattctttcttgtgcgagtccaggaaccctctctttgggtctggattgggacccctttccagtaccattttttctagtgaaccacgaagggacgataccagaaaacaccctcaacccaaaggaaatagactacagccccaattggctgactttgggtaagtgagggatattttattctgggtaatgtatggatttgggttaggttccctcctcagaaatagggggttaaaggcccctcttagtgaagggcaaagatgcttatcagaaattgggttagaggcccaaatgaagaaggttggagtccttagggagttagaggtccccctcggtcatgtcccttggtaaggagaaatggattaggcactatgggatattaaccactattctcttttcattaatctgccttgcactgtttgctgacagctgtgagtgacaggattaggcacgtacaggatcatgggacatggggagctttcttctccccaaaggggga

SEQ ID NO: 29632 - DNA, 1045 bp, Homo sapiens
tattcatgtgccccccccccccaccccccagcacccacagagggcaaggggtgtcattgtcagcttcgtgttatgcatgtggtaactgacgctcagcagccggctcatttgcccaggctagggtgcagtttgccctggggtttggagcggaccgtgtgctccagccacaaagccagggccagcatagccaggccaggtctcaggcctgccccctttccatgccacctcgatgcagccaggacatgcggcactgaatgatgcctcccatgcctgcatctgtccagcccctcggcctggctctgtgtcttacctgagagggcggggctgttccccagcagtgccgattgggtgggaggtccttgcagccgcgccctccccaggctggcagcagggggcagtgcagctgtgtctgggctgcagctgctggggtggatggagatgcttcgccccgctgcctctccagccagcacacctgctgaccttggtctccccacctcctccaggccaaggtgtctggcaggggacttggggtccatttgtctctgagcctggccacaaggcctcaccttttctcatccagggacaggcagaaccctaccatgatggggattttggtgacgtcttaattgtcagtggtcctcctgcccatgggaggaaaaccagacgcctctgttccacgccctccaaagggtggctccagcttgcctttcctgggagctgcttcccaggatgtaaaataagaattagggcaaggagctcagcatggtgtctggcacatggaaagcacccaggaagtgttcgctgctattgttattattaaattcttccacgcatcctgtgttctgtcctccacacctttgctctgatatattccttcagcctggaactctgtttcctccatctgtcaccaaagtgcatctattcttcaccagcgtgtagcctaggtacttcttccgtgggaagcctctctctgcttccacggctggttgtaaccacctttggatctgtgccacgtgctaatggtgacctccctcctcagactgtg

SEQ ID NO: 29633 - DNA, 1049 bp, Homo sapiens
tccaccaccatgcccagctattttttttttttgtatttttagtagagatgggatttcgccatgtgggccaggctggtctctaactcctgacctcaggtgatccacccgccttggcctcccaaagtgctgggattacaggcgtgagccactgcgcccggctgaagactgctttgaaatgtcaccttcttctggaagaactccttcaaaatgagcctccccactgcatccggtccatcctccatgttggtatctatttcctgctgagatcgctgatgagagagtgatgtctgtgcacgctctgtgctcctggcacactgggaaatgaatgatcaggaccaacataggaattcttgttcatcgttccttgactgagccaaatgagagcaggtactctcctcctgggaccaatccagggatactcactggctagacccctgcaggggctcaggcacacctgggcactgcaggggaagggggcagctttggactcttcaagaggtttgtgctgtgacctagttctccagaggtgacctcacacctaggggagactggcaatgggccaaggaggctgacccccatgctctccccagtgtgcattcccaagtcagacaaccctgagtgcaaatcaggactttgtctctcactagcagagtgaccttggataagtcagtccccagcattggtctcagctccattatctgtaataagccataaagttcattgcctgacctgtagttatggtcaaggaagggtagctgttattatgactttttttttcttttttctttccttttcttttctttttttttttttttttttgttttcgagatcaagtcttgctctgtcacccaggctggagtgaaatggcaccatcttggctcactgcaacctgtgcctcctgggttcaagcgattctcctgcctcagcctcccgagaagctgggattataggagtccgcaaccacgcccagctaatttttgtatttttagtagagacgaggtttcgctatgttggccaggctagtcttgaattcctgacctcaggtgatc

SEQ ID NO: 29634 - DNA, 1050 bp, Homo sapiens
gccaactttggtctggttgattctagggctcttctgaggaatgaagcccatctccaacctgcttccccctcccttccccaccgtatgtacccacacccatgacccagctaccgagtctgcctgcttctggtcagtcagggggtcttggcctctgcttggttctgactcctcaggctcctctggttggaactggagattaaaaaaagaacacagcttagcccaacttattctccaggatgcatgcatctgtccacctcatccatccattctatcatctgtccatgcaacacccatctaacgtccagcatcagtagatccatgtatccatccaaccatccagtgtctatcacatgactcaccctctcatgtacccatcatccattgtctatcacccattcatgtatctaccctccattgatccatcacatatccatttacccaatacctacatatccctctctccatccatcatccatctacccatatctccaacatctatcatctgacattcatccacccatgccacatctatccattcatattccacccaaagttcatccatccatcacctaagcaacatccatcatatatccaccaccaccatatattcatcacccagctatccatccatcatcacccatctgtcatccatccaaaagatgtctattattcattcaacatgcatcattgatccatcatccattcacacattcaccctccattcattcattgttcacccactgacccctgtgtcctccatcttgcatgcatccactgagctgtcccctcctttatgtcaggccctgggccagagctagagttacagagataaagcaggtagagatcctgcctgtgtggagcttatggggaaatgacaaccctattagatggatgttgcatggacaaatggaagcaaaactgccaagcccagaaggggaccattactaggagtgactgttcagggaaggcttctcaggacagggagcctgacctaagacttcgacaatgaacaggcgtttggtggctgaacagggaagagcatgtgcaaag

SEQ ID NO: 29635 - DNA, 1102 bp, Homo sapiens
atatacaaaaacttagccgggtgtggtggcgggtgcctgtagttccagctactcgctgaggcaggagaatggtgtgaagccgggaggcggagcttacagtgagccgagatcgcgtgactgcactccagactgggagagaaagcaagactctgtctcaaaaacaaacaaacaaacaaaaaaaactagttttctgtctttttctttttttgagacaaagtctcactctgtcatccaggcttacgtgcagtggcctgatcactgcccactgcagcctcaatctcctaggctcaagcaatcctcctgcctcagcctcccaagtagctgggacgacaggtgcacaccaccaagcccagctaattttaaaacatcttgtagagacgtggtcctgctatgttacccagctgttctctaactcttgggctcaggcgatcctgtcaccttggcctcccaaagtattgggattacaagcatgagccactgcgcctggcctttttcttattgatttgtaagaattctttgtatattctggttagaaatcatttatcaaatataaatgacttgattttctgagcttgctgtttcattttctgagtggtatactttgatgaacacaagttcctaattttatttttatttatttatttatttatttgagacagagtctcactctgttgcctaggctggagtgcagtggtgtgatcttggctcactgcaagctctgctccccaggttcaagctattctcccacctcagcctcctgagtagctgggattacagatgcgtgtcaccacacccacctaattttttatttttagtagagatgggatttcaccatgttggtcaggctggtctcgaactcctgacctccgatgatccacccgccttggcctcccaaagtgctgggattacaggcgtgagctcctgtgccctggcctattttattttttattttttggagacagagtctcgctctgtcacccaggctggagttcagtggcatgatcttggctccctggaacctccacctcctaggttccagcaattctcctgcctcagcctcccaagtagctgagactacaggggtatgccaccacacccagct

SEQ ID NO: 29636 - DNA, 1050 bp, Homo sapiens
gcctcccgggttcacgccattctcctgcctcagcctcccaagtagctgggactacaggcacccgccaccatgcctggctaattttttatatgtttttagtagagacggggtttcactgtattagccagtatggtctcgatctcctgacctcgtgatccacccgcctcggcttcccaaagtgctgggattacaggcatgagagactgcacccggccacaccggttaatttttttgtattttttagtagagatggggtttcaccatgttggccaggctggtcttgaactcctgacctcgtgatccacctgccttggcctcccaaagtgctgggattacaggcgtgagccactgcaccagccttgcatacttttactcaaagttatctccatgagattcacccatgaatactgcctatatcagtacagtcttccctcagtgttcttgggattggttccaggaccccactcagataccaaactccatggatgctcaagtcctttgaagttggccctccatatcctcgggttctgagtccagggttcattgaatctgtggacacagtattcacagttagggagggtggactgtagttagtactttcttatgctggtttgtatttcattgtgatataccccatttatccattctactattgacggacatttgtggtgtttccaggttttagctttatgaatgaagtgttgtgaacattcttgtatatgtgatttgtggctgtaaacactcatctatcctctataaacctaggaatggcattgttgggtcactagggtacacatgtatttagctttagtaggtactactaaaccttttcccaaaagggatgtactgacacacactcccactccccaccagcagtgtaagagttccacctttccctacgtccctgccagtgcttgctgttgtctctctttaatcttaacccttttggtgtctcatagtggtttaatttgcatttctctgatggccagtaacgttgagcacctcttcatgtgtttattggccttttttttttttttttgagacggagtc

SEQ ID NO: 29637 - DNA, 1093 bp, Homo sapiens
tttcaataccctccaccacagtaacccagtacctcggccaggcgcggtggctcacacctgtaatcccagcactgtgggaggccgaggcgggtggatcacctgaggacaggagttcgaggccaccctggccaacatggtgaaaacccgtctctactaaaaatacaaaagttagccaagcgtggttgtacatgcctgtaatcccagctacacaggaggctgagacaggagaactgcttgaacccaggaggtggaggttgcagtgagccaagattgcaccactgcactccggcctggacaagagcgaaattccgtctcaaaaaaaaaatacaaaccggtaccccttagctgtcattcccaatcctcccactcccccagccccaggccaccaggaatctactttctgtctcaatacatttgcccattctggacatttcatataaacagaatcatacaatgtgtgtgctcttttgcgactggcttccttttcactgctggataatattccattgcttggatacaccacattgtatttactcgtttactcgatgtatttactcagatgttagctgatggacgcctggttgtttccactctttggctgtcatgaccactgctgcgctgagcatccatgtacgagtcttcatgtggacatatgttttcatctctcttgggtatataagagtagaattgtggggccatatggtaactctatgtttaactgtttgtggaacttccagaccgttttccggagtgtttccgtgtccatcagcagtttatgagggttccagttgtttcacgtcctcgctactatttgttactgtctttttgataatagccatcctagcaggtgtgaagcgatatctgattgcaatattgatttccggttcccagatggctagtgatgttaaacatgttttcctgtgcttcttagctatttatagatcttctttggaaggaaactctttttcacctgtgttaaactcctttttgcctgtaaatagttaaccatcaacattaagagaagagctgaccccctccttgactgcctcctcgtgggtgagggtccctcaggagggagctgtgggttgaacag

SEQ ID NO: 29638 - DNA, 1046 bp, Homo sapiens
cattcacactagcgcagggtcgggaaggcttccttttgattggatccagcggaaagcggcccctcagaagcatctacctggcatttctataacaacgcacgtttctgttcaccgttgtatcactctggaaacctacgtgccacttccttcttggtgctgacacccttctctacacacacactggcagccatagctcagggtttcagtaccaaagaggcaccctcaagctcccttgcagactagtgggcaccaaagtttgggaaataactgtgggagaaaaccttaaactttagaaattttattatgtagtgatttttttctgcatattgggaggagattgccagcattccttttctgggcgatcccctagccccgtgggatgatgtgaggacacctagagcaggaggaaggacccactgtgggaaaagggtgtgtggacagaggctgcgcagaggcgggagggcctccagaggaggacgtgtccgcggggttggggaagcacctcttgtgtcccatgcagcctgaaccctcctgcagctggaagggtttaggtccaactgcccaacaacatggagtgactcagagaaagctgatggagaatacagggtaccagggcatcacctgggcccacagaatcgaagctcatcaagctctcagagagcagctggtcaagcctttcctttttctttttttttttcttttgagacagagtttcactctgtcacccaggctggagtgcagtggcgtgatctccgctcactacaacctccgcctccctggttcaagtgattctcctgcctcagcctcctgagtagctgggattacaggcacgcaccaccatgcctggctgatttttgcatttttagtagagatggggtttcaccatgttggccaggctggtctcgaactcctggcctcaggtgatccacccacctcagcctcccaaagtgctgggattacaggcgtaagccaccatgcccaggctggtcaagcctttcctgttacagatggggcaactgaggcccagagatgggtggcaacttgtc

SEQ ID NO: 29639 - DNA, 1026 bp, Homo sapiens
tgctggacagatagccgggtggtcagtgttgtgacggctcctctgtggagctgtctgagcttctaggtgctgacaggtggggaggggcactgccagatcagggtcctcagctccccccaaccccctggacattgtcctgggactcaacatgtctgactggtgcccctgcccctgtgctggtcagattccattttctccagagcgcccccacatctggatcctggtcatgcaaagtcttggaggtgcccggggaggactccccaccctagggtgggtatcagggcctgtgggccaggcctgtgttggatgctggggatgcagagctgagccaggcataccccagcctcaggagcagggggctcagccagtccaggaggtgctggggacagagtcccatgggcggaggaggagagtcatctgtcaagttgccgggacgttagtgtccacggcggtttattgactggtatttcatttccttttgatgattctcaccatagccctgcggggtgagcagatggggaaactgagaaccagagaggatcagccagtgaattgggcagtcaggactgggtctccagcagtgtgcccagctctctaccccagcctcagggtcccagcatcccctctctggtcttccacagggtccaagggcgggcacgaggtctgagcaggcagactgggcagagtcctagcttcttctccaaaagggccacgtccttcttcagggaccatttcttccccatccggggtcttgagactcccaggggccatggaggggatttgagaggtctcctggctgatcctccggtgtgggcagatggcctcctttcagctaccctctgcttgtacatccctggccctggggaactcactgcctcacgggggaagtggggcagcttctccttcctggaggtgcagccggccccttggccctgtctgttctgaaggctcaaaggacagggctattccttgttttctgtgacaaacaacgtgggtctagcttttataagcttttactcttgaggg

SEQ ID NO: 29640 - DNA, 1059 bp, Homo sapiens
cttttgactaaatgaccttgggtgaattatggaccctcttagagcctcacctgtcaatagggaataagaattcttaggccccaggtggttattgcagcatcggctccgatgcaagaagaagcactttgtctgaagaggacacgcaagggtattcatgccttggggtttcaagaggaagagattgaggggaacctgggagctggctgggcagggtggggagcccttcccagagcagtgggcccccctttccactccagcccatttctctcctgtggcctgtggctcagctttctcctgggacagagtccttcctgtggggaagggacagatgacagggggagtggggggatgagggcgtggccgtgggcgaggcacagcccaggtttgatctagggacctctggggtagcagggcttggggacccacctgaccacagcatgccctgctctgtgcctcacagaactacaggatctcatgcacatctcacgggcccggaagccagcgttcatcctgggctccatgagggacgagaagcggacgtaagtggatcgagatcgggggcagagcggggaacgtgtgcgctttcctgcccctcacccaccccctgttgtgggctcagggctttactctctgcaccctcacagccggcgaagtggctctgctcctagtcttatagttctcagcagagacagaacatggagagcctgtgtcgctcgttcattaatgctgggcggtgcaggctctggagaccagcccagggtgccaggcttcttggacttggtggggctggcgcagtgttctggcctccctccctgatctccttatggctagaagagggggagatgcctgggtcccccctggggagatctcagcagctgcttcccactgctcctactggcttccttaaccacctcccactgcagaatagtggcgtgggctgccttccccagcacctgctgtatacctagtcccattgtaagaggcgggcctgggtgacaggatgcaaagagaagacgcccaggccttgcccttcaggcataatcccgggtgcttgaactc

SEQ ID NO: 29641 - DNA, 1022 bp, Homo sapiens
aggggtggcacatgggctgggttaaaagatgagagtttagaggtacacagattggggaggagccacagagtctccaaaacagcacagctggatgatggggagtgggtcagccattaaggaaagggggagaaatggcgaagaacgcacacaggccctcggaggaggcctcagcagtaaagtggttttactggctccagggtataaagatgttcaggcccaccaggaagctcccgaatttctgttgtgtgtccacggttcccagtgctgcctgtatagtcccaaacagagccgctgtccccagggggcctgcattctaggtggggtggggggaacagttaataaatacatgagtgaatcgagttagtcgggtggtgtcgatgtaatgagtgctctggaggaaaagaaaggaaagcagggagtcaggcatgcccagcctgggagaggctgacatgttttcatggtggtcaaggtagagacctaaaggaagggtgggagggaggtatttgactgagcagagacagccagtgcaaaggccctgtggcagaagcaggcttaatatgttcaaggaacagcaaagaggccagcgtggctgcagctgaggatggaagtgggaactgtaggagctgagatcatagaggacaggaggtcccatcgagtccttgggtacggactatggtttttactctaggggagctgggagctattggagagttttgagcagtggcggcctggtctggctaatccttggaagactcacaaacatgctgagtggggactggtcattagaggcaggggcagaagcagagaaactggtcaggggcctgttgcatcaatccaggggagaggctggctgggacagggtgatggttggggtcaatacagacatggtcaggaggtgggtggagagacctggaagattctttccaatgctgccacttgccctgggaggagactcacattgcaatttcttctctctaggctagcttgtcactttctgcaaaggtttccctcagggagcctcc

SEQ ID NO: 29642 - DNA, 1034 bp, Homo sapiens
aaagggaagagaatcaaaagtgtctttgcttgtctatgcccagggggtctctgggcagacaccgcaagtcggtgattgtgatgcctctggagggggtgctggtcatgggagattgcttgtttgctggagatcccatgtaccttttgattgctgaagcaggtgaatgtacgcctttccaagaaattaaaatgggccaggtgcggtggctcacgcctgtaatcccagcagtttgggaggctgatgttggaggatcacttgaggtgaggggttcgagaccagcctggccaacatgatgaaaccccatctccactaaaaatacacaaattagccagacatggtggtacatgcctgtaatcccagctgctctagaggctgaggcaggagaatcatgtgaaccctagaggctgagtttacagtgagccaagatcatgccattgtactccagcctgagctacagagcgagactctgtctcaaataataaaataaaataaattaaaaacataaggactgtaaccttgcctcctgcccagtgtaggaaggtcaaggttctggctacttctcaagtacaggagcctcactcaggccccagaccactaatcaaaaaatatgtgcttggttctcacaaaggggccgagtgtgagggcttgggtgttgcttggtaaatacgacccccggtcccggccttggagagatggagccctctctgggccccttggacacactgctgttggctgactttgtcattttcaacccttgctccgattggctcacgtcatgatttctgaaacctttgggggcttccccactgacagaaagatacactttaactcagcactgggcatcccaggccctctttactgggcctcttcttgagccgcacttggcctgtcaccccttcctctgtctgccctcttaactccccacctccgtgcctttgctcatatagttccctttgcctgcctttccgtccagagcagtctccacgtgcccaggtcctgtctgactttcaagggccagcttagtttccacttct

SEQ ID NO: 29643 - DNA, 1053 bp, Homo sapiens
tggaggtgatgatgcctgtttctttctttttttttttttttgagacggagtctcgcactgtcgcccaggctggagtgcagtggcgcgatctcggctcactgcaagctctgcctcctggtttcacgccattctcctgcctcagcctcccgagtagctgggactacaggcacccccaaccacgcccggctaatttttggtatttttagtagagatggggtttcaccgtgttagccaggatggtctcaatctcctgacgtcgtgatccaccctcctcggcctcccgaagtgctgggattacaggcaggagccaccgcgcccggctgatgatgcttgtttctgagggttgccagaattcagtgagacctcagatgaacacaagggctaagctcattgagggttcacctgtgccaggccatttccaaccctttgctcccaaaaagactgcgaggttaacgtattatgttccttatattattttatttattttttgagatggagtttcgctcttattgcccggactggagtgcaatggcacgatcttggctcactgcaacctccgcctcccagattcaagtgattctcctgtctcagcctcccgagtagctgggattacaggcatgcgccaccacgccaggctaattttgtatttttagtagagacggggtttctccatgttggtcaggctggtctcgaacccctgacctcaggtggtccacccacctcagcctcccaaagtgctgggattacaggcgtgagccaccgtgcccagccatatgatccctattttatagatgaggaccctgaggcacagaaaagatgccctggctcgacagcccatgctgctaacattgactccacagtcccaggtgcctcctaagcgctctgttgggataactccttgtttcaaacatgaagtgtgaatcttccttccagggactcatggcctagtcaggggaaggactcagagtagcaagtggttcaccccaatccagaatccagtgtgagaggcctagtgtgaactcaggacaaaggagggtgggaatgtgtctggta

SEQ ID NO: 29644 - DNA, 1555 bp, Homo sapiens
ctcaagcatcatcagggagtggtgtagtcagttgaaggcagttcccaccgagttttccgagcctcagaatccaggagatacgcacagccccacccactctgagatgacagtggctgacttcccgtgctgggcttttccattgtccccctggcctccaggctcctcctctgcctctccatggagtgggtggggaggtggtgggggccggcgtcccctgcgtgtgtgtgtgtgtgtgtgtgtgtggatgtattgacctgtgtttcccaagacagcaggtgccacggcccgccccgcctgccagcccgaattcccgttctcctgtgtctactaacaaggacatgggggtgggcggtgacctccgcatccctcagagctcagagggtcctcgctgccaccggtccccccctagcccgtcatcagccggtggcagctccatcttccattcctggttttagggcagaatccatggagactgcttccagaaggcatctggctctgagttataaattacttccctggtcctgacagtcacctggggtcccccctctccctggttccacctttctgaggaggagcctggagtcagggctgggttttggattaacccatccttcctagttaacacctttttgtttttattttattttatttttgtttgttttctccgtgtgtgtgttttcctaatttatttacctctgtttcccctttttcctttttttttttaattaaagagcaaagctttttattactttgtaatttaaaaaactgaaaaaaaaaaaactgaagaactttggggggaattttgtacttttttcctgtgtaaatattggacttttttgagctttatcgtggttgttaatttgaagtaataaagtagaaaagataaagtgatgcaggcagccctttgtccacctctgtgcccttagggcctctccctgcagacccggaagtgggtcttgctgggagcagcaggagtcagtgaggaacaagccctcgccctgaaggcaggtgtggctggggccactttcagaacacttgggctgtggttgggatgtccgggggctttgaaaacacgagtgcacacaggtgccacgccacaggtgccacgcgggggtcttgtaaagagggctggggtggggctgagagcttccccctgcacactccaggtgtgctgatggcctggggcccctctttgagaagcaaggccctaaaagctcttcacacatgattttatccacacaagtatcctgagttaggtcctgttaatagccctgccttcggacaagaaactggtcctgctgtaaaatatcttgcccacagtcacagctctggtggcagaggcaagacgagccgaggtcatctcgctgtgggggttgtgggggtgctctgaccctctccactgctgaccctggggctccatgaaggagagtgctggagcgagctctgatagtgactctggatgaggtccttcagtcaagccttgataaaagggcagcgctcagcctcgcctgccttggtctcaccagcttggaaaagaatctgtccatctgcattt

SEQ ID NO: 29645 - DNA, 1029 bp, Homo sapiens
cattcttagctacagacagggacatcttagagtcactggaatcacacaggccttccctcagcttgaggggctgcctggaggtgggggtgggggtacacctcctcagtggggagagacttgccaaatctctatcgccagcggctaagggacttgacttgaagcttgtacctccctctctctccctccccctctctccctccccaccctcaaaagacaagtgtgccatttgaccatctcgggaagtgaggagagcccccattggaccagtgtttgcttaggtgagtccatgactgctgcagatgcagccagcccagccgacctagaagctcccagggccccagaaagagaccaatgtgttgtggaggggtgggtggcagtggcagtggcagatggtaccaggcgccccagaactctaaggggcctcaagtagtttaaaacctcggaggctgcctgacttggggccaagggtttctatgctcaggcctgacccctcatggattagtttctgctggaaaaactttttctgccctcggccaggtctctatctccttctgccttaacatattttggaaggttggttcccagcagagacggggccatgggctcacactctgacctctcccacggcattagccctgtctcagcctctgggctgttacgcaagttaattcctgcacaagactcacaacagggctgtggaggaagcaaaggagccctttttatgcctctgtagtaggactgagagaggccctctggccagcgtgagcctgctggttcttcccggactgtaccaggccttgaggcggggtatggaaacgccccactctggggcctggcttggggaaggggaggcggcaggggttctttgggcttctcgagggtataatctgagctctctggggaacgtgtgtccatttgtaggcagtagtccgacacgtcgggggactcaactttacactgggacaatctgtgtgtggtctgttttgtagaaattcatccacacaagagagtggaggcatgaacagggct

SEQ ID NO: 29646 - DNA, 2142 bp, Homo sapiens
gccccatgacagcgaagggacctttctgtccccgcccctgtccctgtgctgggcccacgtactcacccacgtactggtaaggatcctctgaggtctggcttttccaaaatttgccacttgaccagtgagcgcaagaggctgagcctcagctgtgctttttgtccctttcaggtgcccggctcccctgggcacccagagccccccagataggccggtggaggaggtggaggagctgtccccccaaaactactggcctgtggtctggactccagggccccatttctgatgtcgccaggtgtgcctgagcccatcggggccaggcctgaggaagtgtttcttgggaggatgggatgaccccctgttcccaagagatggcagcacagtggaggccatggtggaaaaggccctgccatggggtccttgagggccaggacagcctgagggagggatggtggccactgcccacaaggggcctggtgggaacgggtcccaggacagactcatagctagaccccgttggcggcctctgtgttgaaccagaactcattaaacacctcctcttgcttcatcctggtgtgcctctttcatggcagggccctcagccaccctgctagatggttaggaccaaggctctgttctcctggaagccaaggtcggcacattggtcttgggcttctcttctctctgggtttcttgttcactaaggagtaacacagaggtcaggcagagaatgggggtctcgcaggctagggacctcagggagaggcctctgttgcccttttcagcaaggctggaaatgggatatgggcaggggacgtcttctctgacttcaccctagaccttctggctccaaatggggcccatggccttgagcacctgggaccagctctttccaccacagggcattgggcactgggcactttcttatcgagatagtcactcccacgtctggttcgtgatgggcttggccctccagctcagcacaactgcaagaatggattttgtattctctagacggacactgtccaagatggtagccattggccacatgcgacacatttttaatgaattaaaattaatcaagactggaaatgtcggccaggcctggtggctcatgcctgtaatcccagcactttgggaggccatagagggcggatgacttgaggtcaggagtttaagaccagcctggccaacatggtgaaacccatttctactaaaaacacaaaaattagctgggcatggtggtgtgttcctgtaatcccagctgcttgggaggctgaggcaggagaatcgcttgaacccaggaggcagagattggagtgagctgagatcatgccactgccctccagtggccaccacatccggcaaggcagatgggaccatttccttcatccagaacgttctgtggacatcactgctctaggttcctcccttatggagtctcacaagactgtctagccagcaagatctcttttccaaccaggccaggagcacctctccacccactgctgctggtctgaccgccttcctggaagtccctcttgaggcaggccctggagttagaagctgggcagaggcacccacagccttatcctttgccaatctctgactcaatgccacggccactgtagtgagctgaaccacctccagcagtcccctggcagaagcacctggaaaacatgcaatgggaaccttcaccctgaggccaggcccttcccatgctacccaacagtagacaggacaccctgtgttgttggctgcaccggggtgctgggatctgtggatccctggggcctggaagccactctcagcacatacagccactgtgttccgaggtccagtcagctggccgggaaggaattcaacacagccaaggacagaggtccatatgatgacgggtggatgctcgtgtgactttgctgaccttttatgttttctatgggcaataaaggccaagagagctccctgctgtgtgtttcttgcgtcctatgggttggatgggaccatggagagtcgcccacttcttgcctcggggctggcaatggcctgagcctgctgggctcacaaagggcaggggctccagccctctgcttggctgctggctgcagggctccacaccttggagtgagtcactcagcctct

SEQ ID NO: 29647 - DNA, 1022 bp, Homo sapiens
atcttttcctctgatgtgaggtcctgcctttctcctgtcttgaactcctcctgaggctgtgtccctgggggttgttctggcctgtttgtgtcctgttgcgacactgtcctactcctcctgctgggctcgctgctggccccaggaaggagacaccctgtcgcccagcctagccccagcccttcatctcatccacccatacagccagggaaactgaggcaaggtacactttgggcttggtctttcttgtgacttcttgagttgggcagtgggcccaggcagagagcggggccttggtgtgtgtgagggtattttcttagagccccttgagaagccaggagtggactgggggagacggggaggtgcaggcaggacctctgacctatgctggaggccagcagagccggggttgatctcaaggccgccatttacaggtcaggtgaccttgagctgggtctctagctgggtctctgttttctcatctctacaagggggttgagaatcgaatgagacactggattagaatgtgcagggctgcctctgaaggcatcagcattgactgaggggttgctgcggctgtcccatcctcatcctgtaggccagggtggtcctggcttgttctggtgtgttcggcagcccagccccattgggcctcttctgcacgtgccaccatctcaacccgacagacctcactgcctgaatttgctctaggactcagccccctcccttaggtggtctgtgagccttttgcatacctgacccttgccccactcacatcgggccttcttgtcgccccaacctgtggccctgggtagcccttgtgtgtcacctctgtccctcacagcgctgaccttctttcccctcaggaaccctttgccggggctcctttgcccccttcccagcctcccccaagagctcctcaagggcagatggccccgggcccggcacacgccagatctcagaaatgcttagtggggcgcctgggactgcctggcctttgagggtgaccctggtcccttgcctcc

SEQ ID NO: 29648 - DNA, 1089 bp, Homo sapiens
cgaacatcatggagcattgactgtgtgccaggcactcttgtaagcatgtttgtctgtcagaacatcccaatgagccagatagtgtcatcggtttacacatgaggtacctggggctcagaggggtgaagtgccttgtccgacgacccctggccaggggatgtccgagtcaggatttgggctctagtaggttggctctgaaactcacacttcaaccgctgcactctcctgcctctctgctcatggggaaatggagcatggccaggggactctaaggatcctcactgtcccctggaaacctgtgtggctcatcccagtgacgagcattgatgtgtcaaaagctctttacagtttgcaaagtactttcattcctgttgctggctagattgagttattcattctgtttttctttttcttttattaaaaatccaaatactcaaaaatcaaaacacaaaaatgtgttaagtgaaagaagccagtcacaaaaaatcacgttgtatgattctgtttgattctatttctgtgaaatgtccagaaaagacaaatccatagagacagaatgtagattagttggggggcaggggatggagcgaggagataggaccttaccccactaaaggctacaggtgttttcagggtgatgaaaatacagccctcctgggccaggcacagtggctcatgcctgtaattcctgcacattgggaggctgaggcaggtgaatcacttgagcccaggagttggagaccagcctagagatggcaaaccctgtctacaaaaaatacaaaaattagccaggtgtggtggcttgcgcctgtagtccagctactcgagaggctgaagtgggaggctcacttgcgccccagaggttgaggctgcagtgagctgtgttagtgccactacagtccagcctgggtggcagattgagaccctgtctcaaaaagaaaaagaaaatacagccctccaccttcggtacctgtggggaataggttccaggatccccctcagataccagaatcctctgattctcaagttcctgatataaaaagctgtagtatttgtatataagctacgcgcatcctctgtatacttttt

SEQ ID NO: 29649 - DNA, 1673 bp, Homo sapiens
tttatccaagcggctatgggcctccgtgtgaggtcttggtgtcatgacgtagagatggggaggtggctggaaggtggatggtcgagggcattcttttctgccttccccccagtaggggatgcgactttctcctgcaaggcgtgctgggcactggcgaggtctggcctctgggcaggggcagtacttgggaagaccaggccaggctgtgggagcctggggggtaggaggtgtaagagggctgatgcccgttgtgatcccttgagaagcttcttttgaggggcccctgaatgagcatcccccaaagacatgcttgcttggctgcttcctctctggccacactgaaacctgtcctcagcctgccttagctgttccccaggtgtgtggagtgcaggctgtgggccacctgacacctgcagaatgtggtcttcgagaatgcaggttttcgagttcctggtggctctgcctggccttggtggactggacccctttcccggctccccacgtcgctgaccctcatgttcctgcttcctctgcagcaagagtgagccatggagctacgtgtggggaacaagtaccgcctgggacggaagatcgggagcgggtccttcggagatatctacctgggtaagtgttcctagctccagctggagcccctggggccagcccatgggaccaagaggaggaaagaccccaggatttggggatctgaagtcagaatgtggctccaggggcatgatttgccccagggccatcccagatggggaaggaagcagcaggttgccgggaggcaggccagggggctcctctcgcaggccaggctgggcactggagggtatttttagctccagtttctgcaggagtcatgcggttcttttgtgcctcagtgtcccgggtcagctgggtcaccagctgggtgtgggaaaacccaggcggggttcacatcctctcccctgcttcctgggagaaggatattggtagatagaagggacttgggttgctgctggacccctagccaggcccccctctctatgtcctggcctcctggaacccagcccaggcaggctttgggatgacgcaggctcccctgtaacctcgggggtggggtggggggatgcggtctcctcattagggagttctctctctctctttttctctccggatgtgcttcctgttgaaagtatgagtatgctgtgatgttgcattttaaacaaatcactgacctctcagtcctccccttggcctgggagaaatgaggcttgcgcctttcagtgccacttctgaggggcacggtcatgagtcttggcccttcctttgtgcttattggtccaaagggaaggtatttagtgttggtgcttgtggattagcgggtggaggcttgaagttgctggagtgaggtggccagcccttctacgagttatcctcattcctgtccctgcaccctcagaagcaggctagacacacctctgtgccttggttaccctccttggaaaatgaaaatcagctctgtccagtgcagagaacaccaagtctgtgtgtcgtgtccatcagctcagaacttcggggtttctgttaccccatggttagggttccttggagtatgaaatgtgctaaggaagcctcaatggagacggggacggagactgggagttccctgaccacttccttgcagggta

SEQ ID NO: 29650 - DNA, 1156 bp, Homo sapiens
caaagacaaagatattttaaaatagcaagagaaaagtaacacacttataatggaatccccattagactaacagctgatttcccagcagaaaccttaggctagaagagaatgggatgatatattcgaagttctgaaagaaaaaaaatctttcggccaagaatattatacccagcacagctatccgttacaaatgaagacataaaatctgtcacagataaacaaaaaccaagataattcatcaccactagaccagcgttacaagaaatgcccaagggagttttacatctggaagtaaaaagatgataaccaccatcatgaaaacatgcaaaactttaaaagtcactgttagagtcaatacataaaggagaaagagaaaggaatgaaaccttatcactacagaaaactacccaacttcaaaagtaaacaggaagaaaggaataaaacatatacaaaacaaccagaaaacaataaaacgttggaagtaactcctcacctaccaataataactttgaatgttaatagattaaataccccatgaaggatatagacttactgagtggattaaaaaataagatccaactatattttatctaaaagaaactcactttactggtaaagaaacacatagactgataatgaagggatggaaaaagatattctgtgcaaatggaagccaaaagtgagcaggaatagctatacttgtatcagacaaaacagagttcaagttaaaaaccataaaaattgacaaacaagattattatgtaataataaaggattcagttcagcaagaaatataattgtaatatgtgtataattgtaaatatgtatgcactcaaacaccagatcacctagatatataaagcgaatattactggatctaaagagggagatagaccccattacaataagagttgggcacttcgtatcccactctcagcattggacaaatcatctagacagaaaatcaacaaagaaacatcagacttaaactccaccatagaccaaatggacataaataacaaacatatacagaacatctcacctaacagctgcagaatacacattcttttcttcagcacatgaaacattatccaagatagaccgtatgttaggctacaaaacaagtctcaacaaattctatcaggtatctcatctt

SEQ ID NO: 29651 - DNA, 1052 bp, Homo sapiens
catctaggtgagaattctgtagttactcattaagcaatagcatgtgagttttgtatgtagtattgatttttaagccaataaataaatttttaaaagaatttattttataggatgttggaggcatgggcaaattaaaatgtatttctattattattattatttgagatgaagtctcgctgttgcccaagctggagtgcagtggtgcaatctcggttcactgtgacctccatctcccgggttcaagcgattttcctgcctcagcctcctgagtagctgggactgcagtcacgtgccaccatgccagactaattttttgtatttttggtaggggcggggtttcactatattggccaggctggtcttgaactcctgccctcgtgatccacctgcctcagcctctcaaactgctgggtttacagtcatgagccacagcgcctggctaaaatgtatttctaatatgtacataggtttaatttatatataatttaattaatctctgattaactgaccattgataaatgagtctctgttaattgttggacttcacttactgggcttatgtggtaggatttgcgtaccctcacttattacatatgtatgtatttcatatttatggaaaatctactccttttggtgcaaaaaatgtatttgctaatagtgtcaaaaaagagaaattcattatatgtctatgtacctttttactccatcagcactgccttcagtgaaatgacaacagtaacacatgaacgaacattccacaaaatttgaggtttaagtaaatagaaagctagatgtaaacacacacatagacacacacaaaagtaaatacacacatagacacacacaaaagtaaatacacacatagacacacacaaaagtatacatgtagaaaagagagattcagatttgggaagttcattgtatggagcatccataacaatacagagtgttttagacactgttttctaaagtcttattactgtagtatctgcaggtacctttctttctttgatctagttggataaaagaggaataggtcttaagaggaatgc

SEQ ID NO: 29652 - DNA, 1047 bp, Homo sapiens
attacaggcgtgagtcacctagcccagcagggccctttaaaaaaaaaaaaacatctctagtcagaggaggatggtactgaattgtcaaggccttttgaccctctcctgccatcgtcagccttccctgggaagccccatgtgacaaggaagagaaaatctggccatctcctggtggttgtcacatgagaacacaatgccaagctcatacccttcactttttggccaggccttgcacgggtcagcctcgaattagcagctgaacctctctctcctgctaaaatggtctgtggtggcagcagcgtgctcttatttgagcaagtcactgcagaccaagggttttcagggggatgggatgtcacagaggctgctccatggggaagggtggaggtctgagaagtgccagggaagcagctttcctgctaagctccaggatgtgctgggggcactgggaacccaagacagggcccagcacatagcaagggctcaggacacctgctgtgggctgtcggggaggcaccggggtgaggggtaaaccatgtccccatcgggctgcactgtggaggccagtgggctggtgggcctggggagtgagtgttgccgctggggctgaggattgtggaagctcagaattgaccctgggcactcgataatggggaggagtgggcactgctggcgaggggatgcccaatctctgtagccatcaggggatcggctcccttacccccaaggcccctccagaggtggggaagtccaggaagagatctcgtctgcagcaccaggtgaactcgccatgtcaggaggcaatcccaccgggcagagaaccagggatcccctggaaccctgggcttgtgtttggccttgggcagggccccccaccttctctggagctcagtgacctcacccgttgaaggcctgggccgccacaccctgtcccctctgcctctatcctgcacacctgtggatggtggtccagtttggactggctggtttcttctcttcccttgccccaaaacccactccagccccctgcagggaggaagtggatga

SEQ ID NO: 29653 - DNA, 1053 bp, Homo sapiens
cctaagggctttattgtattagtccttattcctatttgtcttaaatatttcacatggaaattaaaaccagaccaggcaaagcctgacagcccgccagccctgagggggacatccgcagcccttgccatctgccgcctctgtggcctcatcctggtccactcactcccaggctcacttcacagccacaacctggccttcctgcagcttctcaacaccagactcagacttttggagtattctttctttctttctttctttctttttttctttttttttttcagaaggactcttgctctgttgccaggctggagtgcagtggcgcgatctcagctcattgcaacctccacctcccggattcaagcgattctcatgcctcagcctcccgggtagctgggagtacaggcgcctgccaccacgcccggctaactttttgtatttttagtagagacagggtttcaccgtgttagccaggatggtctctatctcctgacttcatgatccacccacctccgcctcccaaagtgctagaattacaggcgtgagccatcgcaccaggccctttttctttctttttttgagacagagtcttgctctgtcacccaggctggagtgcagtggcacgacctcaacctctgcctcccaggttcaagcaattctcctgcctcagcctcccaagtagctgggattacagccaccacacctggctttttttttttttttttttttgagacagagtatcgctctgtcgcccaggctggaatgcaatggcatgatctcggctcactgcaacctcccccctcccaggttcaagcaattctcctgcctcagcctccctagtagctgggactacaggcgcctgccaccacacctggctaatttttgtatttttagtagagacagggtttcaccaagttggctgggctggtctcaaactcctgacctcaggtgatccacccacctcgacctcccaaagtgctgggaatacaggcgtgagccaccatgcctggcctaatttttgtagttttagtagagacagggtttcaccatgttggc

SEQ ID NO: 29654 - DNA, 3352 bp, Homo sapiens
ccaaattctgcctttggagcacaagcaggccaatacacctatggtcaaggcacctatggggcagctgcttatggcaccagtagctatacagctcaagaatatggtgctggcacttatggagctagtagcaccacctcaactgggagaagttcacagagctctagccagcagtttagtgggataggccggtctgggcagcagccacagccactgatgtcacaacagtttgcacagcctccgggagctaccaatatgataggttacatggggcagactgcctaccaataccctcctcctcctccccctcctcctccttcacgtaaatgaaaccactcaagtggtagtgactccagcagacttaattacattttaaggaacactgtctttcctttttttttcctcttcgccttttctttttttttccttttttctttttttttttttaatttttccccccaaccatcgtgatttgtcttttcatgcagattagttagaattcactgccaggtttcttctgcccaccaaaatgatccagtctggaataacattttgtaaaaaaaaaaaaaatatatatatatatatatagctgactggaagagattaatttcttcccccaacttcttgcatgttgaagatatttgagctatttttcatctaaaagagtaaggtattaggcccttttgtgggagccccatgttttgtttttctgagttggtggggagggagggagggggagggctgaattgttttgcagaggaagatggcatctgtgctttaaatttctcattactgggttagaaaacaaagagggattgccctgcacattttcttttgtgcttttaaatgtttcttaagttggaacaggtttcctcgggcctgttttgactgattgctggagtgcatttgatagttaaaaattactaattggttttatttcccttcacactctgcctccccacttctccccccgttactgaaaaataaccattttagtgtcaggctagaaattgaattgctgagttttgtgtatcctttaaattaaaaaccacaagtgtttattgtagtggttaaactgtagcatctcagcatctgggtggaagctgcctatatttcttcccagtttaactggggaccatctgtgaaattaattttccatccagacagctgctgtgagcaaatgaacataaatgctcgctggaaatttactaaccagtttttatattgacctgcagtgtaaaaagcacatttaattataaacaatatattcaaaatgggcaaattttattttcaaatgcagtgtagagctagattaaaagcaactctttgccacctactctgcccttttggcaaagttaccttgaacaaagaatcttaagggtttattaagaactctttattttcttcataccctgttctctgcagtgctttctaacagcttctgggtgcagattttcttcggcatccttttgcactcagcttattacaggtaggtagtgcttaagaaaagtcatggaggactaaagcctaagtccttttcacttttcctccatctgaaggtaggtgagttcatcctcttcatggtaatgctgttttaccaagactttatagcagatggacccagaaagaattttctgctattgtgttcactacaacaggatagggacatcagacagccccagaaaccccttccagatctgatatgggactattaatttttatgctgttaattggtattcattcacaatgcagttgaagggggaaggctccactgcattctttggctaaggcctgaatgcttgctcatctgtaagatctatactcgaggttttgttttccttttaaaattctttagggagagagggatggtttctgaggggttctgaaagtatgattcaatgtgcaacatacaggtaggtcttcagcataagctgaaatatatgcatgtaaaaactttgacatctttttttttaattttccactttcttcttaactttacttctctttttgtcccccccccatcttacagaagttgaggccaagggagaatggtaggcacagaagaaacatggcaaactgctctgtgctttcaaaccaaagtgttccccccaaccccaaatttgtctaagcactggccagtctgttgtgggcattgttttctacaaccaaattctgggtttttttcttctttctttaaacatagaggtaccaccacaagggatgccctactctctcgcagctcttgaaagcatctgtttgagggaaaggtctctgggcaagcaagtggttatttggattgcttgcttccctttttccacctgggacattgtaatcataaaataacagtaaattccaaacctcaaaaactattatggcctgagcacagctgaaatctagcagagtttaactcttctgcctccatgtctgtcacttataattcaggttctgctgttggcttcagaacatgagcagaagaatcgttttatgctagttattgcattcatggttgaaactcaacttagggaaagggttccaatgtattaagcaatgggctgcttctccccaatcctccctaacaattcgttgtgtggacttctcatctaaaaggttagtggcttttgcttgggatcagtgctctctattgatgttcttgctggtctccagacacattcctgttgcattaagacttgaaagacttgtagatgtgtgatgttcaggcacaggatgctgaaagctatgttactattcttagtttgtaaattgtccttttgataccatcatcttgttttctttttgtaggtataaataaaaacactgttgacaataaggtgtgagcttttattgcttaattctctgaataattcaacgtagacgtcttaaaacagtttttgtttcaagacaaagatgggggatattggattgactgattactttcgcacctaaaactgaaaggaaaaaacttaatacaagaattggaattgaaaaccctagcaggatacctagtaggtaagggtttggatatatctgtatctgctcataagtaaaacagtgattgtgcaaatggtactcgcctaagtaccattaggttattggtattaaggtactaagtacaaggcaggtatcagccactggtttgaaaaaattcaaaccagtaaaagatgagtcacaaaactcctccagccaaacctggtaaatttggtttgcttctggcctgaaggcagtgtgaaagtgaaataagtttcacacttaaaactagctgacacctttatatcttgaccacctaaatttggtcatctacctggaaagtggaaattcacaagaacgtaccctaatattttaactggtctttagttgg

SEQ ID NO: 29655 - DNA, 4653 bp, Homo sapiens
agagcttgggattttctggcaccattatttgaaattttaacatggttatgtaaacagatcagatagcaaggaatgcttatttgatgatgattattgtttgtttttacagagttccgttctggaaaggcacccatccttattgctacagatgtagcctcccgtgggctaggtttgtatagataggtgtctctgtcaatggtatatgtatcttttggtttaaagattcgtcatttcaaattcagacttcaagtttagaaagttgtatatacatgtggttagataaatatttgaaagaaaaaaatacaaagcgtgattctccccattccctgccccccccacaattttttttaactttggtttcccccaccccccttttattttcaaagtctcttcctgctcctaacaaacaggctttggtctgcagcaaggcctaggcatgactattcaaacagagggagaggagacagacagctgaatggctcagcttctctctggtggtggtttctggctggatagaataagcctgacgaaacctagctattgtaagctagtttcttcagttattcttttccctatccctgtctaagctagatatatacagagaggtccagttttatgaatgcttattagatggaattttataagtctaatgcagtatcagaatagcaaatatgtgtattgcccagtttaatttactgaggtcaaattatcatgggcacttggctatcccctcctacccatgcacttatctgtaggtgtgttatcaactgatgattttctggagtttttgacccattaccatttaagatatacagagaattttatggtagtttagcccactattctgagctaaacaggtctaactcagaacttctatattttaaaaaaaaagattatttgtattacaaggaaatccttaaattattgacaggtatttaatttgcccagtaaggtgagaagtaccatattattcccttatactatataatataaagagaacaggtattcaaactggaatacaaaagtaatgaagcctttttatgcattgcactcatcattccctccttcagaggtggtgacctgcagccatgatggaaagttctctctgcccctctgccctctgaggtcatgtctggatctgtgccattagaacttgggcctgttgggagaggaggcggaggcctgaaagcagtttacataaagctttcagtaatggttggtttttaaacaggcttgctatgtgctggtagcttctttgtgcatcttgcctagacaattaaaaatatttgctccatgtccccttgcatttctaaaccaaattaattggctaccattagaataacttagactcttcatcccacccccactcatccaagtgaggggagagggaaggtacccgagtctgtttcttgttactcaacatcagtgcttgttttgggcccctttgtttgctgccttgtaaaaaatcaaaagagggagaaaacccaccaaaatggcagaattctgaccaatgtcctacaagatcctggaaagtgaaggcttctacctcatagacaggggtgcaattttcagctgagtcaccagggccttttttcacttcctgtcaagcgatggtctcttaaatgttcccttcaggtaagttctttgattcccataattttataatagtcatccttaggctaccacttccctttccactgggatattttttatttttccttttttttgtttgaactacacactgttaaactaaaagtattgaatttattttgttttgttttttaacagaagctttgatatcagctgcagatcactcaatacatggccgagacaaatctacattggccggaagcagctctagatgagcctcttggctagacttagtccctccttattagtgattggcgattcaggccatgtcatagggcctttcagacaaaaggttcttatcccagtcagctggccaaaacattaactttggatttcttaccctgctacagcatcttctagaaaggcagcaagataatattgtggcagtgcacagataacatcagggtagacttgactggagaaaaccaaattctgcgcttgctcctgtgtgcccccatccagctgtgcatgcacacacaggacacctttctagtatgaagaacttgcatcatgtctgccctctattgagcacccccttctagaaatacttccaagtattagcatgtgaactgttgactccaccctggtgctttctgctaggaaagcacacttaacgcatccagtgtagtaattgaacttgttctactgccatggtcatatgcagtgggattgcataaggagcattatcctagctctgaagataccatggagtagaattccccaccccctgtcttacatccaccctggccctgtaaattcttttttcctttgttgcgtcaacgaccctagccggagactcaagctgccccctgtgataagtgccttctcgtctttctggtgtgattcaggactttaggggtcagtaaagaccgaggagcctttattgtaataagaaacagacataatgccccttcttcacaagccctgtaacaacagctaattttttttttttaatctcccctttctcccttgaaattaatccagtctgggcaatagatgcagtctgaccctttggatgtaacttacatttttttttattaattatttttttctacaatcaccccaattatccttgggggaggcgttggaggacctgaaatttttacccgaacccaggttctccggcgcttggcaaccaaatggggctacagagaagcatctaagccagttcacagagcgagcgtgtgtggggacttctcactgccacggacccttgatgcatgctccccgcgctccagtggtcccgtgtcagaaggcggagttttcgaaaggaggccgccaaaaataaaaggcaaagagacgggatcggctgcagcggtttcccaaaggaggagggagtgtgcatcggtctggtaacaaacagagaatgttttttaattatttatatcacaaaaatctgtgttttatctaggatattttctgaatattctttgtaaaatgcagatttttttccacaaaacagtaggattctttgttatattcttaaaattgtttgtttaagtaggtaaaaatatacattcagctgaaagcattacactaacatttacattttaagccttaggaggttattcagcccaattcccagcagtagagagaatactaaacttgtgtctcaaggtttcatggttttcccacgttctttggctattaatttaatttcccaggtcacgtagacaatcattgataattgaaacaagtcctgagttgaaataaccttgagttgagcaaaaatatcctcattttggcagaagctgggcttggtagtacagtaaaattttagtgtaatgtgctcttgtaattgaaaggggatagataatctggatgtttctgcaaaggaaaataggtgtgtacttaacagctttggctctactcagtttcttaaaaagataagagcaaaaaaagttaaatgttaatcaaaacatttaagtttcctttaaattgtagtaataaaatatatgaagctcctttttttactttgctctgtgactggtttaaaggtaagtttgttatgttgttggtagattttgccaggcttctcccaacagagtagaagtgatttggcctcataacttcacagtggtttaccactttgttctatgttctggttttgtaaaggatagtactggaatttgcgtctgaagaccaatattggtgtaactcctgtcagtatattggtaaaatgtagcagaggcaggagtttggatgtttggatgggattcccttaggattctacagccaataaagatcctatttcctatgcatgtcccaggaatcagtaatcctcttttactctgttgggatgagtctttttttgtttctgttcagagtggttactaacttcaccttctttcctcttgctgtcatctgcattcgtgcttcccacctgttgttggcatgtcctttaccttctctttccctgccacatcaacctacacactgactcatcattgacgtggaagatgtggaagatgtcaagtttgtgatcaactatgactatccaaacagctcagaggattatgtgcaccgtattggccgaacagcccgtagcaccaacaagggtaccgcctataccttcttcaccccagggaacctaaaacaggccagagagcttatcaaagtgctggaagaggccaatcaggctatcaatccaaaactgatgcagcttgtggaccacagaggaggcggcggaggcgggggtaagggtaagtcctggagttttccaggtactgccaaggtatctctttacgccttctgtgacttgcttttagttgctgtttttaagaaggctgtaagtatgttgcttaatagcaaaggacactgcctaatgctttttataacctttttcaactaagaaaacgtgaagtttgttgtgatagtcctattagttaagctaaattgtgaatttttttttcttagagactggtctgaggtttggttttgtttgtttgtttgttttgagacggagtcttgctctgtcgcccaggctgaagtgcaatggcgcga

SEQ ID NO: 29656 - DNA, 1052 bp, Homo sapiens
ctccaaaattagtactgtagaaaccagtatattttgaggcctgagaacattaaaagcattgctaggtttctgataatccatcatcatatcatttgtcagagcattatggttaaatgcaaggattctgaattcttgagtttgaaatttagctctgctgattacaagctgtataattttgcacaattttgtgtcttggtgctgcagtttcttcatctgtgaaatgggagtaataccacttacatgagacttgctgtgaggatggtatgagttagtatttcttgagcacatagcagaacctgactcagtactctaatagttattaaaaattttaaaagcgtaatgtgcaaagaaagtactgtagccttgggagttgatattgcagacataatcgtccacataataactttctgtgtgatgactgcattgttggtcatgttttcaggttgatccaactaatggaagaaataatggctgaaaaggaaaacaaaacaataatatttgtggagacaaagagacgctgtgatgatctgactcgaaggatgcgcagagatgggtgagtatagcaccaaggcaattaacctctggttttatagttaactggaaatttctaaattggtattccaaatgttgtgtaatatttcaataatgcctatccatgcagtttgctcttttaatgagcacagtcatctattcatgaagcctgacaaaccttacaaaaattgcatgatagcatttggctttaaagttcgattttctccactttaaaagatttttaaaatattggtcacttttcttctgatagttggccagctatgtgtatccatggagacaagagtcaaccagaaagagattgggtacttaatggtaagtttaaaactaagcattttctgttgattccccaccccctgcccataagtgaatgttcatgctctatttcagggataggcaaactttctgtaaagggccacatagtaagtatgcttggctttgtaaaccaaatggtggtctctgttatagccactcagcactgctgttttaggacaaaagctgta

SEQ ID NO: 29657 - DNA, 1194 bp, Homo sapiens
agcagacaggtggagtgcttatcacagtttaataggggagcaggcccaagaagctattctaagattgagggacttgcttggagtgtatcttccttcttgtccacaatcttccctttaattgaaacttaacttaatgtcatcctttgcctgcatgtctgttacacaaaaatagagacttgtgtctgttttgtttagtaactccagcacagcaccacttcaaacagtagccgatacatacttggtacctagtaacttggtacctaataactatttgttgaatgaaatgatgctaacttgtactgagtgctggctatgccagatacttttatagtacattacacattattaggtcattttctcagcagcctctgaaataagtggtattatttctactttgcataggaaactaaggtgtgtggaagttaaataattctcttcaaattatacagtaagtggcagaataaaaactcaaaccatgtctggatccagaatctgtgattgtaatccctaggatgtatttctctcaataaagggatttttaattttttgcctattgtagctatattcataaacagtatttattgttgggtagtaagggaggttttacacatttctccatacctttaaatcacagcaaataaaatggtctttttggaggtaggctggtagtatccctagaactccatcctttttgaatattcttatggcatgtacgatacgttgctttaaaaatactgatgaactaactaaaaattctgttcctagatttggagcaagaggtggtggtggccttcccccgaagaaatttggtaatcctggggagcgtttgcgtaaaaaaaagtgggatttgagtgagctccccaagtttgagaaaaatttttatgtggaacatccggaagtagcaaggctgacaccagtaagtttacatgtgtgttttaatgtacagattattgaaccaagtagatatattggttagagtttattcatacgctactgttgccgttttacattttattctagtgtggtgatatttttcttaaaaaattttttggttaatttttttttttttttcctttttgtagagaccgggtttcgccatattccccaggctggtcttgaactccctagctcaagcaaactacctgcctcagcttttcaaagtgctaggattacaggcgtgagccactgcaccca

SEQ ID NO: 29658 - DNA, 1080 bp, Homo sapiens
ctacatttattcatagatttactctttcagtattttattacgtgcatgctggtaagtatgttacaaatatgacctcatacaaaggtaaaactttcataccagccgtatgaagtagggattatccactgcattttacgcagcagcaagcccaggtttagaaaggtttccgaagttctctgctgtagacactgggtaattaacagtagataagacacagtccctgttctcaagggagtcaccatctggtagagggaagacagatgtatcaacacattaaatgctgtaagtattggacagaggaaaaagagaaaagtgttgtgagggaaaaggaaaatgggcctagaggagtgcaattttttgtaacaagctttgtggaactattaatttgataatttgataggcgcttctattatgctgcctctgaacctttgcctcctgctcctctaaccactgggattgccagcctatttccaatatgccctctttctgcctggcaaacatcttgtcttttctaaactcagcccagggacatgacatctgtaatgtgtttctgtgtgactcccaggcttctgccttcttaacctctcaccttccagctcatttgagtgaatctttgtccaagaattgagagaaactttataggtaaagcatgcacatgttgtctgatttaatctaaaatagaaataagaaaacaaaaaataatactgcaactagggacacatttagtcactcccagttcatgagacaaggaatagtaaagttcattcctaccatagcaaaagtcaggatttaaatgtaaattaatttttttaattaaaaaattttaaattaggccaggcgtggtggctcacacctgtaatcccagcactttgggaggctgaagtgggcagatcacgaggtcaggagttcgagaccatcctggccaacatggtgaaaccccatctctactaaaaatacaaaaattagctggatgttgtggcgggcacctgtaatcccagctactcgggaggctgaggcagaagaatcgttggaacccaggtggcggaggttgcagtgagccaagaccatgctattgcactc

SEQ ID NO: 29659 - DNA, 1084 bp, Homo sapiens
ttttacctcctagaacagacctaacacaaagaagacacttaacaaatatttctggacttcgtgaatgaggtcatctatgtaaactcttggccctgtgcttagcatatgactgtgctctgtaaacgtcagttcccaaaaagtgcagatgacataggtgctgcagagggacagccatcacccagagaccaagaccaaaatattattcagtgtttgggtactgcctgtcacaatggcttgaaacaagcgtgtgttctttgtactgaaatacataaactcttctgacagttatttcaggaacctagttaagagattccatttactgcccccaaaatagaaataatcaaaaactctggaaccttgagcacagctgaagttttaatgggcaaaccaggatagagggagtaattgggttttgtggtggggatagagcctctctcatcaagagcagacacgttttcccatctgctcaatgaaagagctggctgtgttcaaaatatgcatttcaatggcagtagtctgtctgagagtccacaattcaggggaatgagttgcaattactttccatctctggtctcctgtctgcccttctcttgtttaagtgttagggatttgcacagtggaaatgcaaaagtatctaaccacagagctggcttctgctatgagacccagctataaattaggacacccacctattagagactgagtcatttgttcatttaataaatatttttaaagataaaaagttttaggaaatggaatctgagggagaaaatgatagggagagagaaaaccagggagatgaaaagagcagcaggcaggatattctctcctgcgtctctttgcacagtagctcaactctgtgtccccctttcccagctccccaggtcctaaacctggagaagtagtatatagttgagagaccagactatcaaattaggcatggactagaatcctagctcttaacctggccaacatggtgaaaccctgtctctactacaaacacaaaaattagatgggcgtggtgccatgcacctgtggtcccagctacttgggggactgaggcatctcttgaacccaggaggca

SEQ ID NO: 29660 - DNA, 1028 bp, Homo sapiens
ctcccctcccaggtcagtccccagcctgtgttctgaaccttggccctcagcttcccaagtagagatgcccttagcgcccctctttcctgcatcttcatttcctcccattctgtggggtcattcccatcactgaacagccgtgctttcatcatctcttatcttgactccacatccccatcttttgctccctttcactccagaacttattatttttttttttttttgagatggagtttcgctcctgtagcccaggctggagtgcaatggcatgatcttggctcactgcaacctccacctcccaggttcaagcgattcttctgcctcagcctcccgagtaggtgggattacaggcttgcaccaccatgcccagctaattttttttgtatttttagtagagacggggtttcaccatgttggccaggctagcctcgaactcctgatctcaggcaatccacctgcctcagcctcccaaagtgctgggattacaggcatgagccacatccagcccagaacttcttgaaagatgcctctgtacccccatctctgcctggctactcctgtcaggttcctgcccccggcagccactgcagctgctcttgccaacagcgcggggaccccactggcttggactgagtcactcctctaacctgtttggtgtggttggccactcccatcttcttgagacgctttgttctcttggcttctttgttgccaaacttttgacagtgttttccttcctcactggctgacccctctccatcttctctgccagctccctgtcctgtcagtctactctttcccaagcccccttccttactgtatctacatattctccctgggtggcctcatttggtctggtagcttcaaataccgcccatacgccagtgacccaccttcgccctggcctctcccggaactcgtacttgtctatccaccagccttctcagccacaccaggaggatttgaggaacctcaatccaggtgaggaaagcacctgactcctaaccctcagtgtcctctcttgcctg

SEQ ID NO: 29661 - DNA, 1056 bp, Homo sapiens
agggcacccagggcccagcagggcccctaaccccgcctcccaaagcagccgcttcgctccgatcccgtaccacgcggatcccacacccacgagcgggcccgcttcccgctctgcaccccgcgaggccctagtacctcctcatcgtcgtcctcctccagctcctcctcaggcttctccgcgtcgcctttcgggagcaattcgtccggggactggggttcccctgcaccggcagcagcgacggcggcagccatgactgtaggggacaccggaagcggaaaggaggtgagcgcagccgaacggcggacagagctgcttttccgggagccgaggcgcgagccgggcgagagcggcgccctctagccccgggtcctccagtgcccgcagcgggtccggcagccctggccttatccgggcgtcggggcttcggcgggcattagcagcagctgagaggcctgtgagaggttctggggcgccaccgcagtcattctgttcagcgggtatagggtgagctcagaaacttgcttgtttttctttttttcaaatgcgttgttttaattccaggtaatagagttcaggggagaacaaagatcaaagggctgactctggcaagattctgggggcttgttttactttaagttcacagctaaggtaggagtggctgagtgaaaacaactcaagagatgatgagccactgtatttttttttttaacaaaagtttattcttaaatttacaacaggctccaagacaacactttattcgagcataggtggccaaagatgtggccgggaatagagatgtttaaagacgaatggagtcaggcccaccatcaccgcaggcccaagggacagtggaacaggtcgctttttgtaagattttagctttttgttgttgttgttgttgttggttttgttttgagacggagtctcgctctgtcgcccagactggatggagtgcagtggtgtgatcccggctcactgcaagctccgcctcccaggttcaagcgattctcctgcctcagcatgcaccaccaaccacgccccgctaattttttgtat

SEQ ID NO: 29662 - DNA, 1033 bp, Homo sapiens
gggagggcgtctgggcctgcgctcacgtgacgggcggggaggtttgtgtaggggctgcgagccgggtgggcgcgggcccgggagcgcgaggctgactgtccggccccacccctcgcgggccagcccttcgccgcgcggaaccttccctcgggcaggggccggccccgccgctcacttcccgcgcccgctcgccgctgaccggagttgtctcctcctccgcagggccgcggccagagggctagaatccgcgccttccgagggagccgcgccctgcgggccccaccgtacccgaggggatggagggctgcccccgaggcccccgcgcggctcgcggtcccacgcctgccggcccgcgctagctactcgactcgtgcgctaaatttatccgtcacccaggccttgtctcccgagtcattggcgtcgtggttcaaaagaaatggaagaaaaggagcgatgtgaccgattgtgttcggtcctcctgctttgaggcctggcatttgcagagggaaacagcaagaaaatcgtggggattttggaggggggtgggagggaagggtggggaaacggaaacaaggtcttacattttatgtgtttttttaaattctgcactttgacagtggtagcaaaataaaagtaatccaaaagttatttttctattgagaagagagaagaggtgggttttatttttttccttttgattccaatcttttctcccagtgacaaagcataaatcatggacaccagagaataaggtggacctcaggaatccggaaaagactgagaagcttacattcttcctctagagggaagagtggggtgtttatagccatctctggaacctaaaacaaaaaacatgagttgtgtgccatggaaaggagacaaggccaaatctgaatcattggagctgccccaggcagcacccccacaaatctaccatgagaaacagcgcagggagctttgtgccctccacgccctcaataacgtcttccaggacagcaatgccttcacccgggatacgctgcaagagattttc

SEQ ID NO: 29663 - DNA, 1127 bp, Homo sapiens
gtggggctgtggggatgtgaaggagggtgggtgacttgtggtcttggctcacagaagacagtgaaggaagaggctcgaaagtgacagagactgagccagtgtcctcgttccccgcaggctactcggatgtggaccagcagagttccagctcgcggctccgaagcgccgtctcacgggcgggctccttactctggatggtggccacttcgccaggtgggctgcaacccgtgcccagttacttccattcttggtgatagtgctttcttacccatctctctgcagttgggcatcctgcccatgcagagagactgtaggaccattggggaaaggtcattctagaataatcactgggagcccagagctgtggggacccccttgcgtggaagggaaggagtagctgcagagcaggacagagggtgtgggcaggtgggatccaaggacctgggtcccggtagggcaggacagaggcatactggcaggtgggggtggggtaggggcagggaggacggcagacgggacaaaggagcggtgcccccaaacaccatatggagccttcggcttgatggtcattcttccaggccggctcttcagacttctctactggtgggctggcaccacctggtaccgcctgaccacagctgcctccctccttgacgtcttcgttttaaccaggtgagcgagactccacccttgccaataaatcgcaaggccctggggtgaagggacgggtaaagtgtgtcaacctgtaatggtcgattctctgagggttttccccagtttccctggagcctttattagcgatcacggagtagcttccccaaagcccacccctgcctgacagaggatggactcagagtcaggttcttctccccgaattgatagcccttcgaggcaggattccagagcacagattatttcttcttggacacattctactaaacgccacactagtctagccgtgcctggctctcagacacacgatggctttcctcctgcagggtaggcccactgactccaggcaagaagtggggtttcccagaaagtccatcttccttcttgggcctgggacaatctaaccccccgagttccccactcatggtcagagccacaaagaggctctgcctgag

SEQ ID NO: 29664 - DNA, 1043 bp, Homo sapiens
caccgccagctgggagcaccgccacctgcggaaccatggggccatatttgcctttggggccacagcacctggcacttggcaagaggcagcaggggtgagctcaccctctgcaccaggcctgtcaagggccttacaattgaatcccacaagaactatggtactattactatctctgttttacagatgaggaaactgaggctcagaaagtttcagaagcttgtccagctcactcagctggcatttccacccaggcagtctggctccagggcctgcaccatgacacattatgctctcctgcctctcaataacagcaaagaataatagtaatgtgacaaccacgtactgcctcttatggttgaccacacttcatatctgttctttcattttatcattatttatatccccaaatgtaggtactattattacacccattttacagataaggtaactgagggccagaggagttaagcagcttgcccaaggtcgcagatctagtaagcaaggaactgaaaatgacgctggcctgtctaacgtgacagttcgtgtctgcaactacgacgccatgttgctgcggcacacatggatggatggatggatggatggatggatggatggatgatggatggatggatggatggatgagtgctctgcagccctgccagagaagctctcagggccctcttctctctctatagagcatctcagttcaggcatcagggaagctgccatctggaggatgagcaggcaatgggcagaggaggggtgggggcgggaagaatgttcttggagaaggaacagcatgtgtggaggccttagggtgagaaggagtttggggcagttgagcagcagaggactttcagtgggcgtgacctatgtcctgtcggggtaagggctgaagccaggaggacagggactttattggcagggagacggggctgtggaaggattttaagcaggagagcaacatggctggatttgcctctggccgctgtgtggagggtgggagtggaagctgtggcacagtccagcggagagtagccagg

SEQ ID NO: 29665 - DNA, 2907 bp, Homo sapiens
tggttgtttgcctgtggtgtgggtcttgtccgctcatcctgacagtaactcaggcaccagtatccaaagttaagttgttgctgttggcaaaaatgaaagttccttcctcttggtgaggttcagtgacttgttcagagttactggctttttgccgtgtgcttgacatcaatcaggccgcatggagctgcagttcctctgctgtgggaggagcgctggcagctggagctgagctgtgtctaccttctcctagatgcgcctgcttcctctgcgccagaagaaggcccacctgatggagatccaggtgaacggaggcactgtggccgagaagctggactgggcccgcgagaggcttgagcagcaggtacctgtgaaccaagtgtttgggcaggatgagatgatcgacgtcatcggggtgaccaagggcaaaggctacaaaggtgagctttgcggtggcttgagttgctgtgcaaacctgggggagaagtggtttcaggcccagctgttcgttgatgaggctcagagtgagcgctgggtacagcgcccgaatcggacagtgtagaaccattctctactgccttccttctgagaacagccttgtggtcagaagtggctgggatagcggagggccaggggacaacttcttaacacgttcctggaccctttgctctttgtagcctactgataactgcaaaggggagcttggaattatgttagtcagtccctgtgaatgggggagcttaaactaatggatgccttaaaaagcacccattcagaattgagttcagggtgacacccccagagcctatccagcttgacaggggagacctgtgggtaatgcacatgaaataatcttatcactccctcagatgacccagccatggttggtaattgctgagtagcaggaaggggtcagtgggaggtgctgggcgctgaggtgaagtaatgtgtatccattccaggggtcaccagtcgttggcacaccaagaagctgccccgcaagacccaccgaggcctgcgcaaggtggcctgtattggggcatggcatcctgctcgtgtagccttctctgtggcacgcgctgggcagaaaggctaccatcaccgcactgagatcaacaagaaggtgaggttctgagagtggctccctgggggtgggaagaggcccccgtgatggggagtggggtttctgtgcctgtcagtgctgcttcactgactgtagcttatgcatcacgtggacatcagtggcttgcttctcatggtcagttctggcccatcttgatgatttgtaaggtgccatcctgtagagtggctgtggtggggctgactggtgtggctggggatactagtcttattggtccctgatgccaccaccaggggggtgacaggcctgtgttgtacagcaggatctttagttttagcccagccgccttacagaaaggaacctggagggccagccagctttttgctctgaccttgggatacgctgtgactgggactgaggcctcagctgccttctagcgtgctttgcaggtcagcacactggcatgtctgggttatttgtccctaatgccccagccttacacccttcttgttcattcagatttataagattggccagggctaccttatcaaggacggcaagctgatcaagaacaatgcctccactgactatgacctatctgacaagagcatcaaccctctggtaagtaatgggtgttctgctctgtgaggccatcccaggcctcgtgcttttggggataggctgcttcctaggggctgctagcaggatcgttaactgaagccaacacaacacctagctgtgtcccttgtaagtggcatgttgtcatctgagtccactcgtcggggttggctggtgagaagtggggtctcaggctcagctgttcagtgatgaggcctggaatgtgcgctgggcacagcgcccgagacagactgcggaaccgttccttgttgccttccttctgagaacagccctgtggtcagggagggcctgaacctggaggggtcatctgcacgacaatcccctcctgggcctgtgctgatccgatgctcgttttccagggtggctttgtccactatggtgaagtgaccaatgactttgtcatgctgaaaggctgtgtggtgggaaccaagaagcgggtgctcaccctccgcaaggtgaggcaggtcctgacttgtcatgggggggctcttgtagagggaggatccaaggccacagacgctggtggccctgtggtgggagaggaaaggaaggagagggtgttggcagtcctttcacactggctttgaagtcctgagatgaggaaattcccagtctggccttgctgggctgtttgctgctttgagtgtgtcctcatctgccggatggtgggggaggctgaattgatcgtgtggcttcccagatgcaggggcgctgtgaacagtgctgaggaaagcctggctcctcgtaatcctaaatcccttcccctcttggcccatagtccttgctggtgcagacgaagcggcgggctctggagaagattgaccttaagttcattgacaccacctccaagtttggccatggccgcttccagaccatggaggagaagaaagcattcatggtgagcacctctgcctgcccccctcgctgggtgtggtggcttgggcagccgcctgcctttggctccagccggggtaggggtggtcttgatgccttaggcctctcttgtggctgtggagactggcccagagtcttggtctcctctagagtgggcatctgctgtcacctgtcatcttctacctctgaccactgcctctctccccacagggaccactgaagaaagaccgaattgcaaaggaagaaggagcttaatgccaggaacagattttgcagttggtggggtctcaataaaa

SEQ ID NO: 29666 - DNA, 2543 bp, Homo sapiens
ggcgggatttgatggcgtgatggtatgtgttgtaatggcggccgtttcattgtcaccggcgtcggcacggctgaatccgcgacgcatcgccgccatcccgtcttggccggcgccgggggtttgctttaggggcacgggcgacccagcggggacttcagtctggcctattttctggaaagtcgagaggcttgtgaagagcgcttggaggactggctttgggcctgcaggtcggccagagagaggccgtaagggtgggagcaggcttggaggcccggcgtttttaaagccatgagtcatttctaagtttcgacctcaccaattctatcattagttgggattagggcccataacctgcttgtctgggtagaaggaccttgggtggaggttctcggcgccgttctcattgggaggtaaagaagcttgggggaggggagtgttgtggagtcctcctgaatatctggggccgctggtgcactccgaaggcctctggagctcgcagaaaccacagatgatgaacttattgacgggcggacagaaactgtgtgctgattgtcacgttctgatttggctctgcggagttctttggcctgtgtgtatcagtgtaattagtgtccgggcaccggaggcagcctatagcttaacattgctagctgctacccagcgtttgtcccgggagtccctttctttagcggtcaaaaccttgctaattggcatataaagctgcctgttaagcagtttttagtgccactacttagtgtatttttgtgtggttagataaaaaaaatgggtcgttttcttacaggttgagaggatttgaaataagattcagcttaaattttgtcgaatacaaaagcattcttgacacgtgcgagcctggaagagataatgacctttttattcggcttgctgggtgtctggtcaggattcttcagtattgctgagatttggaacttaagcagctgggaactagagaagggggcactgctttggtttgggtgctgacggtgatttttttcccacctagtctcacagaaagttctccgctcccagacatgggtccctcggcttcctgcctcggaagcgcagcagcaggcatcgtgggaaggtgaagagcttccctaaggatgacccgtccaagccggtccacctcacagccttcctgggatacaaggctggcatgactcacatcgtgcgggaagtcgacaggccgggatccagtatgtacagacatcctaaaagttgggggaataggagtggagggggagggaaattgtagagatggagtcaagctgttagcagagggcagacttttttttttaagcaggagttacacgttgtcagaactgctgcgacagcagaatgggaatgcttaacttgaaaactaatattccaaggctacagatggtcagcactgtttgctttaggtgcggtgtggggtattgatttcagagcatagtaaatttgccaggaaccttagcaaagagaagttaacactagtgtggggggttggagctgctgaggctggcataagaactgcctcattcatgtttttttcacctgaaagcttgaataatggccacttacctgtgtgtgttctacttagagatgtctaacagcactggttgctgagccatggagacattaatgttaggcagttgatactgactaatctctgagctcagagctattgttagggcactgaattttccagataaatagcaatcttgtctgcctccagaggtttctgtagaagagaattgaagctggacaggtatttggctgtctagggtcctgatattttttgtttgaataacataaatgtgctttgaatgagagataggcagtaaggacagccctgtgagtccgtactgcaggtgtggggcccagttgcccttccggcctaaatgggcactttgcattttcctagaaaacattacaccccttgcttgggctcctgccaagtctgactactgctttttttttgcagaggtgaacaagaaggaggtggtggaggctgtgaccattgtagagacaccacccatggtggttgtgggcattgtgggctacgtggaaacccctcgaggcctccggaccttcaagactgtctttgctgagcacatcagtgatgaatgcaagaggcgtttctataagaattggtaagggaggaggccatgcagtccctagcttgggagcttgggagctggagagcagggagcagcgtgtgcatggtttctcagctctgtagcaggcagggagctgctgtcttgggtttagtttgcctctcgaacagaaaaatacctgggatcagacttggccagccatctggtttcagccggaagctaacaccctcattctgagtccaggctagtgggtggtggctgaggacccagttggttgaggagtccaactagaaaccaggagaggtagcagaataattaaacccctataggggtggcaagggcctctggccctgggtggaatgtcccatttccttcatcactgagtgggcttccccagggcagaaaggtttgtcccggagcaag

SEQ ID NO: 29667 - DNA, 1105 bp, Homo sapiens
cactttgctccaagctgcatcgtctcttgcctgaattattgcagaagcctagccggtctcctgccttccacatgcccctccccccgtaatcttgttctcaacagcaaccaaagtgatcgtgtaaaatcagaagtcattccttgtttttcctctgggtggctctcattgtagtcactaaaaggtggcggtcttagggtgcctgacaagggctatatgacctacccccacccccagccaaacttggtctcttcctgctacccactccccctactccagctgtttttgttgttgtttttggtttgttttttttttttttgagatggagtcttgctttgtcacccaggctggagtacagtggtgcagtctcatctcactccaacctctagcctcccgagttcaaacgatgctcctgcctcagcctcccgagtagctgggattacaggtgcccaccaccacacccagctaattttcgttatttttaatacagacggggtttcaccatgttggccacgctgatctcgaactcctgacctcaggtgacctgcctgcctcggcctcccaaagtgctgagattacaggtgtgagccaccgcacccagccattccagctgttttgtgtttttcaaacacatttgacacatttctgcttcagggcctttgcactgggtgttccctctacctagacaaatgctctttccccggatatccacagctctcttcgagtcatttcagtgagaccttctcattccctcctatttgaaattgcaccctccacccctggaattccccttttctgtttcctcttttgtttttctccatgaaatgtttgcgcttctaaaatactgggtcctttgtccttcatctctcactgaagcgaaagctccagagtagctcccttggtgagtagtattcaggacataattgttggaaaatgggggtgggggccaagagcctggggctttcagcaggacctgtgtggagaatgcatttgatggagaagagcccagccgctgtaataacctgggaagggaacgatgaggtctttggcagggccatgggccagggactgagaatggttccagggggagtgaatctgaaatggtgct

SEQ ID NO: 29668 - DNA, 1046 bp, Homo sapiens
tagagaataagtcttccactgtcatctgtgaagacttgcggcacctgctctaccaatctctgctgcagctgaggcagtacttctgcccactgcacgtggggtgatagagccagagcccacagtcactttaaaccatctcctggattgctcagcctcccctgggctggcacagagctgcccagccagaacaacaaggcagcagatggctaggtgaggacaagtctttttttttttttctttttcttcatttttttccagtctttacctttactatatataatgtcctctgaggcttcattgcctagtgtcctttggcttgtcttatcctatgctggtcttgatccactaatgttctgtggtttgaaaatgttggtgcagaggttaagagcacagactctatagagtcaggtccaggggaatatatatatattataattagccccgtttggtgggatggctctgtgactgttgagggactggtttagtttgcccagagtctcataaatgcagaaattaggacattggactttgaggaactagagctttgctaccatgtgtcaaaattcatattccatttggcagccattcaaaatgaatggaaaatgcccatgagatcatgcagtgttacaggtttttggggtttttttttggtttttggttttttttgtttgttttttgagacggagtttcgctcttgttgcccaggctggagtgcagtggcgcagtcttggctcactgcagcctccacctcacgagttcaagtgattctcctgcttcagcctcccaagtagctgggattacaggcgccagccaccacatctggctaatttttgtatttttagtagagacagggtttcaccacattggccaggctggtctcaaactcctgacctcaggtgatccacccaccttggcctcccaaagtgctgggattacaggcttgagccaccgtgcctggcccaatgttacatttcttaaagcaggatataaaatcatattcagtgtgattacagcgctgcaaagttaagcctattttctgcatggaa

SEQ ID NO: 29669 - DNA, 1049 bp, Homo sapiens
ttttgagactgcatctggctctgtcacccaggctggagtgcagtggcgcgatctcggctcactgcaagctccgcctcccgggttcacaccattctcctgcctcggcctcctgagtagctgggactacgggcacccgccaccatgcctggcaagttttttgtatttttagtagagacggggtttcaccgtgttagccaggatggtctcaatctcctgacctcgtgatccgcccgcctcagcctcccaaagtgctgggattacaggtgtgagccaccgcacccggccgccatgggatcttttctccaagttatgaattcaaaagaactaggtgctagaccagccctgtccaatagtatgttaagtgaagatagaactatttctataagactaaccattagccgcatgtgctgttgaacatacttgagttgaaaaactgaattttaatttttatttaattttaattaatttagatttaaataggcacatgtggctattctaattaaatagtcacatttggctagttgctactgtattagaaagtggagttttaggccaggcacagtggctcacatttgcagtcccagcacatggtgaggccaaggcaggaaggtctcttgagcccaggagtttgaaaccagctggggcaagatagacccccatctctccaaaaagtttttaaaaattagccaggcatgatatcacatgcttgtggccttagcaacttagtaggctgagacaggaggatggcttgagccttaaacccagaaggtcaaggttgcagtgagctgtgttcatgccactgcactccagcctggatgacagagcaagaccctgtctcaagataaatacacaaatatatacatacatgcatacgaacaaaagaaagagagtcttagaccttgctctgttacttaggagttagaagactttgggcaactcagtaacttttctgaactcccagtttcatatagttgggataataacccatcttaaaggttactcacagaattagttacccatggagtgataacttacccacagagtgagtt

SEQ ID NO: 29670 - DNA, 1045 bp, Homo sapiens
acaaaacaaagggtgtagctttgccaaatcccaccataaatcttagagaaccattccattttagagatagaggacaccttgtctactccagccactcctttgtagagattagtaatattgctggaaaccaggactcctgactcagcctggtgccctttcttgagaaaaagatttttggcttattataaagacagtagttatttgatgtagaaaatgtagaagatacagataaacaaaagggagaaagagaaaatagattgttctattccaaccacccagattggtgactgtgcttctactctctcctgtgcatatatagaaacatgtatatgtatgtgttacataattgtgtgaggacaacagctcaaatttactgagtgcttatagaatgggcactgttttaagtcctttacttaaaatgcatttattatggatcttgctggaaaccaggactcctgactcagcctggtgccctttcttgagaaaaagatttttggcttattataaagacagtagttatttaatgtagaaaatgtagaagatacagataaacaaaagggagaaagagaaaatagattgttctattccaaccacccagattggtgactgtgcttctactctctcctgtgcatatatagaaacatgtatatgtatgtgttacataattgtgtgaggacaacagctcaaatttactgagtgcttatagaatgggcactgttttaagtcctttacttaaaatgcatttattatggatctgaggtgaaactgttactttcatttgacagatgaggaaatggaggcatagagatgttaaatatctcaaggtcacagcagctgctaagtggtagagccaaaatttgaacccaagcaatctagctgtagagccttattattattattattattattaatttatttttttttttctgagactgagtctcattctgtggcccgggatggagtgcagtggtgcaatcttggctcactgcaacttccacctcccaggttcaagcgcttctccagcctcagcctcccgagtagctgg

SEQ ID NO: 29671 - DNA, 1052 bp, Homo sapiens
atcctcagttcagttttgaactttatttaccatttacatttaaagctgtgaaattaattttatataaatttaactgaatcttttgaattaatctatgaagtttcaggcagtttattattttttaagtatcctgggaatttttttttttttaaacttgagacagtcttgctctgttgcccaggctgaagtgcagtggcacgatctcagctcactgcaacctctgcctcctgggttcaagggattctcctgcctcagcctcctgagtagctgggattacaggcatgcgccaccatgcctggctaagtatttttagtagagatagggttttgccttgttggccaggctggtttccaactcctgacctcaagtgatccacctgccttggcctcccaaagtgttgggattacaggcgtgagccactgcgcccagccagtatcctgggaaacactgatgccttctttgcagtacagccttgataaagactatttgttgttgatcaataatatcggagtctcaagctaagtatatgtgataaaggacactccactctaaaaataacattataggctgggcacggtggctcacacttgtaatcccggtactttgagaagccgaggcgggcagatcacttgaggccaggggttcgagaccatcccagccaacttggcaaaacctttgtctctactaaaagtacaaaagttagctgcgcatagtggcacacgcctgtaatcatgcctggcccccagactacatttctgattttgttgacagttcataatgtggagaaattaattgtctggtgacatctgaaccacttaaaaagagtaaatggtgatacattatgggatgatcacacagttgtggtgaagcacaaatgaacagatttctagccttgttagttcagttctgcatctaaagtgaagaacctgcctttgtggtttctttagactcttcttgatgatacacagtacagcttggaggcctttaagcagaatagagcagagcagggaggcacaggttgttcagaagctttactagctgctggtttccct

SEQ ID NO: 29672 - DNA, 1027 bp, Homo sapiens
gcaagacctgcccaaacaggaagatgttgggaaatttttagtagcaaagctgttgccattagattactgaaagtatttgaagagttttctggagataaacttaggtattttgaatttccactaggagaaagcagtagcttctatcaggtataaacaaaaattcaggccgagaaacttagcttttcagttgtgtggtatgttgttatcagaaaactttgaccagctggatgagaaagagaagctcaccagaaagtttagaaactctcacttagggaaaatagccttaggctgaggcaaacctctttcggctatggggagaatttggctttttatcaatcctggattatcctaagagtaggtcataacagggatatttttgacaaatctttctttcaaatacttaatgatattggcattatattctgtgtacaaaatacttagttgacacaaacaagatatttgcccagtaagagttagaatggatgatcttttgtgcccaaaagtgatttccctaataggggaaggtgtgaaccaggaaatatttagaatgtgaccacctctgcttattttaatctttgtatcacagatgaggaaaagttgtatagttgtttgccagtatgaaatgataagctgagcaggcactggaccctggcaaaggaagaattgtatagttaaacaatttgtggcagctttgtgacttcctcgaaaattggaaataattactcagtactaaatacaaatacaagcattcctgcccactctaaaagatactgtctaccatcttttctttctgtgcaatgtattttctgctgttagcatggatgtttgagggttgagctgttgataccagcaccttgttaaaagctaccgtgaacacaaagcatatgataatcttagaaaccaagttcttttttttttttttttggtagaggcagagtctcgctatgttgcccaggctggtcctgagctcaagtgattctcctgttttggcctccaaaattgttgggattacaggtgtgagccacca

SEQ ID NO: 29673 - DNA, 1050 bp, Homo sapiens
aacttcacttttatgattaccacatgcttttttttttttttttttaagatggagtcttgctctgtcacccaggctggagtgcagtgatgcgatctcggctcactgcaagctccacctcctgggttcactccattctcctgcctcagcctcccaagtagctgggactacaggcgcccaccaccatgcccggctaattttttttgtatttttagtagagacagggtttcactgtgttagccaggatagtctcgatctcctaacttcgtgatctgcccacctcagcctcccaaagtgctgggattacagacgtgagccactgcgcctggcccacatgcattattttttaaaaagattttctttataacgacaaggaaaataatgctaaaaaaccactctgccatcaatgacaaaaaaaaaaaactccactttctttgccttgcactcgtcaagctaaagggcagtatcaggctgagctcatggtatcagaggtctggggcattaatctcatggcaaagtcgcataaatggctgatggtggcagtatggtgagtatagagggcctagaaaagaggactatgtgacaactacatagtgcaaacaaactcagtagtgaaatttttatagtctgtcataatttaaaagtatttgtgtgtgtgtgtgtgtgtgtgtgtgtatctttgaggcgaggtcttgctctgtcatctaggctagagtgcagtagtgtgatcatggttcactgcagactcaaccttcctggctcaagcaatcctcccatctcagcctcccgagtagctggaccacaggcgtgtaccgctgcaccccagtattttttttctcctcccctgccccaataagttttttattttttgtgggaatgagatcttggtgtgttgcccaagctggtctcaaactcctgagctcaagcagtcctcccacctctgcctcccaaggtattaggattacaggtgtgagccactgctcataatccccttagccttaggtatattgtttgattttcacaacaactttttgcagtgtctgtatcttcaca

SEQ ID NO: 29674 - DNA, 1055 bp, Homo sapiens
ttcccagcaactctaactttcccttagtgtttaagctcctgaaagaatagtttacagtcattgctttctctactttctcatatcccagagactcaactgctttatggcttctgtcactacctgtcttcagaaactgccattgccacagtaatttgtgttctttttgttgcagatcaaataagccctctttagtctttatgctacttgacctctttgcatcatttgacatggttggcttctccctcagacttgaaacttttcctccacggatatctacgacttacctttttccggctttttaaactctacctttccagcgactccctttgccattcagagcttttgctatctttctctgcctacctcttaaattttgttactctccagcattcagctctggaggaaagaggctggtaagaagattgttgtattttacagtaggtttttgcatggtcatttgtttgggaggtaatgataggagcagaaatgaaaaatctttgagaagattgtgaaattggaaagtgtggagttctagaacagaataaattctagagttagaggaggtgctttttcatgaatgggtgtaccgtgtgttgagagagtggagtgagaaatgtacttctttgatctgtttcacatagaagcatgtatcatatagaaattcagtggtggccgggtacggcggctcacgcctgtaatcccagcactttgggaggccgaggtgggtggaacacttgaggtcaggagctcaagaccagcctggccaacatggtgaaacccctcctctactaaaaaattagctgggcgtgatggcgggtgcctgtaatcccagctacttgggaggctgaggcaggagaatcgcttgaactggggagagggaggttgcagtgagctgagatcacaccactacactccagcctgggtgacaagagcaagactccatgtcaaaaaaaaagaaaaaaatggccgggcgtggtggctcacgcctgtaatcccagcactttgggaggccgaggtgggtggatcgcctgaggtcaggagtttgagaccagcct

SEQ ID NO: 29675 - DNA, 1044 bp, Homo sapiens
tttgacaattttaggaatcagaaggatggtgagggatggtccaagatccagagtaggtgatctgagactaggaatttatgaattatcaactgagtcaggtttgaaagcaatattattatttccttatatctgtaactcagcctctttcctctttctcaaactcttcctacttttcttctgttattctcttcctattcttgtaatctttgttgtttctcattgtcttcattcccatgttttccttctcgtgtacctaatggaaacccaaatgacatttccattatttttctttggtccctcgacccaacatgcaaaatcaaatttattatctccacagataaaattcctcctcttttccctatttctattagcagaatactgttgtaatgactgccctggcttaaaacctttagtaatttttgacatctgtctctcctccatccccaacaatcaaacagaaacacattctatcttatataaatcctgtcttcattcattattaacgcgacaaagatttgagttcctgttctgtgccaggtacattgtatggtcgttcccttctttgcatttaactaccccaattcaggatatcaacacattatactttgcctaatgaagtagctttgtaacctccccccacaaccgcatatttcttttttccaatccagtctaactccactgccatattaatttgcttgtacttgaaccatgtgattggctaaactgtattgcccttttagaacatagttcacattttctcacatctatgactttgttcatttaagttatgtctccagcttcctgagggcaagaactttgttttatttactgtaatcctcaatacccagacagcacctggcatgtagtgggtagtcaatatttgttgaccagattggtcttgaactcctgggctcaagggatcctccccgcttggcttcccaaagtgctgggattatgggtgtgagctactacacctggccctctctagaagctttttctgatcttctgtgtatttatacctgggacagaaccctctttcctttt

SEQ ID NO: 29676 - DNA, 1060 bp, Homo sapiens
gaaatgaagggggacagaaatgatcataatcacctttaactattgttttttgagatggagtctcgctctgtcacccaggctggagtgcaatagtgtgatcttggctcgctgcaacctccacctcctgggttcaagtgaatgtcctgcctcagcctcctgagtaactgggattacaggcacatgccaccacgcctcgctaattttttttttttttttttttaagtggagatggggtttcaccatgttggccaggctggtcttgaactcttgacctcaggtgatccaactaccttggcctcccaaagttctgggattacaggggtgcctttaactattttttaaaccaaccacataggagagcaagaccttgattctaggaggctacaagtcctagccctgctgtgactgcagccttactttctctttatcctgaatcaccacgattcttctgtttgtaatattggcagatggtggatgtggtgatcccaagttcattcttggcaacttattttgaaaaatctgctgttttattcttcctgctatactcccatatcccttagttaactcctgtattgaagtacttagcacacatgacttgaatagggattttgtcataatcatttgtgtttccttagcatctagcacatggtcacttggaaaatatttgttgacacatgatgatcactttccaatgctgagatggtgtgattttgtgatttctccaatgaccttgacctagattgtgatactagtggtagtcttgtataggtccctctctgtgttgttcttcttcgtaggtgctttgttctcaggctctggaccattctcttgttttgggacattccagggaacaggagagaaaaatttgcatttaaaacaaaaggagtatgttacatcgatgttcctcattgccaggatcactggaatgttccagttgctatcaggatgaattcactgttggtaacagatgccagggactcattatatttttgttattcttcctcatttactgagatttgaccccctacctctgattgtgatgggaaagggatttcagtct

SEQ ID NO: 29677 - DNA, 1062 bp, Homo sapiens
acgcctgtaatcccagcactttgggaggccgaggcgggcagatcacttgaggttaggagttcaagaccagcctggcccacgtggcgaaaccccatctctactaaaaatacaacaattagctgggcatggtggtggccatctgtaattccagctactcgggaggctgaggcaggagaatcacttgaactgaggagacagaggttgcagtgagctgagattatgccattgtactccagcctgggtgacagaaccctgtctcaaaagagaaaaaaaaaaaaaagaaaagaaaatataggaccttttacactgaaaattataaaacattgccaagagaagttaaagaagacctaaataagtggagatataccatctgcatgatttgaaagacccaatattgttaagctgtccagtcttccccaaataatctaaagattgtgtcttccccaaaatctcagcaggactttttggggagaaattgactttctgaatctaaaattcacatggaaatacaagggacctataatagccaaaacaatttacaagaggaagaacaaacaaaattacttgatttcaaaacttgttataaagcaagagtaatcaagacaatgcagtatttaccagtcattggaacaccataaagagtccagaaatagatacatacatatatagtcaattgattttcagcaatagcgcaaacataattcagaaggggaaagtatagtctttttaacagctattgctggaacaagtggatatttgtatgtaaagaaatgaacctcaatcccagtctcatatgatacataaaaattaatttgaaatggtttgtagacctaaacatacaaactaaaagcataaaacttataggagaaatcatgggactaaatctttgagaccttgacataggcagatttttttttttctagcacgtgtaaggagcactcaccataaaagtaaaaattgataaattgcactttattaaaattaaagccttctgttctttagaagacaccataagaaactaaaaaggtaagccacagacttgggaggaaatatttacacatg

SEQ ID NO: 29678 - DNA, 1044 bp, Homo sapiens
cctcttccaccttctggtggctactggctttccttggcttgtggcagcgtcacttcaatcttcaaggtcagcatctttaaatctctctgcacatctctttctcctgcactgtttttgtcatatctctgcctccctcttctcttgtaaggacatatgattggacttagagcccacctggataattctttttttttttgagatgggagtctcgctctgtcacccaggctggagtgtagtggcaccatctcggctcactgcaacctctgcctcccaggtttaagtgattctcctgcctcagcctcccgagtagctgggattacaggaggccaccatcatacctggctaatttttatactttttagtagaggcggggtttcaccatcttggccgggctggtcttgaactcctgacctcgtgatctacctgcctcagcctcccaaagtgctgggattacaggcgtgagccaccgcgcccggccccaaaattcttaatttaatcatgcctgcaaagactcctagccctttttgctgtaaaaggtaacattcacagattcccggtattaggctatggatatcttttgggccatttttcagcctatcatagtctcttctctgctcgtctgttccacaggcaaaatacacccatctcattccaacatccccaaaagtctcaacccattgcaacatcaactcaagcccgagatctcttctgtcaccaactctgaagtttaaagtctcattatctaaatcatctgttatctgttcccaaaatacactggtcagacatgtatagtgtaacagttatagataattccggtttcagaagggagaaaatgcaaggaataaatgggttactggtactaagtaatttcaaaatccagcagggaaaatttttattatgtttcaaagcctgtgagtaattttcttttactcgagactctgccctctgagtctctggctctagcttctgctttcatagttatccttcctttttcttgaagagaagcatatatttgcaactgagtagagtttttgcccacggtgt

SEQ ID NO: 29679 - DNA, 1033 bp, Homo sapiens
tatgtcctgggctcaggtgatcttcctgcttcagcctcctgagtagctggtaccggaggcatgtgccaccacacctagctaataattttaaggttttttgtagagatggagtctctttgtgttgcccattgtggttcaagagatcctctcgcctcatcctctcaaaagtggtgggattacagacgtgaaccaccatgcttggtgaatctttttgaagctgtatgtacttataagatagttgtgagaggtaaattcagttacctgaatgtaaagcatttaacccaaaataggtatttaatacatgttaattttcatagtactcaaaaattatcctttgtagcactaaccacagttacaattaaatatgtaattttaaaatgtttttcttataagctttgtgatgccagggagcatatctgtcttttctctgccctattctcagcatccagaatagtgccaggcgtgaagtatagtagatgctcaataaatatttgtcaaatgaatgaacacccctttcctgattctgtcctcccttggcttaaaggacagtatcggggttgggggaggggggagggatagcattgggagatatacctaatgctagatgacgagttagtgggtgcagtgcaccagcatggcacatgtatacatatgtaactaacctgcacaatgtgcacatgtaccctaaaacttaagtataataataataaaaaaaaaagacagtatcctgaacattttggcctgctttgagaatcaatcaccgtgttacataactttggtctattaaagattggagctgggtaaaggggagggcaatgaatagaggaataacaatgaaagagaacagaatggtattcaaagtaaattataagaacatagtactctggactttctaactctctctaatctggtatccagtccccaattctaccaaaacagttttcattgtgatcacagctggcttacatgttgctgaacatgttgagtttcccttagtttagtaaaatgataactcttctagttactcaggaaa

SEQ ID NO: 29680 - DNA, 1048 bp, Homo sapiens
tcatgccactgcactccaccctgggggacagagtgagacactttcaaaaaaaaaagtaagggttattttcttttttgtccattgtttatgtgatcatctttatgagaagaaatcacttgaactaaagcttctatgcaagagcctttcactctttaaatttgcactccaggttcatgctctaaggttgtggcattgaagggaaagaggttgtgggtttttattctattttatttacttattctgtgttatttatttattttcatttatgagacggagtcttcttgctctgttgcccaggctggagtgtagtggcacaatcttggctcactgcaatctctgcctccggggttcaagcgattcttgtgcctcagactcccaagtagctgggaattacaagcgcctgccaccatgcccgactaatttttgtgtttttagtagagatagggtttcaccatattggccaggctggtctcaaactcctgacctcaagtgatctgcctgcctcagcctcccaaagttatggattacaggcgtgagccaccctgccaggccttatttatttatttatttatttatttatttatttatttatttatttagagagagggccttgctatgttgcctgggctggttgtgaacttctggcctcaagcagtctacctgccttggcttcccaaagtgttgggattacaggtttgagccaacacacccctcctatttttattttttttttagggacaggtgtctcactctgttgcctaggctgatcttgatctcctgggctcaagtgatcctcccatcttggcctcttaaaatgttgggattacaggcatgagccactgagccttttattctattttatagattcattgaactatttaacattatcttgttgatacttcctttccgttcagatgtttttttggggggttaggagtcctggaatgggaacagggaaccaagaacataatgtatcatatgctagtcatttgagataaatttaaagatttcttttacccagtagaagttcataggatgttatggttca

SEQ ID NO: 29681 - DNA, 1038 bp, Homo sapiens
atcctgataaatcttctgatataccagttataagccccaggaagggagaaggaaactaacattccttgatgcccactacataaaagctaggctttgattgtgttgctttaggatagggaaataggctgcaactagttaaataactcatttagggatacagaagttaacagaaccaggacttgaatctctgacttaaaagtatggtatacggttccttttaacatgcttttgtagaggtaaatatgaaagaggttagaaagttctacccatattatcattattatcattttactacatctattgcaagttactttctgtgaaatgtttcatatttgatttagtcactaaggcgatataataaataaagcttatctttataagctttatatatggcaatataataaataaaggctatctttatttatatattttatacttataaatttggtgatatttcctaaaaagtatggcctgtgggaacattcagtaaaaatggagtacattgatatatacagattccatatgaagcactttactaactttgttaaacaggtataaactttctttgagagtgcagcttaaatacttatttaagtgtatttaaaaaacgatttgtagatttacagccatttaatttacaaagggaaatttagaatttttaagttgtattaacaaagatcgttgtattatatttcgagaaaacactgtggcaagctcatatactactgtaagctccccaggggtgaggatatttgtttttcttcccagcttcaaaggcagttcttgggacatagcaggtgctcagtaaatatttcttgaatataagatgaacatgaacaaatatatatttactccgtgttcttgtgtgtgtatatatattcacataaatgctagggttgatagttgcaattgacaaacataagaaacatttctttactgagaaaaagctttggtcaggaggttatatttcaggtttttgaaagagaaaagagaaaacattgatgggttatggatgaagtggtataggcttggggagta

SEQ ID NO: 29682 - DNA, 1050 bp, Homo sapiens
cagtccctgcccccaagggactggcaacagaaggaatccctatggtaagtaaagggacaaactgaaaaaccattaaagcaaagctcctcctataacaatagattctgcaattttataaaaaatcacaacttcttgttgcaggcaaactccaccccaccaaccccaggactggatcctgccccagtggtagcagagttcttgacttgcctctgacagagaaaatgacgagggggtgaggatccagtggtcctgaagataattaattttctcattgatacaatggagaaaacagaaattaatatattaaatatcacttttcagccaggtgctgtggttcatgcctgtaatcccagcactttgggaggccgaagcgggaggatcgcttgaacccaagagttcaagactagcttgggcaacatagtgagacccccatctctacaaaaaaaatacaaaaattagccaggcctggtggtgttcctatagtcccagctattcgggaggctgaggtgggaagattacttgagccctggaaatcatggctgcaataagccaagatcgtgtcactgcactccagcctgagcaacaaagagagatcctatcaaaaataaagaaagaaagaatatcacttttcagccaagttttcagaagatgttgagagtcttacagttgttagaatgaaagcagtagtagccattaaactgcgtgtaaggacagattgtattaaactgtgtataaggagagattgtatttattttatttattttattattatttttgagacggagtcttgctctgttgcccaggctgtagtgcagtggggtgatctcggctcactgcaagctctgcctcctgggttcatgccattctcctgcctcagcctcccgagtagctgggactagaggtgcccgccaccacacccagctaatttttttgtatttgttagtagagacggggtttcaccatgtagccaggatggtcttgatctcctgaccttgtgatccacctgcctcggcctcccaaagtgctgggattacagatgtgagccaccat

SEQ ID NO: 29683 - DNA, 1443 bp, Homo sapiens
atgcgtataagtatgggtaaaaaggcaagtcactagtttgtgatgaaaagtgaaattttcatggtaaaataccagaatgtatgtacttgtgtagtgcgtacttctaaatagagaaggcttataaaagtaaacagattaaggccaagtgcagtggctcacgcctgtaatcccagcactttgggaggccaaggtgggaggattgcttgagctccggagttcaagaccaatctcggcaacatagcgagaccccatctctataaataaaacaaaagtaaatgcattaaatggaaggttgacagtttatcataaacctacaaagatgtttgtaaaattttgttttagtcattttctttgaactcacatcattataccatcttcatttttgtatggagctggttcaattctaagtcctctagactttccctgcctatctttgttgttgttgttgttgttgtcgaagacagtaaaataagtgtttttcaagtctaaaaaaaaaagaagaaaagaaaactgtcaagaactgctattctgaaactctaagtctgttttatccctgcttaaaagctttcagtatctgttccttgcatgcagcttggcaccttcagtataccagactcctgctggtatacttttataggataaaagcctgacatatcttatctgctgtgatacaaattacctcaagcttgatctttactgatcttgactgcagacaccacagcacgctgagcccttgtaacaggtaggctactcgctaggatgcctgtgctcttccacttctagtaactgagttttacgcttaccaagagtgaactgtttattctcaaatctgcttatgccagttgcatctgttactgtagggaaagcattatggtatgggtgtacttccatgccaatctgtgagtctttgactgtaccaagccatgtagtaaccccattcctctacagcaactgtggtctgtctgacaacagtcttactgcttatttcatcttattaactcccattcatccctttattctcagctacctcttcttcaggaatctttccttgtttcctgtacccaccacccctaggttttattctgggttaggtgccctttctatgtgctccaacatggcatctacctctgtcttagtgtttattgtctaacaataagtctgcatattcttcttcatcttttgctagacagtaagctccttaaaggcagagattacatttttgttatttccacatccccagtgtcttagcacactgcctagtacatagaaggtacttattaaacgttgagtgaatgaattaaatttaaaatactgctcctcctggagtcttctccattttactaaatggcagccctggtcttccagttgctccaccaaaaatcttgaatatatcttcttctctctgaccccacctccaatccatgagcaaacctttcttcttat

SEQ ID NO: 29684 - DNA, 1032 bp, Homo sapiens
agagtatcacgactcaaagaactcaagtttgagatttgttcacttggggaaaaaaattagaatagttcctgtacagaaaaagacttgttttttacataaattacaacaaatggcaatctagtgggatcttctatacttgagaccagttatttgtaatactttgattttaatcattttagattagtttatatgtatttgcatttgaaagattataacttacagggactaactcatataactttccatgaaacttctaattcatggactatatgttgaaatcttttgctttttaaattgtccaaagcggtttatttgctgtgtctgccatcccattacccaccagatatataccacccctgtgttactctctctgtcctgttcatctttctaactcttagtgcaatttaggattacagcagactcccccatacctaacacagctggactggtatagtagggcagttagctttcattttttacttttttccacttgtctaaaatttttttttcagggctcatgaacaatttttttcttttttttttcagggctcaattttaaaaagtcagttaaagtaacacatataataaatagcctactaaccttaattgttgtattttaactttaaagttcactcttccacttttttttttttttttttttttgagattgtgtctcactctgttgcccaggctggagtgcagtggcataatcttggattgctgcaacctccacctcctgggttcaagcaattttcctacctcagccacctgagtagctgggattacaggcacccaccaccatgcccagctaattttttatatttttagtaaagatagggtttcaccatgttggccaggctggtctcaaactcctgacctcaggtgatctgcctgcctcggcctcccaaagtgctgggattacaggcgtgagccaccgcgcccagcctaaagtgttttcttgagtgtgtgagaagggggtaggattacagttgacacataggagagtctacgggtctgtgttgactgtgagca

SEQ ID NO: 29685 - DNA, 1025 bp, Homo sapiens
agggaaatgttttctttttcagtgtctgagagagacagaaagaggagttttcttctgaaaaattaaatacttctactaaagcatagtagaagcttgaacattgctaatcctaatagattaaaatattgtatgtattcgttcactaaaaatctgatttgatcgattgctaataataaacttttgttcatttaaaagttgtgactcccggccaggcacagtggctcacacctgtaatcccggcactttgggaggcctgaggcgggtggatcatgaggtcaggagatcgagaccatcctggctaacatggtgaaaccccgtctctactaaaaatacaaaaaacagtcgcgtggtggcaggcacttgtaatcccagctactcaggaggctgaggcaggagaatcgcttggacctgggaggcggaggttgcagtgagttgagatcgtgccactgcactctagcctgggcaacagaacaagactccatctcaaaaaaaaaaaaaaaaaagttgtgactcccagcctgggcaacaaagtgagacccccatctttacagaaaaatttaaaaattagccaaacatggtgatatacacctggagggtatgtgcttgtaaccccaactacttgagaagctgaggtgggaggatcacttgagcccaagagttcaaggctgccgtaaaccactgcactccagcctagatgacagagcaagatcctgtctcaaaaaaaaaaagttgtgacttaaactatgtttgtgatgctgtaatggcctttttcaaacttttcagggaagcgtgacagcaatgacagtgttttttcccctggatacagctagacttcgacttcagggtaagtagaaatcatactcctatttgtatggtgtcaggaagcaaacattttcgctagtaatttctttttttttttttttgagacggagtttcgcttttgtagcccaggctggagtgcgatggcatgatctcggctcactgcaaccttcgcctcctgggttcaagcgattctcctgcctccg

SEQ ID NO: 29686 - DNA, 1139 bp, Homo sapiens
aattttcttatttaagttgacctagctcctagttatttatcatttacatatatatatatatatatatatatatatatatatatatatgtaatatatttttttcttttttcttttttgagacagagtctcttttgcccaggctggagtgcagtggcatgatcgcggctcactgcaacctccatctccctggttcaagcaattcccctgcctcagcttcccaagtagctgggattacaggcatgtgccaccaggcccagctaatttttttgcatttttagtagagaggggatttcaccatgttggtcagggtggtatcaaactcctgacctcatgatctgcccaccttggcctcccagagtgctggaattgattacaggcgtgagccatcatgcctggcctttattcaaaatttttttttttttttttgaggcagactctcgctttgtcacccaggctggagtgcagtggcacgatcttggcttactgcaacctctacctcatgattaaaatactgtatgaagccaggtgcagtggctcacacctagtactcctgcactttgggaagttgaggccagagaatcacttgaggccaggagtttgaggtcagcctgggtaaatatagtgagactctgtctttacaaaaaataaaattatctgggtgtggtgacacacatctgtagtcctaaatacttggaatgctaaggcaggaaaattgcttgagcccaggagttcaaggttacagtgaactatgatctcgccactgcactggagcctagatgacatagcaagacactgtctctaaaataattaactaattaattagttaattttttttgtaaccattattagatcagcagtctgaaacttgattttatgcctgtaaatctataccagtgggtatgcatctggattgagaaccataaaccaaaatggaagtttcatgtatatagtttcatccctaaatatatgtttgtggtttttatataggaccttatgagtggaaaaacttgttgtttgcttgttttttttcattgataatttgtgtcattgtgttatcttggatgagcttaaagaattgttggcaaagagattgttcctatttaatttaaaacacaagcaaactactatttcaaagacaa

SEQ ID NO: 29687 - DNA, 1022 bp, Homo sapiens
ttgtttttctatatagtccttttatataaaaatctgttctcattattaatcattggagtagggaggaggcagtggtgggttttcagctaaccctcttgatccagtctttccagtgctactaaatttataaaactgttacttggtgttactcatttgaattttctttttttttgagaaggagtttccctcttgttgtccaggctggagtgcagtggcacgatcttggctcactgcaacctccgcctcccgggttcaagtgattctcttgcctcagcctcccaagtagctgggattacaggtgcccaccaccacgcctggctaagttttgtatttttagtagagggggagtttcaccatgttggccaggctggtctcgaactcctgacctcaggtgacccatctgcctcggcttcccaaagtgctgggattacaggcttgagccaacgtgcctggcctgatttgaattttcatatgccagttcttgaggtagtaatagaccaatgagctgtttgggctgactgttctctttatcttggtgtttcacttcaagatatccagataggtaggcaaggacttctatgtttaggaaccttcacgtgtctatttaaagctggcagaaaagagggatgaaggtggcccagtgtttgaagaggtagcttccaggctagactttttctgtctggagatgccctgtctatgcagtacccttcaaagaaatgcagtaccggccaggcacggtggctcacgcctgtaatcccagcattttgggaggccgaggcgggtggatcacctgaggtcaggagttcgagaccagcctggccaacatgatgaaaccccgtctccactaaaaatacaaaaaattagctgggcatggaggcgggcgcccttaatcccagctactcgggaggctgagacaggagaatcgcttgaatccaagaggtggaggttgcagtgagccgaaatcccgccattgccctccagtctgggcaacaagagcaagactccgtcttaaaaaaagaaaa

SEQ ID NO: 29688 - DNA, 1016 bp, Homo sapiens
gtgagaggaacagggcctgggctcagaagggggatataaggaaagcagaacccagtgtgcctgtgtcagtgtcgtctggagaaaaagctcttgatgatatctaatagctgttattcacatcaaaactctctaaggccctccacctattttctcgtttatgggaaatgaaacattcagagaaaggacttgcccagtcacctcagatggctcagctggaaactagaagtgagatccgacatagtggaaatgtgtagcatacggtgagccactttccaacttagccattaaaaaaaaaaaaaaaacaaaaactagcaaatgctggtgaggatactgagaaaagggaactcttgcacactgttgatgggaatgtaaattggtacagccattatggaaacattatggaggttcctcaaaaaattaaaaatagaactaccatatgatccagcaatcccattactgggtatatatccaaaggaaatgaaatcagcgtgtcaaagagacctctgcatatctgtgttaattgcagtgctattcacagtagaaaaaatgtggaatcaatgcttatctacagatgaatggataagaaaaatgtaaatataccaatgggaattttattcagctgtaaaacagaatgaaatcctgccatttgtggtgacatggatgaacctggacaataaatattatgttaagtgaagtaagccaggcacagaacaaacatcacatgatcttactcataagtagaatctaaaaaaattgattttatagaagtagagagtagaatagtggttaccaggggctagagatggtaggaaggagagggggaccaggagaggttagttaaagggtacaaagtttcatttaagtcaggtactgtggtggcacagggctgcagttccagctactcgggaatctgaggcaggaggatcgcctgaacccaggagttcaaggccaacttgggcaacacagggagaccccatctctttaaaagaagaaaaagttagacatgaataagttct

SEQ ID NO: 29689 - DNA, 1041 bp, Homo sapiens
aaatcttacactgtggtgaagggatgttttttttgtaatgctgcagtagagttggagtacttagttctcttgttgtccagtatatctaataagtgtttttcatattatttccacgtaagggaaataaggtagtacttttctttttatatttctatgcttaaaattctctttcctagtcaaaaattgcccaaatctgtgtttgctttctgcttgctacatttgtctcccttacttttcttgagctaaagacaggctttttccaccggcatcatcactgctatcatcattaacagcgtaattatacaagcatatttaatgctgagtttaatttaatatgtaatacatatggtaattgtagggtaatacccacaacaactgtagtttcttacttggccaagagaatgcttatttaagtgttagacttccattctggcaaaatcttgccttatcagaagacattggaaagagggattccctttggtgtttggtcttctacttagaaaaacctattgcagttagtttatcttgtagtattcatctttgtattctgaagataaggtttgaattaaattgatacacacagaggggaaccgattttttttatccaatgtgaattataaatgagataatccacagttattcattgtggagttgttgagactatgaaagactcattgtctttgtattcagctcttaaatagtgtaactatatccccacctctgcttgctttctttccctcccctccaatgataaagaaaatgataaattttctgttgtgcattcaattcttattttaaataagactaagtataggcattgtacctgacattgctacgtttctaccagtgtttcaatttaaagtgctagtgtttaaaaacattttcaagggataaggccttctgtactttgcttatttgaagaatcagtggtaggagcagtgaagtaaattctatggagtacatttctaaaataccacatttctgaaatcataaataagtttattcaggttctaaccctttgctgtacacaagcagacagaa

SEQ ID NO: 29690 - DNA, 1024 bp, Homo sapiens
aaacccgggaggcagaggtggcagtcagccaagatggcaccactgcattctagcctgggcgacagagcaagactccgtctcaaaacaaacaaaaataaaaaacagtgttattactagaaaaaagttaatccaggaggtagcaaagtctgatttacagccttgtttttaaagagataattagaagctataacttatgtcttgttgcagtctggttagaattttcagactcttcagactactttgtgcttagtggcacccatattctttgaacctgtactttttgtggatgaaatactgtgtcagaatatttgggagtatgattagtgtctattcattttttattacaggtggctttcctgggggaatgcctggtaattttcccggaggaatgcctggaatgggagggggcatgcctggaatggctggaatgcctggactcaatgaaattcttagtgatccagaggttcttgcagccatgcaggtaagacttggaagaaaaactttggactttgtatcattaaggcaattctttcataattctgtgtggagacaaaggttactctcatagctattttttatttatcacagttaccaaatagctaattatgcaagagtgacatttattttctttatgcagagtgagtaacttaaatttttaaaactaggaaatacttagcaatcggcaattatatccagttgtccttttctttgtatcaaaattgtgcttttttcatcatacagttcaaatgacttaattcagcttgattttgatacttcaagcactcatctaaaccccatttaacttaactatcaccaaattacaggtctaaataagagatggaatttaggataataaacttactgacccagtaggacactttttaaatactaatgaaccctttcttttcaggatccagaagttatggtggctttccaggatgtggctcagaacccagcaaatatgtcaaaataccagagcaacccaaaggttatgaatctcatcagtaaattgtcagccaaattt

SEQ ID NO: 29691 - DNA, 1022 bp, Homo sapiens
actaccaagaataatgcccactgagaatccagtttggaaaaaatgtttgaagggggtatgaagtatatccttcagttcagtattgccatctactaggttattttacaattttttcatggtcttgcatggacaggttgcatggacagcacttatttcttcttctattatataatttatttccttttgtatcaaaggaggaagaagccagacgacagtcaggagctcagtatggctcttttccaggtatatttaaagaaaagttaaaactgttttgttctattatacagtgatattttaatataatacttaatatttattataaagtgatattctgattttgttctcttatacagtgatattcatgaagaacctaggtaaaagaaatgatggaattattaggcataaaaatgatgttttttgtacagtgtaaaaatagcgtatttttctttcaaatgtgatcagaaattgctagtgaggcaaatctttgaataccagaggacaggactaacacagagatagaagagacggaaaaggcacgcagaagatttattgagtacttcctgattacgacagtgtggaatttatataaagaccaggacaagacttaattttttgttttttaaacaactgtctccagttgtttaatggtaactagctttctcttaaggaaagtttttagaggctacgtatgcttatatgtcactggttagaacttagttgcatgatccgatgctagaaaatctagcctttattctgaaagagtatgtgcacagcaacagaaaacaaacctagaacaaatattgaggatgacctgctgtttgaagaaaaagcaagaaattaaatttagctcatagtttacttcctatgtaaaatataaataatcttattgtcagatatctttgttttagaaagtgactgctaatgttgggctagtactagagagaattttctgttatgtacattttatttagatttgacaagctttgggtcagtaatttcgttacgggtaggcactaattttt

SEQ ID NO: 29692 - DNA, 1014 bp, Homo sapiens
ataaagcaagaagaccttgtggaagttaagaagtttcaggctttccggccaggcgcggtggctcatgcctgtaatcccagcactttgggaggccgaggcaggtggatcatgaggtcaggagttcaagaccagcctggccaacgtagtgaaaccctgtctctactaaaagtacaaaaagttagccaggtgtggtggcatgcgcctacgtagtcccagctactcgggaggctgaggcaggagaatcacttgaacctgggaggtggaaggttgcagtgagccaagatcacgccacagcactccagcctgggtgacagagcgaggctgtcttaataaaacaaagaagtttcaatcttttaaaaataataatattgaatcccaaaagtagaacattccagcttttaaggatgatttttatctaaaattgttggttaaaataattttaatgtgtttacatggtaaatccttcattttgtgggaagttcagctgtcaagaatttactctcagagattttaagatagtgggaattgtattgaatttaattatttactgccagagagttcatttggttttctgttttcttcttaaaatagggcaaagttgtaactttgtcagcaaagtgtaaacaagctaaagtgacagttgaatatgaatctcttaaatgtattttattctctgaggaaataacatccagagcatttatttgatactagtgtctggtatacatatttacatttttccctcttaatccctatagcaatttgataatattaaatatttcttcctctcccattttatggatacagaaacttaaatatactgtggcatatacttggggtatgagttcccagtctctgccttcccacggcagacatccgtaataatactcttcctactgaattcagctgtccgtctgaaacctaaacactgtgtatctgatagaaactagcaggcaagaattgtcatgcacttagaaacctgtttgttaatctttgagcttaattgtttgagattat

SEQ ID NO: 29693 - DNA, 1021 bp, Homo sapiens
ggttatcaaattaagagaaatgtgaatgaagttttatgtggtcctatgtgagaaaagtctctacactggtcctacttgattgtgtaacataaaaaagcctgtagtgccaaagtctaagtggcagtttttggccagaaagtagcttgttctaagccttggaagcattaattgaaatttcgtacctatgagttggtgttttcttccattagttaactagaatttgggatgggagaaactaaatctagcttatgagtaaatcctcttttttttttaaagtttttattttttttgcaacaatttctagctcagaaaaattgcaggtatggtacaaaggaattttttctgaactagttgagagtaagctgccaacattataccccaacaccagtgagtgtgtacttcctacaaagtctttacaatgcaaatactaaacttaggaaactaatgctgatgcatttatgctatctaatcctcagatttatgtgttgcatttagttgccatgtcacgtagtctccattctgaaacagttcctcagtctttccttgactttcatgatcttaacagtttgaatgttattggcaagttattttatagactttcaatttgggtttgtctggccttcccttaggattggatttagcttaatacatttcttggcaggaatatcacttcccaaagttagtgtactgtaagttatactatgtctggatgtcactctaaatacattcctgacgctgcattttgaaacttaggaagaacacagtgtaagaaaccctgtgtcttcattaaaatttaactacaaaggactggtgattactgtgctcttttgcaaagtagtgtttccatagaaaagaattttgtggtgtctatatgcctgttccttatcattaaatcattttactttgctgaattgcagattaggatgttttggatcatataatctttatgtttgacatgggagctattccatattaagggtactgtgtaacattttcttctatcatattaaacataatggaa

SEQ ID NO: 29694 - DNA, 1028 bp, Homo sapiens
aatttttagctccccaccaattgtctaactactggaagacttacttatatgtgaaattctgagaccatttaatattactatgttaatagtaactttatgaatattggtaagaagtctattttgcaaactcctcaaccgggaaatgtcaggattaggaattgagggctaggttttagtcgttttctctattgaacagcttgatgatccaaaagccttaagatatttgtatgcttttatcctaattataggaaagaacctgcagttaataaattctttctaaaattccaggtaacgtagacaagtatcacaggaagaaaatagccggctccaagagctggctccactttacattaagtggatacaatgtttttgtttcattcttactagtgaggaagaggagacacagaagaacaaattaaaagcatgtgtaagaacagtgtcctcctgacttgtgctggagtgattgtgcctatgtagagaattccactttaaggtttgcaaaatatttgtcaggcactactatctcccaaacaaaaacaagaaatagtcatataccttattttaacataggtaattccagtttttctttctgattccacttacattctttagccatcctgagttggctgaagtatggggtgaagcatcatggcatatgtagggactttattctgaacttaaattgagatatttaatatagaagctttttctctttatttctgtatttaaactaagatttttataaactctgaggcctttgcgtttgtgtcagtttctctctctgccttcatcagtctgcagttcgagattgtggcagatggggctgaatgtggagacttctaggtccagacgtcttcctaggcctgatgctactgttagggttactcaagttgaaaacatgtgtttctcacaggcttagctgttgaagaacagtacatctgcctatttgctataattgctagcattgtttatagcttagttttatttgatataaggatttattagtttaaccttttaaattgcacaaa

SEQ ID NO: 29695 - DNA, 1047 bp, Homo sapiens
gattggactctagtgggccagtcctatgtggccactggcagccagtaaggattccctggcctatgtctgctggaagggcccttggagagcctggctgagggggccttcattctggccagctctgggctgtgtggcgttgggtgcctggctctctgagcctctcgcacctcccatccccacccacggtgtgcagaaggcagagggctaatgtctctcttgctgagtcgttgtgcaaattaacaaaaatgagtctggcaccaaaatggcccccacacttggaaaacaggccaagaggcatccaccgacctgctgacccctctttccccgcaggcccaacagcgccctggaatcctgctccttcgcccgccacagtctgctgcagacgctgtacaaggtctagactcaaagcctctcccatcccttggcctggaccagtgagctggggagggactcggatgaactgaggcgcagcctacgccattgccttggacaggactctggccacaggcagggcgggtctgtgtcccatgtgtcctgtcagtcccctgagtatgtgtgtgggtgtggcgcatgtgcaggtctgtgcctcctgtcgggatttgggttttaacgtcttctgctggcccagccctgctctgttgtggggagttggcccccaggggaaagggctgtgagctgctccgccattaaactcacctccacctgagggcgctctgctgatctccgcctgggccctgatggccgtccccacccacctgccttccggcccggctccctggcggagccagaacccagggagttgcccgcgtgctgtccttcccctctgtgttgtgattgggttgtttcctgccctgcctggggctgcttctcgtcaccaagccctggtcctgcggcagctgtcacccctaccatccataccactgtgctgaccgctcagcctgaagagcagagaatgccatgggtgggactgtgggggtcggatcgtggggttgttggcagagggcaaccctgggccccacaccgtgtggacaggcagacaccagattg

SEQ ID NO: 29696 - DNA, 1045 bp, Homo sapiens
atttaaatgttttcttcagcaaacagtatcctaggagcattgctcatacgggccggaatgtcctggctgcccatcgaggctgtctgtagataccctttgcctgcttcagtgccaagtgaacatcgcagagatctgccttgtgtctccctgcacccctggctgcaggggagctcctgctgcctcctctggagctggtgggggcctcactgccatccttggatccctccctgccgtcagcctgctgtcctcagtgcactgggaggagggggtgcgctgtggttgtgttgagccttcataggtgtcctctggtgggcttagaatgggggttcttaatcccccccagtatgtggatagaattcaggggtctgtgaacatggatgaggaaaaaataacattattatttattactaatgtagctaaaatatgtagtgtgacctttgattataaatgtagacaataaacctcacagcattagaaaggcctgtgactacccacataacaaacaagcacatgtagtccctgaacccaaaaaaaaaaaaaattttattgaggcagggtctcgctctgttgcccaggctggagtacaacggtgcaatctcagcccactgcagttgaagcttcccaggctcaagtgatcctcccacctcagcctcccgattagctgggactacaggtgtgcaccaccatgcccacccagttaatttttgtattttagtagagatggggtttcaccatgttagccaggctggtctcaaactcctgacctcaggtaatccactcgccttggcctcctaaagtgctgggattataggcataagccactgcgcccagcttaaaatttttaaaaaaataaaaagaaaatcttgtgactttatccccagtggaaatcacaggtatttcatatgaagttatagttactgctgatatatagaaatatttctcactacatcaaaattacagtaatagtggacccacccctagatcttgttatttggtgcattaacaagaagtttgtatatcactacagcatgcgtttggagttttt

SEQ ID NO: 29697 - DNA, 1031 bp, Homo sapiens
aagttgtgcactggtgtgtccaggggaggagagggagtgtactgaactcttactggttgtcaggctctttctgctacattgtctccattatttgtcccagcagctctgtgaggtatcattgggcctattctaacaatgaggctcagagatcatttgcccaggagcaagctcccctgcactttccatgtttgtattgggcatccctttgtgccctgccctttctttctcaggaggggatgataggtaatgaggggccacagttagtgccagtcccaagatacagcctctgactctgacttaatatccggtgttgtccccacccttgcccttaacccccatgatcccaggcaggcctgggaatagctgcagctttccccagagctgaggctctggtggagctgcattaaaacaacctgggccctcttgggagatgctggttcatgcaaccagatgtacctgggagagggatggctgtctgtgtgtatacaggtattgcaaccacagaaaactaggaaccagagagcagaccctgtcttttcatcccttgtcaaggcttggctgccactgaccaaccctgaatcacctggcacctgcaagtgaaggcacctgcatcaagtgaggcctcctgggattctggcccaaccaggggaactggtctggacatgcctggttgtcatgttgtgtaggcagccttgttctcctctccaggtcggaggctgcttgagtccttgggtagctgggagcgtgctgatgcatgttcctaacatctccataaggtctaacgtttatagacttcctccctgtgcatttatcactttttttttttgagatggagtctctgtcacccaggctagagtgcagtggcacgatctcagctcactgcaaacctctgcctcacgggttcgagcagttctcctgcctcagcctcctgagtagctgggattacaggcgcccaccaccacacccggctaatttttgtatttttagtagagatagggttttgccatattggtcaggatgctctcgaactc

SEQ ID NO: 29698 - DNA, 1048 bp, Homo sapiens
cccgcagagccacctcccagcaggcccacgcccgcgggggccccgggctggcgccgctgtccctggaatcgatgtgagtcactgctgacgctttgcaggagcatgcatctcacctcagaaagtctctgacgttgctgcggagcggggagaggatgtttctctattagccctttgcttttgctctggcgctgatcctttgctgaccttggacaaatcaatttacgtttctgtgctccagtttcttggtttataaagtgagtgtggaggggtgcatctctgtctcgctctctcttggactgaggaatgggcccccgttcagctgagaagttctgtccctattctatctggaggcttcaccaccaccttttaccctcaaattgtcccatctcagaactgcaagagatgctggggtttcaggttaatttttttgttggtttttctttaaatttttttatctttttagagacggtctccttctgtcacccaggctggagtgtagtggaacgatcaccgctgaactgcagcgtcggcttcctgggctcaagcgatcctcccacctcaacctcccaagtcatggggactacagatgccatcacacctggctaatttttaaatttttctgtggagacagggtctcattctgttgcccaggcttgtctcgaaccctggtctaaagtgatcttcccgcctagcctcccaaaatgttggaattacaggtgtgagttattgcactgggctggtttctggttaatttattttttgaaacagggtctccagaagtacagcagcaagatctcagctcactgtagcctccacctacggggctcaagtgatcctcccaccttacatcccaggtagctgggactgcaggcacctgccaccacacccagctagtttttgtatttttagtggagacagggtttcggcatactgcccaggctggtttctaactcctgtgctcaatcgatccgcccacctcagcctccggaaatgctgggattgcaggagtgaaccattacacccgactctggttaattttttttttttt

SEQ ID NO: 29699 - DNA, 1005 bp, Homo sapiens
tccccttaccgggcatgcgtattgcggccagttgggccttcgcaaagtgctcagggaagtgtagtgtgcagggaaagtaggtcactcctgctatcgcctggtccggaggtgtttgaggactacaattcccagagtgcagagcgggccctcaccgcccgcctctccgcctacgtttgggttgagtcgagttttcctagctcctgaggaacatggagtgccctagaaagggtcttcatagccgaaaggggccttgttgtcagacctaaggttgaccggtctgtgtctagggggagatgatgagagactgggcgcggtgttgcagtcagtcagcaccagtcctggaagcctttcaatacacacccgcctgtctgggccgctgcctctgggaccagcgagttggggcggatcccgtgtctcaccaaggagaggagctgcctgcgtttggctctcactccccggacagcggcagggcactcgcatccacccggtctgtgacacctgctggcccctccacacttagttgagtcctgtagtccgtcattgtaggacagtttgcacatttaaggcttagaggtgtctgagtatctttttgggtttggggctcagtggattccatcaccattatccctccttttcctctttgaaacagaattttctttctgaaaaaccttccggccgggtgcggtggctcacgcctgtaatcccagcactttgggaggctgaggcgggcagcggataacctgaggtcgggagttcgagactagcctgaccaacttggagaaaccccgtctctgctaaaaatacaaaattagccgggcgtggtggcgcattcctgtaatcccagttactcgggaggctgaggcaggagaatcgcttgaacctgggaggcggaggttgcggtgagccgagatcgcgccattgcactccagcctgggcaacaaaaccgaaactccatctcaaaaaaaaaaaaaaaaaaatcttctggctaggcagtgactcacgcct

SEQ ID NO: 29700 - DNA, 1051 bp, Homo sapiens
aagggtgaaacttttcattgactttgctcacttcgggccggggcgcgggaaggtgcgggttgttggctgaggcaagccgtggctcgggcgacgcggggccaggagggcaggaccgtctgccggcgacagcccataccgtctgccgttgcgcgacacgaaccaccctccgatccgccatccccgcgtcgtcgccgctagtccgcccgcccgccctcgggccccccgctgccgagcccgacctcctaagagctgaaagaaattattgagagtcatagtccatagccccctgcttcgtcccccaaccctcaacgacgaaaaggacttcggtcccctggcccggcgacgcccgggaaggaaaggagagcgacctccgccccgcgctcaggccaccctggagggagaagccgccccgcggccggtagagcgccccgccgccgcggagacccgagtgagtgagttggggggcgtgcgggcggggggcccgccccgagacccagccggccggactacctcttccaccccgccccactcccgctttgctggactctccacgttgctgccgctccctccccgcctggccagcattttctttccccatccagcttccctccagaccccactttccccagctcctcttctcacgccatctgtgctcctggggtgcccaagagctcctttttctcccagttccaagagtggccctctcctgggtggggtgcatttcctcccttccccgcctcccccggttctttatatcctagctactcgctagatcttccttgttctccaaagaaacataactccccccaccgttaaataaatccgaggaaggaaggggatccaggccttgtttttctgcttcttttcccgtgtgcagggaaggggggtggtaattgttaatagactctatttctggctctgtggagcctgaagggtggagggtggacaccccctttggcgacgggacaggtcagtggagattgtccttgggccactgagccagagttcaccgtttcggctgagctctttatactcttaagtgttttaatgg

SEQ ID NO: 29701 - DNA, 1084 bp, Homo sapiens
agcatggtacttgtattttggtgctgtccctgtaagtcatccagaggtatcccctgtagggtgtctagcacatagtaggtgtttgttaattacttctggtctataagcagtgaaagcatgataaggtaacagcagtgaagaaaagtaacaaacagttcctaaactagatacaggatatctgtttaagccatttaagacagcattttcttgaatttttgcatgggtctagctagagttcttatgtagcgtaagcttgcaaccagagaatgcttaataaatgttaattgctgtctgactcctctgaatgtggtgtgtgaactgatacctttggatcctcatgcctcattctgtccctgagacttattctagatgtcacttcccctacttcacattatacacgaatgttctgaggacatttgagatggaatctagctcacattttcagcactagtttccaaggaacacaaagaagtccagtgacatgatccaggctctcagccttacagatcatcatgtagattaagtggccgaggctctttcctatgcagaaaccttcctacaaccaaggtaccccttgttattattgtcttcctgcaactttcataattgataagggaattagacaggtaagctaagctaggtattctcatttataatttttcaaagccacaagaataaccaggagacagggatgatgtctatggacattgctaccagaggactgatttgtaggttcttatggtgccacatcatgtaatccccttaatcttgattcctttattccttttgtttaccattttcctcagttcgcccaaccagaaaataagaaaaatagcactaacatttatgaagctcttaatatatgcaaggtacttagctgaacattgttttccaaaagttctgtgtgatacagatgaggatgctaaggcttagagatgttaagcaacttggttagcccaaggtcacgtggctaataagtgacagacccaggactagggcctaggtggtctgactctttttttttttgagacgcagtttctttcttgtcactcagactggagtgcaatggcacgatctcggctca

SEQ ID NO: 29702 - DNA, 1048 bp, Homo sapiens
cagcagcgacaaaaactcgcgcgagagcaagacgggcctggtgcaaggattgtaaactgacggaagcttagagaaccaatcacagcgacgtggaggcaggaacaatgggggttaaaggtcggacggaagttcccgaagcttccggtggccggcttagttaggagctatggctaaacatcatcctgatttgatcttttgccgcaagcaggctggtgttggtgagactgcgccctacccctggctgtctgggcaggggtggtattaggagctggggggtcgggggttcccgtctcttccttaggggcttgcctcgcaggcgccacgtttcccgcctctcaggcgcggggtgttgtaggagcgcgcaggtttgtggcctctgatgagaagagggcgggggtgcgcgtgctgggagccccaggcaggtatcggggggtggggtctgaaccaggtccagagaaactctgagcttgcccagggcgttggaggagattcaggagggtgcttggatgtaggtttggttcatatggaaatttgtaatgataaaatggctatccgcaggtctcactcactgcagtccttactcatgtccctacccccagctcgaggatgtacttctcctctttctcaaaacctttattctaattgtactttttaccatctttcatcttgcagccatcggaagactgtgtgaaaaatgtgagtggaacacaccgtcccaacaacccacccttcccactcccagttttctgtggaaccagcaaaagtgccacaaagagggctttgagtagatgtgcctggaagtatgtgaacactgaatgctgcactttagccaaaggcccctctaactccccactgccgcttgcacatttaacgctgtatctctctagttttcaacgggaagaatcgccagagtagcatgacccctccccaacacacagcactttgccagcaattatacaggcttatcatctccgaggtgcttttctaagctcttcacatatgttaattggtaaacttttgtatgtgttgaggggcttgagatggacac

SEQ ID NO: 29703 - DNA, 1048 bp, Homo sapiens
agggacatagtggtggccacaggtacccccctacctggtcctcctgggtctgtacctcagggcaaataactctccctctctgggtttcagtggcctcatcatgtggaaagggttgttatgagaatttacggagagactgtaggaaagggatttgtaagcagcagcccatttgttaaggggccaagggtgcttatctctgtttttagaaaagtagatccagtccataggagacaaacacccctcctgcccagtgggccaccttccagatgttctggatccaagcactacgggtagggcccaggaattcgcacttcatctgtttctaggaattcttcagtcatggaacaggaaaatgaagatacctggtcaagtgtcctgtgtggtggtcagcccatagtaaaggaataagcatcagtttggtttttttgttttgttttgttttggtttttttgacacagagtcttgctctgtcacccaggctggagggccgtggtgcgatctcggctcactgcaacctctgggttcatgcgatgctcctgcctcagtcacctgagtagctgggattacaggcatgcgccaccacgcccggctcatttttgtatttttagtagagacggggtttcaccatgttggtcaggctggtctcggactcctgacctcgtgatccaccgcctcggcctcccaaagtgctgggattacaggcgtgagccaccgcgccggccgtgttacagttcttaaaggtggcgtgtccggagtttgttccttctgacgttcggatgtgttcggagtttcttccttccggtggcttcgtggtcgcgctggatcaggagtgaagctgcagaccttcgcggtgagtgttacagctcttaaggctgccagtctggagttattcgttcctgctggttgtgttcgtggtctcactggcttcaggagtgaagctgcagaccttcgcagtgagtgttgcagtttataaaggcagtgtggacccaaagagcgaaagaacaaaccttccacgttgcggaaggggaccccagagggttgctactgc

SEQ ID NO: 29704 - DNA, 1050 bp, Homo sapiens
tagctgggattacaggtgcgtgccaccacgccaggctaatttttgtattttcagtagagacagggttttgccatgttggccaggctggtctggaactcctgacctcgggtgatccacctcccttggcctcccaaagtgctgggattacaggcgtgagccaccgctgcctggccagaaaatacctttgatatggaaagaataatgatgtgaggcctggcgcggtggctcacgcctgtaatcccagcactttgggaggccgaggcaggcagatcacttgaggtcaggacttcaagaccagcctggccaacatggtgaaaccccgtctctactaaaaatacaaaattagccgggcatggtggcgcatgcctgtagtcccagctactcgggaggctgaggcaggagaatcgcttgaacccgggaggcagagattgcgatgagccgagatcgtaccagtgcactccagcctgggcgacagagtgagactccatctcaaaaaaataaaataatgaagtggaatcaaggtggcaagaaaatttagaatcgtttctgatagggactttcccttatcctaaatgtgttttgaaggcacacgttatttccattgtcattctgactttagaaaggcaggttggggcatgagtgggcattttcctaatgacttgctgctaggaggttataggcagggaacagtctgggagtctctaatccagagagactttcagattccctctcttcacatgaacctccattagttagattttgggaaagtgagcatgaagaagggactcagagctgccaggtacccgagtctcaggtctgacatccttgggccccttctgccacaacttcttgccacttcacggacttgaattatgttgcttcttcctggaagtctggcctgcagcacaggcctttcctctccaaaaagctgctgctcatttctggccccatctgctgctatctttgccatcagccatcacagtttggcatcatcagagtctcagctagaggagctgtcattctgccttagtgtttgcctgcgacctgacc

SEQ ID NO: 29705 - DNA, 1066 bp, Homo sapiens
tagcagggcagcagcataccaaagagatgtgctgcaggactccggaggcagcctgggtgggtgagccatggggcagttgacctgggtcttgaaagagtcgggagtgacaagctcagagagcatgaactgatgctggcatgaaggattccaggaagatcatggagacctggctggtagctgtaacagagatggtggagtccaaggaaacagcctgtctctggtgaatgggactttctttggtggacacttggcaccagctctgagagcccttcccctgtgtcctgccaccatgtgggtcagatgtactctctgtcacatgaggagagtgctagttcatgtgttctccattcttgtgagcatcctaataaatctgttccattttgatgacagaatggcagtgcctgattcttagtaagtatccggctaaaattggaatgaagacatacttagctttactagagtggtgatagctgcttaagactttttttttcttctttgtgaaagagtttcactcttgttgcctaggctggagtgcaatggcacgatctcggctcactgcagcctctgcctcctgggttcaagtgatgctcctgcctcagcccccaaagtagctgggattacaggcgtgcgtcaccacgcccagctaattttgtatttttagtagagacagggtttcaccatgttggccaggctggtcttgaactcctgacctcaggtaatctgcctgtctcagcctcgcaaagcgctgggattacaggtgtgagccaccacgcctggccacttgcttagacttttttttaccagaaggctatggaagagctgtctcctcctaccaggtagtttctaccttggcagttcaaaatgtcgtcttatacacactcaactggagcattgctatcactggaactggctttctcaacctccgtgctgttgacatttggggctggttaatttgttgtgaggactgccctgtgtgttgtatgtttagtagcatcactggcttctacccgctaggtggcaatagcagcacccccccacaaccaaaaaatgtttccggacattgtta

SEQ ID NO: 29706 - DNA, 1049 bp, Homo sapiens
ttgtgtgtttgagggttagggagcagggcagctgccccctgtgtctcaattgttgattagtattttgtgactcaggtaggaaaacttctggctcaatttgtctgatatttttatgtcccccccatagactgaggctgatgtgaatccaaaggcctatccccttgccgatgcccacctcaccaagaagctactggacctcgttcagcagtcatgtaactataagcagcttcggaaaggagccaatgagggtaaggcagccacaggatgctctgggggaatgttaaaggcacctgtttccatctggggcctctgatctgatttccagtttgggaggagggctagctgctctcgactacaaccagtgggaggactttggcattagatgctaaagctgatgggctaagaattttttttagacccaccaattgttaacattttgccacatttaccttctttttcactctataagtgaattttatttttgctgagccatttgaaagcagttgtggagactgtatagtggctgtatgacctcaccagagccatcagaaggaaagggatattaatgctttttagcatcccttatacggtggatacttaacattcatgaatttcatttggttcccagaaacattccctacccctctcccttttttttttggatgcaattattcaaaaacatggaacgtttcacgaatttgcatgtcatccttgtgcaggggtcatgctaatcttctctgtattgttccaattttagtatatgtactgctgaagcgagcactacctccctttgtaaaaaaggaaaaaaaaaaagctgtttttcagtagaataattatgtatgcatgatgcttctgcccagaggtgatataggatactctcactttattcattattatttttttaattttattttatttatttatttatttttttatttggagagttttgctcttgttgcccaagctggagtgccatggcaggatctcagcttactgcaacctccgcttcccgggttcaaatgattctcctgcctcaacctcccaagtag

SEQ ID NO: 29707 - DNA, 1056 bp, Homo sapiens
agtagctgggattacaggtgcctgccaccacacccagataatttttgtattcttagtagagacgggggtttcaccatgtcatccaggctggtcttgaactcctgacctcaagagagccacccaccttggcctcccaaagtgctgggattataggtgtgagccactgtgcctggactgccccagctaagtttttaaatatttttagagatgggggtctcactgtgtggcccaggctggtctcaaacttcaggcctcaatcagtccccagcctcagtttcccaagttggtgggattataggcctgagccactgcagccagttcagaatacactcttcaaacatggaacgtttttgaaaattggccataaagcaagccctgcaaattttaacattggtaatattacataccatttttgcctaacccaaaaggaaataagttaaaaattagtaacaaagtagtttgaaatgaaaaatataaactatcagagagatttaaaaattgtagtaggaattcaaaaatagaacagaacaataatgaaaataccacataccagagcataagtgacaagggcagaggggggaagaaacaaatgaaaggatataatgaaagtattacttggagcctaagatgctaatgctagggagaaacgggataaaaaggtagaaaaaaacactagcacaaaataaccccaaagaaagtagaaggaaagaaaaaaaacaaaaggagaaattgctgaaatagaaagtagagcatactgctgggtcttttcctttccgaagcccctctttctcaccagagagagctgttctttctctttcttttgcctattaaacctctgctcccggccaggcgcagtggctcacacctgtaatcccagcactttgggaggtcgaggcaggtagatcacctgaggtcaggagttcgagaccagcctggccaacatggcaaaacccagtctctactaaaaaatacaaaaattagcccggtgtggtgacgcgcacctgtaatcccagctactggtgggggctgaggtaggagaattgcttgaacccagga

SEQ ID NO: 29708 - DNA, 1066 bp, Homo sapiens
aggaggctcctttgtgtagaggccagggcaggcgtgtgaccttgaaccaggtggacatgaggtcccttgaactcccttctctctctggcttgttcccctgaagcactggccccccagtgctgggcttatttggccatcctgtgccagccccctggtcacccaccgtcacagtggaagctgctccctcctcttacaatggtgttccttgctctggggtctggggacaagaccatctctttccactcctggacgacactgtgcactcagtcagccgcctcctacctgccctcctgcacagggtcagaacctcctgacctggacttcgccctgggcagcttccttggaacttgttgcagcttagcatctttggaagggagcactggactaggagtcagaaggtggagttctgggtgctgttttcccactcttgggccctgggcatgttctgttctgtgcatcagatgttttctgcctgcctccccctgagctgccaccagagccacctgtagacccctgcttctcctgcccctcctgtcccttgccaggcctctggactcagtgcttcctgtcccaaggacctgttgtgtgcccagcttggaagacagtggccactcacatccaggtctctgcctggctatttgctccatgaacccatctcagatgcccctgcccccagggagccaggtgacagggtgaggtcaagtgacaagcagtaggtgtgggagaggtttggtggggtcaggcccacatgggcccagccatccactccccttccatctggagttgggggagtctgagctgctcctggccaccccatctgccccaccccatcttttcctggccaccccagctcccaccccatcttctcctggccaccccatctcccaccccatcttctcttgacaccccatctcccaccccatcttctcctggccaccccatctcccaccccatcttctcctggccaccccatcttctcctggccaccccatctcccccaccccatcttctcctggacacccccatctcccaccccatcttttgctacagccagggttagctcagc

SEQ ID NO: 29709 - DNA, 1048 bp, Homo sapiens
tgctctgtcgccaggctggagtacagtggcgcgatctcgcctcactgtaacctccgactccttggttcaagtgattctcctgcctcagcctcccgaatagctgggattacaggcacgcaccaccacagccagctaatttttgtatttttagtagagacgggatttcaccatgttggccaggatggtctcgatctcctgacctcgtgatccgccctgctcggcctcccaaagtgctgggattacaggcatgagccaccatgcccggccttgttttgtgttttggttttttttgagacagggtcttgctgtatcacgcaggctggagtgcaacgatgggtccccagctaattgcagcctgggctcaagcaatctttctgcttcagcctcctgagtaggtgggactacaggtgctccaccttgcccagctaattttttttttttttttttttttgagacagagtctcgctctgtcgcctaggctggagtgcagtgacgcaatttcggctcacttcaagctccgcctcctgggttcacaccattctcctgcctgagcctcctgagtagctgggactataggcgcccgccatcacgcccggctaattttttttgtatttttagtagagacggggtgtcaccgtattagccaggatggtctcgatctcctgacctcgtgatccgcccgcctcagcctcccaaagtgctaggattacaggcgtgagccaccgtggctggcctttttttttttttaaagacagggtctcggtatgttgcccaggccagtctcaaactcctggcctcaggcagtcctccccgaagggctgggattataggcaggaggcgccgggcctggcctctatttctttaatacctgccctcagagccgtcctgcttttaaactgatgcaaatggcagcagtgaataatcaattcatgggttcgcttgctttgggatttagtacaagattattttaagaaataacaaaggagaaaagattgagctggattttgctgattctcaggtatctgtaccccagggtcaaccctgagat

SEQ ID NO: 29710 - DNA, 1043 bp, Homo sapiens
ctgctgggcctggcactggtcctggcgctggtcctggtgggtctggtgagctggaggcggcgacagcggcggcttcgcggcgcgtcctccgcagaggcccccgacggagacaaggacggtgagttccgtgtgtaggggaaccagtctgagcggggcgcaggggctggggtgtcgggacggtctagggggagatgcatggcccctgagggggagagaagggctttaaggggaaacggagacagagtggaaaagagtttgcgctgaggagctcaggctggggagggagacatagtcctgcccctgagaccctggtcggagccaggaacagctctgccctgacagaccccagtgtgaggaagagacaggttgcaggaagggggccccgtctgagggaggagtctgtcctgccctttgggagtctaacggagcttggttcccccataaatccctgaagagtttgccagactgagccccagctccccaactccctgccctgccagctccccactggccaggcctctggactcagggtcagccaggtgccacccctccccaccctgcattgggcttcatttgacggaggactgcccctccagaggagtcttctaggggagggagggaaggctgtgactgagtacggagcctctaccccctctgcctgcagccccagagcccctggacaaggtcatcattctgtctccgggaatctctgatgccacagctcctgcctggcctcctcctggggaagacccaggaaccaccccacctggccacagtgtccctgtgccagccacagagctgggctccactgaactggtgaccaccaagacggccggccctgagcaacaatagcagggagccggcaggaggtggcccctgccctccctctggacccccagccaggggcttggaaatcaaattcagctcttcactccagcatgcacatgccctctttctgggaccaggctaactctgcagaagcacagacactacagaccacagcattcagcccccatggagtttggtgtgcttgcctttggctt

SEQ ID NO: 29711 - DNA, 1399 bp, Homo sapiens
ggtctgggtggcatgtgtggcatttaaccccatgctctctgctgagccctgagctcccagagttccctccagccctggccctggggagggggtagcatgtgaccaggagggcggaggggcttgtgtgtgtttctgagacgcagtctgagagagacacgggtgacagacagttggggaccccaaacactggggagcagagatagacaggaggggcccgcagtgagacacagaggtgagcaggagaggacacatagccctggagaaaaggagcaggtgtgggcgggcttccctccactgcagtcacagttccctcactcataggcagatcttcctgggtcctccctgcacaaagccccagtggctccctcgtgtcccccagccacagtccaagctccctaatgtgctagataaggccccagtccagcctttcggtcccagcactccctggacttcctgtttgggcctccaagcctttgctcccctttggccttcacccccatctgctccctagacctcagtccatctggcaaacacttcaccatcgccctctccatgaagccttccggcccaccttccaggatgacgtgagctggtgcccttgctgcgaggctgtcttcccccatcagcacaagtgtgagattccctcagggcagacccacatgctacttgggcctggtacaagtgtctgatgtcaggctgggcactgtggcttcacacctataatcccagcactttgggaggccgaggagggcggatcacctgaggtcaggagttcgagaccagcctggccaaatggtgaaaccccacctctactaaaaatacaaaaattagccgggcatggtggtgcatgcctgtaatcccagttactcgggaggctgaggcaggagaatcgcttgaatctgggaggcagaggttgcagtgagccgagattgcaccactgcacagagccagactctttttcaaaaaaaaaaaaaaaaaaagcaggtgtctgatatccccaaccagctctgtccaggaagggcaggaagagaggaggagacaggtgggttgggggagatggcaggggagcactcggggtcatggagaggctttggctagacggagcagaggaaccactcagggtctgtgtcctggctgcggggtccatccccctccctacccaagaggaggctctggtctgcccccagacacctcccagcacccagcagagggcccacccaggcggtgctggttgaggggctgaattggggaaccacaggtagaaagagaggccaggccgggtgcggtggctcacgcctgtaatcctagcactttgggaggccgaggcaggtggatcacgaggtcaggagttcaaaaccagtctgaccaagatggtgaaaccccgtctctactaaaaata

SEQ ID NO: 29712 - DNA, 1066 bp, Homo sapiens
atgtgaggccaggcacctgcacacaacacagacacgaatcccgcaggccttttgtcccggcacctggcccagcacatagggagcgcccagcaaacatttgtgtcacatgagtgggtgtctcatttgtgtctgctgctcttagcagctggcctccctctctggccaaggtaagggaccctggaactctgacagtgggctccagccctcccactctctctggccttgagagcagtctcctcgagtctctgctgggggtcagagcagccagtgcttctgctgtgaaacgcagacctggggcaggcggaccccctcctcctaactcctgtaaattctcccgactctggcctcactgggccaccctctccagggacaggttccccgttcctgggttcccacaagcctcagtctgcccacatggctggcacaagggctaaatgagctgcctggtactcagtcaggcctctgcagccctcactaatgggtaataccagcaccaacatggatggacgtgtatgtgggtggcagggttatggctcagtcttctggctttgtccccacctctctgcctcacagagaggccttccctgccctggctcccctccagggtcctgtcccccatccctgtaccgtacacccacgctcacccacacctgcccccacccccacatcaccatacacccacgctcacccacacctgcccccagccccacttctcctttgcagctcccctccgcccacaccttcctgcctgggagctgctggcccatgtacaggggatggagagggtgggccagcgcccaccagtcagggctggctgactggggttctttgtgaaccttcagggtctcccaagctggaaacctgggggtcggccttgctcccctcactccatggccagccgctgcatcatcccctgccctgggccacctgccctggacgtgggccacagtgccagagagagggacccttgcaggtacagctcagaatctccctcctacccagacacccccaggttctgtactgccccgggactggtgccctgcccatccgcagcccggatgctccc

SEQ ID NO: 29713 - DNA, 1048 bp, Homo sapiens
cccaaaacagctcctggtgcctggtaggtgctaagtgagtgagtggcgagtgacggggaggcatccgcgcaggggtcggcctctgcgttcacaagggccttcctgcgtggtaccctgaataaggcctgggaggttggccctgggggcccccgttcctctcccccttgcctaccctggccttacagcctccctctacttcacacacctggcccccaagaggtgggggctttgctccctgtggctaaagggctgtggtctgccctctagtctcacatggagggcccatgtcctctatcccggggccatgctgagagtggctggggtgccctggccagaccctgtggagtgcaggagcgcgcgtgtgtgcgcacgtgtgcatggagtggcgggctggatgacaggcagctccagcccatgaagacccaggcaaggatttgtgactgcttcatggaagggcgtgacctgccctcccctggtgtgggttcggggaggaacgggatctggggactcccaggcctctgcctctgggtcacactgctctggactcgccaggactttgtgctgattccgtggccactctgccctctcccaatgaaccgaggcccacggcactgcatcctttcccctggccccagcaagaggtactctgtagcattgtacttgtttgtgggggcttttaaatacaggagaagggaaaggaaataaccacaaggggtggtcctggcgctgtcatgagacaaaatggagccaagagagctgactcgaagccctgcaggcccaacccagccagcagagccatctccactgctgaccccattcctggaacacgggaaaagctgtttgtgtgtacacctacacgagggggcaaaggcacagaaccaggcagtgaagaaaggctcccaagggaaaacagagactccctctggggaccgtggggaaacgccctttgtcactcatagacttctgtattgtttgcaggtttttcctgagcacgtgttcaggtactactgcataattacaacgaaaactgattttgaagtacagagtg

SEQ ID NO: 29714 - DNA, 1055 bp, Homo sapiens
tctttggcggggctgatggaatgggtgtccaagcaggggaggaaggcggtgtggatgcagcctgcctgatctgggatgtcactttttgctggcgaccaggaggagaggccttcccccacaccccctcccccccatgcccgcatggggcacctctctcaggtccctgtgccacattttccttgccacctggtaccatttaacaagagaagtggcatcgcattctccagccaagagtctgggaaccttccaagcactggggaacacagtgctgtcactgccgccagctcccagctgagcttggcaggggccctggaaccaggaggcctcccctctagagttgggggctggcctgcccctgcctcacagcagagctgagccacacttaaatggcaggcaggtgccctcagacctgctgtccctggaaggcgggggatgggtggccagagagtggggttgcttcacgccatctggagacccagtgacattgtccaggagacagtttggctgagggaagtaatggaagatcagtgtgtgccggaattggggcttggtactgaggtaaggtggagggagatgggagaggctgggcttggctgcttgcttggtggcgtgacctcaggcaggtcactcaccctcggcaagcctcagttcctcagctgtagcgtggcgccaggctaaccgatgcctttcttcctagctagttgaggactggcaatgaagaagccactattttatgtatttatttagagatggggtcttgctatgctgcccaggctggtctcaaattgctggcctcaagcccattattttgaacataaagctttaaacaaatgtcagatgcctcagggtggccatggtcatgacgtggtcattgcaggatgttgaaggcgggcaagaaccccctaggcctacaggctgggaatgggggggcgaaggctactggaagcggcgcctcttcagctgggcctggaagctgccccgtccgtgctcttataagctggaaggaaggtggtgtttgggccccactcttagaggagtagagcttactcggagtc

SEQ ID NO: 29715 - DNA, 1050 bp, Homo sapiens
ctgttctctgctctccccgcaggtggaaggctttagggccaccatggcgcagcgcctggtgcgcgtgctgcagatctgtgctggccacgtgcccggtgtctcagctctgaacctgctgtccctgctgagaagctctgagggcccctccctggaggacctgtgagggtggctggcccctgggctgccccttctcatggcttcgtgctgactccataaacattctctgttgaggatgtccagtcagggcttgacaggcccaggctcagcccgccgtggctgggaaggttccctgcagtgccagtgctgcagcagggagagctgggcagaagcagcgagggggcccagctggcgagactgtagccccctcccactcccacactcactcttgcagagcctgtgtctttaagcagctggcgtgttacatctccatttaaggtttcctttgaacaaaaggtctgtggctaaaaaaagtttaaaaatcactggtctcattcaccactttgactttgtagatgaggaaactgactcagaacaattaagagtagggcagggtgggccaggtgcagaggctcacgcctgtaatcccagcactttgggaggccgaggtgggtggatcacttgaagtcaggaattcgagaccatcctggccaacatggtgtatccctgtctctacaaaaatacaaaaattagccagatgtggtggtgggcgcctgtagtcccagctactcaggaggctgaggcaggagaatcacttgaacccgggaggcggaggttgcagtgagctgagactgtgccactgcactccagcctgggcaacacagtgagactccacctcaaaaaaaaaaaaaaaaaaaagcgagaccagcctggccaacatagtgaaaccctgtctctactaaaaatacaaaaattagccaggcatggtgatgcaggcctgtagtctcaactactcgggaggctgaagcaggagaatcacttgaacctgggaggcggaggtggtgttgaaccgagattacaccactgcactccagcctgggcaacagagcgaga

SEQ ID NO: 29716 - DNA, 2750 bp, Homo sapiens
gaaacctgtttattggttttgagatacatttcgaagagttgtgtttctgctctgttctgggtcttgtgcctgttaccgaaagcaaagtgatgaaatgcagggagaaccgagtcagcacatgatctgtgaccaccaatccatcaccactgtctagaccagggtcccttatcctggtgtcagggcactcctctggtctaagggcagaattcagaggatagcagtctgtggctgtcgccagtagaaatggggatgttttcatatcacattaggattgggcaggtctcatcactgtctcatgtggcagcagccattaggcctgccccttgctcgatgcatcgatcatgatacacacttgactctatcacgcatttgatttcctagttgatgactactttttgagcccctgaccagatcagcactctgatctcacagatgggaccctgaggcctgggcacacctgaagtgcctgccccgccaggctttcctcccagagagaacaggcgacttgctcagggtcagacagctcgtgagtgaggggtagagccagctgttctgctgtcctagcctgctgaccgtgtgactttgaataggtcactttgtctgccacgaagcatctctaaaggggagtcacgatctttgctccatagttcaggtgctggtgggggacagtggtgcctactcaccctgtgacaagtggtgtaattctgtctgtggccatgaggtggcaggccaggccaggtcctgggttctctcttggcctgggcaggaagcaggaggtcccagcctggttcccgccgcagcaggagctgcagaaatgcctgctcaggacataggcctgcatccctcagatggagcacccagggtttgaactggcctccttcttcatgctggtgttgtcctcttcagaacactcttctgcataattgagtttaagccccaccatatatcttgaggcctttgcgtggcaggaattaccggccccgttccattgatgaggaaacacaggaaggtatgtgattggcccagtgaaataattgcctaggtctgctggtagggctctgtgctgggccctgggaacacaaatgagtcagatattggccctgccctctcagaatctcatgaaataagcagacatgtaacataagcaacagcagaaggatttgctgagctctgggagcctggtggtagaattaggtcatttcttcttggatgtcatgagcaaagtcatgattgtggtcagacctgggcatttgggtcacgtctctggagtgatgtggattggaggaagcctggccagaggcaggaggctgggtcgaggctgctgcaggaggcaggttgtggaacccaagcctcagcagcctagagatagatttcaggaacaaaggccaccaaacttagaggacttattaaaaaaatacttcctgagtttctgtggtaccgaccactgttctaggctccagggacacagcacagaacaaaagagtcaaaaaccccagcttcctgctgggcacggtagctcacacctgtaatcctagggaggccgaggtggaaggatcacctgaggtcaggagtttgagaccagcctggccaacatggtgaaacccagtctttactaaaaatacagaaattagctgggcatggtggcacacacctgtaatcccagctactcagggggctgaagcacaagaatcgcttgaacctgggaggcagagattgcagtgagccaagatggtgccactgcactccagcctgggtgacaaagcgagactctgtctcaaaacaaaacaaaaaaagccccagctttgttctagtcaaggaaacaaatggggtaaatgacgtgctggaaagtggaggcgtggcgtgtcaggtggtggtaaacaggcaagagttaggcagggtaaccagggaacgcccctgcaaacaggacttctaaataaataaagacctgaaggaagtaggcaggcaggccacggagatacctcgtggaaggaggaacagcaagtgcatgggccgagtgtgggacttgcctggtgtgctcaaggtctggcaggcaggcctgggtggctgcagcacaatagcaaagggcgggttggggtggagaaatcaggaatggtggggctggatcagtggagcctggtggggagctgctggagggcttggggccagggagggatgtggcctgacttgggttttaaatggacccctctggctgccgggaggagagtggactgaagggaaactagggcagaaatagagagacaggtctggaggctctttctttctttctttctttctttctttttctttctttctttctttctttctttctttctttctttttctttctttctttctttctttttctttctttttctttctttttctttctttttctttcttttttgagacagacactgggcagcatcgtgttcttccagcggacgtgtctagaacatctgtgcccgggcctagagcagtcttgtccctctctggccccacagctcccctgggcccattcctttttgatggcaccttcttatctgtggtgagggccacccgctgcccctccctccttcctatccctgtatcttctgctccctggtcttgagcatctggggcccgagctgcctgggcattggttggaagtagccctgattcagagctcagctctggagtcactagctgggtgaccctagacagtttgttcgacctagccagccttgttaagccttcatttcctcttgagcagg

SEQ ID NO: 29717 - DNA, 1017 bp, Homo sapiens
gggtacacaggtgtgaagtgaggatgatgtgctttcatctggagtgcatcttatatgccaggctctagcacgtgctgccctgcttttgcttttgctgagtttctgcatactcagttataactaagtcttatgtgtatgtatttgtgagtccactctcctgctggggtgtaagtgattgtgaggccaagcgtatgtccgtctctttaactggtgcatccttgtgtcctctgggagtcagaatgcctgatttccccttaactctctgatttcagatcttgtctcgtcccaccccaagctagggtacccagcaggcaatagggatgtttgttgggtaggtgggtagatggttggatgcatatgtagggaattctgccccaactggatcctgttggtgtttctcacaaggtgaaactaaccacgaggggtaggaaagtagcctttttgttgttgttgttgttgtcgttattgttttagataaggtcttgctctgttgcccaggctggattgcagtggtgtactcatggctcactgcagacttgagctcctgggctcaagtgaacctcccacctcagcctactgagtaactaggactacaagcatgcaccaccgcacctagctaagtatttatttatttatttactttttttttttttttgagatggagtcttgctctgttgtccaggctggaatgcagtggcgcgatctcggctcactgcaagctctgcctcccgagttcacgccattctcctgcctcagcctcccaagtagctgggactaccggcacccaccaccacgcccagctaattttttgtattttttagtagagacggggtttcaccgtgttagccaggatggtctcaatctcctgacctcgtgatccgcccgcctcggcttcccaaagtgctgggattacaggcatgagccactgcacccggccactgtttatttactttttaatatagcgatgaggtcttgctgtgttccccacactggttttgaactcctggcctcaagcga

SEQ ID NO: 29718 - DNA, 1064 bp, Homo sapiens
atgcctctaatcccagcactctgggaggccaaggtgggtggatcgcctgaggtcaggagttcgagaccagcctggccaacatagtgaaaccctgtctctactaaaaatacaaaaaattagctgggcatggtggtacacacctgtagtcccacctactcgagaggctggggcacaagaatcgctggaaccaggtggaggttgcagtgagccaggatcacaccactgtactccagcctgggtgacagagccagactccatctcaaaaaaaagaggaaaaaaaaatacaagttggttcctgtttaaagagcttcaagaagttctcagaaagtattcctcaagacagtccctggagaggctgtatgtgaaggcctacaaagacagacctttacctctacaaagaccctttacctctccaggttggaacaaagccatctgcactgacttggggtgtgtaaaataataaattgagatgattttccttactaaaaagactgaccggtttatagaatgagaataagatggtaatttagttgtatatcctaatacctagatttaaatccttgctccacttacagctgtgcaatcttgagcaccctacttaatctctctgtgcttctacttcctctataatggggataatgtattataatattctacttcctttatagtggggataatagttcctacctcatgggattatcgctcaggaattaagtgagctaatttatgtaaagcactgagaatggcacctgaataagtagttactcaggcccaggcttttctacatggtggtttttgccacctagcttgggagccctcagacatttaaaaagctgtgggaaatcagtctctccctctaaatgggcttcccatccctcccctgaccccagccttttaaagaccaggtttaggtttcctgaacaattaagcagaaaatgcagagttcccatataccctctcttcactcactgtttcccctattgttaacatcctgcattaatgtggcagatttgttataattgatagtactgatacattattagcaaacgttcataatttacatt

SEQ ID NO: 29719 - DNA, 1030 bp, Homo sapiens
gtgaacgcagagcacaggagggattgagaccccgttctgtgtcagctgtagatgctgaatgttgtccccctcctcctgcgcatcccagggctggctggcaaggtcctacgctcccaaaaggctttcctgacccagctggatgagctgctgaccgagcacagaatgatctgggacccagcctagccaccccgagacctgactgaggccttcctggcagagaaggagaaggtgagagtggctgacacggtagggaccaggggtggtgggttgagcgtccgggaggaatgaggcaggcaaaaggtgggtccattggatcacttggcaagtggcacctgggctgacaggtgcagaatgtggaggtcatttgggggctttcccgttctgtcccctgagtaccctctcagccctgctcaggccaaggggaaccctgagagcagcttcaatgatgagaacctgcgcatggtggtggctgacctgttctttgccgggatggtgaccacctcgatcacgctggcctggggcctcctgctcatgatcctacgcccggatgtgcagcgtgagcccagctggggcccagtgcagggggcaagggaggaagggtacaggtgggggcccctgagcttagctgggacacccgggactccaagcacaggcttggccaggttcctgtaagcctaacctcctccaacacaggaggcaggagagtgtcagggctggtcccctgggtgctgacccattgtggggacgcgtgtctgtccaggccgtgtccaacagatcgacaacgtgatagggcaggtgtggtgaccagagatgggtgaccaggctcgcatgccctgcaccactgccgtgattcacgaggtgcagcgctttggggacatcgtccccctgggtgtgacccatatgacatcccgtgacatcgaagtacagggcttccgcatccctaaggtaggcctggcaccctcctcaccccagctcagcaccagcccctggtgatagccccagcatggccactgccaggtgggcccagtct

SEQ ID NO: 29720 - DNA, 1049 bp, Homo sapiens
gctcagcatacacattggatgtggactcctaacaccgctgtgtgacttgaaccttgttatgtgatctctgagcctcagtctctgtgccttggggaccataaaaccacctccttagggggctgtgggaggattaatgagctagagcacacagtctgaccagcagtttctggcacataagtgcccgatcaatggaagccacaggtgcacaatgattggaaaaggccacaggcattgttattaaatgttttcctcatgctgccatatcttgaattacaggcctctggctggtaaggagggcactcgggaggacactgcccacattgcaggcatgcctgtccctgcccttcacacccccatcatgattcatgatgactgcttggggagggcctgacacctcaaaaggccaagagtgcatacaggtaatgtataaagggccaccatgtaacaagcacccagaccatcctgctgtccctgcaccttgattctctcacagtcccaaatagaacagtgctgccatgtaggacaggaacattcattcagctgaggccagtttgggagaccacaagccagatctgagaagtccccagataggcatgggtcttgctctctctgtcagttgagtagcttcaaaacttctgttgggccaggtggctcatgcctctatttccaacactttgggaggccaaggcaggaggatcacttgaagccaggagttccagaccagcgtgggcaacatagtgaggacccatctcaacaaaaaaattagccgagcgtaatgatgtgcacctgtagttccagctactcgggacgctaaaataggatctcttgattgagcacaggagtttgagtgagctatgatcacagctctgcactccagcctgggcaacagagcaagatcttgtctctaaaaaatatatatatatttttaaattttaaataaactgttctccctgccttttgttccccagatccagtcttcatccagacctgaaaagacccaggctccagctgctggcctcctgctgcccctcaggccacctgcacaggaa

SEQ ID NO: 29721 - DNA, 1349 bp, Homo sapiens
tggaatgtgtcctagaagacctggttaaggaaagagcttaagtgttttttgtttttgtcctggaattgcatctgtgtttgagaaaaagaaagttcaggccctgggcctggtggacaaatctcctggggattttgttcatctgttcctctctagtcattcttgggccttccttcctagctgtcagggcccttgactctttttttttttttttttggagacggattctcactttgtcgcccaggctggagtacaggggcacgatctcggctcactgcaacctccatctctggggttcaggcgattctcccgcctcagccctcccgagtagctgggactacaggtgtgcaccaccacgcccagctaatttttgtattttttgtagagatggggtttcaccatgttgcccaggctggccttgaactcctgacatcaagtgatcttcccgccttgacctctcaaagtgccgggattacaggcgtgagccacggcgcccggccaactcttgaacagaacaatgagcttcatccttctgggttgaagcacagtgatgaagtggcctcacccattgaagagagtcgtctcaggtccattgaggttgaaccattccattcagctcttggagggagaggatggactcactgcatccagtcctgtccatctgaaatgttttttatgtgctgttcccacaaggcatatagcttttcctggtttcccagttcagcagtgacattgagggtggtcaccgtccttcatttgtggtagaagccctggtgactggggatagaatcacacctctgactaaaggaggactcatcttgggccccatgctggggacagagagccaccattattgggtgccctgacaaggcagggaacagacagcgaatgtgcgtgtgtgtctgcctcctagtgcgccatgttctgacagagtgatatgataggtgctgtgtgactaagatcagactactccatgtctctgtacttcggtttcttctgtaaaaacaggaatagcagtgccaaccttttgagattccattgggaaatgtctctaagtgccagcacagcacactggctctcagcccgttgatctgccatgcctagctgtgggtttctcttgggagttggaggggtcaaggcagcagattggaccctgcagctgtctcttatagcaaaaaatacccaaggcttggggttaaaagatgccgcccctgcctcccagcctgtgaggtatctggtacctgaccctcgccaggagtgcggaggggaaaagtccttctgcaggcccgtggttgcccactgtctctttgtgccaagggggttgccttgctggcttgtgtcattggttggca

SEQ ID NO: 29722 - DNA, 1025 bp, Homo sapiens
cttgtgagtggacacaacaggcttttaggtctctttcttgggcagggcatctcttgccagtagcccctgctctttcccccgtctcagaaagggttccagtcaaaggtctcttctttttaatttactacatttctgtaaagcttatggtgtgttttcctttgaaaacaacagaactcttgggttttgttattagaaatcttttttttccagtattatgaaggattcctttttgcagaagtacaaaggaaagaaaaatcctcaaagatttagtagactctagcatctgatttaattttactcttaaaaatctcgaggctgggcatggtggctcatacctgtaatgccagcactttgggaggctgaggcagaaggatcgcctaagcccaggagttcaagaccagcctgggcaacagtgagaccctgtgtctacattaaaaaaaaaaaaaaaaattagccgtgcgtggtggtacatgcctttagtcccatctactcaggaggctgagctgggaggatcacttgatcaaacctggaggttgaggctgcagtgagccatgatcgtgccgctacattccagcctgggccacagtgagaccctgtctcaaaaaaagaaaaaaaattcttgtgattgagttgtgcttgctgtgagtttgtgtgggattattgtggtcacggccctcttggcaggcatctgtgaaaacaggatgataggacttggggtctctagaagctgcaggcctctgagctccatgctgctccttcaccctccctgcgtcactgaggcatgaagggaaataggttgtaaagaaaagaaaaaccaaaatgtaccttgtggcacttgctgctacaggatggggcaggaggactagttgtctcagaaatattcattgaggggtcatttctctcaaatgggaggacttctgtgtcgacctcaggagtttgactcacacagctacgctagacgtgtcccttccggcaccaccatgtgcctgaccaccttctggaacgtgccctcctccttgttacca

SEQ ID NO: 29723 - DNA, 1030 bp, Homo sapiens
acaggctatgatgttccaggtctggccaaatataaaagggtctttttgatttgttttaggataccgggacctgaaaagttttcatgtgtatgttcattgcttattactattgcacttgaaatctgtgggtgcacaggctgctagtctggatctcagtttaaatttaacaaggataagtaccgtggctgcctcctgccatggtgcctgggagctctctgagaatgtgttatcaatatttattaacattctgccaccgcgttttgcaccagtgacctggctgtcggtctccaggagctgtggtgtgcagagtgaactcattaattagatttccttgccctgatccatgcactacccttgtgtgagagctcagctcacctggaggcagatgtgtccttgctgccatccaggatgctgtcatcatgttacaagttggaatgaatcatttttcctccaaggattaaaagcatcctcatgggattttaccttcctctgaagcatttagtgtggattatgtgatttgtgttggaggcttctgtgtctccgtgggtcgtggggcaaaggtgacagtggggctcttgggcctggccacctttctgtctcagacacctgggcattctctgtacagagaagaaaatacgcgtctagattttaaagtgtttttacaaggaggctttggcttgagcctgagaaatggggttagcctagaatcaaggatttttaaaatagcatttattggtgatatcgtgggaatatagaaaagataaaatttaaatcagctgtatcttcttacccaaagagaattattgttacatattcatagatttcctttcagtctttttttttttttttttttttttttttttgagacggagtctcgctctgtcaccaggctggagtgcagtggtgtgatctcggctcactgcaacctccgactctctggttcaagtgattctcctgcctcagcctcccaagtagttttttttttttttaagacagttttgcttgcctaggctatagtgcagtgatgtga

SEQ ID NO: 29724 - DNA, 1065 bp, Homo sapiens
atattatttgtagcataggaggatgataatgcaaatagctactccaggtaaaaagtatagaataaaaatttaattagaaattgtactggcctgggtattgatttttgggtagaagggaaaaccttacacatggaagatactatagataagtatttatattctatctttggcacctggcacctagaaagtacttttcaaatgttggatagttgagtgaatgaagggggctaacaggcgtcatggtatggtatgaagaaagttgaacttggggttcagaagaaaaagaggtaaagttctaagttctcttactagctatgtgatctttagcaggtcactttgctttagcctcttgtttcttctacaagaaaaacagatgtcgaagacagacccagagttccttctttattgatctcctgatgtcacaatttgcctagtgaaattgtaggtttcactaggcaaattgagggagaaatctgttgcattaaagaacctaaggccaggtgcggtggctgatgcctgtaatcccagcactttgagaggctgaggtgggcagatcacctgagatcaggagttcaagactagcctggccaacatggtgaaacctcatctctactaaaaatacaaagattagctgggcgtggtggcaggtgcctgtaatcccatctactcgggaggctgaggcaggggaatcgcttgaacccgggaggtggaggttgcggtgagccgagatcatgccattgcactccagagcgacaagagcgaaactccatcaaaaaaaaaaaaaaagaacctaaaaggaaaatgaacaatcacttgagagtcttgggaaatccccgtgtattagttttctatcattgtcataacaccttaccacaaacttgttaatacagttctgcttacagttctgtaggttcaaagtccaacacaggtgtcttactgggctggaattgaggtgtgggctgggctttggaaaagtccagagtcttaggggagaacatgcttccttgccttttaaaaattctgcagctgccgccctgtcccttctcccatcttccaggccagcag

SEQ ID NO: 29725 - DNA, 1026 bp, Homo sapiens
gacagaaggcaaaagggagggactaaaatctaccttgcatgttaagtaaaagcattaacattctagtgagatgacaaagttttgatagcgattatctaaagcgaaagaaaagaatctgcctggtagtaaagttgggtttttttggtttggttttgttttttttttgagactgagtcttcctctatcccccaggctggaccgcaatggcacaatttcggctcactgaaaccttcgcctcccaggttcaagcaattctcctgcctcagcctcctgagtagctgaagttgcaggcacctgccaccatgcctggctaatttttgtatttttagtagagacggggtttcaccatgttggcgaggctgatctcgaactcctgacctcaactgatccgtctgcctcagcctcccgaagtgttgggattacaggcatgagccaccgcgcctggtctaaagttgtttttttaagtaaactttttaacatgtcagcactaaaaggcccaaaataattaagaattctgagtttgtgtggtgtatccacagaatgattcaggacaaatacttccctatagcattccacctcctcccctaaaacagtgaatatactgagaatatgtgaactccagagggcttgtattagtccgtaaagaaatacctgaggctgggtgatgtatgaagaaaagaggttgaattggctcacagttctggaagctgtataggaagcatgatgcctgcatctgctcagcttctggggaggcctcaggaaacttacagtcatggagggaggtagagggggagcaggaaggcttcttgcatggcaggagcaagacagagtgaggtgcgaggtgttgcacactttcaaacaaccaggtcttgtgagaactcagtatcacaggaatagcacccacatgatccagccacctcccaccaggccctgcctccagcattgggtgctacagttcaacctgagatttggtgaagtcacagatccaaaccatatcagggatctattgtatttgaaggatttagc

SEQ ID NO: 29726 - DNA, 1050 bp, Homo sapiens
aaatctcttaccagcttgggatttttatttcatttggttccttttcttgcatgtttttgttcttacatgtcacatgattattcctccaaattaaagtgcctatgcccatgtgatggacagaaaatgaaataggtaatttggaagatttgtatagacttctaaaatcgtttttcattttttgaaatgtataatgcttatgaagcatattattatatttcaagtttcttgggccacatcttttctaacgcacactttccagttaggatatttattctttggatctgtttcataacttatcctggggcagatcatcaacatcatcatcttcatttctttctctcctctattgaatgttctgtttcctgaatcccatttcttcctcattcttaaagtgagccttcatttaagggcgtgcatcatcctttagtagttttgtgagaaagggtgtgtgggagtgtaaaaatgttgagatcctatatatctgagcatgactttatcctagcctcatgcttaattgagagttggctaggtgtggaattctagattggaagtgatttttctctcactgtcttgcagtcgttcttcctggtttgtccactagcttccagtgctgcagttgagaagactgccattctaatttttcatcccttgatgcatgttctgtttttcttctggaaagtttgaggatcttctccttttccctagggtcttgagatgtcaaaatgataggtcttgactaggtcatttcatggttgtgttggctactctatgagatcttatgtacgctgatgtctttcagttcaggcaatttgtcatgtggtagttctttgaaaatttccttccctctattttctctgctctctttataattcctgttaatataaggcattttacctcctggattgatccgctgtttttatcttttctcctctgttttatgttttatctcattatctttttgttctgatttctctatgctttcttcagctttatcatctaatcttttttgtatgtgggttttgttttggttttgttttgttttgttttgtt

SEQ ID NO: 29727 - DNA, 1026 bp, Homo sapiens
gagccaacatatttgttgtaaaggctatgaaccagaaggttgtatcagtctacaatattcactttttaagtcacttctgtagaacagactattaattttttctttctagttagtgattttaagtgaggaaattgaagagaggtgtcttgaagagatgcggaggaaccagtcaagtaggagacaggtcaaggcttgtggaagtagagattggtagtggtttaaatgagcatggtgctggacctgcctgagctcttgtagcttcgtgaatagtaacctttcttccccagtccctggtctagtgtcttcccaactactgccagaaaatcttctgaaaggtagctcttgtcgtatccttttcatttgtgtactgagttaaatttagacaccttgccttggtcttcagggttccatggtaggaccctgccctgcctctctaaccacatctcctggtttccccagttgtatcctctgctgcagctcggtgtccccagaggtgcctttatttccaggtctgggtccgtgtcctcttttctgttctccatcttatcttttttttttttttttttgagatggagtctcgctctatcacccaggctggagtgcagtggcaccatctcggctcactgcaagctccgcctcccgggttcatgccattctcctgcctcagcctcctgagtagctgggattacaggcgcctgccaccacgccaagcaaattcttatatttttagtagagatgggatttcaccatgttgaccaggctggtctctaactcctgacctcaggtgatccacctgcctcggcctcccaaagtgctgggatcacaggtatgagccaccgcgtgcagcctgttctccatcttttgagatagttatatttcaaggcctttctcaaatgttacttttctccatgaaatctaacattcccttaactggatgtttccttcatgacgtttgtaattttctggtgcacctttaatctttgctttttgctttttattatacctttcttttttcctttttttttt

SEQ ID NO: 29728 - DNA, 1066 bp, Homo sapiens
ttagaccagtgacttgtaaattatttcagagccctcacattttatttaaaaaatatgcatgtagcactagctgtatagttaggtggcagtgtgctaagtgttatatcaaaacagaataagatggaagaaaggcggcaggggggcactctcatctcttccgtgctgggctcccccaggtctgcagaggcattttgggaaacaggtggcctggctggggtagaagtgagggtcatcctcttctcaactccagccagagcagctcatcatctctcttatcttttgggtatatcaacataagatttttgctgaaaaaagacttgcagaatattttcaaacaccatttcactaggctctaaggtccttatagtcagggctgtgttttgcttttatagccccatcatctgcattgttgcctgccagtgcattgagaaagaatgtaccattttgcctctgagcctctgctctctaatacttctccctccttcccatctctagccgtatattagagttaaaatagaatgtgtctgtttcatcgcaaatttgtatattcttaggtgatcaccatgtcttattaatctatgtctttgtgtcctgttcacataattctattaaagtaatgttgaatttggatttgttgtagaaaacttgcaaagctcttctaagagtaactaaaatcagtaaagaataggggaaaaaatccagagaaaatataagcaggaaaaccatagcagacagggtcagatggaatattagcggtttaggtgaagaacccagagaaccgcctgccctgtaaggaatgctgggtatttctcctggagggttttattttaatttttgagacaggatgttgcactgtcacccaggctggagtgtggtgatacagtcatggcgcactgcagccttgagttcctggactcaaatgatcttccttcctcggcctcctgagtatctgcgactacaggcacatgccaccacaccctgctaattttattttcttttgtagagattggggtctctctatgttgaccaggctgattttgaactcctggcctcaagcaatcttctt

SEQ ID NO: 29729 - DNA, 1051 bp, Homo sapiens
atctgtggtctcggctacttgggaggctgaggtgggcgtattgcatctgcgagctgtgattgtgcctcacaaaaaccatatacatatatgtatctctcatgaatttgttccctctcatctcaagaaccataccctcttatctgaactgtattattagtttcctgtttttcctaccccctatttttgccttcctcccaaaccattttttccacttatcagctaaagtgatctcttaaaaattcaaattggattatgtcaattgccttcctaaaatgctccagtggtctttcattgctttcatatggtggccaacagggtcatatctaacctttgcctccttctgaaaccatttgacctggtctccttcttgctctctaagctacaggtttgttcaccttccctcttgtttcttgaactcctcaagctcatttctaccttaggacctttacacttggctccttcctgtgtctggaacactctgcttctcaaatctttgagttgtttctgtttgtcattcaggttcaacctaaatgtgaccttctctgaaaggttttctctgaccctccctgtctaaagtagtgccccattacatcaccctgccttgttttgttcatagcttttatcatagtctgaatttattctttaaaacatttttaaattaattaatttatttttaaaaaatagagacaagggtctcactttgcccaggctggtcttgaactcctggcttcaagcgatcctcctgggattacaggcatgagcctccatgaacagcctgaatttatcttgtccttttgtttatctcccttttcctctcagggttaagcatgcctccttcactgctatataggcagcagtatttgatacacagtgggccaaatgtgttaagtgacattattgaggatagtggtggtaggatgagagctgttgaaagtggacttggtgagggaggaggtgccaaggagaggcaaaacttgttttgggaaactaggtgatggcattgccattcattaaaatagaaaacaactgaggaagcgaatattggaatagg

SEQ ID NO: 29730 - DNA, 1071 bp, Homo sapiens
gtagagatggggattcgccatcttggccaggccagtctcgaactcctgatctcaggtgaggtcaggaggttatcagcctgcctcagcctcccaaagtgctggggttacagatatgagccactgcacctggccaactttttaaaactctgtaagataaaatggaatgtaattgaaatgatcacacttaattggagttggactttttctcatgagtccaacctacctttcatataggcaggaaaaaatgctggcatttgtataaaaaacaagcttttgtgctagactctgtccaaggcattttaaattgtgttacaatatccacccagctgaccttagagatagatgacctttcctttccctgagagctggtagagctaatgaggctcaaggcttagatataaccctcctgctgttggctccagagcctgtgctgtactaggtttgttgcctgctcaaggcacaaatcagtcagtggtaagtgcggccctggaatccatatcttcctgctgtgcccctctttttttttttttttaattttaaagctatgatgaacctgaaatctagatttaggtgaaatactggaaagggtggtttttgtgactgcttatggttttgtgaccccctgggagttccctaaacttttaccttgcccatacttggtcagttttgccagtgtacttgagatttaatctgtgaaaaaatttctcttttcatacttaattccgtcattctgtcctgagctgaaaactttggtatcagcttaaagagtaacataatacgtaaagggctatctcttcctgactagtttacaatgcactagaatcattttgtatggtgactgctctcactcagttcgactgggtgggactcaaaagatatatttaccaaagacagttctttccacagtatgccttaagccttcttactcatggggactttgtgttcaaggcaccttagtactcattcattctgtctggggctttgtctctgctgtcttcattttctttttgtggaggtaaaaaagtaacaagataaagcaaaacaataaaaccattgaagtaaaacggtaca

SEQ ID NO: 29731 - DNA, 1060 bp, Homo sapiens
agggcggggaggcgggggatgttcagagcagtgcccaggagggtggccgggagaggaggggcccgagggggctgctcggggagcgcggcagcagcaggggcgtgaagggcagggccccgggtcacagtcccaggggccgagtgcccgcccccgtcccctccggtccagatccagccgcgcccccgtcccctccggtccagatccagccgccgtgcgcagccagcccgggtgtgagggtgcagagcggcggggggttggggctggctgctccctctccccccctccactatttccaggcatgttcttccacctccagcaggccatttgtcagtggtgatgcgggacaaaggaggggcagtgggtggtctgctgcgagttgggcgatgggcacggagcgagggccgagagaaacgccaacaatgaagaggcagatcgagggctttgctcattcaggctgtcgagggagccgtcattttgtgttagcgtgtgtgtgtctgaggtgggaggaggaagagagcggagaatgacaggagaaggattatgacattgtgttgtctctgtttgtggtaaatgcaaatttggcaccagtggtttcccgggaaaaggagcagcaagtaacccaggccgaggccctggcccagacccacggagggagcccgtgctgggcggcgtggggctttatttggccctccctttttttctatctggcgtgtgcttcttgcatttattttacagtgaagagctggagacagacaggccggcgaggcaggaggagccggccccctcctcccaggcatggcagcccctcctcagctcaccccggaggaggcctgggcagctctcccaacccccaggcgctgtcccagctctccggcctccctcccaggtctctgcccccagccagggtcaccgttccatcattctcttagcctgggcagcctgaggtctctgaaggctacttctgcccgcagctgcttcccaagcgtgaccagagaccgagaacctgggaccgaggctgggatggggctttgcagaacgaaggccagggctgggcgctccc

SEQ ID NO: 29732 - DNA, 1046 bp, Homo sapiens
tgttggccaggatggtctcgatttcctgacctcgtgatctgcctgcctcggcctcccaacgttctgggattacaggcgtgagccaccgcgcctggccatgcctggctaatttttgtatttttagtagacggggttttaccgtgttggccaggctggtcttgaactcctggcctcaagtaattcacccacgttggcctcccagaatgctgggattacaggagtgagccaccacgccaggccagcactctgatctcttaataggaaaaggtcctgttctcctgggagctcaagagggctttctgtagggtgcccagcacatacaactggcctgcctcctctttgcccagggtgctggacttgccgaaagctcttctggtgaaggaattcaaccattgcactttttcgctcaattgcttcactccctgtctgttgaacatttccaaatctgatttgcaggacttttttttcttttcttttctttttttttggctagtgaggctttagacttccatgcaactcaccacgcccagaaatggatgctggaccaattgtctttactccccctttcccatgcaagcaatgtaacggcctttgaaagggggctggtttgtggttttccagcagtagaatggtctgtggtcttgagcagctaaatttgaaaccgggcttttcaggaggatcaactgagctctgaaacagctgggcacagtgcaaggtggcaggggtcagggacaggcaggtggggctccttgggcttggctgtgctttcactgctgactcctcagtgccgggaacagtaagagctcacacagccctgcttgaatgaatgcatgcatacgtgatgggatggatctgtgctatgatgagatgcagtagagtatgttggttaaaagcctaggctctagaactggacagcctggagtggaactctagctctgctctttgttagtggtgtgactgggtaactcagttccgttctctgggcctcagtttgctcatctgtgaaatggttgaactagatgattccagcattcctcccagctcag

SEQ ID NO: 29733 - DNA, 1050 bp, Homo sapiens
tcggcctcccaaagtgctgggattacaggcgtgagccaccacgcccagccttgtctttatatctttactcctgctgttccctctgcctggatgcctttcttgtctcctccacctggggctacctctggttcatctgccactctaatgatgcctcctctgggtagtcctctctgaccagccctgtcccaggatggtagatgtcttatgtgcccccctctctggccccctaggcttccctcattcatggcactgtccacaccttcctgaagccaccagcttcagtgaggaagtctcactcagtgttggccccatggccagcccaggactttgcccagaggtagaaccagtgaaagtttgttgagtgaataggcaagggagtggatgttgctcttcctgcctatgtccagcccattccacctgcctgggctgccctcctttcctctcttaccctgtgtgcctggcctggataccccagcttcaagctgcctgtccttcagagagtccttcctctctgagcctgtcctcacctgcagcccacctgccatgaggaccccagatggagcccactgtggtgcctctcctgcacccccagcatggtgtgtgagcaccctggggctcccactggcttctcccacttttcattgcttcaggcccccattaggtggctggtgattgctgacagactgaactgttccagaacctcccctgtcaggactgccctggggaaatctctagaggtgtccacagcctcctgtctgccccctccctgcttgggtctcctcagaccattccttgattccaggtttctgaaaaattgtgtgaaaactggctttgtgtcatcagatccaatttcctgccacctcttacttttaaaggaggcacagccagtttaaaacaaaaacatcctgctgtggtgtgagctgaagactttgggccaggaggctgggctgtgagggccttccgctctgccacctcccctcattcagccgctcccctcctccctgggtcggggctggagggaggggttctggagcccaggttttcgtgccc

SEQ ID NO: 29734 - DNA, 1031 bp, Homo sapiens
atcagatattcacagaggtgaaagtaacgtcgcagctgacataagggctgtgaagactgaaggaagtcagggaggcttcctggaggagggggcccagagctatgatgggaaggaggtaggaattaaatgagtaagcaggaaacagtgtgcaaggctaagagaaagcctgtgcaaagcccctgcggtagggagtgctatactttgaggccggggaaggcaacctgtgttttttgagcaagaggatctgagggcaggggtgtggtgcctgatgagctgggccctctgggagcggtcacatgagatgtcagacatggacttttggattctgtgaatctggaatgtccttagagccccaggcctagaagtctcagggttcacagcccagctccacctcttcctctgcattcagtctcgggtaaggagggtgccatctctgagcctcggttttctcatctataaaatgggctcactgtcccatcaaagcctgcatgtgaggacttattgtgggaatgtgtgtgaagtgtctgtgcgaggtgccctggcccgaagcttccgcacaggaaatgagtgagccgtgtctcctgtcccatttcctggggttcccactcaccctttgggcccagctgcaggttggtggagaggcctgtgccctgcacctctggcttctatctcattggcaggttgggggagggggagttcatggccaaggtcagaggtgccttccctcagcagggttttctgagggccatggcaggtgcccactgctccaccttctgatccttcagcatgaggcctctccccacctggggatgtcttcaggaagggttacatctagcaccattcttagctcctgcgccaagggcattgccgtggcccctctatatcagtgccagcctccagactcagccctggggtaaaccctggcttagctctgtgggcacccagtgcctccgccccctcccctccaagctgggatatagcccctcgcctcatcgttgccgcgagggttagagtctcttggagaagtgcct

SEQ ID NO: 29735 - DNA, 1050 bp, Homo sapiens
ggttgccaccagtctgatttcccaaggccacccaaggtcccagggaggagggtgagatgttcaggctctggacagggaaccaggcctctccctgcttccagctgcccatggtgtgaggggcacctggccatgcagcccctctgacaccaagggtaccattatgttgagtcacctttatctggtggctcatctggaaccttgtgagcctgttcccacaggagtctgctaaactccagccccaggcaggggccacccgttggcctgggttcccactgcgcttgtgcctatggtcctgtgtcccagtggcacctggaggagccatcgtggtgggccggtgctcctcctagagggaagccctaggccaggcctggcacatagtgggtgagcaggttgggcacctggaagcttgggctaggcctgccttctatcgccttcctctgtgtgtggctgtgggcagtgagttacaggcttagtacctactgcgtggagcagtaggcatactgtgtgttctggtctctgaattgctctccactttgtggcgaggggcaagctggctcacaggggcctgatatgagggtttttacacctttacccctttgcctctgaggcaggtggggaccactggttccttaccgaaactgaggctcaaagagggccaaggtgtggtggaagccagatacttttctgcttctgtgtgacttgcgttcatggtgcagtggctgtcagccaggcttgtgcacagccctggtgcaccgtcctctaaagcctctgcacagcgagacagctcctgccactgtctacacacagccctggtgcaccatcctctaaagcttctgcacagcgaggcagctcctgccactgtctacacacagccctggtgcaccatcctctaaagcctctgcacagtgaggcacctcctgccactgtctacacacagccctggtgcaccatcccctaaagcctctgcacagcgaggcagctcctgccactgcacacagactgggtgcaccgtcctctaaagcctctgcacagtggggcagctcctgccat

SEQ ID NO: 29736 - DNA, 1046 bp, Homo sapiens
gggactccagcccaatttaatacgagatgtgttgaaataaactgtcatctggactttgatatattaagattgccctttgaaagtcacgtgttgagaggcagatgatgaagaggtgcctattgttgccgcctcgtgccgtgcccagcccgtcccgcctggcagcctccgtcgcaggagctggcaacatggctgtctgcctccgcctttcccgagcaggcaggaatcactaacgcgttagcagtttcattaagcctctcgccagcctccccgcctccctcccgggcctcctcggtaattattttcccagcccttccactcgcagcccctgagcgagctcttcgggattggccgagtggcccctgcaggccgggctgccgggagggacggggctctgctgaggccccctgggcacccccctcccgactctgcgctgccatttaagctttgtgtccccctgaggcctccgtgaaaatgcagatctgctgcctgccaggggtgatggttaacccgttattacacacccagcacgtgtagtttcctctgtgcagccgacctccattcagacgaaaagtttctccggccctcttctggggctgtcacggagcgggcactggggacccagctgcgaggggatttctcatgctgcagaaccgtgaacatccagggcggtgggggatctcaggggacgcgtggagaccgaggcgggagttgtgtacagagtaggacctgggcccagagggttttcttcctgggacgcatgcccccactggacccaggtggggcccagtaccccctccctctggccacagtgactggtggagaaaggggcatgtggcccatctgagcccgtcaaaggcttccctggaactgtgactgaaggttgagtatgcagggcctgagaccccctcccaggcccattctggatttggactcagctgtgattgttgaaactgaagggtgtgaatatgaggccaccggccaccctcttccacagctgcatttaggatggaggattgcggataaggtcatcacatggaaggaggcag

SEQ ID NO: 29737 - DNA, 1028 bp, Homo sapiens
ttaattccaattaaaaacaaaaaatactatggtgtcacgcaagcctggcttcaggctgggttgggcccgtgggcctagagtttctgatctctggtggccgtggggatgcgggtgggggtggcgcaggccggttagaaggggggtcggtgagggaggaacggtgggcgggaggggggggcggccggtgggctggtgggggttttctgaaggcgtggggtggggagagccggtggagtgggggctggcctcacccccagcagcggcaccgtgcgtggggggctgggcgcgggtgggcgggggctggaggcagagccccccctaccccagcccggcgcgccgcggccgcccgccgcctccatccgggcctctccccacctcccgcccgcccgcccccgcccgcgcccctcccccgccggcgcgcacggctcccgccgcccctcctccgcccgcccgcccgccctccgcccgctctccccggctccctcccggtctctcttaagtgccatcgaggggcgccgggaattgcagccagtaaatcgcgtcccaccactcagcggcggggccaccgcagcggcgccgcccgcgcccgccgggagcccgcgccgcccgggcgcctctccagggcccgcgaggcccgccccccacccggcgcggcgctgcgcagggcctgcccccgggccggccggggcgcgcggggcccgcgctggaggcgaggacgcggcggccgcggggcgcacggcccggagcgcgcggcccgcgcccccgcgcgccctgctcgcgcccgcgccccgcgctccggagcccggccccgctgcccgggctctcctgcgggaccgatgccggccctccggccgccagggtaaggggacagcgcgggcgcggcggggggcggggggtgggcgccagcccctggggcccgatgcccgcccagcatccgcgtctggcacgtgggggcgtctcaagttccctctggaggccagacaggtggcgaggacgcgggggtgtgaggctcaaaggctggcacttat

SEQ ID NO: 29738 - DNA, 1032 bp, Homo sapiens
agagtgagactccatctcaaaaaaaaaaaaaaagtgtgactattagctgggcatgatggcatgcgcctgtagtgccacctactcaggtggctgaggtgggaggatcatttgagcccaggagtttgaggctgcagtgagctatgactgagcctgagcaacagaatgagaccctgtctctcaaaaaatgtgggactgtctctggcagttgggtcacctaattgtgcctggccccaagaaggaggggtgggtacttgaggatggtaaagaacctccccaccaaaggtctctgtttcttaaattctgattacatgtgtccccaggcctctagggactgatcactggagcatgaggcctgatagatcctggtggtcacttgttgggcctgggggcagaccaggggtctttcccagtgcatgagaagagatgggtgaggtgggaccagagtgggcgacagtggctggacaccagctgcctgagccccgccttacctctttgagggtggatttcattgtgtctatcatgaacgacagggactccttgtcagagtaattctctcttggatcaaaatatccgtggactgctctggaaagtgaggagttgggggttgttggggttcatcttagaaccgcctcccagcggtgcccccatcctgccctgggttcaggcctctgaggagaaaccaaagcctgggctaccccaactcccacagctgggtcccttgaccctgggttggatttgaggctcagttaatctcagctcacgctcagctggcacaagccaggcgcaagcaagtgctgaaggcacagccttgctggggcgcagggagttcaggacttggtcacagtcagccctgaacagcagagctgggatctgaacaggcgctggagcccacacttgctctgagagagaatttatgtcttcacaatcctcccattgaaagtctacaatcctggccgggtatggtggctcacgcctgtaatcccagcactttgggaggctgaggcgggtggatcacgaggtcaggagatgaga

SEQ ID NO: 29739 - DNA, 1060 bp, Homo sapiens
tgtacatgtccataatttaaaagtaggaaagtataagaaaataaaaagtgcctctaattctatccaaacacaactgttaattttttttttttttttttttttttacaaaaactaagctaagggaattgctggatttatttatttatttatttatttaatttatttatttattttgagacagagtctccctctgttgctcaggctggagcacagcgttcacaactcactgcaacctccgcttcccgggttcaagtgattctcctgccgcagcctcccaagcagctggaattacaggcgcccaccaccatgcccggctcatttttgtattgttagtatagacaaggtttcaccatgttggccaggctggtctcgaactgctgacctgaagtaatccgcccccttcagcctcccaacgtgctgggattacatgcgtgagccaccgcccctggccaagggaattgctggatttgttttcaaaaaagaaaccctaatttgtaaaagattcctctaaacttagagaaaaaaagaagcatgtagaagagggggtgtgagttctgaccttttttgaagtgcagcatgtgtgcctggaagggccccagtggcaagtgtccagctcgctgcatcccagagacagaacatagctgtgtagtcagcgcccaggtggagacacagcagcacatcccagaacccccgctgcctccaccacagacaaccaccatcccaactgtcatagcatagggtcactactgctgattcaggtagtaaaacttgtcataggaaatcagaataacagcaagaatgtccccacctgtctccagtgagagagcaggaatatgccgggcacagtggctcacgcctgtaatcccagcattttgggaggccgaggcgggcggatcacctgaggtcaggagttcaagaccagcctggccaacgtggcagaaccctgtctcttctcaaaatacaaaaattagccacgtgtggtggtggtgggcgcttgtaatcccagctgctcgggagactgaggcatgagaatcacttgcaacccgaaggtggaggttgc

SEQ ID NO: 29740 - DNA, 1046 bp, Homo sapiens
cacgcttcccttgggtgagcccgcctctgtccacactctcacccaggacaaacccatttccgtccacacccgctcgtccaggtgagcccatccccttctcatcgcctctgctcctagtccatcccccatcagctcttacctgggctgttataggccctcctactcggttgccctccttctcctcttgcccctgcttctgttctccacccacgtgccagaatgttcttttaaggacatttagattcgatcatgtctgccgcgcccacgataggcgccacacctactgcattccctccagtggctttatcaggtagcttctaaaacaaaaaccagacttcttaacctgtgtgggccacgtggtctggctggtgccgacctaaagctctttctgttcctctgagggaacatgctttttcccccctctgggtttttgcacgtgctgtgccggtttgttgcacagtggcgttctggcctgagctttaatgttgcttcctcaaagaggccatccgtgatggcctatggaaagaagacctctgccaccccatcaccctgtaatgtttctttcacaattgatacaagtttgctgtatgcttgttaattgtcttctccgttattgcaactgagcttcctgagttcagggaccgcagctctacgccaaccggtactgtgacggaggtgtgagaaaaatagaagcagttcctagctttatgaggattacagtcatgggtgtgccagcgattaaccaaagaatctcatcaatatagcctccagactgttaagagaagctgtgaaggcacaggcagtgggatctgagctggcaggaggggcggaggtgatgctaaggctctcctgaggaagcgaggtttgagctaaacctgaggtgagcgggagggaagagggtgacacgccaggtagagaggccagcatgtgtgaggccctggtgtacccgggggaacagagaatccaaggtgctgggggaagatggtacgagaagaggtcacagtgacaggcagggtctcacggggcttccagccatggttaggatt

SEQ ID NO: 29741 - DNA, 1050 bp, Homo sapiens
ctgcttcctggaccactgctctgaagcaggccccgccatgagtctcttctagagcaccatgtatttccttcattacatctagagaatgtctaaccactcatgtgcctgttcacctgtgtatcatctgcttctcttccaagaatctaggcctctgcccagactcttccttactcaactccagggggcgccatttgtgcacagcagcccctggagttgtggtgcgggaggtctggccccactgagagagggacagtcggctcttgctcactgcagcctcactgagccgggcctgtagcaggcccttacaaaagatttcctgggccaggcacagtagctcacacctgtagtcccagctactcaggaggctgaggtgggacgatctctggagcccgggaggtggaggctgcagtgagccatgatggtgccaccgcactccagcctaggtgacagagcgagaccttgtctcataagaaaaaagaacgaaagaaaaaaaattcctgggtaaaaagcaaagtacacaaatcgcttgtgccagaagctgctctgaaaccaagacataccagctccacctctccattgtgaaaagcctctcccaagtcactcagcccctgggacgtcctcacagcctgcctctggcgctgggcacccaccccagatccagcagagcatggccgtgacattcaccaacatttagtccaagacacctgaccaaactctcccagagcgtggctttctgggatgtgcagtaactgtatggcctcacccgggttgcttggcaatgctgagccttggtttctcctgctctaaatgggatgagggtgaggcaggagggggattcagtgagatgctgtttgcaaagcgcttagtatcctgcctggtctaaggcaagtccttgacatcctcggtaagaatagtgacaaatataaaatggccttggacagtagagtcccttacctgtggccaccttcgtggttcctctttgcaggagaagctccccgcactcctcactcaagtggctattgctcttcagtaacctggggggagacagaa

SEQ ID NO: 29742 - DNA, 1034 bp, Homo sapiens
actgtgctgctctgatctggggactccaagggcaggagctctcagcattttctctatccctagttctcagcacgtggagtacagaggagaagcttcataaatgcagctgagtggattaattccgggaagctcccgtaaggaccagctcccctaagttacacccgatactcctgcaccattgtgaatataaaattgccatgaacacacacacacacacacacacacacacacacacaaattgctatgaacacacacacaccagtgaaaactcactgccctgtttccaccctggccctccagctattttctgcttctcagactaaaatgacctgaagtgccttccctgaaacaggggttcccatactgttcccaaggcctgcgtgttctcatatgtcagctgccacatctcacagcagggtgtgaccaagctttttgggcctgcacacaggaggggcttcctgggcacaaggtgaacaggcaaacttgaccctgtctctactaaaaatatgaaaattagactgggcacagtcactcacgcctgtaatcccaccattttgggaagctgaggcaggtggatcgcctgaggtcagaagttcgagaccagtttggcaaacgtggtgaaaccccatctctactaaaattacaacaaattagctgggcatggtgtcaggcgcctgtaatcccagctactcaggaggctgaggcaggagaattgcttgaacccgggaggcagaagttgcaggcagccaaactcgggccaccgcactccaccctggatgacagagtaagacttggtctctaaataaataaataaatagaaggtaggtgctttgcttcagcagcacatatactgctaaattggaacaacaaagagatgattagcgtggcccctgtgcaagcgtgatacgaaaattgtgaaatgttcctttgcaagaaaaaaaaaaaaattcacatcacctgaggtcaggagttcgaaaccagcctgcccaacatggcaaaaccctgtctctatgaaaaatacaaaaaattaaccc

SEQ ID NO: 29743 - DNA, 1323 bp, Homo sapiens
tgatagatcctggtggtcacttgttgggcctgggggcagacccagggtcttcccagtgcatgagaagagatgggtgaggtgggaccagagtgggcgacagtggctggacaccagctgcctgagccccgtcttacctctttgagggtggatttcatcgtgtctatcatgaacgacagggactccttctcagagtaattctgtcttgaatcaaaatatccgtggactgctctggaaagtgaggagttgggggttgttggggttcatcttagaaccgcctcccagcggtgcccccatcctgccctgggttcaggcctctgaggagaaaccaaagcctgggctaccccaactcccacagctgggtcccttgaccctgggttggatttgaggctcagttaatctcagctcatgctcagctggcacaagccaggcacaagtgaatgctgaaggcacagcctttctggggcacagggagttcaggacttggtcacagtcagccctgaaaagcagagctgggatctgaacaggcgctggagcccatacttgctctgagagagaatttatgtcttcacaatcctcccgttgatagtctacaattctgtggtttttaatacattgagttgtgagaccatcgtcacaattacaggacattttcatcgcccccaaagaaatcgcgaacctctgagcttacgcggacacacacacaccccaccccaccccccgccccccgcccccaacaggcttccggtcctgagcaaccatgacctggctttgtctctgcagtgtgccctatttggacttgacttgaacgtgaatgcagccatacaacacgtagacggttgtgtctgaattcgtccacttagcgcgatgttttaaaggctcatccatgctggagcccgtgtcagtgcttcgtttctttttatggcttaaaaatcgtctatggtgggccacgcacggtggctcacgcctgtaatcccaacactgggaggccgaggcgggcggatcatgaggtcaggagatggagagcagcctggccaacatggcgaaacctcgtctctactaaaaatacaaaaataagccaggcctggtggcgggcgcctgtagtcccagctactcgggaggctgaggcaggagaatcgtttgaatccaggagacagaggttgcagtcagccgagactgggctcactggttatggagccttacctgggcatgccccccgctgacacctgtggaaaggcatgggacagccccggcccatcccctgctgcccgagccctcccctcctctgaccttcctccttccatgaccctgctgccaggggggctt

SEQ ID NO: 29744 - DNA, 1065 bp, Homo sapiens
atgaattatgtgatttggataagttcttaaactgtgttcaaggaataagaaatatttcttagggttttgtaacctaataagtttgggaactactgggctaaacagagttacatctgtttcactttcgggcttctcagattgtgtaatatgctaatggatgttaccatccagaaggaacatgcagtgtttcctaaacttaaaaccacaattagccaggtgtggtggcatgcacctatagtcccagttacttggggggccgaggtgggaggatcgcttgagcctggaagatcgagactagtgagccatcatcatgccactgcacttcagcctgggtgacagagtgagattctgtctcaaaaaaaccccacaaaaccctagaacatacagcactgcctgcgtctccattttctcatcagtaaataagaaaaacacagcctgggccacatagcaagacctggtctctacaaaaaattttaaaaatgagccaggcatggtggtacacgcctgtagtcctagctccttaggaggctgtggcaggagaactgcttgagcctaggagatggaggctgatgtgagctgtgattgagtttgctgcgaggtggaatgagatgaaggggtatggaaagtgttacacccagtgcctagctcatgacagatgcccagtaaatggtgggtcccctccccatctaaggaaaaactgacaagaatttttgactcttctctgctctccacaggcggctgagtgacagcccatcaatgaaaaaggagagcgagctgcctcgcagggtgaactctgcctcctcctccaacccccctgccgaagtggaccctgacaccatcctgaaggcactcttcaagtcctcaggggcctctgtgaccacgcagcccacagaattcaaaatcaagctttgagcaggggagtgaggcagccagaagtgggggcagaggagggtggctctgtttccccaaggcaaagcttatgaccaatgggccatcggactggagacccctgattgtgggaagggttgccagggataaagagcttcctcactggatgggacccgc

SEQ ID NO: 29745 - DNA, 1115 bp, Homo sapiens
gtgcgaggcccggccggctattttgcaggcatcaccccgatgctgcaggtgatccgcgccatcatgaaggaccctgatgaccacactgtgtgccacctgctctttgccaaccaggtcagtgggcatccccatgatggggaaactcagcttaccctgagaggggacttcgggcctggtcaggtgctgttccaggggtctgcacagctctgctgagattctggggatgaccgggatggggggccctgaatgttctgtgcactggcggccttggcagcagcacggcgggcaggctttgtggtgcagcgcctgtgtctggctgagggggctgccttgcggggagctccctgagcaccccctcccctggctgcttcctccaaaactcagaactcccttcaccatgagcacggtgtggaacccactggtagagtgggaagaatgctggcctggacatggaggggcccatcttacaaatgaccagacatttgcacgaagcccctgagctacagggtgtcagggcaggatttgaatgttggtgtctctggctcctgattcatatccttgtccacgagcccactgcctgcctgcccgccctggcctgctgtgtggtcttggacgagctactttccctctctgagcttcactccctcatctgtagaatgagctgatgaaactgggttgttgcaaggtcttttcaggttagtgttttgtgactgatgacgtagatttgggggagaagatgcttgcctgaggtccttggatgtgggtccttgccccaccctgcctccccgcagctgcagaaaactgccgcaaggccaaccaagatggccttgccaggcccaggggagaaagagccagaaattctaagctggctggtgtggagggagagagggcagcagtgagacttggtggtgctggttcagagtctgtggaggccgtcagaccgtctgtcacctgtacaggccatctttgcagctggtagcgagggcagtgtggtcgcctcatctcatacctccgaacacaggctccgggaggggcttgactgtgcatgtctcgtgggaagtgctgaaaccaggatgcaaaccagggttttatttatttatttattttgatacaaa

SEQ ID NO: 29746 - DNA, 1050 bp, Homo sapiens
gagggtgtataaacaagctctgaaacagctttcttgagagccagtgttttatatgaactttggcttctcagcctctctagttgaactaccagtatgggcttcacacactttttattttgaaataatttcaaattactggccgggcgaggtggctcacgcctgtaatcccagcactttgggaggctgaggcgggcggatcacgaggtcaggagatcgagaccatcctggctaacgcagtgaaaccccgtctctactaaaaataccaaaaattaactgggcttggtggcgaacgcctgtagtcccagctactcgggaggctgaggcaggagaatggtgtgaacccaggaggcagagcttgcagtgagctgagatcgtgccactgcactccagcctgggcaacagagcgagactccatctcaaaaaaaataataatttcaaagttactgtaaaagaacatttatgggctggacgcaggggcttatacctgcaatcctagaacttggaaggctgaggctggctgttggcttgagctcagaagtttgagattagcctgggcaacatggtgaaaccgcatctctacaaaaaatacaaaaaaattaccaaggcctggtggtacgtgcctgtagccccagttacttcggggactgggctgggaggattgcttgggtacaagaggtcaaggctatagtgagctgagatcacgccactgcattccagcctgggtgatagagtgaaaccctgtctcaaaaaaaaaaaaagagctcttatgtactcttcacccagatgtacctaatgttattatttgctacatttgctttatttctctctatacagtatatatctaatgtatgttaaatatattagatactacatgtgtgcatatccatacagtggacccttgaatggtatgggggttaggggctgacctgtatagttgacagtccacgtataggctgggtgcagtggctcatgcctgtaatcccagtactgtgggaggctgaggcgggtggatcacttgaggtcaggagttcgatgagaccagcctggcca

SEQ ID NO: 29747 - DNA, 1101 bp, Homo sapiens
caacatgatgaaactccgtctctacaaaaaatacaaaaattagctcggtatggtggtacgcgcttctagtccagctacttgggaggctgaggcagagaatcgctcgaacccagaagcagagtgagactctgtctcaaaaaaaaaaaaaagaaagaaatgttaatgaactcatcatagtgaagtcttgctaagctgtaagactcaagtggaagtggggaggtttacgtctttcctctcatcctgaattgctagtgtgcctctgactatttggatgatggtttcctaaaatgtgctgaatgtattttgcagaaatttaaacttctgcaagtgtaacatttcgccatcatttcgaaagtagaattgccccttgctgttcccacagtccataaaatctgccttgcttcaaagttgacattcaagttcagttttaaaatagtgtcatggggcttggaaaagagactcttagagtggcctttgctgacagctggctagaagcagcaccaggagagagatgccgctctccctccctcactccgacggcctccgcactggccatcgtggctgaggtgttgtatgttgatcagtctgcctgtgacctgcctcccatgcagaacatgagctttgtgctgtcccgcaggacctggccttggcagtggcattcagtaactgttggaaagaaagagcctgggggtcaaacactttcaaatgacagctcttcagtgattctttttgcaaaactgcccacaatctttggagcctaacatttccttttccttgtcttctctagtatgagaccagggcccgcctagagaggctgtcggcaagttcctccataagctcggctgatctgttcgaggagccgaggaagcagccagcaggtagggggcactgaacaagagctggtctctgtcatgtctacggtatgaacacatttcatctggataggactgtttccttttccaagatattttagcaaccattattcgatgctctgatctctgctataagtcaggtagagcagaagttactattccaggcttcacacgtaaggagaccaagtcatgaaattaaagcaacatcccatcattgcctggcaagtca

SEQ ID NO: 29748 - DNA, 1116 bp, Homo sapiens
taaagatgctttagattagactgtcatgtctcagtgtctatctgtatatattatttgatattcagagaatctaaagcactcgtctactgttttaatgagatttaacagcttttaacagtgagtttcgtttgtaaactgcttgaagtctgtggcattcaggcacacgtctggctggccggctgggtctcctcccgggctcagtgggcctggggcctctctgacgtggtgcctgctggagggaggctcgtcgtcaccagctgactgctggtccggcttctgaccggcctttgtcctggctccgtagcagaacactgtaaaagtgcccgcgtctttgcagtagttgcagatttcagtcgtcgtgttacttgtgcacaaacagaagctgggtcttacccgcagcacgagtgtctcgggctgcccggagtcgcccgggagcaggtgctgcagccagagttacgcgggggccacgcgggccggcgggggtggggggaacgtgggggaacctgtgtttcacgtgactcagcagtgcccgccgccgtcaccagctatgcattcactccgtttccagtgagcagatgtcttgcttggaaagtggacctgtgtctgtgtctgtcctgagaacttaccagcagaaatcctcatttctgtgctacggatttaccaaaaattgtcaagtctttttcagtttaacagttcctttacatgtgtagtatttgaggaaaaaaatcaataaacagttgatctcgtgcatatggaagtcccttcgccatcatctgtcttcatgcccacttcacttggcgggggtggcctccctggggcttactagctttggagctgggcaagatccagggcacaggacccctgcccaaaaggccacggcccactgcccctgccaaactggaggttggggatttgaggcacctgagccccttggggttcccttctccccgagacctgctgctgtttgacctgggcttccacatggtgcgggcatcggctggcgcctctctattgccccagcccaaacagcaggacaagactgacatcacccataactctcctatgagcacattttcctgagcacctactgtgtgctctccactttttacttacatt

SEQ ID NO: 29749 - DNA, 1058 bp, Homo sapiens
taagatggcaggtgatatttcatcgcctacagcactctcagattcagcacgtgaagagacagtgaatcactttaaggacttcagaggcagcgacattttttagccaaggtgtttctttgggccattttcctcctatgcctctccgggtgtgttcccgtcctttctcaagggtttatggtttgccccttaagtgtagattgaggatgtcagattgaaatcttgctctttaaactgtatccagaggttcttcaactctctttggaatgtgtgagccagagagcctcagggaaacagtgggacagaagtggaagctgcatgtgccatgacatccccaacctgggctccgcctgaggactacctggaaacccaaacatctggacatgagggctcggctcagtggagtatgggaccatgacatgacgttttacagccattaaaaatgactgaggccgggcacggtggctcacgcctgtaattgtagcactttgggaggctgaggcaggcggatcacctgaggtctggaattcgagaccagcctgaccaacatggcgaaaccccatctctactaaaaatacaaaattagccagacgtggtggtgcatgcttctaatcccagctactcgggaggctgaggcaggagaatcgcttgaacctgggaggcagaggttgcagtgagccaagatcacgccattgcactccaacttgggcaagaagagcaaaactcagtctcaaaaataactaactaaataactaaataactaaataaataaataaataaaagactggggccaggcgtggtggctcacgcctgtaatcccagcactttgggaggccaagatgggtggatcacttgaggccagaagtttgagaccagcctggccaacatggcgaaaccctgtctctactaaaaatatttttaaaaattagctgggcatggtggcgggcacctgtcgtcccagctactcgggaagctgagacatgaaagttgcttgaactcgggggcagaggttgcagttagctaagatcgtgccactgtgctccagtctgggcaacagagcg

SEQ ID NO: 29750 - DNA, 1049 bp, Homo sapiens
gaaagtgtgtgagttaggctgcatgtcacagagaccctcaaaataatagtggcttaaagagaagtttattcctctcatctgcagagtccagaggtggcatggctggtgggcacaccacactgtcagagacctagacttcctctgtctcgttttgtgcatggctctgttcccaagtcacctcatggttcgcgatgagaaaagcatggcattcatatttaacacggcgaactttgtgctaggattgggacacaaaaataaactccatgtggttcctgccctcaaggatcttaggtctcttgggagagacagatgcctggatgaccgccctccatctgaggttgattggaaggagccctgtgtgagaggaacacaggcaggcaggccaggcagcagagctgacatttgggaataaaggaagtctttatgaaagaggtggcatctgatcttgatcttaaagaataattagtatcttgacactcatctgggaggctgtttgagggagaaggatactgtgaagggaggtacgaagacctgaaagggcagggctctgtttggagccccgggtggcgggtcactctcctgccttgtccgagttgaagtagaccatcattctggagcagacgtcacacaattggaaagatgtccccagctgtgtgattagtatgacatccattctaaaaggtgaacaaaagaacctggaaagaaaccagacaggatcgttttggagttctgagatactcattcttttgcctgtactttggaagcaggatcaagccattcgtaggcacgccactcccactgaacatttcacaatccactgagcccagtgctgtcactgtgtttcagttctcagaagctattgacagcatcttcaatgagaagtcctgggacccagagtcagagcactttttactggttttgcaagatacaaatattaattgctgttgactttccctttaaattttagcctctgtatgtgggcaggacttgtagcatagatgagaccttgtgttaccaacattgtaagtaatttatgtgatgtggacgtg

SEQ ID NO: 29751 - DNA, 1024 bp, Homo sapiens
aagtgaggataggttttctgttctctttaacgttgagtttccatgggaaaacattaaacgttttcattttagctttgaaaatttagggttattaataccacctgtgttccttacaattgggggttttgtgacattttctgggctgttttggaagagagggattgtgtaagtgaatataccctggttgttaaccataataataacaacgtgatctctgcatggctctgttaaattaaaaaatgtaactattaatagtgtgtgaaatagttctcagcctagccagcagctggaagattacacattatgagaaactcatcaagtttaaaccacatggggatttctgtgtagaaatataccagttcctccttccttcctcgctgttcctgtttcagggcagccatcggctttgtggagccctctgaaccctggctggttccattgacgctgactgtgttcctccactaccttcccatcacctaaggtctcttctgtctcggacacctcctgcctctcccactctgcacctgccccattcccatccaaggttcaccttggtgtcgctggcttggaagccatttcctcacttccctgggtggaaagcagctacttcagtcctccaacaatcccaaggagtggtaggcagtgttagttttgttttctggatgaggaaactaaggttcaggaaggttaagtaacgtgcccctggttacccagctggtttgcagcaaggctgggattcattcattgctgcttctcacatatcattgcctcgtgtaagccaggtgctgtgcccagccgtgggatacaactgtgaacaaggcaggtgtgagttaggtgtctgcctccctcaacaccttgagctgtttgagcaggcaggcgtctggaataggcatgcagtgaacactgagcgaatgaatgagtgaatgaaagaattcctgtcaacattctactcttgttggactcgggttggcatgctgcctcccttagcatccagcctgtcactcttcagagtcacgcacacgtg

SEQ ID NO: 29752 - DNA, 1027 bp, Homo sapiens
gtctctagaagtcagggactttatcttgcacgctgccatctcctgttcctggaacatcgcaggtgctcaagatgtgttaattagcgaagaagcaaatgactagaggatgcagtgataatgacctttcgttcaccctgagaactaggctggccagggagtgtctctccctcttgtaggtaaggaaacaggctggcaggaagtgactgcatagagttaggcagactgtaaaagccagagcgggcacaagaatccaggtctcctgactccatccttccattgtgtgttctagtcccacccaactttgaaagcaaaagttgttatatatttctgttaaaaacgttgccctgtgggagtgcttcccattccctctgtggggttggctccactggaatggggaggggaggagctgtggagttgcatcgttctggttcagttaggcctgctctaactgcgtcacttccaatcattcttctttcaaatctttagactcttgtacatcttcttacactactgtttgaattctcatgttaatatcaaatttgaaaaagtgtcatttttgtcctttttaaagtaagtttttctgttttaaacctctggaacatcaactgagtatttaggttggggaagtgttcagcctccatctccacattcccagggtgcttgccaaccagaggctaaaaaaatattgctgtaaaaatcagtccaaggcaagtctggatctgtcagctgatgtgttcccattgcataagataaacgagttttggggacacatctaattacacgctgttagctccagctcttcattaagttgcataggtgagctaagagctgatgggctgcgctgggacgggtgaccttggggcctgtcctacctttgctgctgattctgatagcccaggtggttgtcagctggagcaagcggtctgaatgccaccaggatggctggtcatcagcttgtttcctttgacctataaagatgttggggaaaacatggttattttaagggttactatatgaatctgcatat

SEQ ID NO: 29753 - DNA, 1034 bp, Homo sapiens
cgggaggctgaggcaggagaattgcttgaacctgggaggcagagattgtagtgagccgagatcgctccactgcactccagccggggcgacagagcgagactccatctcaaaaaaaaaaaaataaataaataggccgggtgtggtggctcaacgtctataatcccagcactttgggaggccaaggtgggcggatcacgaggtcaggagactgagaccatcctggccaatgtgaaaacccgtctctactaaaaatacaaaacaaattagccaggcgtggtggtgcgcgcctaaagtcccagctaatcaggaggctgaggcaggagaatcgcttgaaccaaggaggcagaggctgctgcagtgagccaagatcatgccactgcactccagcctgggtgacagaatgagactctgtctcaaaaaaaagataaacttaaaaataaaaaataaataaataaaataaaataataaataaataaataaatttcttcaacaggagagtcattaagatacctggtttgctgtgctgctgaaaacagaattatgctctgtcattccttgactcattcattctagttgtgtttattatgtgcctgttacgtatcagtggtaggaacacgggcaaacaaggcaaaatcctggtgcataaggaacctacattctcgtgagtggagagagaaaagataatttggcaggtgaggttgagtgttaagaaaataaaacagagttagggctggagtatcagggctgggggaaggctttcttaagaagagggtaatgtttgagcaaatatctgatgctgggaggcagcagatcctacagatgtgggaggcaggtattcccggcagaggggaggcaggtgcaaaggtaagccgagtctggtgcatctggagaaccacatggaggtcactgtagccagagtccagggtgtggggattggaaggagcgagactggcgctggaagcaggggctagaatcacatgggaccttgtaatcagggtggggagtatcaataactgtgacagttgacaatagct

SEQ ID NO: 29754 - DNA, 1044 bp, Homo sapiens
atactattatttagggatctagcaaccttattgatctttaaaaggcttaagttcagaaaaagtttattgttgcccttttcttgctctgtgttttggtgtctgcccttctgtctgtctggcatctgtgcgagtcatgcgtcagggcatgttggggagatggaggccagtgtggctgggttgagttataaactggaagcaaggttgggagcccagaatccaaaccaggttcagactgggagaatatctgaaatccctgcagcagcaaagaaggttcctatattcacggtccctgaaggaattttgctgggtccccaggttctctgggagcattgatgtgtctcactctcatggtaccaaagactttctgtttttattcatcaacttcctgtatttccttctgctccctccttaacctggggttggctctagtttcaaagttaattctcaaatccaaacctcagacttaaaggctggtaactgcccttggatatgtttggggctggctcctgagaaacctcttttccaggaaagctctggcctgttagattttgctctgtaattttactgccttgctcacctaacggtggtcactggtgttctgagacacgtgggtggaactcagcaatgtttcttcacttgtatttttgtttgtttgttttttgagacagagtcttgccctgtcgcccaggctggggtgcagtggtgtgatctcagctcactgcatcctccacctcacgggttcagatgattctcctgcctcactctgcctcccgagtgaagtaatagctgggaccacaggcatgcgccaccatgcctggctaatttttgttgacctgtatttggatcttatatttacatgagaatttcatgcaaatagattctttccccctagaaatggactcagacatttttgcatgcaattcaatgtattcataaatccccattcatttttatttatttatttattatttattgtttttttttttgagacggagtctcgctgtcgcccaggctggagtgcagtggcgccatctcagctcactg

SEQ ID NO: 29755 - DNA, 1031 bp, Homo sapiens
acttgatccatcagtaaacctaagctcagagagattcagtggccttcagagggtcaccatcagagctggtgctctgcctaccgaagcccacactcatttcacctcctctggctggctggaataagtaagttgtgaatcactctcagatgtgaacatctttaaaagataattaatctttctcccccacctctgagaaacatagacatgagggagattatgtgtgtcctttgcttaagacggcatctatgtctgtaactaacttggtttcaataatctgaaagtttacaaccatttacacagcagggagataagggcacaaaagggagagctgctggggtgcggtcaaggccgtgggtgactcgctggtacacccaccccatgatgcatcccacgtgggacaggaggaagattccagaggccctggcttaggagtgcctcatcttcggcagatgcattttaaaaggcatcttatgctgttaaagagcaggtagacaagggagaagaaattgtgtttctgtagaggactgcactttgtaaaattgcgaaaggtcttcacattttgtcaacgttgtgatatcacataagagcatttgctcaggtatattagagcagatatttgttttgttttgttttattttgagacagagtcttgctctgtcgcccaggctggagtgcagtggcgcgatctcggctcactgcaagctccgcctcctgggttcacaccattctcctgcctcagcctcccaagtagctgggactacaggtgcccgccaccacgcccagctaattttttgtatttttagtagagacggggtttcaccgtgttagccaggatggtctctatctcctgacgtgatccgcctgccttggcctcccgaagtgctgggattacaggcgtgagccaccgcgcccagccgatatttgtttttatgcttgggataatcatcacttttgtgtcaaatgacttcttttttgctttctttaaatcttttaaaaattgaaggttcaacatagaaaacaatgttctgagt

SEQ ID NO: 29756 - DNA, 1029 bp, Homo sapiens
tggttgagaatgcagtagctgtgtgggttctgcttctctttcttttttcttttttgagacggaattttgctcttgtcgcccaggctggagtacaatggtgcgatttcggctcactgcaccctccacctcccaggttccagtgagtctcctgcctcagcctcccaagtagctgggattataggcatgcgccatcatgccgggctaatttttgtatttttggtagagatggggttttaccatgttggccaggctggtctcaaactcctgacctcaaacggcccgcctgcctctgcctcccaaagtgctgggatttcaggcatgagccaccgtgcctggctgtttctctttccatatggtttatgcttacagatccttgaggttaatatgtcactttcactgttagttcctacagaagaaaggtaattttgcaataaggttttggaggttaggaacatggttttggagtcatacagcccttgggtgtgggttcgagctccatcactaggtgactgtgcggcttttggccaaatgtttcaatgtctccaaaacttgagtgtcttagtcagttggggctgctataacaaagatgcggtggcttgtaaacaacagaaatttccttcttacagttctgtaggctgcaagtctgagatcagggtaccagcatggttgggttctgaggagggtcctttttcatgttgcggattgctgacttcttatagcttcacatgacagaaagaaggcgagagagctctcaggtactttttataaaggcatgagtggctgagtgcagtggcttatgcctgtaatctcaacacttttggaggctgaggcaggaggatcacttgatgccaggagttcatggccagcctgggtaacatagtgagaccctatctcaacaaaaactaaaaaaaaaaaattgtaaggacactagtcccattcatgagggccctgcctaattagcttccaaaggccctacttcctaatgccatcaaactgaggggtagaatttcaacatatgaattttgaggg

SEQ ID NO: 29757 - DNA, 1033 bp, Homo sapiens
acgtgtggctgtcattcccaggcatgtctttggttcttttcagcaggagtatgttcctgaccattcaagctgctgttttgcttacttaggttttttgttttgttttgtttttttgagagacaatgtctcacgctgtcacccaggctggagtgcggaggcatgatctgggctcactgcaacctcaatctcctgggcccaagccatccttctgcctcagccccctaaagtagctgggactacgggcacgtgcctccacgcccggctaatttttttgtatttttagtagagacggggtttcgccatgttgcccaggcttgtctgaaactcctggactcaagcgctccgcctgcctcagcctcctaaagtgctgggattacaggcgtgagccaccatgcccggcctcctacttaggtttttatgtaaatatcatcttattcaacggatccttctgcagcttgctttgttggctgagtggcgtgttttgaggttttgaggttcgggcttgttgctaactgtggcggcgattggtcatctgaggtcttcactaatgataaatcatggcgcgtgaacatgcgtggaggcacctggccatgcccatgtccgaggagtcctctaggaggacttggagaaagggccctgccatgcactggtgactataccagcacacactccccacaggggccgagtggtcctgttgcttctgtctgtcttatccttgcctgtgttgaagcctactccctaggacccagaccccccagcagggccccaggacattgttggaagtcgccctcaggttctgagcccctcccttctgtactgtgggggtcatcccgggagtcctctcctggagctctgtgcctggggaggtacgtccagcatggcatggatggcgggcttccataggggcctttcctggcttgttcttttctgggagaaacctgagccgactgccaccttcctcgggtgtgttttgggtaaagtcttgaggccagaaagatcttgcatccctcaagcactcttgagctggtgctga

SEQ ID NO: 29758 - DNA, 1047 bp, Homo sapiens
gagccagtttttctctgtgtaatcctgattggactaggaaccttcctgctggaaacgtgcagtgagtggcacctccttatgctacagtgtaacagagagtttcctctgcccctcacttctgccatatgctttccgaggaccactctggtcccaggcctgtgctgggtggaagggaccttggtttgttcatgaggacaaaaaggttcccatgggctgcgtggaaggagcacagtgggaatgaccagctcctgcccagccagcctccacggcagcacgccctccctcgggcggtcactcgcccgtctgagacctgttctccatctgggaaggggatggtgagacaccatctggctcccacagtattggaaggatgggaggtggcatgagaaatatgcctggcacacagagggtggtcgccaccgtgccacgtcccctgcccaggccgccttgcctgctgttgccctactaaggggcagccagtgtttttccgtgacccttccccagccgttaaggacagagctgaatcactgctttaccattcacaaacttgcagctcttcctgagtgaagcctcctgctgctactggcccaggtgtggaggaggccgccagcagcagcagcacctgccagcgctgtgggcccttacacccctggccatcagccctcctgcctcaccttaggccggctgccctggaaaggatggggaaacttgaagatacatacatatatatatatatatatatatatatatatatatatatatatatatatatataatttttttctttttttaattgagacggagtcttgctctgtcacacaggctggagtgcagtggcatgatctcggctcactgcaagctctgcctcccgggttcaaatgattctcctgcctcagcctcccgagtagctgggattacagacgtgcgccaccacacccagctaatttttgtatttttagtagagatggggcttcaccatgttggtcaggctgatctcgaattcctgacctcgtgatccgcccgctttggcctcccgaagtgttggga

SEQ ID NO: 29759 - DNA, 1022 bp, Homo sapiens
gtagtactattttactaagtgattttgtttatattagatttgaaacttcatataaatgcattgctgccattttcaattcaacattaagtacctaatccatgcagtgttatagaaaaaatgtttaaagtaatgttttttgttgttacttttaaatccagatttggacttaaagccaccactaaaatcaattggaagcaatttctaacatcatttcatgagcctcaggggttgcaagttagcagtaaaggtcccctgacaaaaagaaataggtatgtaaaaaaaaaaaaaaaaacaaattttagttacacatatcataatatgtaaaatatcagagaatatctgtgctactttttctgcatttattgaatgatcgattagtctccattgaataattgccaacttttatatagtgatttactgcttacaaatttttcttattgaaaactgccttaaactataaggttggtataattgttatgtcaatttctagatgagaaacataagatgatacaatctgaactccatcacctgctcagagtgtggtggagacagctatggaccacaaaggctccaggcacacaggccgccacggcaagcactgctccctagctctaagcatatccttgtaacattgtaggtaaacgtgtatttgttaggtgttacatggaaaggaacaatatatgttgatttgttttccagccactgagtggcccagatatcatgggtcatggagattatttgtctatcattatttctgttttcgttttaatatctattataacctcagatttgcaataccaaatatcttgtgatggggccccaaaatgttttttaaaaaatttaataatatgaaattttagaatttagctttctgctctgagaagtattttatgttgatgcgtatcctgtattcattgccctctatgaatcttaaagaaaaaaacaggctttataatcttggcacgttcattgaaagtgctgtgctctactgtaaagtaaaatataccatggagttaattccc

SEQ ID NO: 29760 - DNA, 1065 bp, Homo sapiens
ctcttctttgtaggggcccttttaggcttgggctctggctttggaggagcaggtttagcagacaagcttgcagatctctgtgatttgtccttcatcttggttttatctttttttttttttgagatagagtcttgctctgtcacccaggttgaagtgcagtggcatgatctaggctcactgcaacctctgcctcctgggttcaagcaattctcctgcttcagcctccctgagtagctgggattacaggcactccccaccatgcctggctaatttttcatagttttagtagagatagggtttcgccatgttggtcaggctggtcttgaactcctgacctcaggtgatccacccgccttggcctccaaagtgctgggattacaggcgtgagccacccagctggttttatcttctttcatgtcctattcaacctttctcttgggcatggtgatgatggcagtgggatgtcggtgctggttgcaggatgtagcagcacacagcctcttgtcagttcaggggacatctcacctctttttcacactgcttgataatctttgatttgtagtctattttatctgatacaagtaaagctattcctgctcttattttggttttcatttgcatggaatatcctttccatcccttcactttcagtctatacgagtctttataggtgaagtgggtttcttataggcagcatattgttgggtgttgtttcttaatccattcagccactctatgctttttaattggagaaccgagtcaatgaacattcagtgttattgttgatgagtaagaacttactgttgccattttgttgcttttttctgtttgttttaagtcgtcccttccttcctttcttactgtcttcccttgtggttgattttctctggtaatatgttttagtccattgctttttaggtttttgcattatagttaccatgaggcttacagaaacatcttatagatataacaaattattttaaaaagatgacagctcatcttaggtcagaaaaaagaatataaacaaacaagaaatgaaaaaactctacactaattctatctgtt

SEQ ID NO: 29761 - DNA, 1033 bp, Homo sapiens
ttcagtttgttctgtgcacctgaggcgctcagccgtgggaggaccattttgcgagtgtagccctgtttcactcggatcaggttggcacggccgcctgcgtgtctgtccacctcatccctccgtgtatctgagggagtaaaggtgaggtctttattgcttcactgcctaattttctcacccacattcgctgaagcgatggagagtcgggggccagtagccagccaaccccgtggggaccggggttgtctgtcatttatgtggctggaaagcacccaaagtggtggtcaggagggtcgctgctgtggaaggggtctccgttcttggtgctgtatttgaaacgggtgtagagagaagcttgtgtttttgtttgtaatggggagaagcgtggccaggcaggtggcacgtggcatcgcatggtgggctcggcagcaccttgcctgtgtttctgtgagggaggctgctttctgtgaaatttcatttatatttttctatttttagtactgtatggatgttactgagcactacacatgatccttctgtgcttgcttgcatctttaataaagacatgttcccggcgttgcgtcgagcgtttctgcttgtgggggtagaggggtccctgcagcggtgctgtcggtgcttgggacaatatgactgtgggccccgttgacaccccattccctggggttgacagcagagggaaacaggcccgtgttgggctttgatgaagcagaattcagactttccaggggttcacttctccccattatttcactcaaattcagactttccagggggtcagttcccccactatttcctcattcacctctgatcacttctataaatggggtggaggagaaagggtaaaagcatgggagatgcgggtgcacctgtgggtccaggtgtcgggacctcccagtctctgcctgggagccctgtgttcagcgttgcgcactgtggtgcccgaggccggcccctccaactgtgcttccccactgggaattccaaagcctgtcttcctgatttcctgtggaag

SEQ ID NO: 29762 - DNA, 1040 bp, Homo sapiens
atattatgacaaaagactgtaataagggctggggggataatgagccaggagccatagatggaaaccagcacatatcataatgtagcatgcttccatgtaattcccaccagacccagttaatagctctagaccccggaatcgcctttgtgtcttctctgaatcagtaaccaacccaaaatataaacactgttctcacttctgtcactatagttgagttttgcccatccttgaacctcatgccaatgggacatacaggattgtaccctggagcgccttggggtgggaggactccgtcacatcctgtctgtggggcttggccatgctgtgtctgcagttccgtcacatcctatctgtggggcttggccgtgctatgtctgcagttcattcttttttgttgctgtgtagtacaccatggtgactgtcacaacttactcattctattgctgatgggtatttgtgtttccaagtgactttatgaatgatgtggccaagactgttctagaacctgcgtactggtggacaagcactggcttcccttgggtgtctccccaggatagttcctggatcatgggctatgtgtatatagcttcagtagatactgggcagacgtcatttcctcatcttggctagcgggtcattcccccgacccatcattcctgcgtaaactgccaagttcagcctcaggttgggccgagtcacccacctgttacagcccctgagccacttccataacaggggctgggttctgttctgttctgttctcctaacagccctgtgaagcatcctggcccctctgagaatcagagccgactggcccatgacccagcacgggggattcaggctgagaccgtgcggggcgcgctcctcttcccagactcagtcgccctgggccccacctggggctcttgagccccttcttgggcagcaggtgttgacccgagcacagggccgggcgcgtgggcctcctctgagcaccccgcgctggggcttctcccctccaggcaccagcttgctgcaggaggtggtctacttggtgagcc

SEQ ID NO: 29763 - DNA, 1045 bp, Homo sapiens
ggagagcgaggccgagacccccagcaccccgggggagttcgagagcaagtacttcgagttccatggcgtgcggctgccgcccttctgccgcgggaagatggaggagatcgccaacttcccggtgcggcccagcgacgtgtggatcgtcacctaccccaagtccggtgagccccgcgccgaccgcgcccgccacgccatgccccagccctgcagcgcggccgcgtagacgccgcgcccgcgcccggggcttctgctgggccgggtggtcgcccttggcctccgcccctgccgtgcccaccgctctcccgatgctcggatccctgcggggcggggtggggtggggtgggggtgggaaggggcttggttctcatctggggaaaccaaggtcagagaccttcgggagcggccccttccgtggagatggagcctatttggccggcgctgcaggaggatgggcccagggccgccacccatccctgcttctccctttacctggctggctgtgtgaccttggacaggtcactcaacctctctgttcctgaatcctgcccaacctttgatgagtgcaaagtcctggtgttcacctgggaagggagataacatgggcgtcagggctttcagcgtggaaacgtaacgtccctcctttccagcctgggctccgggtgggggatgggaccagtccccgcctggagtgccttgcttgtacattctcttgtttcagggctgcctccatcaccgaggcaggacctggggcattcacatttcccagcattagctgacgtcactttcacaataacagctgtgtgagctagtggtggtcattcccactttacagtctaggcacagaggctcagagaggggaagaggctggtccaaggtcactcagctggtgagtggctgacctgggaattaaagctaggctggtctgtttccagacctgaggtaggagattgtatagtaccccatctgaggtttttagggaaaggaggtagcagctttcctgttctgtaaacatgccctgggatttccttgttgccactgtatt

SEQ ID NO: 29764 - DNA, 1106 bp, Homo sapiens
tgccccttcccagttgcttgtgtcttgactcagcccaaaacccaaagcactttccgtatggaagaagatggtgggttgtggctggcctctggtgagactccactgccccacagtgctggctagttcagctcttcctgcaaaagcaaagccttcccctctagggacgagctgctgccagggcctccctgggcatgagcaccacctgggagtgcagcccttcctccatcacctgcaggtccacaggccaggggtcgagccccggacagcctggacatcggctggagctgggccaaagagggggtcacagggggagggcggcggcctggcagaatcttaggcagaactaggaaaagatcaggagacatctctcctgaaattcaaacaattggacaatctgttctggatcgatttagaagcagtggagtggaaaaaaattagaaaatatagtgtgaaagctattttctctccctctcagctcacttgggcagagggatgagctggagtttatttgcggactgtccaaggccctggccagggcctcgcacctcctccctgccccctgatccacggcctggcccacttatccccaatgcctgctgccttctcctccatgcccagttctgggctggcaatagggggtctcagaggggcagcatccctgttggttccaggaaccaacagtgtataggaactcagacatggacatggctaagatcggacgtttgtgttccaacaggcaccctgagggaggtccttctgtccctctctcccacactgccagacaaggcctctccatgccaaggttaaggtgtctctgcctagttcactcctatacccccagggttcaggccatagaatcagggctggcacatagtaggtgctcagtaaaagtttcttgcctgaatgatggaaggaagaaagggacgggggaaggaaggaaggaaactgaggctttaaatgaagtgacccattcacagtcacatggtctgttagagatggaggtgggattggaatcagatccatcaccctcgagacctgatttccacccaccccgccgcccatccctggggccaggagctaggtctgagacatttaggggcctccca

SEQ ID NO: 29765 - DNA, 1035 bp, Homo sapiens
tggtcccctcctgaggagacctgaggcacacggtcagggaaggggtagagggggcacctggggcagtgaggcagcacctccaactcatgggcagaaccaggcccagggatgggagtgctctgcccaaggcccttggagccccaacctgatggggagaccctcacctgctcaccgtagccctatcctgggcactttgccaacatcaccttgtttaattctcataactttctgtgagaagagacaggttgccattctcactaggagctcagagaggcaaagggacttccccaagggcacgcagccactatgttgcaaagccaggatttggacctggtggcttctgttctttctgctggggaggctgaatacactttgtggtcaggaggggtgctggtgtggggcctcagggtcaccacactcctgtgtccacccttcaccaccatgtggttttgcccagcctcctgcctcctgtctgcctcggtttccttctctgtaaaatgtgttcacagcaggccctcctgcaggagtctgaacccaggagggaccatgcagagtgctccgaagggccggccctctccactccttggttgttctttgactcctctttggggaggagagacacctggggaaggtgtggggcctgcaggagccacagaggagctgcgctggggttggtcccgcttccctgcatcttaacaaccaggggctggtttctgctgcctgctgcttcctcagaagggggtgggtgccaggcaggcatgggccggccacttgtccggtgcatgtcatgggtttattcactcctgagatagtacccagggcccgtcctcacaggctcacagtctgcagggactcgtgaacacagtcacctgttctggctccagactctagccctgtgtaagataatgcacaggtgtgggtgatgacagaggatggggagcaattctgccagtaggaaaggggctgagcatcaaggggaccctcccagaggaggcagcatccaaggaggtggagtctgagatgaccaggttgaca

SEQ ID NO: 29766 - DNA, 1034 bp, Homo sapiens
aacttttcagttataaattgatgaatatctttgtgcacaggctgtttcccaatgtcaagttattagggtagactccaggaggtgggattcttcaactaaagaatatgaaaacctttgaggcttttactacatattgacaaaatggtttccggaaatatttgtatccccttacactgccaccagcaaggataaacatgtccatcttgcccgtattgggaattatcatctggctaaatatttgctaatttgataatgaaaaaatagcatcgtgtttcagttggcatttcactgacttctagcacggttgaacatctttcatgtggagcgattgtatttcctcctttgtggattgtcagtgtcctttgctctatcttctggggtcagataaatttgtatgagctcggtatatattaaagatattaacctggtgtgtgtcatatttgctacagctgtttctgggtttttgtgtgttttatcttattggaattttgacatacatagtcgatctgtctccacagcactgtgtctgctagacaagaacacaaggcaggcaggtggattttgtctgttttgttcatggccgtagcactagcacctatgacaatgcctggcacgtgataggtactcagtacacttctgttgaattagttactccagtggatctgcaacgccttgggatccacggcacgtgataagcactcagtacacgtttgttgagttagttactctgatggatctgcaacacattgggatccacacatggatccagcagtccgcgctccagctcacaggccgaggctctcacactccagagctcgcaggccgaggctctcacactccagagctcgcaggccgaggctctcacacattttgtctcagggtccccttgcactataagaactcattgagggcctcaaacagcttttgcttatataggttttctctatcaatatttaccatattatacatttaaacagaattttaaaataattatttggaaaataaaaacactgttaaacaacattttaaataaa

SEQ ID NO: 29767 - DNA, 1044 bp, Homo sapiens
gcacaacaggataagcgtccaggagccacgggctcccaccccgagcatatcacatggtgccgaattgcactgaacacgcgtgtgtgcatcgcacgcggccacgaccacagacacgcatgcacacacgcagaggtgcagagcgaggaggccggcaaatcccgcagctgccacggtccctcctgtcattctcacgactccgggagaaactgtgctgtatgatacagatctattttaatacacttaccactgggtgaacaagatttttatattcttttattgatgaacaaagtgaaccgtgtgaggcacacgtcttctatattggctactctgtgccaagtatgcattaccgcgtggcttgcgatgtccatgtcttcagcttccttttctgttggtttggttttcttcgcggatggattgagttacatgttttaacagtgtaatgggaggatctgaaaggttggacccgggaggggtagctgccgatgtgtcttgagattgttaggttttttttggaccaaggaggaccgtccagtgggtagtgaggatagagaaaaagtgtttgtcttaaatacgccaatgtagttttccttctttacaatgtattaaactcgatcgatgatttcaaagccctgtggttttggtgtccttgcgttgcggagaggcccccgggagtgcccagggcagccaggtgggcgttggaggggctggaaatcagggtcttctcccatcctgaggagggagggatggagggagggaaacagggagagagctcagtgccctccactcactcacccccgattcccagtcctcagaggcggcgggtgaccctttagggctaggattgagggtggaaagtcttggaaacccagcaggtctgtcactgtgcagagcccaaggtggtgccctctgctccctcatgggttcctgcctctcagcctggcaacatcaccgctgtctctctcccccagcagcgggtacaggcgctcctgcagccacgctgagcttacaccttgccctacaagaggtggggaatcagcccccctg

SEQ ID NO: 29768 - DNA, 1053 bp, Homo sapiens
tcatgatcctaagcccagggctcccaggccgtgtacatcccacgccccactccgcaccaggcacgtgcgggacgctgaacacggctggcctgttcaccccacacaagcacacagaggtgggatcgtgtcccctttaggatttacaaaccacaggctcacagcaccttgcccaaggttgtagctgcaactcagcttgagccagccgggccgtgacctcacatccccagcctttctgccatccttcagatgcctcctgatttcagccataacagaaaatggcacctacagcaatacatagagaatggggacccaggaagcaactcggagcagaggcggaggctgggggtgggcggggccactgtcagactgaggttcccaggctgcctcagctgccctggggtttctcacagtaagggtgaggttgcggcacggacatgcttcctagcaggctcctcacatctgcaatgctctaaaacgcgtgacatgtatgtacctacaggtgtcaaggtgatgggcagtggaagctcagggatgtgaggtggcagtgtccactgcagggcggtggccatcaccccacgctgatcgccactgagtctcacggctgactgtgcttccccttctctcagggatgtgaggtagcagtgtccactgcagggcggtggccatcaccccactctgatcaccactgagtctcacggttgactgtgcttccccttccttctccccctgtcgtcacggcggctgcacagtagcggggggcaggaattacaaggttcattttacagacgaggaagctgaggctcagagggaaaccacatgtacggtcacggagctgcatgctaacttcagacagaacctgggcttctggctcccgacccagggcgctgtctgctccctcctgtcccagggcctacagcctgccttaggacagagctgcagccctctctggggccagccattgtcctggcctcagctagcatctgaatgagtctggctgccctcaaatcagtacacgccctgcaaagggcagtcggagcaaggtcccagccccgc

SEQ ID NO: 29769 - DNA, 1079 bp, Homo sapiens
ctgaccacatacctgtcccttcttcccaggttaggccaaagactctgattccagacagcctccccgttgccccgggccgggaccggccacccaagcagcccccaacattccagaaggccaccgtggtcagcgtcaagaaccccagcccagccctccccaccgccaacaacactgtcagccatgtgccagcgcccggcagccagccccaggccctcgccgagcccgccgccctcgcctctccgctgagcagtgcgggggtggcctacgccatcatctccacctcccccagcaatgccgccgccatggcccccagcaccgccgtgtctgtggtcagtgacagcatcaaagtccagcccctcctcatcagtgctgacaacaaggtgagtgcccaccagcaggctccggaaagggtgtgcggccgcatacaggaggccgagagcaatcatttgggaagggccaaatgaacaagcccaggcaggatgaatgaccaggaggcagaatgatcaagtggacaaatgaatgaatgggacggaaacagaggagcaaatgaatgaatggagtatgaacacatgattaagggagtgaattagtgcatgaacaaatgaatgaatatgcgatccagagacaatacggctgcatgaattaataccagtggaaaaggagtgattggtcaatgaatgaattcattcaaatgattaaccaattaatgacatgtgtggctgaatgagtgactagaagagatactgattctctgtttctgctggtggagttggacggtcaagggctgtttttaccccactgcccaagtgcacaatctcccataatttctgccaagttttaaaactaaaactaaggtcctcccgctgctcccctccgagctcctggtggttgtgctgtttgaggccttcggggctgcctcatctctgccgtcccctgtctgtggcctctttctctctgttccccatttggggtctgccaggccgcccctctcttgcttatggctggggtaccttctgcttccccagcctggatgttgacggccgaccctcatgtgagctggtgctgttgcacccagtgca

SEQ ID NO: 29770 - DNA, 1081 bp, Homo sapiens
gagatgatggagtagactggacataagcaacacatttagggtgtcactgtccccatcacccacccgcagatgggactgtctagttgcaggaaaacaagctcagatttcccacttatgctatgttatggtgagtcgtgtaattatttcattatctattacaatgtaataataacagaaataaactacacaataaatgtaatgtgcttgaatcatcccaaaaccatctccctcccaggtccgtggaaaaaccatcttccacggagctggtctctgtgccaaaaaggttggagaccactgatgtaaggtacaaaacaggcagcatcacgtccgaacgggacagcagtggggaggagggacaacagcggggaggagggacaacagcggggaggaggctctggcgccctgtgctctggatcctgaactcagcggtcattgtctgggtgtggatgcaggaggagttcctccagctgtacccttaagacctgcgcacatcgctgtttgtaagtcgtatctggataagtaaaaaagaaaaggaagcacaccaagcagagccgaagtgacaaactgaaacatatctgagcttccgggagccagggccacaccctggtcatcagccctgtgcttggagacccagactccacctgacccctatcctcaggcctttcatggatggcagtggcaagagcaggtacgaaagcagaattcacactctggtccccacagggtccgcgtggaaggtgtgacatgacagagaggcagaatttggtgcctgtgctgccgagcggggctgcggtgagtgctctgggcccagcctgtcccaggagatgcacccagcacacctggagggcccagagcccttccctctgccaggccattcatgggagctgcgtggctgagaggttctatagggcagggggctgggccctggcgctggccaggatttaaggcccagcgggcacttcctaagttagcatccatggctgtcagtcacctgcccatgcgtcggtctgcttaaaaacaaaggcagcagagccctgccttgcgagatcattttaaatgagatcatgaacgtgaacagaat

SEQ ID NO: 29771 - DNA, 1033 bp, Homo sapiens
ctttctgagaaatgcatcattaggcaattttgttgttgtgtagacgtcctagagtatacttacacaaacctagctggatagcctactacacacctagtctgtgtggtatagcctatgctcctaggctacaaacctgtacatgttgctgcattgaatactgcaggcaactgtaatacagcggtaagtatttgtgtatttaaacatagaaaaggtgcagtaaaagtaaagtattataatctcaagtgagcaccatcatatataacgctgttatgcagcacatgactgtatataccctgaccaagtgagatttgtcttgggaatgcaagcgtacttcaacatataaaaatcaatatcatacaccacattaatagaataaagggaaaaaactatatgattatctcaattgatgcagaaaaagcatttgataaaaaaactaacagcttttcatgataaaaacagacagcaaactaataatagaagggaattttatcaacttgataaaaggtatgaaaaactcaaaaagaacagtatactgagtgttttcaccctaagatcaagaacaagacaaggaagggcactcttgttacttctctgcaacactgtactgggatttgtagccaggacaattagacaagaaaaagaaataaaaggcaagatttcaatgggaaagaatagacttttcaacaaatgatgctgggacaactggatatccacaggagaaacaatgaagttgagcccccacctcccaccatatacaaaaattaactcaaatgaatcaattaaatgtaagagctagaatcatagacgtcttagaagaaagcataggcatagatcttcattgccttgaattaggttatgatctcttacttataacaccaaaagcacaagcaataaaagaaaaaatgaattagacttcatcaaaactcaaaacttttgtacttcttaagataccattcaagaaagtgaaaagataaccaaaagaatgagagaaaatatttgcaaatcatatatctgataagggatatatatatat

SEQ ID NO: 29772 - DNA, 1030 bp, Homo sapiens
aatgtagtcactttttgaggtactgggggttaggtcttcaacataagaatttgagggaaataaaactgagcccatagcagggtaataggaaaggctttaccaagttaaagctgggattggaaataccccatttctgtgattaaaaaatgtacctttgacatttctgaaatcagtatatttctgaccttcagggtacagtttaaaaaggcatactgccctggttttaccattagtggttgaaaggatggacagtacagacttctactgggaaagaggtcttagtgttagatgcatcagcttcttgggtcaggggcaagatttttctctaagttgcctatcggaattgaatctgccttgcctgagcctctcctttcagactttcttccctctccccagccatcagtgacctttcagtcttcatcccaggtcctctttcttcctctgcctcagagcctagttaattgcttctattcagtgaaattagagttcaagagtctgggactgggattccttctcagagaatgcaggagtagaaggcaaacacatctgacttcttgcttacgtcatagaacattacaggatgctgtggactgaattgtgtcccccacgaattcgtatgttgaaaccctaactcctagtgtgattgaatttagagtaagaaagtaattaaggttaaatgatgtcatatggcatgtgaaaacacagccagaagctggccatctgcatactaccaggaactgacttgccagcctccaggactgtgagaaaataaactgttgcttaagccatcagtctatggtgttttgttaaagcagtccaagctaactaacacacagaggtacgagtccctctgaaaattgtcagtgttccttcagttctctttgggtcaacttcagtctaagaataggtcttaggccagtcaagctgtacccctgacactgaggatggttccactaattcgccatcccctaattcaggagggggaaggatagatacgtgaacaaaattgagatccttttgagaaggaaga

SEQ ID NO: 29773 - DNA, 1053 bp, Homo sapiens
gagcactcctcgggacaccgagtggcctcagggctgggttcagagctcctcccgcagggggagcctcagaagtggaggcagctgctgatgggtgagtttacaacttcttatcctgcctaaggcgagtaggcgtttttattccgtttccagtccttgagctcagcagatcaaaataacagtgaccctgcaaccccacagagcccgcgacacgctcgctttcttccccgccctgcccctttagtccccgctctggaaggccaggcagtttaggtgtaaataggtatcttttatggtttccaaatgaattatttgtgtgagagtaattaaatctgtaagaaaacctgttgagattcttcactatgaattatgacttctacaacatgtattttagcaaaaacacgatgctggcctccactggatagctcagtatgctgattgccagtgatagttctgtacgcgttaccaacagcgtctttattaaccctcttccacatccagtggaaatcattgctaggcggtatttgttggttggctgttagctttgctttatgatttcatgtttcttttaaaggttgttttgcatgttgaatattaaattttttttttctgtgtcttcctctaatctttttctgtaatgggaatttcagggtaaatacagatattatagcaaagcaataatttaatgattgaaacttaatttgcccccagtgattcctgaaactttttttggagctttcacacaaactacttttttgaactagagtgtgttggaggcagagaaaaatcaccctgtgtgctggctttgcctgccgtgagccagtgaggagtccgagaagaggtgggcaggtcagtgatgggtttggccagagatgccatatttgcagtattaaatcatttcaagatgcatttcaaggcctggcacggctcacgcctgtaatcccagtgctttgggaggccgaggcgggcagatcacttgaggtcaggagttcgagaccagcctggccaacatatggtgaaacccccatctctactaaaaatacaaaaattaaccgg

SEQ ID NO: 29774 - DNA, 1004 bp, Homo sapiens
cccgctaagggttctgtgggattggggaagccctggtgcatagctgcagctcctgtgcagccccagccccgctcttctgtcttctggaggcccttgtccctctggacctctgatccctcctgcatgcggtgctgggctaggcagggccaagcgggacttgtaaacaatacgtcatctaatatcataacccctgtcaggtaggagttagcccgtgtcttacagggatgaagcagaggctcagagggttgagtagaccttccctcggtcatttccagcagcttgggtctggtgcactcagcttcctaagagggcagagctcactgcctatcacccaaacccggctgtcctgcccaccctcccagcgtcctgagagcagccaccaggtcccctggtgagtcagcctagtgaaggtcctgccacccgggtgggcacccgggctgttctgcagctgaagtagaagcgtgttttgactggatgtgatttcccactttccaggtgatgcccgcctctgggcctttatggctgtggctgctgtgctgaggggagctttcccacccaggcctaccgactccttggaagtggggctgcatgccctgcgtggcctgtgctggggaactcggcctagcacctgtgcttacccgttccacttgaacctcagcctccactccttagaacacctcgcctgcctcagtctgcccaccctgtaccacaccgtgtccagagcacagaaccctggggaactttaaaacaaaatgcccattccttcccccgacctgggcatctgagtgaaagtcctcctggggggccctggagtctgtggtgtaattcattcgttccctctgtctgggtgtgtcagcctgagttggtggccactgggctgtctgtttaccacccctgcccccatgtgatagatggggccactgaggctcagaagcaggagggactggctgtgatgccttcctccaccttcctgatctggcctgctcccagccacctgtccttgg

SEQ ID NO: 29775 - DNA, 1046 bp, Homo sapiens
gaacctggggatacccagggtcagggagcgtcacctgagctgttgggacgccatgtggccctgccctgtctgtccctccatctctatgtcagcctgccttgcagggccgagttggtagcacgtcctcccccacagctctgttgctggacaaaggccctggtggctgggggcctctgctggcctggcttctgcctggggctgcatgccacaggggttctgaagtccccgggaagaggcagggtcctgactggcagtggactgctgtgcatgacccattgctgaggctgcagccgcctgggcttttctgtgcagctcctatctccggtgggggccttgctggtgtgggactgtcacgttgcagaacaggaaagggctggggctctgcctccactgccctgcggtgggaacccctgtgtgtgcctgtgggcatgcatgtgagtgtgtgtgagcatgtgagtgcgtgcatgtgagtgtgtgtgagcacgtgagccatgtatgttggaggctggaggtactttctcaggtttggttggaatctgatggggtggaaagggcttggcgaggagccttagctgtgcccaccctttctggtcctgaccctactttgatggctgccctgcctgaattcttcagcttgacccctcccctcccctccacctccatgccagcaccccttcaaagcttccccctctgctttttccatctgctataactcttcatgtatttttggtttttctgaacatctgacatttttttacctagatggaaactccatgagggcagggatctgttttgttcattcttataaccccactgcctaaagaatggcccacgctggcagtttattagatggatgagtgggtggagggacaggtgggcagctgagtgcaggtgagtaggtggaagggtggatagatggatgaatgatggatagttgggtgggtgggttgatgcatgatgggtggttggatggatggatggctgtgtgatgggtggttggatggatggatggatgtgtgatgggtggttggatggatggatggatg

SEQ ID NO: 29776 - DNA, 1104 bp, Homo sapiens
ttggctgggccctgtcccctctaggtaggacccaccaccaggctcatcctcatcttgggtcctggaggcctcctgagctgccaccaacgtccttctaaagagagccaagtccctggcccacgccttggcttggaaggaccctgggtttgttttgagggggttggaaacgccctgcagggggagtcgagatggggttctgtacccaggttggtgctggggctgtagggaccctcatgtcctggtgatcagcagggctgaccgccccctaagtgccagctgtgtgtacccccagtgccagggaccaggtgttgtggtatccagagtcctgtggttgcccctcccctaccagtcttggcaaccaggacttcccgagtccactcgggcccaggagacgctgtgtttgtttggcacactgggtcctcatgccgctgtcttcccggtgccataagagccctggcaaacaaggagtgttttatctcccgtggctccaggtctgtgtaggctccaggagatgctgggaggctttggggtgcagcttcctcaggagattgaccctggaagagggttcctgctgactggctggtttcctcggtgtgttctgggcctcgttctcctaggactgctgtgataagtgatcacaaaccggggcgctgaaaataacagacatgccttccctcagttctgcagctggaaggccgaaatcaaggtgttggcagggccggctgcgcttcctggaggctctaggaggagcccccctgcctccccggcgcctggtggctgcaggccttggcttgcggctgcctggctccaggctctgcctccctgtgcaccagcccttccccttgcttctcatctccctctgcgctcattttacgataattcatgttgtgattgcatcgagcccacctgctaatcggattgcctcatctcaagatccttaacttaattgcacttttgccatataagtaaaattccttcttttgctatataaggtaacattcccagattttaggaattactatgtggacacttccttttgggggccaccgtgtagcccattacagggtgggttatttcctagtctctcctccatcgtcggtgttg

SEQ ID NO: 29777 - DNA, 1046 bp, Homo sapiens
gcatcctcccgggggctggcaccccacagagagttacccagcccccacgagagtccacagtgctgccatggggtacctgtcctggaagctgaagcccgggggttcctcctttttcttcttatcttaaaacagcattggccaggtgccgtggctcaaggctgtaatcccagcactttgggaggctgaggcgggtggatcatgaggtcaggagatcgagaccatcctggccaacatggtgaaaccctgtctctactaaaatacaaaaaattagcctggcgtggtggcccacgtctgtagccccagctacttgggaggctgaggcagggaaatcgcttgaactcgggaggtggaggttgcagtgagccgattgtgccactgcactccagcctggtgacagagcaagactccgtctcaaaaaaaaaaaaaagccaataaaacaaaacaaaacaaaaaaacaggctcgttggccactcagcgtctccccacaggagttcccggcactccccaacaaggggtttcttgtggtcagacgtttggattcctgttcaggaaacgaatgccttcagattgttctgtgaggacttgaagcaaagcagagacaacagaaggttcctgataaactccaggtgtttgatccctgtcgaagtcccggctggtgccttcactgtggcgggtgggcctgtgtgggcttctcccatgatatttagctcatggtataaacagatggcgactttggctctacccaagccatactcagcatctttaaggtgggggagtttggtgtctccagggtcggaaggtggcttcctgctcttggaaggagaagtagttccacgtcttagaaacctgttcatttctgacttcattcgacagcttggtttgaaggaaatggttcttgaaatgccctttagaatcgctttctccttttgtacaatgtcacgccaaaataagacaaatttttactaagaatcaattcttaactctttttgccttttaaaaaaattgaggtgaaactcacatacgataaaattaccactttaaaatga

SEQ ID NO: 29778 - DNA, 1047 bp, Homo sapiens
catggggattgtgcaggggacaggatgtgtccctcagagctgcgggccttgtttggaggcttacgcgtgtcccaagcacagggggcaggcctgtaagaggggaatcatgtagcaaggaggctggcccagagcaggggtgattgagaagtgggcgcgggaccgcctgggtctgtgtgcttcccaccaccgcggtgcctgttcagtctgtgcctgcatcgtctcagtgaaatcttacaggatccccatggtaagggcagagaaactgaggctagagagcttgtagcgacaggaagagccaggcgcagactctggggtctgtgtgctctaatcgtggtgctgacagccatcttcggtcccctctgtctgtcagtggcgaggccctggggcacagagctggaggtttctgaggacggaagctcagtgcaagtgactgcgttgcctgaaacgggacggctgagagttacctgcacatggtgcctgattgtgggggtgggcgacagtggcagccgtgctgcaggactgtgggaggggctgaggctggagaaggggctccttggagccttctctgggtccttgtggggtctcttatggtagagctgtcacaagaagctgtagagtgaaggactggtgggcaccaggtgcagggaggcaggcatgtcactggtcagagctggaggctcttatttggggagcctggggagggagataccagatgaggagcctgctcagagcaggggctgacgcacctgttgaggggccttccagctcagagaagctgcattgtactagccggggagtcgcctttctcctgccctgtattcttccctccctccctccttccaactatccatccacccatcaagatttttctttctttttattttatttatttatttatttatttatttatttatttgagacagagtctcactctggcacccaggctggagtgcagtggtgcaatctcagcccactgcaacctccgcctcacaagttcaagcgattctcgtgcctctgccccttgggtatctggactacaggtgcccg

SEQ ID NO: 29779 - DNA, 1025 bp, Homo sapiens
gaacaacccagtggggtcggtggtggcaaagattcgtgctaacgaccctgatgaaggccctaatgcccagatcatgtatcagattgtggaaggggacatgcggcatttcttccagctggacctgctcaacggggacctgcgtgccatggtggagctggactttgaggtccggcgggagtatgtgctggtggtgcaggccacgtcggctccgctggtgagccgagccacggtgcacatccttctcgtggaccagaatgacaacccgcctgtgctgcccgacttccagatcctcttcaacaactatgtcaccaacaagtccaacagtttccccaccggcgtgatcggctgcatcccggcccatgaccccgacgtgtcagacagcctcaactacaccttcgtgcagggcaacgagctgcgcctgttgctgctggaccccgccacgggcgaactgcagctcagccgcgacctggacaacaaccggccgctggaggcgctcatggaggtgtctgtgtctggtgagtggccgtcggggtgggaggagtagctcctgatgggcctcctggagagcctcaggaacccgccaagggctccgcctggcatgccggggcgcaattgggccgggcccgggcaactctgcaaggatttgttgccgccggttggatgctgggggtgggcgcccggcctaggcccagcgagggggagaggcaccgcgccgcttccgtcagcattttcctgggagcaggcctgcggttctcccaagttcaagaccggggatcagcgccttcctcagcaggctagtggctcctgagtacagctattaaaaagtggcctccaggtgatctgggtcacaggatttgcttggagatgctctttcgtcagccagccacagggctctctgggaagatcagaggtcactgccccttcccagtgccaattaattccagggtgggaccgttggaattgtcagatgggtccctgagtcaccctataatgcagccggtgttcccttggtctggcttttctgt

SEQ ID NO: 29780 - DNA, 1033 bp, Homo sapiens
actgtggtgtctcacgagaattctgtcacgagaatttatctctgtcagcaaaagaatatgaaagtgcccccaattcccaccttccgccctttgcaagatgttcccacagcatctgtccacctgggtcaggtgtgttttctcccgcggatgctgtggcatgtccacacaccacgtgctgtgcggggatgctgcttggtgccggcaatttgagactaaccctcagagggcagttccttctgcttctagaggaccgtccgcattcttctgtgtgccagccctcggtggtcccactgccgtccacatgacctgccctcagatgagcaggcgccagctctccaaccggtggacgctggcaagtgtttcctgagcccccgcagggagctgctctccgtttgctcagattcttggcccggttctttatctcctaattagaaatgagagtatcgaagactagggcgtaatgccgatgacacaccgaggtgaggagagcaggagaaggggtaagtgctgctaggctggaggcgtctcactgtggagttctctcactgtggagtcctcagcttaacacagggacaatggcctgaaggaggaaggaggcagagcctccatcttgagcccagccttctttttcttttttttttgagatggagttttgctgtctttcgcccaggctggagtgcagtggcgcaatcttggctcactgcaagccccgcctccctggttcatgccattctcctgcctcagcctcctgagtagctggggctacaggtgcccgccaccacacccggctaattttttgtgtatttttagtagagtcggggtttcaccatgttagccagggtggtctcgatctcctgacctcgtgatccgcccaccttagcctcccaaagtgcagggattacaggtgtgagccaccccgccctgctgagcccagcctttttggcaagaaaggaagccatcatttatcggacatttttgtgcttgaaactttttcaccctttatcttattccagtttctaatcccctatggggt

SEQ ID NO: 29781 - DNA, 1029 bp, Homo sapiens
tccacagctggcgggggggcggggttggtcagaggaggttcacacagctggaaggggcaggggtggttcggcgaggggggcgtgggggtggtctgaggaggctcacacagctggggtggggaggcgggggggggtgccagtgacaggtggggttgtttatgggtgtgagcctcacaatgacctcagcgggtccttctcgtgcagatcatcgaccccaagatgccccgtgtgcctggccaccacaacggcgtcaccatcccggccccacccctggacgtgctgaagattggggagcacatgcagaccaagtctgatgagaagctgttcctcgttctcttttttgataataagagaagttggtgagttgagaggccttagactccggggaccggctggggtggttgggggccgtgggctcggtgacctgagtgtccctgtggtgagcagcgtctttgtctgctgggccctggcacagctaaagtcggaggtgagtgctccgctgtttgcctggtggagaagggcactgcccagccccctcgccgggactgtgggacgggcactgagcaccgggtctgtctctgcccgatggcttcctctccctctcgcctgagccccattggtctggactgtctcttccctactccttacccatgtgtccgctccagtgttgggggtccctctgctgtgctcccggacccctgtactgcaggacatggcccctgcccgggcctggcctctggccctgttcttagagccttctgtcccagcatcatccagctctgctcagacatccaccccatcacaggaggctccccctgtgccctgagctgcttttccccagagcgtctgggaccctcatgtgccagggtttagaccccaagatccctctgtgcaggacacgctggcagcacatgcctctgggaggagctgtggccccggctgtgccctgcgcacgtggcccgggcaggtgcttcctggttccccgtggagctggctgcacttgggacctggcgcaggggctcggggcca

SEQ ID NO: 29782 - DNA, 1036 bp, Homo sapiens
agatggttatgagtcccacatggggcatcctagctgggccgagagctggaggtgtggaggaggggttgtggaccatggttggggagggcctgctgcaaggcagggacgtctgcacgtctcagggctcctgccagacaggagtggtggttctgagggttgcaccagaagcaggagatgggggtttacggtgcccgttagatagctgtggagaaggtgggctgtaggtggttgggggaaggggggtctcccggaggtgctgggaggagactccttcaggctccatctctgctggccgggtgctgttgcacccatagaggccaagactggggttgaccactggccttggccctgcagaggccattgggattgcagtgagcagttgaatgtcgtaatcagggcgagagctcggggcgggggggggaggctaggaggtggaagaggaggcaggaagtgaagtgaggccccaggccctgtgccccagacaccagctgcgtcaggacgctgcaggctcagtgctgaatcccctcctgctgctgtacaggcaccagggatgctcatgagcagcctttcagcagcccttctccgcattgcccagttccctccggccagtgttcccaggtgtttcacaaacaccttttccttaagcctgttggcgacattgaacaggagggagggagttttgtcacctcgcatgtgcccctgccttgggatccagcattcccacatgacagctgtgctccctgcggctgacacgggaggctttttgttgaggtgaggcttcccccttgtatttgaattggctgtgaggtgctctaaggcgccgagtgtcatttaaaatcagaggcacctcgcagccgaaagcactgctgcccggcgtcatggcccagccttgggagaactttcttcagcctcaaaacattgctctgagtcctgttaagttgtgtagttttgtattttcaaaacaactttttgaatgacaatagtaaccatacatacttcaaacggttttaggaaagtttgcaggtttaatgaaatg

SEQ ID NO: 29783 - DNA, 1050 bp, Homo sapiens
gggctgaggaccccgcacggttattgggtcacaggactgaggacctcgcatggttgaggacctcgcatggttggagctgcttggccctccgctgtggtgagcgtggctcctcataacacccaacgcttagcaggagcctttggagaccatttttgttgctttgtagctctggaatcattttatttttattttttttctggggccattgtaaggaaaacacaatgtgactgagacacaggtggcctcgaatcacctgttacacccaatgttcacaatgactcaattgatgaaaagggcgtttcctgtgagctgatgggaaggtgggtggagaagcaagtggcctgaaagtccactccgaggtgaggcgggtggggtcctgcccctcagagaagttgggggtctctggagaggtggggcgggcggggtcctgcccctcagagaagatgggggtctgtggagaggcgagtgccagactggaatggggaagtcattagggaagacagccacaagcaagcttgttggttggtatagaaatgtgacttacgatacttataataggatgaaaaccaagaatcagacatttaaaaacccagcatgaacgttctcatcagtaaagcctctccatcatttttcttaaatataaccacaatattttcacacctgaaaagagtaattcctcaatggcaaatacacagtctcacttaaactgtaatttaacagtctgtgtgttgtgtttatattttgcttccacttgaagcagcttgaacaaggctgtagccgttgagtgccaggcccctgagactttagtgtctgaaggaaggagatgcctcctgggctgcactgttggccccggtctgccccttgtacaggccctcccgcaggctctgccgtagccgcgactcagtctgccgagtgcagaggttcgggctgttgctgtgagctggccctgccagggctgacttccccggggctgcgtgtcagctgggtgggggccacgccacagctgggattccagcctgtctgatgagcctgtgggacggatctgcagct

SEQ ID NO: 29784 - DNA, 1063 bp, Homo sapiens
ctagagtacatcccttgtgttcttaattctcgtttttatttaacgtatttgtttttaaattataaaagtgatacatttcattgtaaaatactgaaagtgcagtgggcaagaggccctgtgcagacagtaccctgggctgtggcagcatccgcccggcaccctccagcgtgctttagctgaaggagctggggtcgggaaggtccctgcagtacttgggtcttatgtctgtaccgtctgcgtgtctgtgtgtggctctcagataggatgggcttgtgggttatatggaataataaatatagagtcaactaatatcctgttttagtttgtaaatgattctttttcctccctaaaattaggtaccagattatttggatcacattaaacatcccatggactttgccacaatgaggaaacggttagaagctcaagggtataaaaacctccatgagtttgaggaggattttgatctcattatagataactgcatgaagtacaatgccagggacaccgtgttctatagagccgcggtgaggctgcgcgatcagggaggtgttgttctgaggcaggcccggcgcgaggtggacagcatcggcttggaagaggcctcggggatgcacctgcctgagcggcctgctgcggcaccgcggcggcctttctcctgggaagacggtaagaactggcgccgtgtccggaggaggtggaagacgctctttctagcagactctgtcctgctctgtgttgccagctccctatcagcatggtccgggagccactagcatgcaaccgcatacatcatttacattttctagtagcctcactgaaaaatggaaaagaagcaggtggaatttactttaataatatgtcttattttactcagtgtatggaagagttgatttcaacatgggatcggtaaacgttactgaggatatataagcttttcaccttctttgccatctgatgtgtattttacgctcagcacctgtcacttcagactggctgcgttttgggtgcccaccaagaggactgtgtggctgtggctccctatggggtggccggtctcgac

SEQ ID NO: 29785 - DNA, 1085 bp, Homo sapiens
gtctttgcttagttttcttatctgaggtctgtttccccttaactcttctgtccgagttgagtgggggtgctcatcgcctcagctgggaagctgctcttccatgctcttcctcactctaattttggggttttcagcctcttgctcacatgagctccctcagcctcccaagtagttggggtcacagacgcacacctctgcatctggctcttaagtttttaaagcattttcatcaaagcctttttgctcacaacttgtgggctgttgacatttccagaagccctgactctggagaagatggtggcttgttgtgatgaggtcagaattttttctcacatctcatgggtcagaagaaataaaaacaaacagaatctttctttctttcttttttaagagatagggctggctgggtgtggtggctcatgtctgtaatcccagtacttcgggaggctgaggccaggagttcgagaccagcctggccaacatagcaaaaccccatcttcactgaaaacataaaaattagctgggtgtgggccgggagcggtggcttatgcctgtcatcccagcacttgggacgccgaggtggacagaaacctgaggtcaggagttttgagaccagcctggccagcacggtgaaaccttgtctctgctaaaaatacaaaaattagctgggtgtggcaacgggcgcctgtagtcccagctactagggaggctgaggcaggagaatcgcttgaacccgggaggcggaggttgcagtgagctgaaattgcgtcactgcactccagcctgggcaatagagtgagactccatctcaaaaaaaaaaaaaaaaaagactcactgaaccagaagagttaagtgttgtgctattgactgcacatggtttgcctcagtcccaagtggtaaaaacagactgctcccaaaacagcaggccatgaggtgaccaggtccagcccagcccagcctgcagaggaggagccctgtggggctgtgatcagagcccagcgtcccagtgcacctgccgatgccctctccagcctctggcttccttccgttggctgtccttggagggctgtgcttcgtgggcaggc

SEQ ID NO: 29786 - DNA, 1026 bp, Homo sapiens
cctgaacattttccttatgtccagcttcagccttgctgtggtattttaaaactggaattacatatatatatatatatatattttttttggagacgaagtctcattccgtcacccaggctggagtgcagtggcgcgatctcggctcactacaacctccgcctcccgtgttcaagcgattctcctgcctcaagccttccaagtagctgggattacaggcacctgtcaccacgcctggctaatttttgtatttttagtagagacgaggtttcaccatcttggctaggctggtcttgaactcctgacctcatgatccacctgcttcggcctcccaaagtgctgggattacaggcgtgagccactgcacctggcctaaaactggaattttaaatttttaaccagattgacaacctcttcattagcaactttagactgttgacttatgttggattactgatctattttggatttgtttccatgatcctttttttccctttttctttatttttcctctgagactgagtcttgctatgttgcccaggctggagtgcagtggtgtgatctcggctcactgtaatgtcttcctcccgggttcaagcagttctcctgcctcagtctcctgaatagctaggattacgggcgtgtgccatcatgcctggctaatttttttgtatttttagtagagatggggtttcaccatgttggccaggctggtcttgaactcctgacctcatgatctgcctgcctcggcttccaaaagtgctgggattacaggcggaagccactgcgcccggctcactttttcttctgatgtattgactcagatggttttgctgttttggagtcgggggcatttttcctcctctactcatttggaaggtgcacattccatttaactctctgtattcaagttttttcagtattttactgtggtcacgtacacataacataaaatgtaccatcttaatcattgtaagtgtatagctcaggggcatgaagcactttgatattgctgttgctgtgcagcca

SEQ ID NO: 29787 - DNA, 1722 bp, Homo sapiens
gttctgccgcccgtgggggaattttgtcagcttcactgagacacttagtaccctccccttacctgtggttttgctttccatggtgtcagttgcccatggtcagccatagtctgaaagtattaaatgggaaattccagcagtaagcagttcataagttttcagttgtgcaccattctgagcagcgtgatcacagtctccctgtcgtgtcctgcctgccgggagcgtgaatctaacctttgtccagtgcacccacgccgtgcagctgcctgcaccttaacccgcttagtagcaggtaccaacatccaggctggcgctcggtcctgttccaagtttcaggcagccgctggaggtcttggaaccatcccccttggttaaggggggactcttgtcattcacacaccatgaaatttacccatgtgaagtgtacagttgagtggattttagttcacagagttgtgcatttatcaccaccaccaattttagaaatttttatcacctccaaaggaaaccctgtgcctcttagccattaccccaacttcccaccttctcatcctcccccagccctggcagccacccatctgcatcctgtctccgtgtatttgcctgttgtgggcatttcatagaaatgtgtttttttgttcttttatgaaatgtgttttttttgttctttcactgagcatgtttccaaggtccatccatcgtgccccctgggtcggtgtgccattccttttcacggctgcgtaatgttcattgtatggataggccacgtttaaaaaaatctgttcatcttttgatggatgtttgtttttttcctactttggagctattatgaacaatgctgctctgaacatttgtgtaacagtttttaggtagtgtgtttttatttctcttgggtatattctaggagtggagttgctgggtcatgtggtaatgctgtttagtattttgaggaagtgccagattgttttccaaggcagctgtacccctgtatattctcaggcgctgtccttttgatgatacccattccatggtgcaggggcagcgatcgctcgggggttttgctttgcagttccacagtggctgaagatgttgcctggccatttgcatattttctttggagaaatgtctgttcagatctttgccatgttttcattggttagctgacttcttactgttgtcataagagttctctgttctgggtactagactccctattagatacatgacttgcaaatactttctcttcattctgtgggtcatcttattgttttattcagtgttctttgaagcacaaacatttacaagttggatggagtccagtttatctgctttctcttcggttgcttgtgcttttggtgtcacatgtaagaagcctttgcctaaccaagggtcttttaataggagttttatttatttttatatgtgcacatatatatatattttaagagctggggtctcactgtgttgcccaggctgttctgaaactcctgggctcaagcaattttctcgccttggcatcccaaagtgctgggattacaagtgtgagtcaccgcgtctggccactgttttcctatatatgataatttctacctttacctgatagcagtctagaagcatgtggggcttgcttgcttgctcgctcgctttctttctttctctttctttcttttttaaccaaattaattttttaaactcttgatatccattgcttgtgctgtgggc

SEQ ID NO: 29788 - DNA, 1076 bp, Homo sapiens
cagagagttcactcagacctgctgggagtgggcttggccgcgcgggtggcactctgacctacacagtcacttgggattgtttgaaaatatatttttaggctgggcgcagtggctcatgcctgtaatctcagcactttgggaggctgaggcgggcagatcacgaggtcaggagttcaagactagcctggccaacatagtgaaagcctgtctctactaaaaatacagaaattagatgggcatggtggcgtgcacctgtagtcccagctacttgggaggctgaggcaggagaatcacttgaacccaggaggcggaggttgcagtgagccgagatcatggcactgcactccagcctgggtgacacagcgagactctgtctcaaaaatatatatatattttaaaatctcatctaaattttaaattggcatcttgggtagaatttcacagacaattcttgaggcagtatcttaaccacttttacgggttactgactctgttttatttggtggtgaactctttgttatgacttggtgaagttgaacagcaggttatgctcctagtatgttttgtaggtagattaattttattgtcattacgttctgcctatgatgtgtaaccattcttttttcaggctgaataactataaaaagtcttggctgtacaaagcggggtctctgcttgtgatcggacacctcgtggtgaatgccgcctactcagccacggccctgtatgtgtcccatttcaactacccaggtggcgtcgcaatgcagaggctgcaccagctggtgcccccccagacaggtgggtgctgggggcactgcctggggactgctgtggctccgactgcagggctgggctctgacggcaggcctggttttcctagacgtccttctgcacattgacgtggcagccgcccagacaggtgtgtctcggtttctccaagtcaacagcgcctggaggtaggatccacacacagcacggccctcccagaggccatgtgagggccccttgggggcgggggacagggcgatgtgggggccctgggcaggaccaccagctctcatcccacaggtacgaca

SEQ ID NO: 29789 - DNA, 1050 bp, Homo sapiens
tcctgaacaaaagctccaactggggggtatccttcagtgtccgtgcaggagggcgatgggtgggacctgcagccacatctcctgggcctccatgggcagtggaagcagctgcttctcccttctctgcagcgtggctgcagggtcaggatggagcccctccctcccacttgctcctgggaaatgctggccatgggaggtgaggtcctggctgccctctctcagccaggaaacagcctgagggctggaaacagccctgccccagattaccccagcctctcctctgctcctcggacaatctgcttttttttttttttttttgagactgagtctcgctctgtcgcccaggctggagtacagtggtatgatcttggctcactgcaacctccacctccctggttcaagcaattctcctgcctcagcctcatgagtagctgggactataggcgcacgccaccacacctggctaatttttgtatttttagtagaggtggggttttaccatgttggtcaggctgatcttgaactcttgaactcaggtgatccacctgccttggcctcccaaagtgctgggattacaggtgtgagccaccacgcccggcccggacaatctgcatttaaaaagtgctttcttaggaattatgtcaaacatacacgcatagatggaacagcataacgaatcccaacatgtgtgtcacccgtgaccgtctgttttttgttttttggttttttttttttttttttttgagacagagtctcactctgtcgccaggttggagtacagtggcatgatctcggctcactgcaacctccaactccctggttcaagtgattctcctgcctcagcctcctgagtagctgggattacaggcacatgccaccatgcccagctaatttttgtatttgtagtagagacagggtttcaccatgttggccaggatggtctcgatctctttacctcgtgatctacccaccttggcctcccgaagtgctgggattacagacatgagccactgcgcccggccgaccatctgtttttaacagtgaagaaaa

SEQ ID NO: 29790 - DNA, 1076 bp, Homo sapiens
gacgtggctcccacccggccacggtggaacacccatggacacgtgtccgatgccagcatcagcttgggggagtctgtgtcagacatggctcccgcccggccacggtggaacacccatggacacgtgtctgatgccagcatcagcttgggggagtctgtgtcagacatggctcccacccggccacggtggaacacccacggacatgtgtctgacaccagcatcagggttggggagaacgtatcggacgtggctcccatccggtcacggtgcaacacccatggacacgtgtccgacgccagcatcagcttgggggagcctgtgtcggatgtggtttccacccggccacggtggaacacccatgtacccatccctccgccccacatggtgctgggggctctctcaccagaagctgagcccaacacacccaggccccaacagagcccccctggccacacgtcccagtcagcgctcagcctgggagcacagagcactgtgctggactgtgggccacggctgcctgtagaagtggggccatctctgtcctcccccagctcgggctgcggggaggggagcatcagcgtgggggagaacgtgtcagacgtggctcccacccaaccatggtggcccaacaccccgggagacagtgtctctgaagaactaggtcagagtagggtggctggtggtcaggagtgggactgtgggacgcacagagcctgggaggtaggcgggcagtggggttggtggcatgtgaagttcccctcaggcctccttgtcagccaggacctgggctgctgtgggggacatgggaggggctgcttgagccagggccggctcggctctgtacccgccacaggcactcggccctgatgccctcgtgtccacttgtgtccacacaggccctgggaggagcggggacactgaggacctctctccaaattggcctctcaactcacaggttaggtggatgcagcctgggggtcccacagcaggcagggagggctctgtccctctaggttgtcacgcgggtgggtcccacatgcgattttcctttttttggcacaagctggttgtgggga

SEQ ID NO: 29791 - DNA, 1235 bp, Homo sapiens
acagggcgtttttttttttttttttttttttggaaacagagtcttgctctgtcacccaggctggagtgcagtggcacaatctcggctcactgtaacctccgcctcccaggttcaagcaattctcctgcctcagcctcctgagtagctggggttacaggcatccgccaccacatccagctagttttttgtatttttagtacagacggggtttaaccatgttggccaggctggtctcaaactcctgacctcaggtgatccacctgcctcggcctcccaaagtgctgggattacaggcgcgagccaccgcgctcggctgagacagggcatttgtccagcacagcatctgcgtctgtctccctgtgctgttatcaacctgtcctgtgctgtcatcaggctgtcccaggctgagtagtgctggatccttcaaggggctgtttggggttttggagagagcccctcacgggaggggctggccgcttcctgctcagccccacgcgatgctgtaggtcccaaccttagatctctttatggagcgagtgagggatgtgtgtggaggggtgcgcgtgcctgtgtgcacgtgtgtccgtgtatgcatttatgcatgagtacgtgttcatgcatgtatgtcagtcgatactgtcctgttaacacatggagaaaaccaggcctagacactacgtctctggcctgtggcagccaaattagagctggccagtccaggtttgagcccagttgcctgctggtgagaagctcaaaatcatggggcacgatcggtgaagcaggctttgaattcagcaaataaagcgtttgtgttggttttgcttcatgtgcttttttgcattagttttcagttctcaggtttgtacctgtagaaggggaagaggcctaacttcttagaggcctggggccctcggcctcctgctcaccccttgcttcaggccacacaggatctcattctggtatttgtccagcagatgttgctgagccctggctggacgctgactcaccagggtctcccagcctggcaggtagaagggcctgcctggtgctgccctgtaggtgctgtgagggcccagagctatcagcccctggtagggggagacgggggcgggggcccactggggcctctgttatggagaaccatcctggcctgaggggtgccaggtagatggggtggggtgactcttgtggccgtgtcctctctggtgtgtggcttcaggcaggcactggtcgac

SEQ ID NO: 29792 - DNA, 1076 bp, Homo sapiens
caccgtccaaaaataacctttctgtgggtatgtgtgccagggctgggccacactgccagtgggtatgtgtgccagggctgggccacactgccagtgggcagagccaggccctttggacagtggggcatgacaatgacagctgcagagggggtttcctgcccagagggttgtgccactcttggggggtgccccagcccgtgtcctctgctgcattctcaaccctatgtggcccccccaggtgatcgggctgctggacgtattcactcctgatgagaccctggatgacttcacggacttgtgagtgccgacctgggctggccgctgggcacgaggggtgttgggcagctctgggcactggcttcaggttctaggttggcaatggggttctcttcctgcagcctgagtgggggatgcacaccgcccaccccctccccataccactgtccaccccacgccctcccccacatggtcctgggacccacgggcactggcacagctgggcagagctggggctgctgcctctctccacgcctggcacctgggccctctccagcaccggaggtgtgaaccttggacctgaccatttgttaacaggaaggtcccgtgctcgggaccctggcaccaagtgtgtggccggtaactggagctgctgaccttttccagcgggtgggggagaagcggtagggaggacccaccctgcccctgccctgcagccgaccaccctgggactcacaccctgtcggccaagagtgaagggccaggccgaggaaggcctggagagggtagcaggcgcctcccgcctgacttgcagaggtcaagtcagtggcctctgggaaggtgctaaataccattctcctgtgtctgtctccaccggcccagccgacccctctgacccagatgccttgccgcgcccccatcgcccccaggcacctccctcatttctggcacaaagttgtgaagttgaaacctgactgcctccctcccctgcctgtgaagactcgagtcctgctgcctctaccatggagcctcagcccctagcctggcacgcagggcgcttcagcggagggttcaaaaac

SEQ ID NO: 29793 - DNA, 1071 bp, Homo sapiens
cgattttcccgccgctgcctcctgagtagctgggactacaggcatgtgccacaacgcacggctagtatttttagtagagacggggtttcaccatgttgggcaggctggtctcgaacccctgacctcaggtgatctgcctgcctcagcctcccaaagtgctaggattacaggcctgagccactgcgcccggcccatagttttcttgatgaaagtgtcaggagttcggggcaggggaagctacccaggggtactctgagcagccccagcctggcccccttggccaggcatcactgggttttgtccccaacaggattctcccagcaacaagctgctgtacgccaaggagatctccacctacaagaagatggtggaggagtaagtctgcctgccctccaggccaggcccccatgcccaccctcgaccccctgcggggaggttcaggccttggtttcccccaccaccccctttgtggtccctgccgcccacactgtatgatgctcccacccctgcagttactacaaggggatccggcagatggtgcaggtcagcgaccaggacatgaacacacacctggcagagatttcccgggtaaggagaccaccagggacgcacccacagccctccccgctcccactaccccatgctgagcctggccctgagctgcagggcaggggtaatgtggtgctgagggggagagagggtggggcgggacctcgaggtgggctcggccatgtgaagtgagccacagctgcgtgtggggagtatgagctgctcctgcttggagccaggccctgcccacagcgccccctccctgcggctgcacccacggccgtgcccacagcgccccctccctgcggctgcaccctcggccgtgcccacagcgccccctccctgcggctccatccacggccgtgtccacagcgccccctccctgcggctgcacccacggccgtgcccacagcgccccctccctgcggctccacccacagccctgctcacagcacccgtccctgtgggtccatccacagccgtgcgtcacacagggagacactgagatggttggatgtgcac

SEQ ID NO: 29794 - DNA, 1501 bp, Homo sapiens
ggcaggggaggctgatgtagggatcactggccaggatggagcagggtccctagcgtgagagggacggaccaccctgaggaagagctcagaggcagaagggccctgtctctgccacttgtgtctgagcccccaagatgcagttgagtctggtagggagggaaagagagaggaccacgcatgtcctgggtccacctgtggggccttggatcttcctcctattgggagaccctcagctcagcctggtcctcagcagctcacccatcacaccacacatccccctcatccacccggacccaggcacagaccccacaccgagacgtgctcagttacacacacgcatgtggacacagcctgtccaggctgcagatgtgggggcctctgcctctgagacctggtggatttggagttgctcatggctccccaggtccccttgttgcctccgctgtgcgcacatcagaggctgtgccctgggcgtgacatgggccgagcgaggagctgtgggtgattgctggcttccactgtttcaccagggcagggggcctggaggtggtcagggaggctcaggccgcctgggggctctggcgggcagttgtaaacagcatgtgcacttgctgggctatgcacagggcacccctcgctctcacctgagcctctggtttcccgtgtccttcacctctgccccatgggtgagccacctgttccaacgtccaggggtctgtctgtcagcctgagcctgtgcgctggggccggtgcgtcccgaccacctggagctccttggggtcacaggtcagggggcatgaatgtgagcacttgagagcctttctgggggcgtcaactccttgcctcggggataggcctgccggtgttttcagcacctccgggagggatcctgtagcaggcgatggcagtgccttggccccagtggtcagtcagggtggacttgaggagggctgagaagtggtctccggcgagacctcgaggatggcgggggtgtgaagcaggaaggggcggagctccaggttcctcagttcgtggagtggcgtgaccctctctcccatgttctgacgtttggggcagggactggagagggatttgatcgggggtcctctgggtcggggctcccctgacccttctctcttcccacagggtgcggggggcaatggcactgcagctctgggccctgaccctgctgggcctgctgggcgcaggtgccagcctgaggccccgcaagctggacttcttccgcagcgagaaagagctgaaccacctggctgtggatgaggcctcaggcgtggtgtacctgggggcggtgaatgccctctaccagctggatgcgaagctgcagctggagcagcaggtggccacgggcccggccctggacaacaagaagtgcacgccgcccatcgaggccagccagtgccatgaggctgagatgactgacaatgtcaaccagctgctgctgctcgaccctcccaggaagcgcctggtggagtgcggcagc

SEQ ID NO: 29795 - DNA, 1824 bp, Homo sapiens
cggggcctgtcggggaagaccatagaccacagagcaaggccagtccctcaggggctgggttagggagggtgtctcggggtctaaaggatgggcaggggctttccagggagcacagtgaacatggacgtgggaatgtcgtgaggcagcgttctctgagtgggcacagctgtaaagatttccacacccactcaacctcaaggcagccctctgaggtgggcgccataatgacccccaggttacatatggggaaactgaggcacagagcagctttctgaatggcccacatgagccagctagaacgtgacagagctggggtgtgaactcactggtctggctctggacttcaggcctcgaggtccctgggtgcagcagcgtcaggtgtgaccacagccacctaaggaagaaactcctttttctggggtagctaagcgggaatcttgtgagcaggagatggagcctggctcagtgttgagggcaagatggatggaggtgggagaagccagaggccgggcagaggaggtagacttgggccaggaagggccccagactgagggtggagggatcatggtgttattctctgggaggggaaatccatggccgttctccacggtgagggccagggaagaggacggcagaaagcctcctccaggagagtggagtatgggtcttgcctctggcttcctgagtggatcgatcactcaggggaggttgttcgagggcgtgcgggatgggcgggacagaagccagcctcccctgaccttggctgcccccgcccacgcctggggcctgggcccgtggaggctggagcctgggggtgtgctgcagggagtgggcatggggcacacaggccggtgtggcgtcccttcaagatggcaggtctgggggtaccgtgccaccgccatggctgccacctccgtcgggagctgcagtctccagtccccgcgggtcccagctttctcaggagacccggtgctgccctgtgctttggctcctgagtttgccagaggagcagccttttgcccttttcacaaaggtgctgttgagtctcaggtcgaaaggatgccctctgccccccgaaacctcatcctctccccagccctttggccgggttaacccttacctgtgcagcagggtagcacagtccatgcacagctgtggagctcacctcccttcccgccgcccccctgctggtgtcactgcatgtccaaccccgggtcccgctgcacagggcacatgaggatcccggtggggtgggaggagagtggggcctggccctgcgggaggaggtgctttgctggcacacaacctggccaggctgcagtggactctggggcctgagcaggattcagtagctgaaccttggttgtaggggtggctattgagggcctggagagtcacatcttgaggcagagtggagcctaccttcttttctttctttcttttcttttcctttttttttttttttttttttttgagacagagtcttgctctttccccaggctggagtgcaatggtgtgatctcagctctctgcagcctcaggtgatccgcccgcctcagcctcccaaagtgctgggattacaggcgtgagccaccgtgcctggctcagcttcttatttagacaagcaatatgtaaatataatcttaaacttgtgttttgctttaatcttagagtcagggtctcgctctgttgcccacaatcatagttcactgcagcctagacctcctgggctcaagctactctgccttagcctcctcagtacccgggacttcaggctgtaccaccacacgcggccagttcacggtctagttcaagttccttgaa

SEQ ID NO: 29796 - DNA, 1035 bp, Homo sapiens
cccaccccacgcagggcctgtgtccaccccaatcctttgagccctggagggccgcacagccctaggacctctgccttctccaccgcccatgtcctaggtgctcatgccaccccctcctgccctcccaggcctaggcccgagctctcctcgttcttcatggcggctgctgcctggatccccatcttggcccctgccgggccgctgcccatgcacctcctctggcccctgccctctctggttcccgtgccagagcccacagcctggcctggccaagagcagcccccaagctgggcctgccctcccactgggcctgactgctttgtgctggtttgattttagcattaagaatggtcagtctggctgggtgtggtggctcacgcctgtaattccagcactttgggaggccaaggcgggtggattgcctgagctcaggagttcgaaaccggtctgggcaacacggtgaagccccatctctactgaaatacagaaaattagctgggcatagtggcgtgcacctgtagtcccagctactggagaggctgaggcaggataattgcttcaacctgggaggcaggggttgcagtgagccaagatcatgcccctacactccagcctgggtgacagagtgagacctgtctcagaaaaaagaaaagaatggcccagtctgtttgcttgaaaatactgaaaggcagagaactcccaattttagtccccactggaaccaccccgcagtgcagccaagacttggggcggtctcagaaccaaggctggcaggagtttgggggcctggcagcccccactcttggcctcatctggagtagggctctgtccttcccccttacatgcctcttgtttacctttacccagtgggaggggcgggggccagactcagcccgtgcaaggggcctgggggctgctggtcagaaaaaaaaaacaaaagggacctcaggagagggccacaggtgcccagccagcaagcagctcctgctgcctcccaggctgtctaggttgtagaggggaggcccagcatccctg

SEQ ID NO: 29797 - DNA, 1031 bp, Homo sapiens
gctccgcccgggcctgccgcgctggggcccggggacctgcggcggctgcggctccgcggagggctcccggggcctgggccccgtccgtcggtccatccggcgaggcccgggccgctgccgccccactcccttcccggtgttgactcgggggacgggcccggcggcgggggctgcgcgtccctccggagccgcgtcggatccctcctccgcgcctgcctctcactcttcagccgccgagctccgtgcgccgagcggagatggtctcgcggtgcgggcgctccgggccggccccaggctcagcggcacaggagcctggatttgcccgagctcccgggggccgtccccgcaccccctggggcctgcttggcgcggggggaccagggcggagagcacccgcacctggcgagaccccactgcctgggcctcctcgcggttcccagagtggcgtctgggtggacaccccgagacacagaaagtctcagaagcgggggcgcgagccctgcctgtcccctgctgaccctgcccctccgcaccctgctcctgcaggaagcccctgccctgccagcgcccctggtcgggctattcggcagatctggggagcccgcctccccctgtcatctgggggtctcagagcccggacgccctggggcttcctgccaggcccttgatttctcttcccgaagctccctgggaaaggaagaaaggggtccgtctgcccactgtgggctgtggcagagtcaggacagggggtgagggtgagggtgagggtgagggtgagggtgagggtgagggtgagggtgggccccaaacccggcagatcccggcggcctggagggctccctgtgccccaccttccctggacccccccgccctccccacttaatgtctgacttcggcccttgcttggaggttcggcgcagcctgtgaggctttaaagttgagcttcctcaggagccctttgcgggtgggagagcgaggctgccgggaagtgggggctctcagcctgccccatgcccagatgaccctggcac

SEQ ID NO: 29798 - DNA, 1027 bp, Homo sapiens
gcagagactcggcctctggggagctgagcgggttccctccacccccaaccgtggtggaaagacaagctcgctggggcggggtgggggtctggtctccacctgcccctcccactcagccactgaggacaaggtggggcccaggcttctgggagggggagctggcacaaaaggaagtcctggggttgatgtgtttgagcgttaggcgaagtggttccccccatcccccaaacggaaaaatgtcagtatttgctaagctgtagagacctgatgccgtgatgtggcctgttccgcctccacccattacacggggataacgctggggggtggcgggcccacaaaagaggtgctggaggagactctcccacccctggccgggccggggctttggggccggaaggttcacagtacgcggtttgtccgaacgtcacggcttttattgggagttgggggtttggggtgccctgtcaggtgatcagaacattaaaaatggactcaacgtaaaataatcttctggacccttctaggacgacatggccgtgaccggtagtgctagaaaccagtcttcgagcccctagtgccacaccatgtccccccacctgcatacctgtggtctccccctgccaggcaccctgtgctgggcacagggacatccctgccaggcctagagggccttgtgtttttaaggcagtcaaatcttgcagcctggttcagtgccagctccaagggctattgggtagctgcaagggtcaattatgcattcctgtgagtcaggtttttccaacccaggcccttgactctgccctgagcttgcagctggatacaaagtgcaaaaaagcttggctccttctgtattctttaaaaacaaaacaacaacaaaaaaaaaactgtaaaaacagcctccatgtccacgcccttcctggcccatcaggtcctggtggcatctcagggtcctgccccccccacccccacccccaccccggctcctgcaggccgaccttattgctgtgctctgggcttgggggcggct

SEQ ID NO: 29799 - DNA, 1586 bp, Homo sapiens
ggctgctttcccaagaccctgaggctctggtgtggggatgctccctggagtctggagggtgtgaggcgcccttcactgtctcctttctgggcgtcgtcttcttgggcctgcagccccccatcaaaggcttctttgtggccccctggccagtgctctgggcttaggtcagttctggggacagggtgcctggtcttacctcctgggctgggacagcaagggggggacgactgctggggcctgggcttggctgggccatgacggtcagcctggccctggttctgctggaaatgcaggtcctacgagggcactctgtacaagaagggggccttcatgaagccttggaaggcccgctggttcgtgctggacaagaccaagcaccaggtgagtgatcaggtggtgggggggactcacgggggagggggctccgctgactctgtggcctcctccagctgcgctactacgaccaccgtgtggacacagagtgcaagggtgtcatcgacttggcggaggtggaggctgtggcacctggcacgcccactatgggtgcccctaagactgtggacgagaaggccttctttgacgtgagccttggccggggcttgggagaggggaggggctctgcggtgtgggggctgcggagtcagtaacccgcccttccccaggtgaagacaacgcgtcgcgtttacaacttctgtgcccaggacgtgccctcggcccagcagtgggtggaccggatccagagctgcctgtcggacgcctgagcctcccagccctgcccggctgctctgcttccggtcgttaccgaccactaggggtgggcagggccgccccggccatgtttacagccccggccctcgacagtattgaggccccgagcccccagcacttgtgtgtacagcccccgtccccgccccgccccgcccggccggccctaacttattttggcgtcacagctgagcaccgtgccgggaggtggccaaggtacagcccgcaatgggcctgtaaatagtccggccccgtcagcgtgtgctggtccagccagcggctgcaggcgagtttctagaaccagagtctatataaagagagaactaacgccacgctcctgtgcctgccttccccactccccggctgcctgctctcggcctacccagagggtcccatctgcccctatccaggcccacctggcgggaggttggcatctttctcgtgagcctctcctggtgcctgggtccacccagctcggcctgcatgtccctgggagtgactttgctctgggggcggatcgagcaggaggcttcactggggacttgcttgattccctccacgcctcagggctggtctaggggccggcacggctggagaggaagcccccatccctacccaggggatgcagaagctgacctcacagaggcttgggggtgaaagggtgggtggtcatttgaccccagaaggctgttgcaggtccagaggacacttgaggtggacgtcagtttctggctagacccgagctgaagggatggaggccggaggcgggggggggggggggacagtgggctcccaggggaatgcaggttgaccacatctgg

SEQ ID NO: 29800 - DNA, 1059 bp, Homo sapiens
aatatactgaagcccatcaaatgaatttttttttaatttcttgagacagggtcttgctctgttgcccaggctggagtgcagtggcacagtcatggctcactgcagcccgaacctcccaggctcaaacaatcatcctgcttcattcagcctcttgagttgccaagactactggcgtgggccacgtgccggctactttttttttttttttttttttttttttgtagagatggggtctccctatgtcacccaggcaggtctcaaactcctgggctcaagcagtcctctcaccttggcctcctaaagtgctgggattacaggcatgagccaccacacccggccccatctaatgaatttaacgctttttattgtagagattccccatctgataaaccattatgtccatcttttcttttaaatcttgaaacataacttaaaaatatatataaagatggggtcttgccatgttgcccaagctgttctcacactccttgggtcaagcgattctccctcctcggcctcccgaagtgctgggcttacaggcgggagccactgtgccctgcctgtgttgtctttctttaagcttagagtcttgggttttattctcgcaggtaggtaatgagcttgtgcgtcagcttggtctgtttgaagcttgtttctaagctttgtttgggcagctctccagcacctctagagaagctccagggatagagcagcccaaggcgtgtggcctctccagggcttcagttggagttttgtgtctttgtgtcttcggtaaggtcttgccacactggctttttggaagtccagtatcttttagcattcctctagaatttgggttcagctcatagttttgtttttttttttttgaggcagagtctcactttgtctcccaggctggagtgcagtggcgcactctcggctcactgcagcctccacttcccatgttcaagcaattctcctgcctcagcctcccgagtagctgggattacaggtgcccgccaccatgcccagctaatttttgtatttttagtagagacagggttttgccatgtttaccag

SEQ ID NO: 29801 - DNA, 1050 bp, Homo sapiens
tgacctttttacaaggatacactgggccctggttggcgtccaaagcaggctggtgctgcgtcctcactgtgagctgggcgcctgcagtgtggcagccgtcagaggacacagggcgtgttgggctggcattgtgcttggcctgtagtgaccacttggtggacgaggggacattgcctctctcagtcccaccctcgggccttgcagaagcaggtgagcctgggcagggccaggcgcccagagaccctctgtggaccccaggcatctcccagccctttgggctgccagtcctccctgtgccttcaggccacgtcgtctggaccgtaaacctcagcctgggactcagatctgcctgtgtcctggactgagctgctctccgtccttttggactgggctcaggctctgagcccaccctctcccctcttcgggaagcctccaggtcgcctcttctccaggccacacctcttgggcacctcctgttgctgtgccctggacagaggcgtctacatgctcatgtgtggagcgttctgagctgtgcccatcacaagccctggccccctgagtggaggacaaagggccaggatgtggagggagggactcagagacagacttgctctaagctggtttgagtgggaagaaaggaagtgttagaggagagcccgggatccccaccgcatagcccttctgctgccacggagtgctctgcggcctgccctgccctggcagagaggcccacaccaggatggctcttcccactttcctgcgatcagggacttggggctgacccctgctgtctccaggctccctgggggcttggtggaaccctctgacctgtaggcacccccaagctgggcacgcccaggcctggggctaggcctgagccttctctctgctgtgccctcagttcccagccccagagccagggtcaccacgctgtccaaccccatggcggcctcggcctccagacggaccgcaccccgaggtaccgtaccgagcctgcgcaggcccgcctccccttacttggtgctggcggcctctagtgtgcactgagtt

SEQ ID NO: 29802 - DNA, 1048 bp, Homo sapiens
tttgtccctcctcctctcacctttgctgactctcgtgggcctcagaaccctgtcccggaacctggtcaagaacgccaagaagaccatcgggcggcagcatgtcactcgcaagaagtacaacccccccagctgggagcaccggggccagccgccccctgaggaccaggaggacgagatctcaggtggaggggtgggggtggagtcctgggtggtctctggatgctgacattggccagggaggatcagggcaggcggagtggccccgtgatgaccacgtgtgcccggcctgtgcagtgtcggaggagctggagcccagcacgctgaccccgtcctcagccctgaagccctccgaccgcatgaccatgagcagcctggtggaaagggcttgctgtcgcgactaccagcgcctcggtctgggcaccctgagcagcagcctgagccgggccaagtctgagcccttccgcatttctccggtcaaccgcatgtatgccatctgccgcaggtgagggccggccagggctggcccgggtggtggacacgtgactgggtgtcttccctgcccgctgtgggcctgggccacggcttctggtcatgtaaggaatgtggagggggagactccgggcagagggacgggccacagggctggggggtggctggggggccccgtggctgagctggaagcgcctcctgctgggagccatgggctggctcctcttgccctgcttggggcgtgagcctggaggcgggtggggtcgccagccaccttcacgcctctgcctcctctcagctacccagggctgctgatcgtgccccagagtgtccaggacaacgccctgcagcgcgtgtcccgctgctaccgccagaaccgcttccccgtggtctgctggcgcagcgggcggtccaaggcggtgctgctgcgctctggaggcctgcatggcaaaggtgtcgtcggcctcttcaaggcccagaacgcaccttctccaggtacctcctgcgtcctgccctgtgcctgccctgccctatctcaccctcccctccctcagctccg

SEQ ID NO: 29803 - DNA, 1083 bp, Homo sapiens
gttttgccagcccagcgggtggcagctgtgtcccgagaggaatccaccgaccttctttgttgctgtcctcaccgacatcaactccgagcgccactactgcgcctgcttgaccttctgggagccagcggagccttcacaggtcagcttggggcctctgggtacagcatgaatgaagctgcatccttgggccgtggccaactccccctgcccccgtctccccctgacccccagcaggaaacgacgcgcgtggaggatgccacagagagggaggaagagggggatgagggaggccagacccacctgtctcccacagcacctgccccatctgcccagctgtttgcaccgaagacgctggtactggtgtcgcgactcgaccacacggaggtgttcagggtgaggccggcagccggggcggcgaggcacgacgagggtgcttccatcggctgtcccaccactccccgctctggtcattgcagaacagccttggcctcatctatgccatccacgtggagggcctgaatgtgtgcctggagaacgtgattgggaacctgctgacgtgcactgtgcccctggctgggggctcgcaggtgagttttggaggcagctggtatctgcacagccacaggccctcctgctggggccctggtaggtatttggagcccagccagagccacacacagctggaggccttggatgctccctcttgcgtcctcgtgccaccattgcccccaacagtcctggcctgcttacctggccctcgcacctgtgctctgggcctgtgtcgttcagcctctctgtccactcctttgatggtgtgtgcctgtctctggatgttgatgtcagcttgtttgtctgctccctgccctgtgcctgggtgtgttggagtgtctaaccgtgtctttctgcccgtctgtcctgtgcagctggactctgttgaggaaggagcggtatggattctttgtttcttccgcccacctaggccccatccctacccccaagtcaaaagcagccactcctgtcctgagttttctctgcagctgcttgggacaacagaggcagggcatggcgtttccctcttgccat

SEQ ID NO: 29804 - DNA, 1048 bp, Homo sapiens
ggagtttcgctcttgttgcccaggctggagtgcagtggcacgatctcgactcactacaacctctgcctcctgggttcaagcgattctcgtacctcagctcctgagtagctgggacaacaggcgcccgccatcacgcccggctaattttttgtatttttagtagaggcagggttttaccatgttggccaggctggtctcgaattcctgacctcaggtgatccacctgcctcagcctcccaacgtgcagggattataggtgtgagccaccgcacccagccataaaaaataatttttatgaaaagtataagtaggccctcaattactgtaattgaagtgaattagattcagttctggaccttcatttaggaaccagtgtcttcatctgtttttgtttttttcttttttttcccatgagatagggtctcactatgttgcccaggctggtctcgaactcctgagcttaagtgatcctcccacctcgactttccaaagtgctaggatttcaggcgtgagccaccgtgcccggccaggaaccagtgtctgttgaacacccaccatagacttggccctgtgctggggattcagtggtaaacaaggtcctattcctgcccatgtcgaattcactgctgggtgaggcaggtgtggtcaggggacagagcagctggcaggaaaccaggaggcttttgggataatccacttaccaagtacaggcatgggttgcttaatgaaggggatacattctgagaagtgcattgttaggcgattttgttgtgcaaagattctagagtgcatttacacaaaggtagatggtgcagcctactacagacctgggctatgctgcttaccctgttgctcctaggccgcatgcctttacaacatgttaccatactgaatactgtaggcaactgtaatacaatgggaagtctttgtgtatctaaacttgtctaaacatagaaaaggtatagtaaaaatgttatataaaagattaaaaatggcacccttatggccaggtgcagtggctcacgcctgtgatcccagcaccttggga

SEQ ID NO: 29805 - DNA, 1048 bp, Homo sapiens; identical to SEQ ID NO: 29804

SEQ ID NO: 29806 - DNA, 1048 bp, Homo sapiens; identical to SEQ ID NO: 29804

SEQ ID NO: 29807 - DNA, 1310 bp, Homo sapiens
gaacctcaccccattcccccagggaacatcttgctgctctcagagccagaaaatgctgacagcctcatgctggtggacttcgagtacagcagttataactataggtgaggctggaaagatggcttcccatagatctgttcccatagggctcttgaaaacaggccagctgcccagggcatttggggactgaatgtccaccttattctcccaggggctttgacattgggaaccatttttgtgagtgggtttatgattatactcacgaggaatggcctttctacaaagcaaggcccacagactaccccactcaagaacagcaggtatgtgggccagaggctggggagcaggacccatcctgtgaggaaggagggaggtggagtctggaaggaatggccggaaaggatgttacctgggaaatactccacagtctccccaattcctgactcttggccattgatcgtagttgcattttattcgtcattacctggcagaggcaaagaaaggtgagaccctctcccaagaggagcagagaaaactggaagaagatttgctggtagaagtcagtcggtgaggaaggaggggcagggtggggtagggcagagcagaggaaagagggattggggaagaggcagatttatcaagctgcagggaaggtggctgtggagagtggagttaggacagtgggggagaagttaaaactgtagggattggccaacctgggtgaggggatccaagcagtgctagacatgctcttgaatgcccctccttttcctgccctccccccaggtatgctctggcatcccatttcttctggggtctgtggtccatcctccaggcatccatgtccaccatagaatttggttacttggtaagtgaccctggggatgggaatgctagctggggggctggggagcagcagcagccacactcttccaggaggcctggggagtcccgggtggctgtgggcagcctgaggtggatgtagaatgctggtcccacgtcttctcaccactgtgtggggtgggtttccttccctaggactatgcccagtctcggttccagttctacttccagcagaaggggcagctgaccagtgtccactcctcatcctgactccaccctcccactccttggatttctcctggagcctccagggcaggaccttggagggaggaacaacgagcagaaggccctggcgactgggctgagcccccaagtgaaactgaggttcaggagaccggcctgttcctgagtttgagtaggtccccatggctggcaggccagagccccgtgctgtgtatgtaacacaa

SEQ ID NO: 29808 - DNA, 1075 bp, Homo sapiens
aaaactttttttgcttggaaccaccacaaagatttatgaaaaatgtttaaatgaaaaagaaatgtgcagtgagaattatgaaaatggattgttccctaaggtttatgagcacatacatgccattctaagtgtattacacatattagctcattcgatcatcacaaagtcactcagggaaccactgttactgtcctcatttaacaagcggtaacttaacttgtccggggtcactatggccagtcagtagagaagctggtagtcatgttacccaagcggggccagtgtgaatcctgttctgagatagtacgtgtcttaaaatgaggagaatggccaggcacggtggcccacgcctgtaatcccagcactctgggaggccgaggccggtggatcacgaggtcaggagatcgagaccatcctggttaacacggtgaatccccgtctctactgaaaatacaaaaacgtagctgggcgtggtggtggatgcctgtagtcccagctgcttgggaggctgaggcaggagaatggcgtgaacctgggaggcaggggttgcagtgagccgagatcgcgccactgcactccagcctgggcaacagagcgagactccgtctcaaaaaaaaaaaaaaaaaaaatgaggagactggttccactcttgggatctataggagaactgtgaactcaggagctgctggtgaccgagtggtagccttgagaagaaagccacactaccacactacggccggcatctggggcctaccatcctgaacgcaccttacatccaaagctaagcaggctcgagaagaaagtcacactggaagaaatagagattgggagacagggaaggttctgaaggggtttgagtttctaattttagtccctgaaatctgatagcacttctgcagtttggtttcaaggaacaatacatttcccagagaagttcaagagctggacttggagcaaatgcccagctcagccaccaaatacccaggtggcctaggaaagcttcctagccttcctatgtctccgtgtgtgctcagctaagctggggactatagtacaaactgtttcatttcctcat

SEQ ID NO: 29809 - DNA, 1045 bp, Homo sapiens
aattaaaaagccagaagatgcagttctaattacatgccttaactagaagtaggatatttgcagcttatcaagttttatgtaaatttgttcctttggcacaatttgcctatataagcagtattagttcagtataaaatgtttattagttattgaaactggctctagtgtaatttctgtgttttaatacatagtcccaagttttgtgggatccctagagagaactgtgtggtgtctatgttttgaataaacaggttttttgaataatagtaacttacatatctatagtctcttatctgaagcccttggggtcaaaagtagtttagaattttagattttagaacggtagtatgctactagtgctgtgtgctatgtgacattccaatagaatcttgggcaatggccaagcatgttgacatttcttagtgcttgaatgggataaagatcataaagagcatctttttcagctgaggtcaggttgggctgacagtgtgtttggttttccagagcgttttgcatattggaactgcagataagggattatggacctgtaatattaaatataatagctgacatgtattgtgtttattccaagccagacatggtactttacttgtattatctcatttaatctttgcaactctttgaagaaggtgatagtattaattttgttttacagatgaggaagagtttcagagaagttaagaaacttgcctaaggatacatacacctagtaagaaagtggtagagttacatctcaactaagtcgaattagacaccaaatctggtgtgcacaataactagttatcctcctcgtattcagtgtctctgatttgcagcccatagactcagtcttacatcaacataaagggaattaatacgaagggtatcaggtgatggagtatcaggcccaggggataattgggggaaagaatgagtctcagtagcaacacttctttgatagtctttcttggccatttccattagaataaatatacttctagtagcagtaagattcagatgagagagaatacttgagcttgtgttg

SEQ ID NO: 29810 - DNA, 1090 bp, Homo sapiens
aggtgatggattcttttacagccagtgtttgtgcatcactgataattcattcccttcactttgcagcactgataattcattcccttccatttgcagactatagaaatttaagtttcagagaagcttagtaatttacttaaggtcacatagctagataataatgaaacttgaactttaaatgtaacttactgacccccaagatattgctgtttccctattattaggtgcttatttaaccggagaattgccatgtgttttttgtaacaattacattttttttttctttttgagatggtgtcttactctgtcacccaggctggagtgcagtggcgtcatctcagctcactgcaacctccacctcccaagttcgagattctcctggcttagcctcccaagtagctgggagtacaggtgcatgccaccaagcctggctaattattttttttttttttgcatttttagtggagatggggtttcaccatgttggccaggctggttttgaactcctgacctcaagttgtctgcccgcctcagcctccgaaagtgctgggattacaggcgtgagtctctctgcctggccacaattacaatttaatattaaaatatatacatatgtgtatttctatacatgtgtgttgacttttacacagtatttaacattttcaggtgtgtaaaatgaaagcattaggactaaatgatcacatagtgactatttggctcttttagagagaatgtgaatcactacctaccatttcactgatgcacactgtttaaaagatactatgctaggtgttacagttagaccctgagaaatggggtgctactatgatgttgttatgatagccatgcatgtgaataatatccagattctgcttggcccagatacctctccttcctatcatatttctgggagaaatagatgcttaaaaagggaaaagaaagcaaagtagagcatgttatatatacctgggtctttggccaaggtacaacagtataatgtcatgggccatgagaaaggctctattttctctaagttaattagagaaaatgtacctgctccagtacgttcctgaatagatgtatccttata

SEQ ID NO: 29811 - DNA, 1095 bp, Homo sapiens
taatctatggggactgggagaacttttatgtctagccggaggattgtatatgtaccaatcagcactgtgtctagctcgggttttgtggatgcaccaatcagcactgtgtatctaggatatctggtggggactgggagaacttttatgtctagctagaggactgtaaatgcaccaatcagcactctgtgtctagctcagggattgtaaacacaccaatcagcaccctatcaaaacagaccaatcaactctctataaaatggaccaatcatcaggatgtgggtggggtcagataagggaataaaagcaggctgcccgatccctgcagtggcaaccgggtctggtccccttccacattgtggaagctttgttcttttgctctttgcaataaatcttgccgctgctcactctttgggtctgcactgcccttaagagctatgtccttaagagctgtaacagtcaccgggaaggtctgcagtttcactcctgaggccagcgagaccacgaacccaccgggaggaatgagcaactctggacgggaggaatgaacaactccggacacaccatcttttaagaactgtaacactcaccgtgagggtctgcagcttcattcttgaagtcagcgagaccaagaacccaccaattctggacacaccgtctctactaaaaacacaaaaacaaaattagccgggtgtggtggcgggcgcctgtggtcccagctactcgggaggctgaggcaggagaatggcgggaacccgggaggcggagcttgcagtgagccaagatggcgccaccgcactccagcctgggcgacagagcgagactccgtctcaaaaaaaacaaaaacaaaacaaacaaacaaaaaaaacataaaggagtcctcacttgatgacaatgatgacagcttatatatttagagcacatatgaaatactaggtactttcctaatccttataaacacattttcttatgacgtaacctaaagtaggttccaacatctcataacatctcttcatcttgttgattaaaaacacgtaagttcagagtggttacataagcttcccaatatctcagtgtaaatctgtagcagagatggga

SEQ ID NO: 29812 - DNA, 1050 bp, Homo sapiens
ttgagctgttgtaaaaattgaatttgaataaaagtggcttgaacagcatgaaccaatggccagggctaatgtgaaccaaagtgaacttaaaatcatgaatacctgaaaaggggaattgaagtttccacactgagcttgagaccatggagcctgatggtcccataatttccagagtgggaaatacagtttccctgagtaggcagtaagtctcaaggcagagaaaaaccacagactgtgaagtacagaagcatcttactggtgaggacagagtatgttctcattagatttggtggagaggaactgtgcaagagagagaagactcaaaatagatggttgtctacatgagcacaggcattttcagagcttgagatttggagggaaaatgatcacaaaacagtacagaatgcttaacatctggtaagatgaagcaaaagacggactctggtacctctgagtagcaaacagtcccagggctgtccttgccaagtaatcagttctctggaaaaaagtaagtgtgcaaaaaggcctgctaatgaaatctgaagtaacggcaagtggttttgatggctatatggtccctaaacaaaaggctggcctcatgccttcttacaaaactgaactgacctttgtgagtgatgattcctggtgaacccttagctatatttttaaataactgttagtgtttttctgactactgcaagtatatgatcttgtgcaagatgtgatcttgttttaagagggatttatggatttttctgttcagaaataggattagttaaggtccagtgattttttttaaacaaatgcttaatttgtatctacttggttgagtaaatagtgttcttttgagtttcgatttctttttttttcagggtcccgaacccctttatttgtacttagcagaaacgattgccttctgtagaggagtatcttcccaatgtagttaaatttgatttttattttccattcaaatatttagaaatttcaacttataccttacaatattaaacatttttgtagtcagtcaccacaaatctcagagaggtattt

SEQ ID NO: 29813 - DNA, 1148 bp, Homo sapiens
atgctgcttatccaagaccaccgtttgagaaccactatcctaaaataggaaatctgtcctacacagagggcttttgttgttgtttttaaaaattgaacatagtctccctaccaaaacatctgattttggatcaaaaagcactctgaatccgaagtacccctgtatgagagaaagagcaggcatcagagattccaaccatggctgaaggccccatttcaacaagagagtgaataggaataaagcacacagaatgtcttgacagactaccatgtgaggcttgagctaaagtgctgcatggcatgactctggtagttaaagccaactgaggggagacattgaaagctgataaatattatgataaatattatgatcatcccttacatcaattcccccaaagaaatgcagtgagtcagagtttaaaatattactctagaatgcagcctaaggcatcactgagcattaatactttatatacaatcctataaccaaaatatctgaatcttctgtaaaactgctgtgaagagatgatccatcttgaagtccttagtccttttcataaaaatatttccaataaatttctcataaaatgtagaacttctctcttaaaagaagaaaagtttgcatcttctagtaaagaggcaaagtttttcatcagtcagtaagaaatatgttatttttctctttgcccagtctgggattaatttaactctattgtattaattctagtgagattgttttctacccttcccctgtttgaattgagtcatattgtaaatgtatttactactttatgtcttttaccattatctaccccaagttctttgaatttgtgaatgaataaataaatgaagtaactatttttccccctccaccaccttctggcaaaattgattgcatttggggagcctaatctaaggagtattaattagactgacattcaagatttggtagtggggggtgattcatcaagatagtcaaaagggaagccccagaccctttttccccaatggaccagttgccattgaaagaaataaaaccagttaagagatttctgcactccagtcaagtgtaaagccaatagcattaaagcactgtagaaaaatttatggcactcgcttgctggagcacctcccactccccacagcgta

SEQ ID NO: 29814 - DNA, 1029 bp, Homo sapiens
tttgaggaattcagactactctgttaaggcactgcagtcttgttttggtttgctgcctttacaagaatgctgttttttttttcatctagtataagtgccaattcaggaattgcatttgatgaccattcggaatgtcttgagtcagtaatttggaagtgaggtggagaccttgaagttttagttcttgctaacctcaaaaaggctacttatattttattcgatcctgggttttcttatctgggaaaagaaagaggaggtggagaaatgaccagttgctttctaaggtcccttctagacctaactaattatatgttgttttcattaagcagatgtatgggatagtaccaataaaaatgaaaaacagattttgcttgtgatatgccaatatagaggtaataccctgtgaagattttgtcttgtaggttttatgggagaattgtagacaaacctggtgaccatgatcctgagactttggaagcaattgcagaaaatgcaaaaggcttggctggaatatcaggagaaaggatttgggtggaactgaaaaaaattcttgttggtaaccatgtaaatcatttgattcaccttatctatgatcttgatgtggctccttatataggtgagagcaagttataaagtgtttgaatttttggcagtgaaatatctggtttcaaatttcataaggaaaaaatgtttgactcatttggttgaagaattcttggagaaatggagtattttaaaataagacaaagtttgggttatggggtaagttttgtcgtgagtagggaagagctcaaagacagcttgtggtgcttgtagagtagtctctagtcagacctaggtttgaaggaagctcagccccttatctagtctttgcaacttgggttagtttctaacccaaaaaagcggtttaaaagtaatgtagcctctatctaataggaaagctaaaaggattcagtgagttaatacatgtaaagctcttttagaagagtgacttgtacacagaaattgttcagtaaacgttgtaattca

SEQ ID NO: 29815 - DNA, 1044 bp, Homo sapiens
tctgatgagactttatggtttgtaaggcatgactccccaggtgccttgggtaggaatttgggcaagataagaaaaaatcagagtttagtcctcaaagagtagaataagatattaatgtcagaaattattattgttccccagactacctttggcaatttatagttaataatacagttagctggcccaatattaaacagtggtccctgaaaacttaggactaagcattgctgagttcctggtcaaaaacactgatttaaaaaaccactgttctagtccattcttaattcaacaaatatttattgagagctaaatatatgcaaggtggtgggttgggctgcaaagaatacaacaaacagaaaaacgcactctaccctcaaggtgtttacaactgtcacgattagcttcaatattcctgccgtgcgtgtgtgtgtgcgtttgagactattctataaatctgtttccaatcttgagtcatatttttctttgccatatccaagaacaatctgtaaaactatgtgcccgacgtatttttttaattaactcactttaagcgttaaattatttaaaaataaattatataagtatctcccttagaatcattgtaatcattaatgtccataaaatcatgaggttttctatttctcaaagtgtatattaaaataaatacgtctatttttaaaaggggagaaaggagtgacaagaggaagctttgtgattgattgttacatctacagttggtgggcataaatgaaaattgggagattaaaacccagtcccacagtgttctaactatctctgtatatgcacagctcccaataaagttagagttacaaaaataagacaggatgccttcctaagagagcttattgtctttcttaccaagaagatcaaacatgcttgaaacatttaagtgacaagcctaaaagtgcattcaactcgttttcttccatgtattcatggaacacaaaaccagtcttataaaaggtcaaaacagcttgcttgctccaaaccctgccttcacaggcatatgcacacataagaatt

SEQ ID NO: 29816 - DNA, 1084 bp, Homo sapiens
gctgggaccaaggggagggatatgcgtccggaaggcattgcttgggtccagcgtgagctcttatcttgttctatatacgggccttgggagctgggagatgaacctgggagagattctaatgtactgtacgaagttaactagtggctatttgttttttacaaatacatgcacataatttaaaattttgttttttaaatcgacatatatttatggtgtacaacatgatgttttagaatatgcatgtatagtggaatggctaaattgagttaattcatatatacattacctcacatgcttattattttttttggtgagaacatttaaaaactactcttagtgagtttcaaatatacggtgtattgttatttgctgtagtcactgtgttgtacagtagatctctggaacttattcctcctaactgaaatctgtatcccttggccaacctctcaatcctccaccccagcccctggtgaccactgttccactctctgtttctaggagttcaatctttttagattccacatataagcaagatcatgtggtattcgtctttctgtgcctggcttatttcacttagcataatgtcctccgggttcattcatgttgtcacaaatgaaccagggactgtttgaatacagggttagaatgttaaaaataaataggactatagcaggggaagtcggaggagacatgtttttctggcacgactgtaaaggtgcctggtgcttggatgtatgtatggtggctgatttgaagtgactgttttgagataacggtaatagtctgacagaagctatttggaaggaagcaaactccttttacagcctggcctggttctacaggtggtcacgtgacagtgacttgatttgttgagtgcttttctccctaaattaaaaataaaggtttctgggttgtgagatgcttcgtccttgtgggaaaatctggttcaaaacaagctctgctgcaggctttgggaatgtaggtcaggacttccttaattccatgtgctaaaccagaggtcccctgcacccaggtgaggggcctaggcagctctgcctttgcaggctgcctcagtgctggaaag

SEQ ID NO: 29817 - DNA, 1051 bp, Homo sapiens
gggaaaaggagctcctggtgcaggtacgaatccagaaaaatagagtgatacagtgatcccccaagaacccactagccttaacagtattccacattttaccatttttgtttcatctgtcttttttcttttttttttgctggtatcttaaaaaattcaaataccatgccatttgaccccggatacttccaaacgcatctcaggaaaaaggacatctacttagataaccacaataccattatcatacctaacaaaactaacaattccttattaccatattgaattttgtttgattgaaaaaatactttttaattttattagtagtagtattatttagagatggggtcttgctatgttgcctaggctggtctcaaactcctgggtgcaaatgatcctcctgccttagcctcctgagtagttaactacagcatgtgcaactgtgcccacctgaaaaagttgttttttttttttaatagttaatacattcaagtcaggttccaaacaaagccccctcttgtgtatgggtgttatgtctctctagtctcttctgagtcttttaatcttgaatagtcctcttttcctttttatcatgccattgacttactgaataatatttgatgttaaaaatgtgtgcatgcattaatttgattaaaaattttcaagaagttttaattggcttttaaaattttaatggttaaaaagtatagacaactttatatattttaaaagtcttatgttctctgtaagggtatttttataaaaacttgtttttaatgactaaatttaaacatctcaaatgcaggaacctttacatatcagttattctgggcacaattctttgcatgccaagatgagtaaaaatgattattctccagtattttttagtctaatcagagagggcagtttgtggacatgcctgccaaagcattttgccacatggaagtaattacttttaaagctaatagttaatggattccttactaggagccagccattttattaagtgttttaaattatttttatccataccacacactgtgggagaatccatata

SEQ ID NO: 29818 - DNA, 1153 bp, Homo sapiens
aaatattagttatgtaattttgatgataatttcttattaatatcaataaatatttctaaatacttgttactaaatggctgaatatgtatatatgtataacatatattatacagcttaaacattgaaaataatagattagaggaagtatgatatagattctgtaacctgatcaagagctatcttcatggaaattaattttctacctgcaggttaaataactctgaaattggtttctggctttgcttagagaaaggaaatattggttaatcaatcacaagttgagtgtatccatctttggtggtttccctttaaacaaaaagcctgttacggatcttgcttcctttccgtaggaaagttcattttagaaagtatattgagtcagggtttttgtttattttaatgatagagaattgaaaattggcattatcagatggcatgatgggttctttctggtgctgtttgaatcagggttagacagagactttgtgggactgttctccttcattgcattttctttatagttccatcccccaaagattccaggcatattatatctgtattgcacaattagatctaactgtattttgaatgttaaattcagccttaaaaaaaacctttattagccaggtgcggtggctcacgcctgtaatcccagcactttgggaggccgagacgggtggatcacgaagtcaggagatcgagaccatcctggctaacacggtgaaaccctgtctctactaaaaatacaaaaaattagctgggcgtagtggcaggagcctgtagtcccagctacccgggaggctgaggcaggagaatggcgtgaacccgggaggcggagcttgcagtgagccgagatcatgccactccactccatcctgggcaacagagccagactccgtctcaaaaaaaaaccaaaaaacctttattattattttttaaagcatatatggttcacgtgcccttgatggaggatattaacattaagtattcaggagtgaggaggaaggttaagttttaggttcgataaggattgtctggcttttggttcaaacaagtggtttttaactcatccagccattccttatgacccacattaccctctcaaagtgggggcaggacaggagaaccccacagatcccccaccttttgtttt

SEQ ID NO: 29819 - DNA, 1081 bp, Homo sapiens
catggaggcaggccagagacctatctccctctggaagaggtgatggccactggactgggaaaggttgctgggaggctaagcagagacaaggggagaacggaaggaagaacgtgagtgagatccctacatgatgtcagctgctcaatctttctttttggttctagcagcaatcctgggaaaagtgaccctgtgttggaataaagggtgagggaatacaggaggcaaaagaagagggtgtccaagggtttgtacccaaaccaggggaaacaaccagaaacaggaaataggaaccaagctaattttccatagtaaaaaacaaatttttttttgttaattctcttaaatccaaagcaggcaacttcactcttttcagtgttaggcccagagttgacattcaatacttactgaaatggagtcttgttttatagactccatttatggagccaggagtgagtgatttagtgttccaattgttaaattaattgccaggatgctgaagcttacactagaggctaaggtgctatgggcagacttcatatgccccatggaagtctgctgttgttaaaatgactgttgaaatctaagccaaatacttggctcacttagtgcttaaggtaattgatgcagctgataccaggccccgccagtgtgtggtggcttggcagagtcaagatggtatgttaatgtaaccaatctgtttccatttccacttgaatctttagtttattttgaatgtgaggttggattataggatctcctgcctcctgtgtatatttaagcgagagtttgatgaaagcaattcccagacttcagaaacatcctccggaaacagcagccaagaagggccaagtaatgtaccaggttagtgattcagaatggaatttcagccatagaatgggacctggctctaaggaaaatggggagagcaaacagtatcttctagaaaaagggtgaaaatggttttgaggattattgcaccagggcatcatcctggcagttactctttttgagcaagtgaataattgatagagcccagattccttctgggttggatcttgtttccttccatctgggagtgtct

SEQ ID NO: 29820 - DNA, 1052 bp, Homo sapiens
agatgacctttttcttgaagattttggagtcactatagcatagtgtcatcctcaccagctctgagcatttataatataattgtgtagctacctgagtactttttacttaacataatttagtctgatttatggacatgtcatcctaacctgttaatgagcaaaggcagcatatcttattcatgtgtatatttttcatagggctctgcccaggggaagagtgcatagaagcccttaaacaaatgattggccctgcagtaatccccccagaaaagctcagttttcattattaacagtgttgttttgcgtgtgtgcaagggtggaagggaattgttcttagttggcaacagtctgcccaccacactcgagcatgctcccaaagcctatgtgtctgttgcagccacagcaatttgtttcaaaggctctgtgttgaaaaccccaggccttagaacccagagaactacagtgtgtggagtggtccttaatgttgatctaaacttagatcatgcgtgaggttttgcaactggctctgatcttcattaggttttggtgtcatgagtggggtgcagtttctggtcagttacagtgttcacaatctatggattttcctttgcagcactcctttttctgtcgcttgacagaagataagaagtcagagaaattctttaaggtgttttatgaccggatgaaggtggcccagcaagaaatcaaagcaacagtgacagtgaacaccagtgacttgggaaataaaaagaaagacgatgaggtagacagggatgccccatcacggaaaaaaggtaaatgttcctcagtcttcagtcagctggatcatgaacaccagaagagtccttgttatccttcattgttttcattacttctgtgctctaaaatgcattatgatgggagctttcagaagaaatgccagcctggttatgatgtaattcttcctcagtgacctgagctgaagccctgctgctcagaaggatcttcctgtttaataaagaacattcctcttggtcgagcttagggttttattggcaagggatccatgaata

SEQ ID NO: 29821 - DNA, 1001 bp, Homo sapiens
ggtgacctgacatagcccttggcagatcaagggaagagggaaaaaaaatttcctttccctgcgggaacttgaattttggtgccatcctagttttggtgatagccttttttaataagcaaatttttattaaccttgatctacatttaagttttcacagtaatttatatgctgcatacccttttttgaataattttagcactgtttgcctttgctctagtgccaactaaactgagaatctgtgttagtctatagatgatgatttgaaaggccatgctattggagctatttaatctgaataagtggtgaattcattatgagcactttgcctgagagaatctagatgctgcaccctgggcatgttgcagttaaaagaccaaatatttgattcccagcaaagaaacagcagcccatttttctagtatagtcaaatgcaggagactaaattcttcttgaaaattagaaatttgagcagcattaagaaggaaggttggtaaagaagaccaaacagtaacttaagtacacaacagtaacaatatgaaactaacataagtgcccatcaacaaatgaatggataaagaaaatgtggtatatagacacagtggaatactatttggccataaaaaaggaatgaaatcctgtcatttgcagcaacatggatggatctggaggccattatctgaagtgaaataagccaagcacaaaaagacaaatattgcatgttctcatttatatgtgggggctaaaaaaaacaaaaaacaaaattgatcacgtggcaagtggaaagatagataacagagactgggaagagtgagttaggggaaaaaggaaaggaggaagagaaatgggttcaagggcacaaacatccagttaggtagaaggaatatgtttgatagcagagtagaatgactataattaacaaaaatgtgtggtgcttgggtgatggacgccctagataccttgactggatcactaggcactatatacatgtaacacaatttcat

SEQ ID NO: 29822 - DNA, 1025 bp, Homo sapiens
gtattttggataagggatagtaaacctgtactaagaatagcagaatgccgccgggcgcggtggctcatgcctgtaatcccagcactttgggaggccgagatgggcggatcaccaggtcaggagatcgagaccatcctggctaacgcggtgaaaccccgtctctactacaaaaaatcagctgggcgtggtggtgggcgcctgtagtcccagctacggcaggagaatggcgtgaacccgggaggcagagcttgcagtgagcccagtggctgctgcactccagcctgggtgacagagcgagactctgtctcaaacaaacaaacaaacaaacaaacaaacaaaaagaatagcagaatgtgtatcatagactcagactattttacatagcagttggcagccacatactgaattaagagcacctgcatggtgggagttgagtgaatacaagtgtgagcaatgaaatgaatgagacaagccaccagttacacaaataggccttaacattgtggaatgtgttaacatcttaactttgtgtcttcacatatcaagatgataaacttctgtgactttttcttgcataaacgtgtgctcttaatatcttttctttttaaaggtgctagtgcttggaaacaagagagatcttcctaatgccttggatgagaaacagctaattgaaaaaatgtatgtcttgaatatgctattttaataatttgcttctaaattaccatattttgcccacttgttatgttattcctaatgatcatagccattttttttaggtagataaaagttggcctatcagagaagtgaatcctaacattttaggattgctacgatgatttcttcagtatagtaataaaactaatgagtaaaattgaacaaagtgataagtatgacagctgttctaagcacagacttatccttttaattcttctcataggaatctgtctgctattcaggatagagaaatttgctgctattcaatttcttgcaaagaaaaggataatataggtaagaaatgactggta

SEQ ID NO: 29823 - DNA, 1055 bp, Homo sapiens
caatatgttagcactctattggaattatatgcccaaaatacccttcatttactcaatgcccatattaacttcttagaactgccataacaaagtaccacaaacaaggtggcttagaacagcagaaacttaagtcattcaaaattctagaggctggaagtccaaaatcaagttgtcagcagggtcgtgttctctctgaaggctgtagaagatccctccttgcctctctctagcttgtggtggttgccagcaatccttggcattccttcacttgtagatataccactccagtctctgcctcacattcatgcttctcccctgtagttgtctctgtgtcagtgtattatgttttcctaaggacgcaagtcactggattaggtagggcccacctaatccagtatgaccttatcttaactaataacttgcagagaccctatttccagtaaaagtcacattctgaggttctggatggacatgactttttagggggacattaaacattctagcatagtatggttacagaataagtatgtatggctcaactttagtttcttaactaatttggtttgagatgatttgataaatgaatgtattggaacaaaatgtaataaatagtaccagaatagtatatctataaagtttatgctgatattttttctttagcttttgtattccagtctatccttccctaactcaccttccaccccgcctgcaaacatggctttatttatttttatttttttaagatggagtctcactctgtcgccgtggctggagtgcagtggcaagatcttagctcacagcaacctccacttcccgggttcaagtgattcttgtgcctcagcctcctgagtagctgggattacagttgcccactaccacgcctggctaatttttgtatttttagtagagacagggtttcatcatgttggccatgctggtcttgaactcctgacctcaggtgatgcacctgcctcagcctcccaaagtgcttagattgacaggcatgagccaccacgcccagccacaaatatgctttattcagtttaaagtgtgga

SEQ ID NO: 29824 - DNA, 1088 bp, Homo sapiens
tttaagaaatgaatgaattatttggctcacttaactagaggggactttatacctataaatgtattttctttcttagttttttttttggggggggggataaacttcatttaattgtggtcttttttttgttgtcagcctacatcatgctttgatgttttttctttttaaatcaacatcattaaagtttgaaaaatatcataaaatcccaccagctattttaaatttatttttgccactagttcctacccatatgtctatgcatgttttacatagttgcaatcatagtatgtgtacatattttggatcttaatttgtgcttttccactagtgctcttggtattacaagaagggagagagcacttccaataagtgcctttattcctgctcacagactgtttctcagattaccttttatcaggtggactgaagttgaaaacagtttaacggggaattgtgataacactttcatttgagaatatgacggtttggagagtgagttgatgacattttaatgtttttcttaatgaaccttaaaagcgcttctggagaaccttaagaatcccttcccagcaaagtgaggtggtggttgatttaacttgctggtctttgtggtatcatgtgtgctgttggcctttatttcaggatgaaggctgccgatgagtgttttggtttggttatgcattggtttggttatgcgtaagttaaggtcaggttgctttgagacagatgtgttattggaaagagggttttagaagtattgaggaggtggggatggcattagggaagggttgtgccctgagctgggtaggcccgttggttggtaaacctttgttgtctttgaggaggccaaagaagccttgcatggacgcctcacacttgccacttacaaacagtggaaaacttaattttttgtactctccttcctttaactcctctcaggctttgcttttttttaaatattttttaaaaaaatttatttttaatttttgaggatacacagtaggtgtatatatttatagggtacatgagatattttggcacaggcatgcaatttgtaataatcacatcatggaaaattgggtatccaa

SEQ ID NO: 29825 - DNA, 1056 bp, Homo sapiens
gtgacaccatctaactgtttgaagatgattttcctttatttgctcagttcttcttttgattcctttcctttgagctgcgattctacattttaaccttatttgaggattgagtactgttgtgtattcacctgcatttccctttgtcttgtctctccagattatcaatcccttgaacgcagggactgtttcttatgttatctctgtgcctacaccacaccaggtagatttctgaacagctgttacaggttaagtatacatgggaatttaaatttaaaaacacatatgtttgattttgttagctacataatcaaaaattttctatcaaaggccatggttttctccatcttttctgttttgaggtgaactttaaaaatttacagtggggtgaatgccatgaacatttgtacctggtgaagtaagtggagcgtttagttgtgcggttcagccagctggttacagggaaaggtattgagttcttgctggatgaacttaaaggtatcaggttaggctggagattgacaagaatatctacaaagaacaaatccagagtctgagctgcatagtgggctggcataaatggagtcataataatttcatgctgttaggccagtagagttttatggtgtttttttttcttccttcatcctcactcccacttcccccttattttggcaccttttgaaagaggatgtagcaattatttggtaagaaagaattaaaagtgttctaatgagtaaataccccagatcttagagaggatttgtctgactagagtggagagaagaaaccccacagttactgcaagtaatttttttttttttttttactgtggcagctcattaatttttagtgactgggcattgtaaaaaatattttaaaactgggtctattttagttatagattacaaggcaaagcacaataaaacatagaaaggagttcagtgctcacagtgagtaccttccttccatgggcctgtgcaggtggatagaatgacacatgccgcagatctgggtgtgactcaggagaggggagttacatgtggttctcctgattac

SEQ ID NO: 29826 - DNA, 1052 bp, Homo sapiens
ctttccactctggtacaagtgtgtctccacagttctgtgacttgattctacttatggacaccatagaaagtgttactttgggggtagaaagacctttgctgtattaattcacccataattagttcctgaataaataagagttgctggcaattatagtttctgatgggtgtttacttttattgtcttctcttttgaaataaagtctttttgttgaattttaattttctttttcagttcaaatctgaacatcaatgatgtactagggaactactcattgactcttgttgatgcattggatacacttgcagtaagtgttcacctttttttaaaaaaatgaattaagatgttttagagttgattatccctagttccctccagcagtgggaattccagggagcctgataagtcaaaatgtatcattagctttgataactgttatttattttaatgaccttaatggggagaacaagaaaagtgttgaaggttaaatgaggggaaatgtgattccattaaaaaaaggagaaggaatgtacgattgattttagggaacctatttttttttaaccagtttctatcttattccctaaaagaacccataatgaagctcattaatattgataattatagtcgttgctattccaggagtaaaagagagaagatctaagggttggcaggtaccctgaaatgtcatctagccactggctcccccaggagcaagttggagccctagcgcccatccttatgtggggctccctagaaacccttctcttttatttgccacttcctgttttgtggacactccatgcctgagctgccaacgtgggtgctggcattactgcctcatcctgtggttttgctcattgactctggagaactagaggcctttgagcagatatgcagaagcaccttgaaggcagtgtggcactcagtacatggtgccatgtctgtgtgcttcatctgcttcaccttttgccattaaagcagtttccaggggactgtattccagcatagtgttgttttaaaatcttcttagttaaggtgatttttacaac

SEQ ID NO: 29827 - DNA, 1099 bp, Homo sapiens
atgttttctgaaattctgggcggactaaggaccccagggatgtggctttcagtcctggccacgaagcagttgctgcgatgccttttagcttccctggatctgccatttctttataaagtgagtgaggatgttaaattatgtcactggtcttcacctgagggtgattttgctcctcagggaacattggaacagcgtctggagacgtttttgattttcacagctgaggcgtaggagttgccactggcacctagtgggagaggcaaggggtgctgctgaccgtcctgcagtgtacaggcagcttccacaacagttacttccaaacgtcagtagttcacaggctgagaaaccctggattaagtcatccagtcacatttcctgagagagcaacatatgagtttttaattttccctcgtttttgtctttctagtgcaatcgtgtacctgatgagaggaggtactccctgcccttaaagagcatctacatgcgacagattgaccagatggttggtttgatttgatctgctctctgtgaggcctcatcttgaaccagaccttaacgaccaaacccagaccatgccaaagtccagtctgaaatgaaaggggacagaagtcttgctgtccatggtggtgtaggaatttctgtgcaacacctcaccacgtctggttaatccttgcacacttcagtgtttctctcctgttcaataaaatgccctgttaaggatataatttgaagtgagaagatacatggaaattgccctcttatgacatgttgatgttataagcacaatagatggggcatctttggattgatgttcacagctttatacttcagaacctaagtctcttcactttgctggcacctgctatactggagtattgctatgtctttaaaaaattttttttattatattttatttttttgagacagggtcttgatatttttttgggacagggttacctgggctcaagtgatccttctgcctcagcctcccgagtagctgggattacaggtgagcaccactgtacctggctagctacttctttgttagaggattgagaatgaaatttctgcaaaagggcccatggttcatttggtatcc

SEQ ID NO: 29828 - DNA, 1035 bp, Homo sapiens
ttgagtgagtcttcacataggctgttttcttttctctaggctctgtgatcctctaccttatgatataatagtcgatccaatgtgtggaactggggcaataccaatagaggtaatcatatttctttagcttttagataagagtgatacatccagaatattctagacctaatgggcaaattagacataatgaaatctccatggttggatcagtggacccaagagttttaaaacaattaacaatagaaagtggaacttttttgtaaagaatgtaactacttatttcaaagagccatgtgccactggcctagatacattgttagtgacatctattcactagattacagaggaagctgagaattacaaactgccgatgagtcctctttgtgtaacagacaagctggtagacttgaatgggaaaagataattgaaggcataagcataaactggaggaaggcaattttcttctctgtaatccacttaagttcctagagggaataagtatagttgtaaaaaggggaaacttatgaacattacttggattttttaggaagtctaacaagcttaataccaaatgctcttagttttcaaaattaccatgatattgagaggactcataaaaactgtgtaaagcaaagcaagaaatggaaaggcattttctaaatggagaatatttcacagtagattccccttgaataatcagtatcatctatatgtttttaaagaatttagaagagggagctcccagtaaaatcactgaagtttgtgtgaaacatagtagttcttccatatagtatactgacagccaatttgaataaactgcagggagacacagcagattatatgattgggtagaaactggacagatgagcaagtccaaagcaagcccacaaggggagaaataatccaaactgtaattagaaaatggtatctgttctgggagttaaaatccaagactgaaatcatagaagtctacatgtgactgtgttccgtgaaagctagagaaattactgtggcttaaagagactgcacagtaaa

SEQ ID NO: 29829 - DNA, 1049 bp, Homo sapiens
ggagtctaggactaattccagaaataaaaatacttctggtctacaaatgtgactgcgctgtctctgttaacaccaacatatcctaggatttcctgaaacattttcattcatgatctccagacagatttgtgatactgtggtcataactagctacatagttatgcatttctgcaaagggaaagaatgtcagtaactagctacataccattctgttaaattattaatgatatttattaatgtttcatcatgcctatttcgctgttctgggcactttaagattaaacctggtattaagtgcagcatactcaactagatgtagacttcacttcatagaattttaaatctgatggcaactatatgcaatacgcatttatttttgtgtgtgtttgtaggaaaatttgtagatgtaacaagcaaaacaaagatttttctgaatttccaactctaccataacagaatttcaggcattttccaagaaatggcatgatagcagctgggttgcatgttgtacttagaacactgttgatggagtatatctgttgtgagcctggtttctgtgtatgtgtccaattcagtgataggagaagaaagcctgtaattacatttgcataaagtggttggctgctaaagagatgtaattccattattccaaacttttaattcatattttaaaatataaaaactagtatatatatcaaggaatattttaggaaatcttgtagttacctgtaagtgtctaactgtgtattcaatcagtaaccaatatggaaattgcagagtttcttcatcagaagatatgagtttaaattttatatttggcatgcacagcaatatattaaatgctgtgcttaactagaaagtattgtgcagtgtgatggccttttaacctccacaatatacattttatttttattccctagacttgcacatgaagtgcatatgttcatatttacccgtttggagatgggtaagatacaaccagcatagctccatctccatggccatctttgatttcatgcaactttcctttttcctgtccccctcccacc

SEQ ID NO: 29830 - DNA, 1624 bp, Homo sapiens
agttaatgagaagagcgtgtattccactcataattatgggaccactcagaggcatgggtgtcgaggactgccttatgctgtgagtatgcatttgtttctctccagaacagtgatcttcctggagtgtaatccattcttatacattgtgactttcttgaaatgtttatatgcagcatgacgaagttgccccttttgcacttccctgactccagcggacgtctagccctgcatcattgttcttgtttttatgtcccagttgaccttggcattttgttttatcactttcctggttgaagccaaaaaacaaagggtactactttcttctttctttccatatgtaccatactttaggggagagaggggccagtgtttggacactgttgatttaaaaaatcttattttcaggatcataattacggagcccctcctcctccgacacctcctgcttctccccctgtccagacgatcatccctcgttctgacctgaatggcctgccgtcgcctgtagaggaacgctgtggagacagcccgaactctgaaggagaaactgtacctacctggtgtccttgtggtctttctcaggatggcttccttctcaactgtgacaagtgcaggtaagatcctgttccatctaaatttaagtctgggttgctgggattagggtttcttacaagtagggaaaagctcaaagtattctttcttgtgtttgttaatgtagatgattccttagtgctccttggctcgaattctctgcactaggtgagaattgctgacaacaaggaatgagagattgatgttaaagctattgaatttgatatgaaatttaatgtcctggaaacatttggtaggtgggagggagggggtagcatatgcagagacacttcgcccatgtgtgctatgatgtgatgcatgctgttggaaggactactttaagtttattttccctctttaggggaatgagcagggggaaggttattagacttcatcggcggaagcaggacaacatatcaggtgagcggaagatgggttaggtccacaatttgacataaaaatattctgtgatctgaatgttcattttaagaacccctcttggccaggcgcagtggcttacgcctgtaatctcaccacttagggaggccaaagcgggcggatcacctgaggtcgggagtttgagaccagcctgaccaacatggagaaaccccatctctactgaaaatccaaaatagccaggtgtggtggcgcatgcctgtaatcccagctacttgggaggctgaggcaggagaatcgcttgaacccgggaggcggaagttgccatgagctgagattgcgccagtgcactccagcctgggcaacaagagcaaaactccctctcaaaaaaaaaaaaaaaaaaaaaagaacccctcttacaagttcccatggtcccccagccagctcttttcacagaaagagatagaagtcctctcaagaccactgtatagttctctcattgtaaacgaaatgtgttgagaacagtttagtcctgtagcaaagtattccttgtgaacacaaaaaatatggattcctgttttaaaaattagccagtctcaaattgttatagattgagtcagcgaagcttagggactga

SEQ ID NO: 29831 - DNA, 1026 bp, Homo sapiens
tctttgttgtggaagggactgttctgtgctttcaagatgtgaacaggatccctggtgtctacccactagatgccggtaacactcatacactcagttgagattatcaaaaatgtcttcagatattaccaaatgtcacctgggtgcaaaatttccctcaattgagaaccactactctaaacccaactgaggtagagtctctaatgccttgaaggatgggacagcagagtaaacacacagtgagattagcgaacaatggctaatactgtgacagaggcttccagaatacagtacacttatcaagtgtaagtttaacaattgccacttaaagctgggaatattgtttggacactgccagtccccctagtctgtaagctccattaagcctaaggttttgcactattcttttgcgcaactgctactgatgtcaagcaggcgatactctgattgtcagtatgttggctttaggtgtttctttagatccctttgtttattgttcagtcttttggactctagtaagaaatgtggagacaatagtgttgattttttttcttctatactcctgttccttgcagaaaggatagtagacaataatcagtcagcaacagtgatgcaaaagtggtaaaagaaagtgttatgataagcatcagtgttttctgtgccattcatagaaagtatatttaattttattgtacctgtttgcaagtttaatgtggacatggattttcaagtagctttggtactacagtgtcttttccttctaatcatcactagcatgacatcatcactgtcagtgtttgttttgttttctgatggcacttaagtcttgaacaccgtggaggagaacatgtattgggcttatgctttgtctctgtagctcaggcactgtctgcctaggaagctgttcctgagttgtagtaatcttttctcaatactgtcaccatagagggcaatggttttcctagaggagtatagcaaagtacctcctagacattttctatattctccctacctactcctctcccctca

SEQ ID NO: 29832 - DNA, 1029 bp, Homo sapiens
agtgataaatttgaggtctctactgttcatttgtatgaagattttcttatgaacttgatgtcagtcctttgattagaaaattgatttttatgactttaaaatggtcataaaatcacagtgatgggatgaaactatgatccagattaatttcttactttataaatggagaaactgagcttccccatttaaagaagttattcaaggtctcacctctcattggtaacaaaagcatgatagaaaccagatcctctgactcccagtccattactcttttatgccacatcaattgccaagtgataaattttctctggaaccccagcttgtcccacccccattcccaaccctctatttatgcatggactttactaacctccctgaatttgttttctacagaattctccctctgaagcacagaatttagatgagaatacaactgagggctgggaaaatcggataagactatggactgaccagtatgaagaagctttcactaatcagtacagtgcagatgtacagaacgcgcttgaacaacacctacattctagcaaggaatttgtgggcaaacctactattttagacactattaataagactgaattggcctgtaataacacagttattggttcccaaatgcaggtaagcaccaaagggttgaggactctctaagtagctgaaattttaagaacccaggaagagggtaatggattggaattactgttccttccaaatgtacaaggccatggaataacagattagccaggtgttgatcatatgtaaccaaaagtaggttatattaactggaaactacctggatacatatttttaaactacctttattaataaaaaaatagatgaattgaggctgtgtgcagtgcagtggctcactcctataatacaacactttggcaagaagccaaggtggaaggattgcttgaggccagcagttcaagaccagcctgtacaacatagtgagaccctctctttacaaaaaaaaaaaattaaaagccgttgtgatgatacacacctgta

SEQ ID NO: 29833 - DNA, 1044 bp, Homo sapiens
tcaagaccagcctagacaacatggcaaaaccccgtctctgccgaaaataaaaaaattagctgggcgtgtagtcccagctactcaggaggctgaggtaggaggatcacttgagcccaggaaacagagattaccgagagctgtgatgcaccactgcactccagcctagatgacagagcgagattccgtctccaataaaaagaaaaacaaaagtatttataggactctctaatgtctctgtttaacttattcagagacaatatcagaggaagttactgtactgatattttaagagggtgaatggataatgtaactgaatttcaagggtactgagacaggcattttggttgtttctttggagcagtaattataaagtggactgtgcctgtcacaagggaaaccggaattgtcctatacaaaaaaggaatcctaatgctacagaactgccactcctaccacctcctccaagcctacccaccattggagcagagactagacgtagaaaagcacgacggaaagagctagagatggagcagcagaatgaggcttcagaggagaataatgaccagcaatcacaagaagttccagaaaaagtaactgtatccagtgatcatgaggtaatcgcccctggtcaaatgatgatgctatggcatcaatcctccaaaggaagaggaacccgggttgccgcatggtttaagtaggggagctatagtaacacttagtgccctttatatcaatgtgggtttattgtgttcatacatttctttctgttttacaaagtcaaaaacatcctttgctggttttgcaccagagaataggggttagttatcatctgtgtttaccatgtggcctcacatgagttaacagtttaaagcactagagattgttatagagagttttaagctaccagaataaaacagattgattttttctcagagcttgagtacagctgaatattgcctctatcttaaaggaagtagacaatccagaagaaaaaccagaagaagagaaagaagaggttatagatgaccaggagaacctagctca

SEQ ID NO: 29834 - DNA, 1029 bp, Homo sapiens
caatcagtaaactgggaaaatacatttgtaattttattgacaaggggtcaacattcttactatttaaagagcccttacagatgaagaaaaagaccccaacacctcagtagaatgcaggctgaagaacatgagccagcagttctcacaggactaaatataaactacacatatatagatattcttttgatttaataatcctacatgtagccatttgttctaatagcaaaaaatgaaaaaaaagttggttaaattttgataatactaatgttgtgcagtcattaaacctgaactgtagatttctattcattgtcataaaatgttgaccatgtatttctgagtgaaaatagttactgagtagtttaggtaaggcaagagtcagtgaagcaatgtctcgataaaaatttaccaggatattagcatgcgtttatttgtggatatgattttcaggttgtgtatgtgctgtataaccttggtaattttttgagtaaaggtgaaaaataataataataaaagatggatagatttgaccacataaaatttggaaactatatatgcaggaaaaagagaaaaagtaggcaaatgacttggctttctttggcctgtaaacttcttaagggcagacatcaggtctcttgttgaatacagtatcataataagtactcagtaaatatatgttgaatgaatgccttgtacattgatttgcacgtggcagatttcacctgtatcttataactcctttctacaactaacttcatcacttaacataattgactttgatagttatagtgttggacctagcagtacagagatctgtaagattccattgtttaagacccttgaaatattaaatatataaaagttattccgaatataagccatgaattacatgtttgtttctgttttatacctaggcactttttaaaaggaggaaagaaaatttagtatctggaacaaaaggaagatgtgaatatacttccaatctaggaatattaaaaatcctgagatatcagaaaggaaaaatatgcatct

SEQ ID NO: 29835 - DNA, 1050 bp, Homo sapiens
accacccactgtccatgccaagtaaaattcacagccaaaaccctgctttgctgaagcagcctcatttcccctacctcagcatgtgcctgccacctaggccacagttattcagagtctacattaggcaccctctccttacctcagccctagcacccctgagtcattgtcacactaccaccttcactctcttcacgtgttcccatttacatctttccattaagcactcactgctcagtctctgttatgggactgctgcctcacctgaaagtcccaaggtaaagtcctaccctctgtaggatacagggacctaagtatacacatacatgctttttctgctctgttgccaaaagtacaatggattttacaaaataacattaataggggtggctcaggtctaattagattatgccaagaaccaactctagcctgtgagctagggattccatcaatcacatttcctgtaactgtcattcaagaggaactggccatctccctaaccatgtcagcccccagcacactaatgtctccccctggatagcactgggagggcctgaggcatataagagaataaagaaatgtgacaagcagaagaggcattggatgaaggaacaaggtccatgtaaggaggaataaggggtagggtgcccctcaataacaaatactgtaggttgctaaactctcatctaaaatacaaagacgtataacactaaaatttcaccagtctaactctttccttgtatgtgcttgagatgtttacttacagcatgaaacattataaccaatttatccttaaatgctttcagagataccaggaagcattttaacaagtcattctgtccattgagatgagttctgcagttaaatatttcccctatgcattcttattcaacttccccgcccccgaaaaaagttatggctaacatctatgcttgcttttattttttgttttgttttgcttcttgacttcgagtagatgaataataacaagatgcttttccctcctctagaacatatcctcccctgagagttcccctgcgcataggcccgagt

SEQ ID NO: 29836 - DNA, 1050 bp, Homo sapiens
caagtagtttagtagatattcataagtttctgctatgtgttccgcactactctcagacaagtgagacatagtctctgccaaatccagtgaaagacaggctgttttagtacaacttggtgaatgttgtaaatattcagcaaatgtaaatgcctgtatgtgccatatacttgctaggcaattgagaggttagaacagtgaaaaagaaattttacctattatttagtgtgtcccaagttcgaggcactgtattaagctctttaaatgtgttttatcctcacagtaagcctataagataggcaattttctattttgcacatgaggaaactaaggcaagttgagtaactttcccgtggtcacacagctagtaaatggaaggaccaggatactacccagtttgagagagaaggctggagtgagaggcagcaggttactgatttaactgaatctcaaacaataagtaggagtcagccaaccaacaattgagggtgaggtatgttacagtagagggagtagaacaggtaattaggtggcactccattggccaggcagcaggcatgcagtatggtgcaaacagttggatgttgttgtatcaggtggaaggccgggggagccaggaggaaagtgcagagagtgctgggctgggccaggccatagagagcttgctaatgggttgggactccacttccaagtaatgcctgatcaagaagtcacaaagccaaaaatatgcttttgtataagtggttctcaactaggggtgtttgagaatgagtaggagtgttttgaattgtcccagtgacttgcatttattgagcagggccagggatgctgaatgtcctgtataggggacagtcccatgtaatggccaaacatctgtagtatcctcattgaaatgaaacctagtggtttttttatattttcattataatgatattaccagaatttattaacttctttccaaaattatttctagaaaatgcatatgcaaaactgtctatatttttgttccatttggacagaaaaatgagaaccctaaggggatagaaggaggag

SEQ ID NO: 29837 - DNA, 1043 bp, Homo sapiens
agtggtttgggaatgcttcgaattttattttttctactcccaattaatcaggagttgatgatcccatgagcaggaccgcctccatgattggggagcatgcacttgtgactgcagggtaagagtgggaagataggtttgtggagtggcaccgacaggactgtgattgtgtgtgggcctgccccacatttctctgggggatgcttatgtgagagtgggcccagtgaaagagttaccaagccacccacacccctaacactgttctggatgagagatgagagcagaccggcttctccccatcagtgcattgtgcctgttgtacacccctggaggagccctggagccagcccaggtggggtacacaatctttttaaattccatatggttgccagcttatttctttcacttgtttactgtaatatctggcgtgtttttatttatctaattttgtattcagttataaccatggtaggggtagtgaatatatgacaggtgtaatccctggtgctgcagtggaccttcttttcttttggacaagataatactgtgagtttccctccttccttccctctaatttgttttccttttttccccagcctcttgcatccccttcttttctaccctgtcctacaactatcatatgcacagtcttctctctttgtgtgtgactgttacaaaatttcacttttcaaaatcgaaatcaggtgtttgctcaaatgaggggagattttttttttttttttttttttaaatgctgagacctcagcagagtacttttctttttgttgtttcccccacaaacccatcagtctgggagagcattgggagtggaaatcatgttgcctgggatgctggtttctttgtatattatataaaacgtatgtaaatgtctctccatttgggctggggtttgcattctccccttggctatttaaccaaggggagaggccagcgggcaggcggccctcaccctgcctggcacgtgcagagaccccagccactctgtgtgggcagggtgctgtcaagaccagacctcttgggggggt

SEQ ID NO: 29838 - DNA, 1022 bp, Homo sapiens
accaatttctgagtcacccaccccttatcaggaagaaagatgagtatattatcagcaagggctttggtcagacctgggtttccgtcgtagctttgcagtcctagctgtctgacttggaaaaatcacttcctttctgagctcagttattttatcctgtttttaaagggggaaaaatgattcaggcccccctcccgtaagtttgggttaaaatgaaataatgggttgggcatggtggctcatgtctgtaatccagcactttgggaggccaaggtcagagaatcgtttgaacccaggaattcaagactaggctgagcaccatagtgagaccttgccaatacaaaagatagattagatagatagattggatggatggatggatggatggatggattgggatggactgggatggactgggatggatggagtaaatactcatagtagataccttttcacgaatgctcagtaaactgtagctgtggttaaggacttggccttagtcatttgtccgagagcctgtaggctctgtcatggcactaggcagctgcgtaaaaggccaggcctccatcccgacctgtgtattcttgcctgggttgagccagctcggtttgtgtgagtattcttgtacccccttccagaaaggactagctaaaagacacctgctctgagttggccatcagcagggcatcgggggagttgggagccggtaggaactgcagctctgggtgctgtgaagagggccctgagccgcatccaactaaggaagtgaaatgttgctgagctcccaccctcctaggcagaggtctgagccgctgggatgtggacaggtgacctctgaagcgttgttcagctccgccaccatccagtttgagggttgcttggtcccatgttctctccagtcctgtagtgggagagcagagggggtggagcttggatccctctgtttgctgctcagggcaaaagactttgggctcttgttgaagctggttaagttacctgtgttcttagactgactggaaggcttt

SEQ ID NO: 29839 - DNA, 1034 bp, Homo sapiens
tccatcaagtgccggatgaaatctttggctaaacccccaagacaaaagcaaagataatgacagcatggtactgcctgtgtactccccaagagcatacccactccctcaggtctggcctggcatcaagacaaagaggccaaatcagtccatgccccaccccacccaacctatgctcttcttcaggccctcccaccccgtgccttccagctctttcctttctctcttaagaaaaacatatggccgggcacagtggctcatgtctgtaatcccagcactttgggaggccaatgcaggtggatcacgaggtcaggagttcaagaccagcctggccaagatggtgaaaccttgtttctactaaaaatacaaaaaaaattagccgggcatggtggtgggcgcctgtaatcccagctacttgggaggctgaggcagagaattgctcgaacccgggagacagaggttgcagtgagccgagattgtgccactgcactccagcctgggcaacagagcgagactgcgtctcaaaaaagaaagaaaaaaaaaaaaaagttgttcttgactaatctcagtgcattcacactgatgataaacgatagtagcttcacaggtttgcttcttaatagggggcacaaaaggaggatgaaaatgtttatggtggtgttttagacattagggtgtcaataggggagaggtattttcaaatagactatgtttgaagattgaacaaatgaatgcctagtttctcactctgggagccaagcagaaggaagtacccaagcagaaggaagaaggggtagggtgtctggtctcgaagacagctctttgtgtggtgctggaaaatccgacagaaggaaggcaggagggagaccgcccccaaagcaggtgagggaggaaccagaggcagggcccaggggaaaaaagcaaagccccaaataccagagtcagagatgtcgtcccagtaaggagagtcaaactcgtactcggccttcaaaatctgttcaaagagtttggcatcattctcgtcatagaagggaggg

SEQ ID NO: 29840 - DNA, 1051 bp, Homo sapiens
ctgataacattatgtggccctctggatccagccatgcctgaggtctacccctgggcttttggattatgtgtacagttggttcatccctttttctgctaattcgagtcatggctaatttaacaccctttagaaccttaaagaaccatcagcatcacccgggaacttttttagaaatgcaaaatctctactgctttggatcctgggtcaaaaaaaagaaaaaaaaaagaaatgcaaaactttaggccctgccccagatttactaaatcaatctgcagtttaacaaaatcctcaggtgatttgtatgctcattgaactttaagaagcagtgttttagaacaggttcttaaaaaggaacaaataaactcatttaactaaagttaactgattaaagaggatttgctagggtattctttccacatctgtttgctttctctgggagaataagaagtcataagtcaaagaaaagcatctctcgtggtgaaatttcaatcctcagggataattagttactgtagtaacctcatcactggtttccagtcttgtccctctccaatttaccctccaagctgtggccagagtgactatcctgaattgcacacctgccaaaaagtcttaagtgtctcccggtggcctatgggacaatatccagcctccctggcctggcttccaaaaccctacacaaactgtcccactttcatctccagcccctttttccactctccccccagcctgtgattttaagctccatcacactctacctctctccacatagaaccatgcctctaagcctttgtttatgctattccttctgcctggaatgtccttcttcctctctgacaagtgcacacctacccatccttcagtccccagctctaatgccccattctccaggaagttttcccccaggcagaaggcacagctctctctgggctccacaaagccctcaatcccaaccttaattggagcacagcacacaccctgttgtcattttctgtaggtctgtctcttgcacatgtctgggatcaacttgaagggcagagaccaggtttga

SEQ ID NO: 29841 - DNA, 1055 bp, Homo sapiens
gtctcgatctcctgacctcatgatccatccacctcagcctcccaaagtgctgggattacaggcgtcagccaccgtgaccagcctgaaacaggagcaagttctaaactcaggctctagagtcagaaaaggtagagtcaggttctggatccaaaatggggcaagtcatgatcaggttctggaaccagaacaggcctcaagcctaggggctgagcagggtatcccctggcctgggagcagaggacttctggctgactgctgcccgcaacgttctcaagctggtggtgaagtctgagtggaagtcataccctattcaggcagtagaggaagaggcctcaggtaagtactgtggttacctccactctcccacccatttatcctccacccatccgcccttccacctatctgcccttctacctatctattcatccacgcacctactggttcatccacacatctgtgtatgattcacatctacccatctatccatccatccaccagccatccatccactcatccacccacgtattcacccactctctgatctaccgattcacccacccacccttccactcatccttccatcctcccacctgtcacccattgttaatctcgtcattcatctacctgatgtcagctccatactccccatccatctatccactccctgcctacctatccttccacagatccacctacccatctatctacctgctattccattctcccatctactacctatctgttcttcaggccatccactcatccattcttctgtcccaggtacttagacacttgtcttcccatccgtttgttagttgatccactcctcattcagccctcccatgggcctggcatgtagccgagcaccctggagagggcagactaagaagacatggtccgtccctgcctgtgaggagttcaggtctctgaggaggaggaagcagtgaaactgggctttacacatggcctgagaacagcttaggcctgaacataaggaacagcttggagtggaggggacacagaggaaccctcactatcatgcatgccaacccaac

SEQ ID NO: 29842 - DNA, 1031 bp, Homo sapiens
ttactggcatgagccaccgcgccaagccctctaaatgtcttttattgctgatttgttcttgtttttgtttttaggccagcacatagtaaaggcttataccttgcactgtttttttttgtctcttttcatctaggccagccccagtgccttttgaccccatagttttgatcttttgaggggccaggcgggttgttttgtagaactgtcccacattctggatttatctgattgtttccttatggtgtgatttaccttggtcttctgttagctgattgtctcaggaactagaagttaggtcaaatagtttgatgaggttaaacatttttcccaagagcacttcagaggtgatgccgcgtacctcatgtggcatcacaaggcacatcctgtgagagtgtctcacagttagtgctgctgagtttgactgtgggttacagtggtggctaccagattctctccattataagctacatctcccctttgcaattaatttttctgtaaggtgctgtgttggctctgtccagattacacattttcctgtcatcctttcatctaattgttttgataccagttttgattattgcctattttattagagttgcaaaatggcaaatgtctaattctgttgttccttctgcatttattagctgagattcttctgtaaagatgaactttccctcatcatctggggctacttgggagtgctgatagctacatttttatttgatttttttttttttttttttttagacagagtctcactctgccacccaggctggagtgcagtggtgctagctcggctcactgcaacctccgcctcccggattcaagtgattctcctcagatcccgagtagctgggattacaggcgcccaccatggccggctaatttttgtgtttttagtagagatggggtttcgccatgttggccaggctggtctccaattcctgacctcagctgatccgcctgtcttggcctcccagagagccaccgcgcccggcaatagctgcattttttttttttttttttttttg

SEQ ID NO: 29843 - DNA, 1047 bp, Homo sapiens
gacacctgaggctcttgtcacatgatcaggtggccatgccctatcagtgggaatacccgtatttgctgagcattttgccctctctcttgggccttctctcctttccccgcaacaacattagctacctggtgctctccatgatcagcatgggactcttttccatcgctccactcatttatggcagcatggagatgttccctgctgcacagcagctctaccgccatggcaaggcctaccgtttcctctttggtttttctgccgtttccatcatgtacctggtgttggtgttggcagtgcaagtgcatgcctggcagttgtactacagcaagaagctcctagactcttggttcaccagcacacaggagaagaagcataaatgaagcctctttggggtgaagcctggacatcccatcgaatgaaaggacactagtacagcggttccaaaatcccttctggtgattttagcagctgtgatgttggtacctggtgcagaccaggccaaagttctggaaagctccttttgccatctgctgaggtggcaaaactataatttattcctggttggctagaactgggtgaccaacagctatgaaacaaatttcagctgtttgaagttgaactttgaggtttttctttaagaatgagcttcgtccttgcctctactcggtcattctccccatttccatccattaccccttagccattgagactaaaggaaatagggaataaatcaaattacttcatctctaggtcacgggtcaggaaacatttgggcagctgctcccttggcaggctgtggtctcctctgcaaagcattttaattaaaaacctcaataaagatggccctgcccacactgtgccttgtgtttggggcttgatagagtgtgaaaggtgtgttgcttgaaaggtgtggccttagacactaggagatgatgggtagaagctccttgagaaacctagcagtggccatagagaagtagactgggtatggggaacctaagtcatagttgtaacctacagctgattggtaagaactatgggccagac

SEQ ID NO: 29844 - DNA, 1035 bp, Homo sapiens
gtgaggcctggtgataaggcctgatttggccgagaagcaggggggtgcatgctggggcccatgtcctggttgtgctccttccaaacccaggtctgctaagaacttgccgggggacttgcgctccactttgagcctcagtttacccttctgccaaatggggaaagggcattggtcagatggccttttgggtcttatgtccaagctgggttgaatcacagattcaggcatgggggaatgggaacagcacttatgacactatctcagcacctcctccccacctccctccaccctgcccctgcctcaggcagcaggaggccccggacctcttccagtggctgtgctcagattccctgaagctctgctgccccgcaggcaccttcgggccctcctgccttcgtgagtttttaagttgctcttggggatgggaggggaccaccgagtccagggatccagtcctggctctgtccctagttcgctgtgtgaactcaggctactcagataaacttctctggacctcagttcttgcctgcctgacagggctggggagatgggcaaatcagtggggaaaggcttggagaaagcacaggggctagactgagtcatatgcagtatagttatcatcatgtactaaagaaatgatagacttcccagccccttcatttcccatgccagatcggactatggtaccttcctggggaggggcgggtgctgacctggagcctccatgatcgccatccatcctcacacacagtcctggcacaagagctgaacttactaccagcctcttttagagcagtctttcctgaagctacagataaagagctagctacaaagatggcaaattcagtctttgtaaaagaaaatattggctgggcgcggtggctcacacctgtaatcccaacactttgggaggctgcggtgggtggatcatgaggtcaggagatcgagaccatcgtggctatcatggtgaaacaccgtctctactaaaaaatacaaaaaattagccgggcatggtggcgggcgcctctagtccca

SEQ ID NO: 29845 - DNA, 1038 bp, Homo sapiens
taatctcttaagtccgggccgcggtcggcgttcttctctggggctccgcgccccaagcctcggcttcctcatctgccctgagatgggatagtccccacaggtacctttctgcgtcgttaaaatgaggaaatgagaaaggcttttaccctcacccccttcccgatgaactagtccaggcagtcggcctcatctcacgtctgttgggcttctcgggaagccaaatggtatcgcacgtgttaaaggcgggtgtctggaagccgaaagtcctgactaactgagaatgttgactaatccggatagcattgagaagaggaaatggagctattcaacagattcattgatctatataagctgctataagttacatttactctttctgtgtagtacctcacagaattctgaaattttggatatgacattctacgacattgcatttagctattctcacaactctatttttcaaaatgtccaacgtttaaaattttttcttcctcagtctttcaggagattgtcatggttgagagactggactgtacctacccactatgaatgagcagaacaccatagctaatattaactttctgcaggtaatctctgagcttcgggagaagttggatcctgcagcattgtgttttgccatcactgttgcaggctttccaagtaaagttaaaaagtaaaggacaagcaaggtaaagagctcatggataattgccacccttttcctcacataggatgtcacagttctctgacatcccacagtcagagttggagcttaatacttacaactacaaataatggtactattatgatatttacatctagtattatatcgtttttcaaattacgtatatgtatgtggctatgtatgtgttcatatgttttcttagccattcagatcaatcccaggcagactacagtgcaagtttattagccatcttatacatgaggttgtcatttactccagggtacatggctactaagcaggaattcacatcttgtaagttcttttctggtaggtagaagagtaatttttttcct

SEQ ID NO: 29846 - DNA, 1048 bp, Homo sapiens
cacccaggctggagtgcaggcagtggcgcaatctcagctcactgcaagctccacctcctgggttcatgccattcttctacctcagcctcccgagtagctgggactacaggcgcctgccaccacgcccggctaattttttgtatttttagtagagatggggtttcacgttgttagccaggatggtctggatctcctgaccttatgatccacctcagcctcccaaagtcctgggattacaggtgtgagccaccgtgccgggcctttctctttttttttttttttttttttttttaagagactaagtcttgctctgtcaccgaaggtggagtgcggtgacagcatcatagttcattgcagtctcaaacacccgggttcaagcgatccccccacctcagtctttggagtagctgggactacaggcaagcaccaccaggcctggctaattctgttagttagttagttagttattttgagagagtttcgctcttttgcctaggctatagtgaagtgccacaatctcggttcactgcaacctctggcccctgggttgaagcaaatctcctgcctcagcctccctagtagctgggattataggtgcctgccaccatgcctggctaatttttgtatttttagcagagatgggatttcaccatattggccaggctagtctcaaactcctgactcaggtgatccacccacctgcctcagcctcccaaagtgctaggattacaggtgtgagccaccacgcctggccaattcttttatttatttatttatttatttattttttgagacggagtctcgctgtcgcccaggctgtagtgcagtggcacgatctcggctcactgcaagctccgcctcccgggttcacgccattctcctgcctcggcctcctgagtagttgggactataggcgcccaccacctcgcctggctaattttttgtatttttagtagagacggggtttcaccatgttagccaggatggtctcgatctcctgacctcgtgatctgcccgccttggcctcccaaagtgctgggattacagg

SEQ ID NO: 29847 - DNA, 1147 bp, Homo sapiens
gaaactgttcaactttagatcatcaggcactacttagattctcataaggaatgtgcagcctagatcctgcgcatgtgcagttcacaatggggtttgcgctcccgtgagaatctaatgcagccgctaatctgacaggaggcggatctcagtggtaatgaccacttgaccacccctcacctcctgctgtgcagcttggttcctagcagaccacagactccgtgatccaggagttggggacccctgatctacctttttcttttttttttaaattttgtaattaaaaagtcttttttagacagagtctcgctgtgtcacccaggctggagtgcagtggcacaatctcggctcattgcaacctgcacctcccgggttcgagtcgttgacctgcctcagcctcctgagtagctgggattgcaggcagttgccaccacgactggccaatttttttttgtattttttagtagaaatggggtttcaccgtgttggccaggctggtctcgaactcctaacctcaggtgatatgtgtacctcagcctcccaaagtactgggattacaggtgtgagcccccacgcccagcctggcttatcctttttgatgactataatatttcaaaaattaaaattactccatcataatttactgaaccctttccagattgatgggcatttatagtctttccaacttttcacaaagtaatttttctagtaatagtgaaaatacatactggagttggcaagtgattgaatcttttaataaatgtgaagatgttcaaagttacttctgtagtagtatcactttaatgtatattggaatgtattcctaagagataccagtggttaatagttgtggcactttatttctttaaaaaatatttctgggttttgtgaaaagtgtagatactaccaggggagtgtgtggaacaaatgagcatcatccattgtgtgttttaattagaggaaaagctgctgtttcattgtagcaaatgtactgattggttaactgtttttctattattgcatatttattgacctggtgatgcttttcatcatctatagcaccaatactcagacaaagaagtacattgaaagggtgctaagaaataagattcgatcaggctgcattcaagaacagctgctccagagtaca

SEQ ID NO: 29848 - DNA, 1371 bp, Homo sapiens
tccccaataaagcattatacccagcttactactaaatgtaagattttttaaaattatggtatcaataaggaagctatgtttattaactggttatttactctgggtccattaatgtctatatattgcattattgatagagcatgatcacttcttttaaaaaagtcagtttagttagcattgaaccttatagaccaacttcaaattataaccaaggtggaacatccctggggggtcgtgtgattgcatgaggaaaccgggatttagaagatctggcctccaatcccaaatcgagcagataggaatgtactattaggcttataacttaacttctttgagcttaacagtcaattaatatccaaatgtggactcccattgatcctgagagaaaactcagaatggtgaaggattattctgtgtaaaacaaagattaagatttcttaagttaaaatgagagttggggaagagaagtctgatctgacattccaaaaggataagcaactcttaggttgtgtactgtttcctacagcttcttttctctctctactcttccccactcaaggttcttaaggatatgtgttcatccattatgtcgctggctcagagtttgcttcactctctagactagagtagaatttcatttggcagtctcctatacaaataatgtgtttatgttttttgacacatactgccagcaggtatgttgaaatacttattttggcaaggagggaacagaggaaggaagaatcatctaatgcttattttttgttggttggaacttactgaagggaaagtagctctgaactgggtctcaggaaagctcaattttactcccagccttgatgaaatgaagagatttgactggtggatctaactctgtgttctgaactctaaaattctcttgtctgaaattaagatacagatttggtctatttcaaaacatgagacactttttttttttcaagacagagtttcgttcttgttgcccaggctggagtacagtggcgcaatctcggctcactgcaaccttcgcctcccggattcaagcagttttcctgtctcagcctcctgagtggctgggattacaggcgcgtgccactatgcccagctaattttttgtgtttttagtagagacagggtttcaccatgttggccatcctggtctcgaactcctgagctcaggtgattcacctgcctcgccctcccaaagtgctgcaattacaggcatgagccaccgtgcctggccgagacacattttaatagcatatatccagagagagaggactgtatttgtggaaaatgtttatgaaagcaagtaaagcacagtgtcttattttgtatttgtacatatattcttcctattagcaatgttaa

SEQ ID NO: 29849 - DNA, 1033 bp, Homo sapiens
ttgtagcatgcatcagaacttcattccctactacagctttagtaattccattctttgtttttgttgttttgttttgttttgttgagacggagtctcactctggcccccacgctggagcgcagtggcacgatatcagcttaccgcaacctctgcctcctgggttcaagcaattctcttgcctcagcctcctgagtagctgtgattacaggcgtgcaccaccacacccagctaatttttgtatttttagtcgagttggggtttcatcatgttggccaggctggtctcaaacggctgacctcaggtaatccaccctcctcggcctcccaaagtgctgggactacaggcgtgagccactgcgcccggcccccattctttgtttataccacattttttttatccattcatccattgatggacacttgagttgtttccaccttttggccatttgaataatgttgctatgagtattggtttacaaatatttgtttgagtccctgttttcggttctttagggtatataagagtggaattgctggatcatgtgatgaacatatgtttaccattttgaggaaccaccaccgctttccatagcagctgcataattttacattcctaccaccaatgcacgtggtctccaatttctccatattcttgctaacatttattttcctttcttaaaaaatgttttatggccgggcgcagtggctcacacctgtaatcccaggactttgggaggccgaggcgggcagatcacgaggtcaggagattgagaccatcctggctaacatggtgaaaccccgtctctactaaaaatacaaaaaattagctaggcgtggtggtgtgcgcctgtagtaccagctacttgggaggctgaggcaggagagtggtatgaacccgggaggcagagcttgcagtgagccgagattgcgccactgcactccagccggggcaacagagcgagactctgtctcaaataataataataataataataataataataataataataattttgcttttaatgaattaa

SEQ ID NO: 29850 - DNA, 1034 bp, Homo sapiens
gtctcactctgtcacacaagttggagtgcagtggtatgatcctggctcactgcaacctccacttccgaggctcaagcgatcctctcatgtcagccttctgagtagctgggaccacaggtgcgcaccatggtgccccgctaattttttgcaattttggtagacataaggtttcgtcatgttacccagactggtctcgaacttttgagcttaggagatctaaccacctctgcctctgaaagtgctggtgttacaggcacgagccactgtgctcagccctttgcccgtttttaaattgggtttttgtcattgttgaggtataggagttatttatatattctggatattgatcccttatcagacatatgatttgcaaacatgttctcccattctatgggttttcactcccttgatagtgtcctttgatgtacaaaagtatttagtttcgataaagtcaaatttatctttttttttttttttggagatggagtctagctctgtcaccaggctggagtgcagtggtacgatctcgactctctgcaatctctaccttgcgggttcagacaattctcctgcctcagcctcccgtgtagctgggactatgggcctgtgccacaacgcccaactaatttttgtatttttagtagagacaggttttcacatgttggccaggatggtcttgatctcttgacctcgtgatctgcctacctcagcctcccaaagtgctgtgattacaggcatgagccaccacatctggccttattttttatgttattttattatttttttgatctgtgattttcttaattattttgagtcgtatgatcacacatagttttaaagtgtgtattctaatcattttaagttggcaaaagcaccattcccaatcacaaatacgcagcagttttatgttttcgaatggttctttaaagacaatcctgaatcataacttagtttgagttagagtgtaaagaattcaagagtgaagtttaacttgttactattttaaaagcatgtgaccttatagatcatgtata

SEQ ID NO: 29851 - DNA, 1069 bp, Homo sapiens
ttctccaaatactccaccagtgtatcctctccccaggtgatgcctttgttcttattggtgtctgtgtaagagaatccaacagcctgacctgtcttccgcccgaagagaccttggagattaggcctagtcttgtgcttgcctcccttttccacggtgtggcactgggcacacttctgaacaaaaatcttgcttttctcaacatcacttgtatttaattctctttttagtccctggggccacgaaggttgccactccaaagccggacaacccactctttactttttttgttgttgttgcttgtccttttggttgttatgcttaagataccattgccgaatccaaggtcatgaaggttttctcttattttcttaaatttaggtctttgatccactttgagttaatgtttgtgtatagtgtattttaaggatttagcttcattcttttgcatatggatatccagtttttccagttccatttgttgaaaagatggtcctttcaccactgaaattattttggcacccttgtcaaaaatcaatttgtcggccgggcatggtggctcacgcctgtattcccagcactttggggggccgaggtgggcggatcacgaggtcaggagatcgagaccatcctggctaacacagtgaaaccctgtctctgctaaaaatacaaaaaaaaaaaaaaaaaaaaaaattagccgggtgtggtggtgggcgcctgtagtcccagctactcaggagtctgaggcaggagaatggcgtgaacctgggaggtggagcttgcagtgagccgagattgtgccactgcactccagcctggatgacagagcaagactccgtctcaaaaaaaaaaacaatttgtcacatatatgaaggcttatctttgaactctgtattcagtttcattggtctatgtgtctgtccttctgccagtaccacactgttttgactactgtagctttgtattagtattgaaatcagggctgggtgctgtggctaacgcctgtaattccagcactatgagagaccgaggcgggcagatcacgagttcaggagactgagaccatcctggc

SEQ ID NO: 29852 - DNA, 1028 bp, Homo sapiens
gacacccacgcaaccaatacaccaccatggcctcatgagggaggagaaggcctagaccatgttcaggcagattctgtcggccatgcagtagtgccatagcaaattgcgcagagacctgaacccagaaaacatcatccttgatgaggacggtaacgttaagatcgcagacttcggctttggtaccacattccatgatgggcagaagctgacagccctttgtagcacttaacccctacatggccctggaacgtttcctaggccagggctaccaatgtgccaccatggatattcagagcctcagagtaattttataccacatggtggctggggttctgcccttctgctcatgcagcattagggtcctctcagcaaaaatttaaagtggaagctatttttccccagtctacttttcctgaggtcttaaaagcctcattaaaaaactattaacagtagaccccagggagcagaccacactagaagaagttatgagggacccgtgggtgaacagtggtcaggagttgcctctgacaacatgaagaacaaatcctggaccacctgaatcccaaaacaacccagcttttggtggccatgggattccaggctgagaacctatctgtggcaatcaaagaaaaattattcagttatcccatggccacctaccttgttttggaacaaacaaaacagaagaagcggtccactatcagaccacagacccttcctcctggggatcccacttgtcctctctacattgaagtttccaccttccctctttcactgaagcgggctcatagcattcagcagaagactgtgggtgccaagtctgggcagggcctttgcccttgggagtcctgttttagacccagctccaccacgtggccctggcctcttctctgccctgtctgtgcttgcagccatggtgcccagtctggccccaccaggagacaccagaacgactgtccatgtgtctactccttggcaccttccccgcatggtgggtagatgggcagggaggggtgggaatctgtgta

SEQ ID NO: 29853 - DNA, 1066 bp, Homo sapiens
aggttagttacctatgtatacatgtgacatgctggtgcgctgcacccactaactcgtcatctagcactaggtatatctcccaatgctatccctcccccctccccccacccctgcaattttgttttttaaagagcctgggctcttgctattgtgccccgggctggccttgaactcctggtctcaagggatgctcccaccacagcctgctgagtagctgggactgcaggcacgtgtcactgtgctcagctttttttttttttcccccctttggtagaaaaactattatttgtaatcttatgttatggagaatagtttgacaacagattcatctcttcctttagccctctccaaccttccagctagaaccccaccccaaagaacacaggcaaagatacatcagcatcaataatttattgcaaactccctaatatcacatgctagtatgcttgcgaattcactcacgaatgttctgggatgggggccagaaggtagagagcaccatgaaagtacagcctgtgaggccggactgctgaggggcagacttcatgccaatggagggacagacttcaggaccagtctggatgggctaagctaccttgggcaggaaggagctgggccaggccaggagcctgaggttctcctttggccaacccatcccaggtttccagcccctcctcctcactcagggtcctgtgtggtgagggaggtgtcgggaggttagcggctctacagctgccaggcttgtggccactaccagttgagcgtggggcccctagtctagtccttcactggggaaagctagggcttgggctttcactgcagtatcttcagacaggtcgggatgagggatgaggccttgcccttggggggatgcccgtcctctgtggcatcgaggagctgctgcaggtaacaggaggtgaagcagcacgtggcccgtggcttgcatgctgaaaagggcccagtggagagcttccctgggtggaatgagagggcacgcaagtcaaaaccacgaagtaggttgggcgtagtggctcatgcctgtaatcctaacactttgggaggccgt

SEQ ID NO: 29854 - DNA, 1209 bp, Homo sapiens
tagccagttgagaatttaggctctaaatgtaagataatagctctgtttcacatttattgcccgtctatttttgatgaagctgtggtattaacaactaaaagattctaatttggggaaaaatctaaaattttgtttttccctaaattataagtgggaagatggagtaagagaagtgatttttttctaattttatctaacagttcagtacaaagttgaggtagtgacatgaaaacctattaagtttctgtgcttttaatttttaggttcgccagttggtgatggataagttgtcgtctattagattggaggatttacctgtgataataaagttcattcttcattccgtaacagccatggatacacttgaggtatgctcttatatcccatcacacctagataaagcaacttaagtgccaattgctcttctctgtccccagactaactgagaatactgactaatccggatagcattcagaggagagaatggagctattcaacagattcattgatctatataagctgctataagttacatttactcttcctgtgtagtacctcacagaattctgaaattttgggtatgatgttctatgacattgcattggctattctcataactctatttttcaaaatgtccaacatttaaatttttttcttcctcagtctttcaggagattgtcatggtagagagactggactgtgcctacccactatgaatgagcagaaaaccatagctaatatttactttctgcaggtaatttctgagcttcgggagaagttggatctgcagcattgtgttttgccatcacggttacaggcttcccaagtaaagttgaaaagtaaaggacgagcaaggtaaagagctcatcctcacacaggatgtcacaattttctgacatcccactgtcagagttagagcttaatactactacaaataatgatactattatgacatttacatctagtattatattgtttttcaaattacatatatgtatgtgagtatgtatgtgtttatatattttcttagccattcagatcaatcccagacagacgacagtgcaagtttattagccatcttatacatgaggttgtcatttgctccagggtacatggcaggaactccgatcttgtaagttcttttctggtacgtagaagagtaatttttttcctctctgctacttgtagttcctcaggaaatcaagaaag

SEQ ID NO: 29855 - DNA, 1051 bp, Homo sapiens
agctgggactacaggcacctgccaccacgcccggctaattttttgtatttttagtggaaatggggcttcatcatgttagccaggatggtctcaatctcctgacctcatgatctgcccgcctcggcctcccaaagtgctgggattataggcgtgagccaccatgcctagcatggcttattcttcctgatgactgtgtaatattccaaaaattaaaattactccatcataatttattgaacctttcctgtattgatgtattgatgggcatttatagtctttccaacttttcacaaagtaattttccttttttttttttttttttgagacaaagtcttgctctgtcacctaggctcgagtgcagtggctcgatctcggctcactgcaacctctgtcacccgggttcaagcgattctcctgtctcagcttcccaagtaggtgggattacaggtgtgtgctactttgcccggctaatttgtgtatttttagtagagacagggtttcagcatcttggccaggctggtcttgaactcctgacgtcgtaatccacccatctcggcctcccaaagtgctgggattacaggcgtgagccaccgtgcctggcctagtaattttcctagtaatactgaaaatacatactgtagttggcaacaaatacacgctggagttggcaagtgattgaatctttcttttaataaatgtcaagatgttcagagttacttctgtagtaatatcactttcatgcatattgctctgtattctttttttttttttttgagaatggaatctcgctctctcacccaggctggagtgcagtggcgcgatctcggctcactgtaagctctgcctcccgggttcacgccattctcctgcctcagcctccccagcagctgggactataggtgcatgctgccacacccggctaattttttgtatttttagtagagacggggtttcaccgtgttagtcaggatggtctcgatctcctgaccttgtgatctgcccgccttggcctcccaaagtgctgggattacagatgtgagccactgtgcct

SEQ ID NO: 29856 - DNA, 1030 bp, Homo sapiens
agctggagaattcttcaaagaggcaatgtgagtgattgctgaaggatgggaatgactgacaagagaaagtatgggaagtgcgttctaggcagagaagagtttgagcagaagcaaactggtgcccaagtcaatggtgtgactgaggaatgagaagcaaacaagcatgactggagaataggatatatatggagaggaatgattggaggcaaggctggtaagacataggacaggcccatgttgcaaagagtctcaaataacatgctaaagagtttcaactttattttttagacaataaggagctattactagtttttacatacagttgacctaatctactcagcattgagagataactcagtaggctatatgatgggtggattggagactgctgaaatggtctaagggagtgagagtaagggccagattttggtcacgggaatgtagaagaaattatggcttaagagacaatttggtgttagaattaacatgacttggtgactgttaagaatatgtggcggtccgggtgcggtggctcatgcttgtaatcccagcactttgggaggccaaggcgggcaaatcacgaggtcaggagatcaagaccatcctgcctaacacggtgaaaccccgtctctactaaaaatacaaaaattagccgggcatcgtggcggtcgcctgtagtcccagctactcaagaggctgaggcaggagaatggcgtgaacccaggaggcggagcttgcagtgagccaagataacaccactgcactccagtctgggcgacagagcaagactctgtctcaaaaaaaaaaaaaaaaaaaaaggcttagaagagcacagacattttgagaaggttaaagtttaagtggcagatgaaagcaaatgtccatagaaggaaaatgagaaacctggaagattaataatgtgagcttaaaggatgtcaggtagcaaaagcccaggaatgagtttcaagagtgagggattggccgggcacagtgactcatgcttgtaataccagcactttgggaggccgag

SEQ ID NO: 29857 - DNA, 1049 bp, Homo sapiens
ggatgatatggcaaggaatagggtaaagacataacttttggtagaatattgttttcactgaaaaaaaagggaaaggtggaggtaaagaataccgagaactgggaggtgcattagaatgactaagcagtagatgattaaagcccaggattgtggttcagagtgaagaggataaagaaaactttatgtttcctgatagttagttcctagtctctgataataagagatttagaaagttgtaagaattttcccagtttatatccagtctatcaaacctttgggctctgagcatagcttttagaacttgagctttgagcttttaagggagctaaaaagttttagatacctggctatctatgtgtgtctcttttacagggattttaattttttgaattttaagggaaaaatgttagctgctagcctcattgttggcatcattttttccacagggcattttagattatctggataacatatcccctcagcaaatacgaaaactcttctatgttctcagcacactggcatttagcaaacagaatgaagccagcagccacatccaggtaagaggcaatatgttgggaaagatttttttttttttgagacagagtctagctctgtctcctagactggagtgcagttggcacgatctcagctcattgcaacctctgcctcctgggttcaagcgattctcctgcctcagcctcccaagtggctgggactacaggcacgtgccaccatacccagctaatttttgtattctccatcaaaaagtgggcgaaggacatgaacagacacttctcaaaagaagacatttatgcagccaaaaaacacatgaaaaagtgctcatcatcactggccatcagagaaatgcaaatcaaaaccacaatgagataccatctcacaccagttagaatggcaatcattaaaaagtcaggaaacaacaggtgctggagaggatgtggagaaataggaacacttttacactgttggtgggactgtaaactagttcaaccattgtggaagtcagtgtggcgattcctcagggatctaga

SEQ ID NO: 29858 - DNA, 1124 bp, Homo sapiens
agtgtagtggcacaatcttggctcactgcaacctccacctccgggattcaagtaatcctcctatctcagcctcctgagtagctaggaccacaggcatgtgccaccgcactcagctaatttttgtattttttgtaaagaagagtttcagcatgttgcccaggcttctacatttttttgtttgtttgtttttcaattataatagggaggcagggcacagtggctcacgcctttaaccccaacactttgggagtccaagatgggtggattgcttgagctcaggagtttgagaccagcctggttaatgtggttaaaccccatctctataaaaaatacaaaaactagccatgtttgttggcatgtgcctgtggtctcagatactcaggaggctgaggtgagaggatcacttgagcccaggaattcaaggctgcagtgagctgtgatcgtgccactgcactccagcctgggtgacagagcagaaccttgcctcaaaaaaaaaattataagaaggagtctattgccctacatttgtcaacctaaatgatttctacttttatgtgacctttatctgattagttatgatagggctatatgtctcaatcaaacactgttcctactctacaaaagccaatctctcagtcattggaagatggagcaagatttttatccctctgtcagaatacagtcttaggttaacaactcatttctcccatctgctcctacctggtgacacaggtttgacttgactccattgcgaacccttagtttctgagacgctatccagcagtttcttcactcataactctgcatttattatagaacaaaggaagccggaatattggattctcacatctccaacagagatctgcccaagaaattgttcattgtgtttttcaactgctgaccccaatgtgtaaccacctggagaacattcacaactattttcaggtcagaagcctagacttagaagctgctaagcaaatatgaggtttcatttttggctgagaaaaaggaaaatgaggacaattactgaagcaactgtcctaaaatcatttttatttttagtgtttagctgctgagaatcacggtgtagttgatggaccaggagtgaaagttcaggagtacca

SEQ ID NO: 29859 - DNA, 1053 bp, Homo sapiens
gttatcctcagatagagctcccctctactctatgctctcactcctaagctgagcaagttccctgtccatcgactgtatctgtggtaggtaagtctgcctaattctggggcttagttaacaggcctatttgatttttgtattaagttacattctccaaataaaccttttggacccttcccaatttgttttttatatatataaataagaaaataaaacccttgggctggatgagactattctgcctcaggggcctttcagtgagatacctcagctagaggtaacagtgtgtctctcttcttcagtatgggcgtctctttgtggaagcatttctgaagcaatgtatgccgctcctagacttcagttttagaaaacaccgggtaagagctaagagcagagaacaaagatatgcactgaagagttgctcagaagatatgtccttggtgactcctgggtggggctgggagtgttctacctgggctcctctggtccacttcagctgtagccagagatccccaaattggactgaatattccaaagtaggctgaactcctcaggcccactctggatcaaacccacctttctatttcttctccagatctgacagtggtcttccttttagcttgattttattgtgctactgcactctcaggtcctcatgtatcagtgtgtcatttgcttattcctttatgcttctgtaggtatactctcagaaatgattttaaaaaaaaaaaagctcatttgtgtcataaaaccctttgctgtggtaatgaacagtcttgacagttttttagccaatggcatccagggctagagtgatgaattaaggatagaatcacattatttcctatacatatttagcaagttgaacaaaatactcaccatatttggttggtccctcacagccctgaaagagaaagggaaggtggtattttatcctaatgttgcagatgggaaaactgagacatggtaacctatgtaaaactaaaatgcaggtcttataactctcagattgatacaagggacagaaatgggagagttgagaataagaggtag

SEQ ID NO: 29860 - DNA, 1057 bp, Homo sapiens
tttttgagatggagtctcactcttgtcacccaggctggagtgcagtggcgccatctcggctcactgcaacctctgcctcctgggttcacgtaatcctcctgagtagctgggattacaggcgcctgccaccacgctggccaatttttgtacttttagtagagacagtgtttcgtcatgttggccaggctggtttcaaactcctgacctcaggtgatccgcccacctcagcctcccaaaatggtgggattacaggtgtgtgggccaccgtgcctggctgattcagcattttttatcaggcaggaccaggtggcacttccacctccagcctctggtcctaccaatggattcatggagtagcctggactgtttcatagttttctaaatgtacaaattcttataggctagacttagattcattaactcaaattcaatgcttctatcagactcagttttttgtaactaatagatttttttttccacttttgttctactccttccctaatagctttttaaaaaaatctccccagtagagaaacatttggaaaagacagaaaactaaaaaggaagaaaaaagatccctattagatacacttcttaaatacaatcacattaacattttgagctatttccttccagcctttttagggcagattttggttggtttttacatagttgagattgtactgttcatacagttttataccctttttcatttaactttataacttaaatattgctctatgttagtataagcttttcacaaacattagtatagtctcccttttataattaatgtttgtgggtatttcttggcatgcatctttaattccttatcctagcctttgggcacaattcctgtgctcaaaaatgagagtgacggctggcatggtggctcccgcctgtaatcccagtactttggaaagccaaggtaagaggattgcttgagcccagaacttcaagatgagcctgggctcatagtgagaacccatctatacaaaaaatttttaaaaattagcatggcggcacacatctgtaatcctagctacttggcaggctg

SEQ ID NO: 29861 - DNA, 1315 bp, Homo sapiens
aaaaattcaaatcagagtgaagtgaatgagacactccagttttccttctactccgaatttcaactgattttagctcctcctttcaacattcaacaaatagtctttttttttttttttttttttttttttttgagatggagtctcactctgttgcccaggctggagtgcagtggtgcgatctctgctcactacaagctctgcctcccgagttcaagtgattctcctggctcaccctcctgagtagctgggattacaggcgcctgccaccatgcctggctaattttgtgtttttagtggagacggggtttcaccatgttgtccaggatggtcttgatctcctgaccttgtgatccacccacctcagcctcccaaagtgctgggattacaggtgtgagccaccgcgtccagccagctttattattttttttaagctgtctttgtgtcaaaatgatagttcatgctcctcttgttaaaacctgcaggccgagcacagtggctcatgcctgtaatcccagcattttgggagaccaaggcggatggatcacctgaggtcaggagctgaagaccagcctggctaacatggtgaaacctcatctccacttaaaatacaaaaattgccggccgcggcggctcatgcctgtaatcccagcactttgggaggcctaggcgggtggatcacgaggtcaggaaatcgagaccatcctggctaacacgggtgaaaccccgtctctattaaaaaatagaaaaaattaggcgggcgtggtggtgagcgcctgtagtcccagctactcgagagcctgaggcaggagaatggcatgaacctggaaggcggagcttgcagtgagctgagatggtgccactgcactctaacctgggcgacagagtgagacaccgtctcaaaaaaaaaaacaaaaaacaaaaattatccaggtgtggcggtgggcgcctgtgaggcaggcgaatctcttgaacccgggaggcggaggttgcagtgagccaagatcacaccattgcactccagcctgggcaacaagagtgaaattccatctcaaaaagaaaccaaaaaaacaaaaaaaaaacatgccgtttgagtactgtgtttttggtgttgtccaaggaaaattaaaaacctgtagcatgaataatgtttgtttttcatttcgaatcttgtgaatgtattaaatatatcgctcttaagagacggtgaagttcctatttcaagtttttttttttttttttttttttaaagctgttttttaatacattaaatggtgctgagtaaaggaaataggcagggtgtgttgtgtggtgtttt

SEQ ID NO: 29862 - DNA, 1956 bp, Homo sapiens
atctcggctcactgcaagctccgcctcccgggttcacgccattctccttcctcagcctccccagcagctgggactacaggtgcacgccaccatgtccggctaatttttttgtatttttagtagagatggggtttcaccatgttagccaggatggtctcgatctcttgacctcgtgatccgcctgcataggcctcccaaagtgctgggattacaggcgtgaaccaccgcgcctggcctgcctggctaattttttgtgttttgtaaagacaagagtctccctatgttgaccaggctggtctcaatctcctggggtcaggcagtcctcccaccttggcctcccaaagtgctgggatcacaggcatgagctactgtgcctggccttgctctgtaaactttgagggttacacagttgactttgttcccttctcccaccagcctttaacacatctttctctgtgccaggtcacagaatattctgaggggaaggtgttagactggtcattttagaatcggtagagatccctgctggctgacctcacatcgttcccttcttacctccaggacagttggagatgtttcatgttagctgatgatcttcatttactcttcacagaggagactaactgtgtgacgagcaccttcatgtagtaaagattatttttactatgacatctaaatgtctacattcaatttagagttgaaagaatggaagggaaaatttgagcatgtatgataaggcttggtcaactatgattctcgatgtttgatctatagactatcacataatcccaaaagtgtcgtgaagtaggtggtattatctccacatatccattagtaaataccttcatatcaattaacaaatatttaagcacctactctgtgtaggcactgggcagatgagattcagaaaggttaaataagctgaccaaggccatgcagctggtaaatggccgagctgtggggtaatatcagattagtccaacttcaaagccagtgttctctgcactgctgcctctgggagcacctgctctgttctagcctggcatcagatgtaggggtggcaagacgaaggtgccagggtccctcccttgcggagctctctgcagggtgagttagcccaggcacagtaaagcactgggtattgaggctcttgagtgatagagcttttgcacatcccctttcctgcatctccacttggcacatgtctagtgcacacgtggaacaccaggcttggggctgttgttgccaaggacaatcgggccatgcttcacagactgagaagtcactcaccacggggcagtgagtggagagctgtaacagggatgggtttggagtacccaagggtcaggggaatgagcgactgaccatcaggaaggtcctcacagaagaggtgacatctgagtcttactgatggacaaggagggggacaggacatttcgggcatagggagcaatacatgcccaaaatgtcaggaaatgctgcttgtctggagtgcttggggcactgctggccctcccttctctcatccgtgctctcctgcgttccctggacacttgcgtgtttggaggaaggcaggagatgaggctagacaggaaggctggggccagtctgtgaagggttcctgatgagctcaggggtagggattattctgtaggcaaatgtggagccctggaagggttctaaactaaggctgaagtggtggggtttgcattttagagctcctctggcacgctgcagagaaagggtaggagggagaagacagggagctggtgaggagctgttgaaatccttcaggctactggtgatagggctggagcaacatctccacttatctttccttctttcctttggagatgcacagttcaccaagcagtgcttccaggaagaacgaactctcccctttatgaagtcaggtggtttgtctcttaccttctgcccatggtctacctacttctt

SEQ ID NO: 29863 - DNA, 1050 bp, Homo sapiens
tcttggttcactgcaacccctgcctcccaggttcaagcgattctcccgcctcagacccctgaattgctgggactataggcgcatgccaccatgcctgtctaatttttgtatttttagaagggacggggtttcattttggccaggctggtctcgaactcctgacctcaggtgatctatccgcctcggcctcccaaagtgctgggattacaggcgtgagccaccgcgcctggctcaagtttatcttctaacgtttatgttgattttttttttttggtcttttttttttttttcctgtgcgtggtttttttttttttttattgctgccaatttttttttcttttttgtctttttgagacagagtctcactctgtggcccaggctgaaatacagtggtgtgatctcagctcactgccacctctgcctcctgggttcaagcaattctcctgtttcagcctcctgagcagctgggattacaggcatggaccaccatgcctggctaatttttgtatgtttagcagagacaggatttcaccatgctggtcaggctggtcttgaactcctgacctcaggtgatccacctgcctcggcctcccaaagtgctaggattacaggcatgagctaccacgcccggccagaactttaaaaattaaaaattttagctgggcgtggggctcatgcctgtaatcccagcactttgggaggctgaggcaggtggatcatgaagtcaggagatcgagaccatcctggctaacacggtgaaaccccgtctctactaaaaatccaaaaaaattagccaggtatggtggcgtgcacctgtagtcccaggtgctggggaggctgaggcaggataatggcgtgaacctgagaggtggagcttgcagtgagctgagattgcaccactgcactccagcctgggcaacagagcaagactccgtctcaaaaaaaaaaaaaaaaaaaaaaaagtttttgtcatccaggttggagtgcagtggcatggtcatagctcattgcacctttatttttctgtggtccccttggtttaacttttcc

SEQ ID NO: 29864 - DNA, 1030 bp, Homo sapiens
gtctcgatctcctgacctcgtgatccacctgcctcggcctcccaaagtgctaggattacaggcgtgagccaccgcgcccggccagctggagactttcttgagtatctatgtggctctctgtaaaattaaactgcatataagaattcttaaagttcggccgggcatggtggctcacttctgtaatcccagcactttgggaggccagggcggacagatcacttgaggttaggagttcgagaccaagctggccaacatggtgaaaccctatttctactaaaaatacaaaaactagctgggtggggtggcacgcgcctgtagtcccagctattcgggaggcttaagctgaagaatcacttgaacccgggaggtggaggttgcagtgagccaagatcgcagcactgtaccccagcctgggtgacagagcgagactctgtctttcccctccccccgcctccccccagaaaagaattcttaaagttctacagccttagagtgttaagtaattttactgtctgggaactcagatgcactgcttctttctgacctatgtaggtactttcttttcttttttttttgttttttttttgtttccagctcaaggctgtaggaggaagaaaaatctagtccctgggggtactgatgaatcagttggatggtgggcgttggactgtgaattcctgatgcctctgggtaaactctggaggaaattctgtttcattacttgcactcagccctcctattttgtactaaggtattcttgaatacaagtgcaccggccaaaaaagtaaacttacgcataaaaagaaaggctctcttccttccaagaatgctgaacacctttgaagtctctgttgctgcctcatcttttagatacaatcattgattatgtatttttggcatcgtcctgaactttgtttcatttccttcacagttgaatgtgcagttggctttgtccactcagtgatggtccttgtgactgttcttggcttttctgttgtttttccatctttctataggaagcttgagaccg

SEQ ID NO: 29865 - DNA, 1033 bp, Homo sapiens
tggtggggtggggtggttaggataacgcagcaggaattataagcaatatgactttatttagttcctttggaaacaaaaccccccaaataatgcctgaacccaaaggtacataaaaatgacccaaaatagatttgaacatcacttgtagtttcttcctcgtaacatgagtgctttcagctggacagtagattacaaagcatctccgatcacgttaaggcagatgatcaatctgtggctgcatctgtaactcctcctgggaaaataatcctgttggagttgggggctcttcccagttgtctggttagttggcccaggaaggggcagtcctggagctggcgggtggggagccaggccccacctgtcttgtcactgctcgttctgctggccctctgtcactgatgctgatacggagccctggcccttgttgacatcactgatgcacacccactgcccatcaactgactccttccacagggtcacctgcgagtcagtgcacaagcagattatcacgggtctgtgcccttccctctgctgtcccctaaatatgagcctcatcctcatcaagaaccactgcccagaggcttgtgggtgaacagagcatgtccctcctccactgaaatctcaccaaaatgagagtccaggaataaaaactcacagaaaaaaaggagtaacaataacagcagctgtggatgatgatgtcaacacaggatactgttttcagcaaactgtgacagagctacagcgagaggatatggggtggcggggagcagggttcgcaaagtgtggtccccagaccagagcagagcatcggtcacctgggagcttgctacaactgcagattcttggggcctggaacaactgattaggaagctctgggggtggggctggcaatctgttttaacaggtttaacaacactgcagtttgaaaactactgtggtagaggaaggtaacagttcaatatgttgtttctacactgaagtaaactgtataagaaatagctaagagctgaaaaggtttgcccctggagagaaa

SEQ ID NO: 29866 - DNA, 1016 bp, Homo sapiens
ttatcctgtatgtagaatctagaaaagtcaaactcacagaagcagagagtagaatggtggttcccagggactgggtgggcagggttggagagattgggtcaaaggatataagatgtcagtgccacaggtggaatgagttcacgtctatcgtacagcatggtgacataggcaataacatgcaatacaatcaatcatgtgtacttgaaaatcgctaagagaataattttaagtgttcttgccacaaaaaaaccaaggcaatgcatatgttatttagcctgatttagccattccatagtgtttatggatttcaaaacatcatgtctaaaccacaaatatatagaatttttgtcaattaaaagttaaaaaataaaataatttggagcatattttttaaaaagtgagggctttgggatcatacagatctgggattgagtctttcaggtatcagctgagtgatcccccagggccttgtcttcttcctctgtgaagtggagatgataatagtaccagcctatggtgttgttgtgagaactcagggagatgaacagcctggaagtgcccagtaaagagagggaggcccatgaggattccaagggctgggtttctgctgctgagataatgcaagagaatccactcaccttttttaaaacttaatttttttaatttgagagagtgcattttattgattaaaaaagagagttggtaatgctactttttgtagaaatacgaagacaacatgaagttaggactaatgagtcttgggaacttggtactttttttttctaatcttattttatttaagttacaggatatatgtgcaggacatatgcaccatggaatactatgcaaccataagaaggactgagatcatgtcctttgcagggacatggatggagctggaagccattatcctcagcaaactaacacagggacagaaaaccaaacacctcatgttcttgcttataagtgggaactgagcaatgagaacacatggacacagggaggaaaacaacaca

SEQ ID NO: 29867 - DNA, 1067 bp, Homo sapiens
atgactttttgactttacgatggtgagaaagcgatacacattcagtggaaattatactttgtggacccatacagccattcggtttttcactttcagtacagtattcaataaattacctgagatattcaacactttattatggaacaggctttgtgttaagatgattttgcccaactctaggctaatgtaagtgttctgggcacgtttaagggaggctagactaagctatgtctggcaggttagacgtattaaatagagttttgatttatgatatttttttcaatttatgatgagtttatcaggacatggtaagttgaggagcatctgtatagtataagaacaaaaggcgcaaacagtgaatggctctaattagggaggtgaaagatgatacagaactagcgaaggacacaggggttgtcagaggaaaaccagaaaagtgttagagaaaccaaagaaggcaatgctttctggagggaaagagaaactaacagtgtcagaagcacagaggtcaatgcgagggccactgtgtttgttgattaagtcattgtggtccttaagaattcagtttgagaaagagggtggagctgaaaccaagatgagggcctttaagattattgagaattgaaaaaggctacagtgttttttctgctttattgtacctcagcagtatcaagatggggaattttaggaaggtgaagaagtcttataggtctttctggcttttgaaagtggcaatggtcaactattaggatatttaaaataaagtgtccctagaattttttttaatctcagaaaatcaatactttttttccctttatctcaatccagttgcaaaatttgaaagcacgatgtacatccacaatgattttagtatttgtatctttaaaaatgtatgtgttggtgtttcttgttccctttggagctttcttgctccatcgtaaactgcttgtggttacctgtcaaaagaaataaaatcctaataatctctctcttgttttggcaaactaacttattttggagccagtaagatatgacgaggaaactactggaaatgtacaagcattaaa

SEQ ID NO: 29868 - DNA, 1064 bp, Homo sapiens
ctctaggtttttctagctctactacagctcagaataattttgataccttactctttttttttgtttgtttgtttgagatggagtctcgcactgttgcctgggctggagcgcagtggcgcaatcttggcttactgcaacctctgccttcctggttcaagcgattctcctggtcagcctcccgagtagctgggactataggtgcccgccaccatgcctggctaattttttgtatttttagtagagacagagacgaggtttcactatgttggccaggttggtcttgaatgcgtgacctgcttcggcctcccaaactgctgggattataggtgtgagccactgtgcccagccaataccttactctctattagtgctaaagttatttccgttttccctcctgatgtattttaccctctatgttttaatttttattcccagaactaccctgtagttcaggcccctcatatcacactcctggacacttagaatcttgtttccatgttgtgcaacactactgtagaagaatctcccttgaactacccacatttagtgtatcattcattgaccaagagcataatggtgtcttccttctggctccaagctgcctttcctgccttatcttccattattttcctcataaagcattgctccagctaatcttatctatttttctccagaatctccatccccttcccgtcagatacatctaaaactttttttgtatctttgtttttcctcgtgttgtatcatcttcctaaaacatgttctacttgtgaaaaccctaagaaattctctctgtcttattgaaattctatctccactgtgaagcattatcatggtgtggccatatatgatctatccctatctgaagtcactgcatttattccctgatcctcatttgcaggtccagtaccttgtacaagtttctttttgtgccatattagactgtaagctccaagagggcagggcccaagtcttatgaatttgtgtctgcatagtgtctagtacttgtctgaggccctcaataaaattcttttgagtgaatgaaagagtaccgtaaatgtctt

SEQ ID NO: 29869 - DNA, 1001 bp, Homo sapiens
tgctgcttggtgcacagaaagccaatcactgagacaagtgtggccaagaaacaaggctttaaatctggtgctgcagccaaggagataggagctcagtctcaaatccatctccctgactgactaaaactagggctttatatagcagggaggaaacataacaatatgtaagaaaataaaaactagagaggggtaaggaagcatctggtgctgtgatctgatgagttccagttatttgattctttttttttttttttttagtaggcctgaaggtcctttcctgagggaaggaactcagataaaacaaatatgagtttcaagctttaacagcagaagggtcaatttccatgtttatccaaaaacaactatctgtgggactcttgggttggtttcacttttttttgttggatgatcttggcactcttgtcaaaaattgagactgtatctgtgaggattgtttctgcgctctctattctgtttcgttggtctatgaatatgtcttgtctttatgcggtactatgctgaactttgtagctttgtactatagtaaatttgattactgtagctttgtagtaagtttggaaatcaggaagtgtgagtcctccagctttgctcctcttcttcaagattgttttggcaattaagtgtctcttaagattacatatgaattttaggatggctttttttttatttctgcaaaaaacaccgttggatttgtatagagatcacaatgaatctgtagatttccttgggtaggatcttaacaatactaattcttccaattcatgaatatggggtgtgtttccatttatttatgatggggtgtatttccatttatttatgatgtctttaatttcagcattgttttataatttttattgtataagtctttcacctgaagttaattcctaagtattatattctttttgatgctattgtaaataaacttatagtttctttttttagattgttcattattagtgcatagaaacgtaactggtttt

SEQ ID NO: 29870 - DNA, 1026 bp, Homo sapiens
ctgtctacttccccatgagatccacctggcactcctactagtcttaaaccattatctcccttgaaaaatgagttctggctcactccttactactaaggctgaggggcaaaggagattatataaatgaaagcaccatgcatgtttgaggtggtttccttttcttcgttgttgttttttgagacagggtctcaccttgtcacccaggctggagtgcagtggcacaatcttggctcactgcagcctcaaccttccaagctcaagtgatcctcccaacctcatcctcctgagtagctggggccacaggcatgtgtcactatgtctggctaattttttgtatcttagtagagacagggttttgccatgttgcccaggctggtcttgaactcctgggctcaaatgatccacctgcctcagcctcccaaagtgttgggattacaggcctgagtgggattacaggtctgagtcactgcacctggccgaggaggtttgtattattacttgtgaatggaggaataacttgagctttagaaaagttaaagtgacaaagatcaagaaaatttccccccctgcttttttctcttatattttaatatttccaaatgagctataacatatgcagaaaaaagcttaaaacattttatatagagaacaagtatgaattaaacacccaggtcaaaaaatactctcgttgcccttcacccatctcatattttactttctgaccacaggcctagaagtaactagtaactagaaacagtaaacttttcctgtacaacttcagtctggtatatgggtcttaaacaatataattctatttgcctgactttgaatttttcaaacagaattatgctataatatgtagattctttcgtgtcttgttttgcccaatattgtaaaggttacccatttgctgtgcggctaaagttcattttcgttgctatgtagtgtttcataattggatatattgaaatttctcctctacggtagcatttctagtctcagattataatgaagtgtgctgtttgg

SEQ ID NO: 29871 - DNA, 1049 bp, Homo sapiens
tatgtggttttctaatcccgttgtcccagttagatgcaaagcttctggaggacaagggccacacctttccccctttgtgccctcaaacactaacaggcgctttgccatagtacttggaaaaatatatattagttgaatgataggacaaaaaagcggttgtagatggaaaacgcattaactgctgagaacacgttttcattttgagttgtctataagagtttaaggggcagggaagccctggagttgaagtaaattcaacagcatcaagttttgtgtttggccctcaataaactagtctctctgtacccctggcagggggtgggaggagtcctgggggagctcccttccaaatcttacagggtggtctgtttcttctttggataataatgatgtaatggctagtctcttgagaacttgctgtgttccatacattgtactaagcatttatttggattatctcattaaatcttcacaatcactttatttaacagatggagaaattaaggcacatggaacctaagtgttcaaggtcatggagccagtaagtgttagagccaagtcgtttggctccagagcctgtgttcttaactactactttgtagtgtctttcttacatattagttgggcctgtgtattgctagttgaattcctcttcccagtggcaggccttcacgtgtttgaccatggttttcatgttctccaaacctcagttctctagatttgtactttggtaggtcatcattttccacagatcctacctctttaggtcagaaaatcttgccagtttataaagattctctgggactaactcccacaaagcaaggtcacaagagatcaatgtacaaatgaagcagttcagtgagttttgtctaccattctccataagtacatgggagacaactgatgattggaaggtttggtgttcacctcatggagctgtgatatctcactcaccacacagatctgctcttctgagggaccatcttgccaatttccagagagttgcagggatattaaatttttgcacattaagcttcctctttccaagc

SEQ ID NO: 29872 - DNA, 1088 bp, Homo sapiens
caccccagccccactcaaatataatccccataaaggcaaagacattatatgtcttatttactgctttatatgtcttgcctaacaaagtaactggtacattattgttacttaatatttttacctttgaatttttttgccaaaataatacagaattagaaagaattcctcccccagtgtcatggctaaatttatatacagtagctgacttggaaactgggcagagttgttttgcgtttggaaatactggtgttcttacagttgagtttctatttccaaaagatgcttactcagcctttgatggcacagtttgacttgtgacatcagaaggttgacaggcagaagtctgagtcagaaattcagctatagaagagcgtgactttcatccctgctcgccctttgaggtatggctggacacagctcagaaaggtcttggatttcaatttgtctaggaaggtatttagcaaattatttttaccatttggattttggtaccaatcacccgaggaatctgcagtctctgcgtaagtgaagaatgagaatggaaggggtaagtggagctagtgggagagcacaggccagcccgccacttccctggaagaactgatggctttttccaaggcctggatcatgcctcgcctatcctcctccccactccatgtccccagtccatcctctgacttttatttacttaccaccttggaagtcataagattctgaagttttccacagctgctgggacttaggcactgggccactgaggacaagctgacaggtcagtgtttgggctctggatttcacatcattcattagccctctcgatccccacagagagggacgttcatgctatgaactgtgtcatggagaaaacacagccctagaaagaggaactcttgatcccccactacttcattctttcaagccctgtgacctgttcctctaaatgcctgtgggaccacaggtgggcttgggatggggatgcttcctgaatgcccagggactgtacgcaaaatgttacgtgtgtgtattatgggcagccagggaggctcggtttcatcagactctcaacagataccatctttggtctaaaa

SEQ ID NO: 29873 - DNA, 1029 bp, Homo sapiens
gttgcaagagattaccatatttgtgtgaatttcaagaagtcaaaggccgtggcaataaagtattttcattttatagagtttttcttggaaaggccacacaccatatgacagcagagtgcttaaaacccagagcctggtgccagcacaaaatccaaacatcgtaaagttacttccaaagcccagatattgaccgatcccctctcttggagcagtgcatctttcaactagtccaagtccaccagcccagaatcaccctcccagcctcagatttcaagttggaagcccaaagtaaggcatgttttctaaaaaggaaaggaaaagctattggatagcaattgtcaagagtcaaaaaataaataaataaaaataagaataaaataaaatcatccccaatggaggagctttagcaaaagaaaagggagacatgccattggtcactgctgcatgtatgcattgtccctcggttggtttttaataaacccagctaacctccctccaccaaattgcctgtatctctccttctccacttagggctgtgtaccattactagaatatgaaatagtgatttgaaggggtcatttgttcaggttttccaggcttctgcactgcctgccctggaatcaattttttttttttttttgagatggagtctccctctgtcgcccaggctggagtgcagtggcacaatctcggcttactgcaagtcccgtctctggggttcacgacattctcctgcctcagcctcccaagtagctgggactacaggtgcccgccaccatgctcagctaattttttttttgtatttttagtagagacggggtttcactgtgttagccagcatggtctcgatctcctgacctcgagatccacctgccttggcctcccaaagtgctgggattacaggcatgagccaccgcacccggcctggaatcaatttttaaaacctgtctgggtgtgggtggcttatgcctgtaatgccagcactttgggaggctgaggtgggaagatcgcttgaggccagaaggagtt

SEQ ID NO: 29874 - DNA, 1139 bp, Homo sapiens
ggtgccgatgaaatagcctgtactttataaagtatgttgtaaatgttgctgacataattttgtgtcctgtaggaaatgcttccttgggtgtttgtattatagcccaatccaagtcatccctgagaacatccccaggttgtaaggattagtcagaagtcatgatgactgttctatataaatatttggcctattaactaaaattagtacctttccatttcttctctttcttgggcggggcagcgggggagtgcaggggaggggaaatagggaacgttcaattgtgttttaagtaatgctcataaaattcttagccaaagatgatcttgccctccaccttggtgacccaccgcatacggggtacatctatctggcctgtctctaggcctagacagaagaaacagggaggattattgttaacttttaccacatgtatgacttgttcccggacaacccattcttcctttaggcagaggtgatatgcactgaagtgtttgatttagagtgatggaaaagtctgtgctgccattcctcagggagtcctaaacgttgatttgcctttgggagggccaggcttcacgaaaacctgatttacggtgttgctctgggcctgatttcctttgcacactctggaggaagtgctctggtgatgttggcactgagcaagcaacaaaggttttaaaatgtcggccctggaaacaaaactgtaccttgtgatgttagaataattataccacacttgatctctgattacggccaaaacagcagttgctaaatccagctaacatggaaaaactagaaaaagtgaggggaaatcagccaaatgcatagcaagggatggggaaagcggacctggactggacacagaatcttctgtttccacttgtctggtaataactgcaacacttcatggtccccagccccagcgcccaccccttgtctagagccattgcgctctgcatgttgacactagctgtgggaactctgtgatttaaagttgagttgaaagaactgcttttatcatttcaagtatgtagccccaggccaaaacagacaaaacaattttttaaagtctcagttcaaaagcagcttgaaatattctctgttccatcaaaaggaaccccaaatctctccactgttct

SEQ ID NO: 29875 - DNA, 1010 bp, Homo sapiens
ggcccaccctgaccatgtgggcagagatagcttgtaaggctcacagttatgtcccccaggtcatcaagggccagaggctggatgtgggtgctccgagattacagctgaatcctcccctccatacccgtgtccttcagggactccccaacagcagtggcaatggccagagagccaggttctgcctgcacggttcaggccatggctcatggcagcattacaatgcctgttgagcttcccaaagcagaaaggtccactgcccaccccggggagcagtgagcgggtccctgtgggtcgcactgcgcacacgcctctgttccagcccctgctgctgcccaacagcacaatcctctcttctcatgtccatttccccaattagactgggagctccctgtggccgtgacagtgtccacacacacgtctctggctgcccacagctctgctctgcagagggctgggtaaatggtgagcgctcgtaaaacgttgaaatgaacagcagtgataacttggcctcgggttccatcagacacatcagcgatctctcctccagactaaaactgagcgtgctgagaacaaaaactgcatcttgcttgactggcttctggtaccccctggcacacagcaggggtctgtgccattttgttaaatggatgaatcaaacaaacaggattaccatgtcaggctctgaggcaagatgggcaactgttctcagcttcaccaggattcccaagcaccagaaccacctctcccaactcccagggcctaccccacccacagtttcaacagaccccatcagacacggacaccaggcagtgccacttggagggaagccccggtgaggccacagggacacagaggctcttgcagctgaatgcacagagcccggaggcaccccctcggggcacggcaccatcctctctgtcagtcttagcaaatgctgactactgactaaggacctattaggtcgcagtccctggagattcggagagctcaagcagtaattttgagcctcc

SEQ ID NO: 29876 - DNA, 1064 bp, Homo sapiens
tgttctaagtagatgtattaactcatttactaggatatcaagtagattactactattaacctaattttacaaatgaggaaactatagctcacagtgaattcggaatttgtacccagggagtccagctccagagttcatgcttccatgctcctaaccatcatgctctgtgattaatggataacaatttgttccatatttctcctttccactgaacaccttggtatttctttttctcagtgacacagatacatgtttgaccttgaacaatttcttattctctctgaactttcttcatctaaaaagaggagataaagtatatctcaaactaattgaaataaaccttgaaaatgtctaacaatatgattgacacttgacagatgttcagtgaatgttccaccatgacaagcagattttcatagcagctttaagacaacagcttactacatgagtatttataggagccttcaagtgaggataggagcctgtcatttgtgaacagattttcatgacactaaaaaatgatttagaaaaatagaacaaacctagatgaatattccttcattttggttcgagcaatttgttgtacatggtttggaaaacattgattagcactgttttgaaacagtctctggggaagatgtttttaagctgacttatatgtggaaacttcatactttgagcactatcacattcatgtctcatttaatcctccacacaatagaatctgtggtgcagtactaatactattctcattttacatatgaaggaattaaggtctaagtaggttaagatgattacccaagctcaaatagccaggaagtgatagagtcgggactagaacccagatttgtgggttctataggttctgtggcctggaaaagagaatgttctacagaagggacaaatctgagctgagctttgaaagatgagtgggatttagattagtgaggaaggaaagaggcatttcagtaaaaaggaagagatagtaaaaatatagtaacagtaatgggaaagaagtgtgtagagcagatgtaggctagttggcataaaggtttcagggcagg

SEQ ID NO: 29877 - DNA, 1068 bp, Homo sapiens
aactaaagattttacttcatttccatgcttggagtggggcccagcagacccctaagaggggtacctgctccatcttaggctgacccactcacatggctccactaggcattgctgtagtggagactctctgtggtggcctcattcctatggcttagctaggcattgccctaattgtaggggaggggtgcggcacactagctgtggtggctctggctctgttcctgtgacaagtctctgcgttggcccccaggacatctgcaacatcctttgaaatctaggaggagattgccatggctccacatttcttgtattctgcatattagcagagtcagcaccctgtggataccaccaaggtttaccatttatgccctatggagctacagcctgagccacacccaggaccatttgaaccacagctggggagtctgaggaacactgtactggcatgcagggagcagtgtcctaatgaaacccgaggcagtaagtccactgagggtgtgccaggcatagtgaggaaaccattctgccctcctagagctctgggcctgtgatgggagggtgaaaatctcaaagatctctgaaatgccttccgggtcattctctcattgtcttgatgaatagcacctggcttccttctagctgtactactctgtttaacaaactgtcaattggctacatccttagtattctctcctgaatacacttttttattctttgcctttccaggctgagagttttccacatctttccttctccttcccttttcattgtaaattatgtctaagtcatttctcttttccttcactttactataaggggccaaaggaagtaatgaagcatcttgaacactttgctgcttagatgttcctcctaccagatatcctagtttatcactgttaagttctgcattccacaaagtcctaggacatgaagacaattccactaagttctttgcaactgtgtaacgagaatagactttactccagtttctaataccttgttcctcatttccatctgagacctcatcatcagaattgcctttactgtccatatttctacctacattct

SEQ ID NO: 29878 - DNA, 1033 bp, Homo sapiens
gtatattagcgttggtctgtaagccttttgaagtcttggaacatgtttgcttctcttatttccccatggaatttaagatggtacctggcatgtatcagtatatttggttaaataattaaacattgcaagttttgtaaataatgactagtatttgtatatcatgttaaagttcacaaaatgctctcacatttattatatttcttaattctcccccaaattttgtgatacttctatttaaagttgaagaaattgcatcttaaagagttgaaataatttgcccaaggtctcacagttgataactgctctagataggactagagcccaagcttcaggtctgttaaaaatgctgacttgccttgtgttttcttgaaatcccagttttctttaagggatttgtagatattgttgtttaatactatggaattatcctgggagctcaatggaaaggtaatgtcttcctgtgaactagacagttataggagacctgagaatgtttcagctgcaagtggatctaaagaaggagggtgtagtgggttgaatagtgttcctttctgcctggccctccccatcccccaattcaggtccacctcaaaatgtgacttatttggaaacagtgtctttgcagctaaggatcttgagatgaaatcattccagatataaggtagatcctaaatccaatggctggtgtccttataagaagaagagaagatacagagagcagcacagagaggagaagcccatgtgaagatggaggcagagattgcagctaggcaactacaagctagggaatggcaaggattgcttgtaaccactagaggctggaagaggcaaggattggatgggccctacagccttcggagggaacatagcccggccaacacaccttgattttagacttctggcttctaaaaccgtgagaataaatccccccacaccttttttttccttctcttttctcttttttttttttttgtgagacagcatcttgctctgacacccaggctggagtgcgatggggtgatcacagctcatt

SEQ ID NO: 29879 - DNA, 1049 bp, Homo sapiens
aaactcattaagcaatactctttttttttaattttgatgtggctttctgtatctttgttttattttacaacataaagtttaaagaaaaaaatgttttctgttgtatgaacaagagcaagaggattagtgggcagagaggagaaaagaagggcacctatatattaaaaatatttttgcctaaggtatactagactttgtactagagcatttcacacctgttatcttgacattcaaaatggattattcttatttggcagagtctcagaagttaaataatttcctcatggtaatgagtagggggcaggagttcaagcccaaatttgattgattccaaagcagactttctacttccctcatttactgatgttggcaaatagaagtgtgggtggtataccaatgtctctctaaacctagtgtctatagtatctagccttcagttagtcaccctcctaaaaagttgtgtcctttgtgtatattaaaaattatatggaaacatgtatattctcaccctctcaactaatctgttatataaaagactggttatattacttgttctaacagaacaaaaatgataattctaagacaagatatgaaaatatagtgacatctgggccaggtgtggtggctcacgcctgtaatcccagcacctttgggaggctgaggcaagcggatcacttgaggtcaggagttcaagaccaacttggccaacgtggtgaaaacccatctctactaaaaatacaaaaattagctgggcgtggtggcatgcgcctgtaatcccagctattcgggaggctgaggcaggagaattgcttgaacccaggaggcagaggtttcagtgagccaagatcgtgccactgcactccaacctgggcgacaaggcaagactgtctgtgtgtgtgtgtgtgtgtgtgtgtgtgtgtgtgtgtatactttttgacatctttaaatcccttatttttaggggaattgtttttctagtgaaacatgaacaaagatatttgaaatgagtttcaaatatagtccagcagctgagaagtcctagaacaatc

SEQ ID NO: 29880 - DNA, 1114 bp, Homo sapiens
tctagtatccagaatatatagagttcttataattcaacaataaagagacaacccatattttaaaggggcaaaggatttgaatagacatttctccaaagaacatatacaaaaggtcaatagtgcatgaaaagatgctcaacctcattagttctaacggaagtgtgtcacaaagccacaatgagatataactttacactccataggacaactataataaaaaagacagagaataacaagtgttggtgaggatgtggagaaattggaacccttatacatggatggtggaaatgtgaaatggtgcacttggaaaaacagtttgtcagttcctcagaagttaaatgtagagttaccatatgagccagcaatttcactcataggtatacctgagaggatttaaaacacgtgttcacccaacaacttgtacacagatgttcatagcgttattcatatagccaaaaagtgaaaacccaaatgtctgtcaactgttaaatgggtaaacaaaatgtggtatagctctacaatggaatgtcgttcagcagtaaaatggaattaagtactgatacatgctacaacatggatgcaccttggaaacgttatgctaagtgaaagacgccagtaacaatcatcaaataaatgcaaataaaaatttcaataaggtaccatctcacactattcagaatggctattaagaaaagtcaaaaaacaacagatgctggtgaggctgcagagtaaagggaacacctacacacctagacactgctggtgggaatgtaaattagtcaccgtggaaaacagtttggagagttctcaaagaacttaaaacagaactactattgaacccagcaatcccattattgggtatatactcaaaagaaaataaattgttctaccaaaaaaacacatgcacttatatgtttgtcgtagcactattcacagtagtaaagatggaatcaacataggtgctcaacagtggattggataaagaaaaggtggtacatatatactatgaaatactatacagccataaaaaggaatgaaattatgtccttttcagcaaaatgtatgcagctggaggccattatcctaaatgaattaataacaggaacagaaaacc

SEQ ID NO: 29881 - DNA, 1027 bp, Homo sapiens
agttctgttttatctatcatatagttttgtctaattttagcctggtacatctttttctatccctttactttcagcctttctatgtttatgtattttaggtgtatctcttgcaaaacagcctataaatgaattttcaaaatcaatctgacagtatttgtcttaacttgaaattttacatttattataattactgatgttagatttatttctactgtttgtataatgctcactactgtgtttttactgtttatcgttgtctttttctttcctgccttctaccagattgcaagccctcccactcttttttcagtccattaatttggaagttatatattctgtttgtattatgttagtgaatactcttaaaattttaaagttgcagttgacttaaagtccaaattcagtcaaattctttattcttctccaaaacaactccgcagtcttgttctgattatgtgttattattgtccagtttttatacttgtttttgtattcaaatttgttcttttttgttgttctgtggcttggatttatacaggagtcttaattctgccttatgcagactcttcctactccctatatttagttgattggaccaggggtagaccctggatctaagtcaggctaacccctggaaacctgaaactgggcccaagagacactagttggaactagtgaaaagccagagatgagagagagggaaaattttgttcctgatgactttgcagtttctgattccagtttctcaagaggtgcagctttggagttctctgagatatccctgtatccttgcaataaattctcctgttttgttaaagtaatttatagtgggtttctttcttgttatcaaaggaacttgaaaatgccattctccttcccagaattactaattttaaattaattatatcattgcacatctgtttaatacttcatagcttactaaatatgtactgtcattaatctattctccttacaacaatgtgaatattagtggtttttcaactagataaatgaggaaactgaggcc

SEQ ID NO: 29882 - DNA, 1050 bp, Homo sapiens
cctgtagccccggctgcttggggaggttgaggcgggaggatcacttgagcccaggaggttgaggctgcagtgagctgtgttcatgctactgcacttcagcctaggtgacacagtgaggccctgtctcagaaaaatcccaaaaagtaacccatgcgtttatgatcaattgattttcaacaaaggtgctaagaacagacaatggggaaaggacagtctcttcaataaatggtgttgggaaaactggatatctacatgcaaaagaatgaaattggacctttatctcacatcatataaaaaaaaaacccctcaaaatgaattaaaacataagacctgaaatggtaaaactcctaaaagaaagcataagagaaaaccataggttgagcaatgacttcttggacaggaccccagaagcgcaggcaacaaaagcaaaaatacacaatgagattgaatctaacgaaaaagctactgcacagcaaagaaaacaacagagtgaagagacaaccacggattgggagaaaatatttgcaaaccgtacatctgataagcggttaatatccaaaatatataaggaactcaaacaactcaataacaagaaaacaacccaatttttttaaatgggcaaaggacttgaacagacatttttagaaagaatgcatatgaatggccaatagatatatgaataaatgctcaatatctctaatcatcagggaaacgcaaataaaaaccacagtgagataacatctcataccttttagaatcactattaccaaaaagacaaaagataagtattgggggggttgtgaagaaaaagggtgcactattggtgggaaggtaaattagtatagccattttggaaaacgctatggaggttcctcaaaaaatataattactgtacaatccagctgtcccacttctggatatatatccaaaggatttgcaatcagtatgtcgaagagatatttgcactatggtcatttcagcattacagtaaccaagatatggaaacaatctaagtgtttgttaaccaatggacggataaacaaaaatgta

SEQ ID NO: 29883 - DNA, 1041 bp, Homo sapiens
ggggtcaaagactgtgtttcatatgtcattgcattgtttcagcactgactctagtgtttcaaaatgttttgtatagttggtacacaattaatgtttgttgattgaccaccttaacatttgagaggtggaagaagggcctgttgagccagagtttgaggtgactttggaataattttttaggtttcttgatcagtattaaagacccattggatctctgagaatagctttatctataacattttccctttttccccattttcattactaccctcactgggggttctctgtgacttctcccagggcctgttagccatcctgattacttttcctctcccacagggtgcctttgaccttaaagttattatttttcctctttgggcatctgttttctcatcagtaaaataacatgaaagtaatctttaagtttctttctagctccaatattctgtgatgccattgtccagaatctctactgaatgggggagcaaattatgtatcacattttttgttataaaaatcaaattggtttattgaacagattctggagaataaaaccttcattcaagcctcagccttagtggtcatattagtattgtggtctctgtgggtttttaatcaaagaaaactgtggacataggaatggtatcatttgtcagtgtaagctgcaatgaagaaatgcaaggtagaaaaagatgactgacatcattagacccactttgacaagtgtgatattattctcaaagtactcccgggcatgtgagttatttttgtctcctgtgggtcagagtctggggcttgttctcctcccctggtaagatagctagtttaatgatggctctgccatcactgaagtacatttggtcttaataatgggcttaaatttttcttggttctgttgggaacttcagctgtaacaaggaaacttagtagtaacgatactttgatgtgggaaaaactaagcaccttttgctgaaatcagttgctctcatcactgactttgagcatgttattttcctttccacattagcgtcttttttctag

SEQ ID NO: 29884 - DNA, 1058 bp, Homo sapiens
caggggggcagatctttcctgtgctgttctcatgatagtgaataagtctcatgagatctgatgggtttaaaaaggagagttcccctgcggaagttctttgcctgctgccatccatgtaagacatgacttgctcctccttgccttctgccatgattgtgaggcctccccagccacttggagctgtaagtccattaagcctttctcctgtatgaattacccagtctcgggtatgtctttattagcagtgtgtaaatggactaatacacttacctaatggggttgtggtctgtatatacttagcatggtatctgtcattttgaccctcaataaaggttgttattattttcatcatcaggattatcataatctcatcctattcagatccttttcaggtccttcggcaaccctaaagaactagaaattcctaagcactcctatttgatggtttggaggaagcgttttcatcttttagcagatcttactttttagaccttcctctatatcttaagtgggacttctgactcaaaagctttgaatttacttttaatgtcaatatattacccactctactggcttaccgagtggttctggttagtaggctgttttttaagaaaaacagatccaaactccttgctcatcagttcactgctttgggccattcattcctagggatattgactactgttccacgttgacaaattagagaatccttggctagtgtagtgtgatgtattattttgggatgcccacgcattaaggggctgggagaaggaatcctggtgtctgataaaatgaaatagaatctgggtcatggcatcattgttgtatccagcaggcttctgggaaggcaactttcagaaacttcttaggacattggcagaaactctgaggtgagacccctgggtgaattggtatggtttgtttccctagaatctctgctaagagggggagcagtgtttgtcactgaaaaacatgagtgtggtgtaacctaaggagaggcttatcagaagtgctctgagtctagaagagccttctgcttgggatctgaaagcaaagca

SEQ ID NO: 29885 - DNA, 1039 bp, Homo sapiens
tctgtaagtaaaatcaacttttgagggaagaatgtccacagccagttttcagtggctgcataagaacagtttcaaccctcgtatcttgtactttacctacaaaaaagtgccaagaaagttggctgtgaaaagcgtgaatttttgtgccatatatcagatgaaaccttctaggattcaggtttctcctttaaacttttattcattccgtatttttaataagctatcatagggttcttctgaaaccagttccttagaaaaggtgtgcaagggacccagaattccaatttacataggaacttaaatcccaaggggttctggctgatggtctttgatttttgcctccctaaatttacattagggtaaaagattatgttttgggagtgctgtcttgctccccagaatataactatattttcccccagcactcagtacactatgtagcatatagtaggcattctgtgaacttctgatgaattgttggcttcctcacagcagggtctggaattgttcatctctgtacacccatctcctagtacagcacctcctagcatataataggttttcaaaaattaattgcattgatattgttacttcacttttaggtaagtgcctatccttttaactaggcgtttctcagtcaagactgtcagagccctgaatgagtcattgagtcaggattagagggttaatgatagcccagaaaagataggcaccacttgttagctgattcatggggctaatgtcagctcttttaggggacgtggcctagataaatcaaagtctggcaataatgaacccatagcccgcagacagcaaaaattatggacctttctgaactcctgcaaaggaaatgaaaaactctttaatcagatttctggacttgaaactagggatttttgtaaggatgctgtatttcagattgccaacatggaattggggagcatgatcagagaaaggttggaagaagaggggaagataatagggacttagctggaagaaggaaaaggaaaaggttgcccggaaagcagagagaaagatg

SEQ ID NO: 29886 - DNA, 1029 bp, Homo sapiens
cccccggtacttgtcagaatttgactctctcctagccacacagggtgatcctgctattagcagctttttctgggtgatttcactgcttatcaactctctgaccgaacctgtgccccagtttcttcatctacaaactgggaataatagtagcacctgccaccactttgacagcctggttgttacaggctcctagtgtatgggttctcttaaagaaatttgtggccagacgtggtggctcacgcctgtaatcccagcactttgggaggctgaggcaggcacatcacgaggtcaggagatcaagaccatcctaactaacacagagaaacccgtctctactaaaaatacaaaaaaaattagccgggtgtggtggcaggtgcctgtagtcccagcaacttaggtggctgaggcgggagaatggcgtgaacccgggaggcggagcttgcaatgagccaagatcgcaccactgtactccagcctgggcgacagagcgagactctgtctcaaaaaaaaaaaagaaatgtgttccctgttttcttttcctaaactgtgccagaggccagggcaggaagaatggggagagcctgtggctagggctttgctcctcccgggatctgggatctggtgaggggtcacactctcacccattcacaatctgagcacattgccttgggccctgcatgaggagaacagcagggctccctggccagaccccaagttctcccttcagtttcacaaagcagctgccacatgaatgacgttttacatattgttctctgctagttcatgggagtggacaaatttggtgactgtgaggggagggtccctttcagctgatgactttgggttgtgtttctcaatatctttactatgactgctgttggtgtgaggagatactttgattgggttggaaaaggctctgccttgcacagctgtgtctctgagcacattgctgtctctgaagttggtcagggcaagccactgggatttggggagcagaagtggacctgtcaatgaaagcagcattccaga

SEQ ID NO: 29887 - DNA, 1078 bp, Homo sapiens
gactataagttaatgagataacgttctgtggcttacaaactagttctgaagtaaattaatcccagaaaggggtctcagatccattttgaatagtttctctctgaaataaatgtatagacccatcaaggttatcaggtttgaaagagaagttgcattccaacaagcaaattctgttgtttgtggaaaataaacaatttattactgtctaatttgcaggttacaggctacatttagaataatgttttctcctcaaataatcataacattattccttacatttgtattttacagtttatgtagcaccttgcagtttaaaggcactttacagtttacaaacactgattcatctgtcattttgtggaattctcacaatagccccatgaagctatccctcatcgtaggtgacttctgagtgtctgaactgtgggctcacacttgagtggtacttttcctcctgtggtacaagtttccttggactttaagcctgttgattgtaaacatgtagaaaaataatgcaactagtcattctctctgatttatccacctcttattcaacacccagatactctgagaacttgctttctatcttgcttggatattaatacagttagacacacacacttgtgcttgcccactggtctatattttcaggactcttgtttcatgggccctactccctagcctgctacctttatcgaggagataaccttccagaaaggggaagagggaacaccagagataacctgagaggggaggagagctggtacctggccccacctcatgtgtaaatgaatgctccccagggaaccgcaccccttggtcattttcagccacctccatatccacatacatctcttctgataagaatctccacccttcagctaactcctccaggcagttcacagcagaaagcagaaagctacagccacctgggtggatcaggttaagttcagcaaccgcctaaccctacttgttttagattcagtcctgaggaagggagattagctctattggattagtgaagggacaatacaggtttagacttcttggatccactctggaactcactggtaatgat

SEQ ID NO: 29888 - DNA, 1052 bp, Homo sapiens
cacactcttccattagctcaggaattaatctctttgctgagtttgatgcttccatatcatgctgttgatttttctcaaatgtttgttattcttttttgtgtgctcatctatgcttgagattccttatttggatgcttttttccgtttgccattatctaattcaggtgctaaatcggggagaacagatattatgctaaatggggttgtcggtgatctcgtttttgggctgtgaagactctgtggagacaacccttcttgtgtttggctcttactgaagtattggcctatttttcttactcccacattcagtgctttaatctggatgtagttgttgtaaaccatgctgagaacaagtgggaatggggaagacccagctggcctaatggctccaaatgcatcctcccaattagtaaccctgatgaatgctccaaccccctccccaccatccccaacttaaatttcctgattctgtgcttagaaccactctaaactgcttacgctttttcaacaattttctcttgtacatgctttgattatggtttcctctgatttttttttttctatgcatttggtcagatcttctgtttttcaaatattccacaaaattctggtctggtcatttttttttcttgctttattactatttattctttatacatttatgtctttttataatctcatatgattttggatgggaaaaaattaaggatttgtttcatatttatttcactatcttaatttaatctgcacatttcaataataacttggtatgatggctagttttatgtgtgaacttgactgaaccatgagatgcccagatatttggtcaaacgttattttaggtgtgtctgtgaaggtgtttttggaggagattatcatttgaattggtccactgagcaaagcagattgcacctccccagtgtgggtgaccctcaccccaccagttgaaggcctgaatagaacaaaaaggctaaaccttttggtaatagggaacttctcctgactgactgcttgagctggaacattagtctttccctggctttggactcaaa

SEQ ID NO: 29889 - DNA, 1026 bp, Homo sapiens
gtcaagcttttaaaaaattaactgttctggaaggaaatcatctgaaatttgtttttcccttataaacaaaatgtatagaataccattttcttgaagacataatcattattattcattcatttatttatttatttttagatatggagtctcactctgtcgcccaggctggagtgcagtggtgcaatcatagctcactgtggccttgatctcctgggctcaagcgatcctccctcctcagcttccctagtagctgggactacaggtgtgcaccaccacacccaactaattctttctattttgtgtagagatggggcctcatgatgttgcccaggctggtcttgaactcctgggttcaagctgtcctcccgcttcagcctcccagagtgctgggatcacaggtgtgagccaccatacctggaaccacttttaatttgttatttttaactggatatgggcataggaattattattgcctggtttcttgtgcagagactcccatatgaataaagttcattgactgtggtgcatagacttggtgacatatatttcatctgctcaaagacatgttttactgtcttttttggaagatgtgttccaaatagatggggctgcttgggtttcattactatattatatagttttgaatacactgaggaattaattcccatactaccaaatgaaatagcagatgctgtggtgcagggccccaaattcccccttcaggactaaggccttctttgcccaagcagcacatattgactgctcaaagctcacagcttagtttctctgtgggagtctccgtcagccacagagagcttcccccaaggttatgtgccctccctgggtgcagctcatatccagtgatcagtcagtgtgggtattcaaaggcccagcctccctgccttgaccggagacaactttgaaaggccaccccagctccagaactttctgtgggaccagtggaggcctctgttgcaaccgtattgcttccctcactcctttccactcctttattcactgagagca

SEQ ID NO: 29890 - DNA, 1040 bp, Homo sapiens
gcagagcttgcagtgagccgagatcccgccactgcactccagcctgggcgacagagcgagactctgtctcaaaaaaaaaaaaaaaaaaaaaaaaaaaaagaaatgtaaaatagcaagcgagtagaggtttcccaaaatcagtgtgaacattgtgaaagttatatatatgtatagacacacacacacacacacacacagtaatagcctttgaatgaattcttttttcatcttttctgttgcattgtcctagaaatcccaaaggagaaagttaagtggttttgcctttgacagcggttacagattacatttttcttgtcactttctttgggacttcttttgtgaaacttgtggcatgtcctagaataatctttatcttaaagttttaaaaactttttagaaatttcatatcagtgttataaatatttattctgtatgcctccccagtttgggatgatttcatccttaatgataagccaagacaaacttcagctaacaatatttagtttatagatcttagaatgtgtttatgggtaaaagaacctcgatgtgatgataccttagagaatagatctactgagactgatgcgttttattttcatttttgtattttatttatttatttattgagacagggtctcactctgtcacccaggctggagtgcagtggtgccatcatggctcactgcagcctcaacttcttgggtttaagtgatcctcccacctcagcctcccaagtagctgggactacaggtgtgagccactacacccagctaatttttatattttttgtagaaacaggggttcgccgtattgccaggctggtcttgaactcgtaggcccaagcagtcctctggcctctgcctcccaaagtgctgggattataggtgtgagccacgcgcccagcctgaagctttttttaaatgaagatttattcaacaaatgtctattgagccacttatttgtgccacaagctgtttcagataaggaggataaagcaatgaacagacaaattccattcctccttgagtttacaattattg

SEQ ID NO: 29891 - DNA, 1013 bp, Homo sapiens
ttagaagaaaggataatgaggttgatgtgcctgctgtgccggggggataagagaaaggtgtcaggcaagaatagatgtataaaagcactagttacaactatactttgaaagtcatattttacctggaagaaatctcaaaaaacaaagactacatggcagttaagtgacccaaatcaagtcactttccctcttcaggcctcagttttcccatatgttagacaggttaaattaggtgagacaaactgatcttttaggaccattctataatactgtgcttaactttctaagcattctggaatggagcagccttgatcttttcacagatacgtcaaccatatagctttatttataaaacgaacatgttgagataactaaaattagagttaatatcttcataggtacaaagaaacttttagaacttaagtccacaagtcagaatttctggatgaattcctttttcctcttattaaaaattgttaagatgtctgattagactagttgtaaattcccttgaaagcaaggatgatatcctgctctctactgtgtcctcagcatcaaggacagtgcctaacacagaacaactaccaatgaatatttatgaaatgaatgaaagtttgaattgcaaaattaaatgccaccaataaagaggctttgtgagcgagcgtggtggctcaagcctgtaattccagcactttgggaggctgaggcgggcggatcacttgagctcaggaggtcaagaccagcctggccaatatggtgagaccccgtctctactaaaaatacaaaacattgtctgggcgcagtggctcacacctgtaatcccaacactgggaggctgaggtgggcagatcgcctgaggtcaggagttcaagaccagcctggccaacatggtaaaaccccgtctctactaaagatacaaaaattagccaggtgtggtggcaggcacctataatcctagctacttgggaggctgaggcaggagaatcacttcaacccaagaggcggaggttgca

SEQ ID NO: 29892 - DNA, 1030 bp, Homo sapiens
ataaaatcatacatataatctaaaatatgaattcttatacattttatgtcattaaaattaaggtaaaattgaaaacagagttaaaaacttttcctcagaaatcggaaacaatctaaatgtccatcagctgaatggatagacaaaatgtgctgtatcaatacacagcctaatctaggcagttcagcagtaaacaggcatgaactgctgacacatgccacaacctgaacctccagactcaacctcggaacctccaaaacattatgctaagtgaaaaaaaaccaaacacatgagaccatatatcatatgattccatttatctgaaatgtctaataaaagaagcaaatctatagaggcagaaaagtataatagattaacagttgtctgggattgggggtagtaattggcgtttgattgtaaatcagcatgacagatcttactaggtgatgaaaatgttctaaaactgatttatggtgatggttgcaaagcttggtaaatttactaaaattcgttgaattgcacattcaaaatggtgaactttatgctatgtaaaatatgcatcaataacgctgttttaaaagctttttatgaagacttctagatctcctaagaatatttaggtatcagatattttcgcccttgacccttccaaggtcagaagacacagctgaaaaaatacttttagtggaaccaaagaatggatccagtaactacagtatcgtggattctagctttgactttgtcactgactgtacttgggcaaggcctgggcaagtcacttaacctctttttgctttggtttccccatctgtaaagagggtgttagtttaaatgttctccaggatttcttgcacacatgagagtcgcatcctcacatttctgttatctgtgaatctctacctcctaatgattccccctccctcaaatactctaacaaagcccctttattcagcatggcatatgtggcatattgcttgtctgactaattcttgctcacgcaagcttcctgaccttactgcataggtctttcagg

SEQ ID NO: 29893 - DNA, 1073 bp, Homo sapiens
aagagaacaaattaaacaagcagtcttcctttcttgtaggaactgtatttcagggtaattacatggctttagttgctgaaggaaagatcttccttatagaaaaatgcctgctgtctgggtacagtggctcatgcctgtaatcccagaactttgggaggccaaggtggacagatcacttgatcccagaaattcaacaccagccttggcaacatggtgaaaccccatctctacaaaaacatacaaaagttagttgggcattgtggcacgcgcctgtggtctcagctactcaggaggctgaggtaggaggatcgcttgagcctgggagtcagaggttgcggtgagctatgatcgcgctgctgcactccagcctgggtaacagagcaagaccctgtctcaaaaaaagaaaaaaaatttcctactaataaatgtggaaagagtggtggaattagaaaaacatttcataaactccaagtattgattcaggaaaagatgataaagtttgttacacctttaggtgaatgattaatgaaactgaacatccttgtaataccaaagtaacattgcactgatgactgtctaattgaaggagaaaaagtaactgtacaatggagagatgagacatatcaccattctaacttagtggtagattttaccatggctgatggtcagtcatatattttgccttctgatgtgatggaataggaagtacacatcccctatggtatattcaagcctaaaatgtttaacttgaatccagaaatccttggatatagtgtccagtttataagaaacacaggggatggagaatcaagctaaatgatacaacaagaaaacaaccagacaaattcagaggttgagacattctatctgataactggcctgacctcttcaattagtcagtggccttaaaattaaggggaaggagtagtcatgctagatttaaaacagcttaggaacatacagccaaatgcatttcatcatactggattagattagggttggagcaaaccaactataaagaacatttggggtcagctggggaaatgtgactatgggctgggtattgtttgaaa

SEQ ID NO: 29894 - DNA, 1026 bp, Homo sapiens
atagttttgtactttacatttagatctatgttccattttgagttaatttttatgaagagaataagctctgtgtctaaattattattattattattgttattattatatttttttgcatgtggatgtccagttgctccagtcccagttgttgaaaagactgtctttgctccagtgtattaccctggtttcttcatcaaagatcagctgactacatttatgtggtcctatttctgggctctgtattctgttcctttgatctatttgtctattcttttgccagtaccgtactatcttaattactttaactttctagtaaggcttgaagtcaggtaatgtcagtccttcgactttattcttcttctttaatattgagttggctattacgggtcttttgcttctccatataaactgcagaaccagtttgccaatatccacaaaataacttgctgggattgttattgtgattgcattgaatctatagatcaagttgggatgaatgacatcttgacaatactgagtcttcctatccatgagcatgcagtgtctctccatttatttcattctttgatatctttcatcagagttttgtagttttcctatataggtttcatatatattttattaaatttatacttaagtattttacttttcggggtgctaatgtaaaacaaaacagacattatgaggaaaatgtaatgtctgtttgggggtaatgtgtttttaatattaaatttcgcttgttcattgctggtatataggaaagcattatgacttttgtatattaaccttgtatcctgcaaccttgctataatcacttactaggtccaggagattttttttttttctgttcttttggatttttttatgtagaagtcatgtcatttgcaaacaaagacagttttatttttaccttcccaatctgtatcccttttatttccttttcttgtcttgttacgttagctaagacttctagtatgatgttgaaaagcagtagtgagagaagatatccttgccttattcctaatc

SEQ ID NO: 29895 - DNA, 1033 bp, Homo sapiens
gcgtgctaccacacccggccaatttttgtatttttagtagagatgaggtttcaccatgttggccaggctggtctcgaactcctgacctcaggtgatcctcctgcctccgcctcccaaagtgctgggattacaggtgtgagccactgtgcctggcctgtataccttaagtttaaaaatttttgtctattatactcaataaagctggacaaaattttaaataaataacagcagtcattaacagactcaattgatgacctaatgtagaagttaatgagagcaggcctgttggcaaaaaggcatttatatggatacactgtatgtatctgcactgtttcaggatcctctattatgatacctgggtaaagggtgacttcctttctatcataaaacagcctagacagcactaagaaggtggttatgttcttttctgttgttgtgagcgcccagatgagattactttgccaaagactcttttcatttctctttctgaaactctgtgagattgctgtgttctctaggacttaacttcacagctagtctatttttcctttcagaaatgaccatggttgacacagagatgccattctggcccaccaactttgggatcagctccgtggatctctccgtaatggaagaccactcccactcctttgatatcaagcccttcactactgttgacttctccagcatttctactccacattacgaagacattccattcacaagaacagatccagtggttgcagattacaagtatgacctgaaacttcaagagtaccaaagtatgatgtttattttcacttttcagactactaggactagaattggactcatctctcagtaaccctgtaataaataatgctccagagactagaaatctaatagagaaggcattcaccattcatttattcacccatttatccatgaaatattaggtatctatgaaatgccaggaagggagctggcacgaggtcaatcttgccttccccgccccctccttccttcctctcttctttcctttcttgcttacttc

SEQ ID NO: 29896 - DNA, 1059 bp, Homo sapiens
caccttggtctcccaaagcgctgggattataggcataagccaccacgcacaatctaaacattactttcattagcctctcatgagtagaagaaagttttactttcatctctctgtataaaaattgtttttaagtggcaagttttcctattgaagtggactttaggtgagctttttgtatgtactctacagtgtatcctctgtgaaaaacccgtcgggggatagtggtaaactgtatataactgcacaatgtattataaagagcacgatccctttgtcatcttttgttgtccagttgaaaggagaatgtttctgaaatcaggtgcatagtgcagtagtcataagaatagcaaacatttatttaatacttgctgtgtgccaggcagtgttctaagcacttcatgcatatttattcaatcctcacaacaattcagggaagtaaggaccattttacaaatgaggaaaccaaagcactgagaggttttctcatttgcgcaaggttacgtggctagcaaaagatggagacaggattgtgagccaggcatgctggctcagactctacactctctaccatcacatcatgcggaataccggcctttaaatgcctagggtgcaaatagatcacagtatggcatagtttacctttggagctgtgaagtccagggtcaagtcgtgattcactttaaaataactacttgatattgtgggtttttgttgttgttgttgtttgttttttgtttttttgtttttgaggcgaagtctcactcttgttgcccaggctggagtgcaatggcacaatctcggctcactgcaatctccacctcccgggttcaagggattctcctgtctcagcctcccgagtagctgggattacaggcacatgccaccacactcggctaatttttgtatttttagtagagacggggtttcatcatattggtcaggctggtctcgaactcctgacctcaggtgatccgcctgcctcggcctcccaaagtgctgggattataagcatgagccaccatgcccggccgacgttatgtttaatagaacaaaaatata

SEQ ID NO: 29897 - DNA, 1027 bp, Homo sapiens
gcagcatcatgccagccaccctagcaaactcccaaaacctacccagcagccaaagccaagcgtaaagctcagtgaagctgacaagccccaggacactctggtggatgttttgcccccttgagtgtttgctgttttgtgaagaaaaagtgtaggagagttccagctggaactctgcagcaggcaaaagctctttttgttaattcaaaacagtttggaatccatttcagttcttcctaaacctccaagatacgggggaggaaattcactggattttacaatatatttttcaaggcaaattgccatcgccgtcctaatgacagagaagctgccgatatcactacaacggctgcagatggcaagtcatccagcctcctcctgtgccctcctgagtctggcttggtgacgcaaaccacctcaagggcagctccttctttttccagcagtcccagcactgttccttctctgtgaagccactttggatggctattcttggcatgatcatagacttttctgctgttgagtgggcaaggagaatagggtagaagcaggggaattgttctcattgctatgcatttatagatcaaagaggagcagatattttatgttaattggataacacctagttctatcaggtcagtaacctggggtccctggggctcccccatgggtcataccagatagatagattttttaaaaatttgttggaattaaagtagaatcaaagcctagtgctagcccagaataagttattcaataaatgcttgttgagtgaataatcatccgaaatgattataatactgcctaccattcgttgaaagcttcagtatgtgggagaatctgtcctgggcactttatatacacccataatctgtttggatttcttggtaggaagactacatggctgcatacatggtctttcattacctccattttatagatggagaaaatggaaatttaaagaggttaagcagtttgccgaaggtcacagagctactaatcggtgaggtcaaggttcagacccaggtct

SEQ ID NO: 29898 - DNA, 1067 bp, Homo sapiens
cccctggtcctgacaaaaaggtggggagcaaaccgcatggctggacgtaaattgagtgacctggaatgactagaacgacagggggcctctaaccccagggtgcacagaggtagggacccaagggctttccggggtcggacagaaatctcgggttccattttcactctgagagacccagaaatgacagagcccatgctcagtttccactggtggtgctgttgagtggaggggctttgaacatggcacacaggaaagggttgcccaccctgtcaccagatgggcttgcactgttttgtggtttgggagttgcatattggaggtgggagtggagtgttgagatgaggcaagttgagatgtaatcgctatttaatgggcagatcaaagaaaacattggctggtttgatttttattatggttatcccgctccaccatcctggcccagtcatatatattattgttatcaggcatagataggggaagcaattaaatgtgaaactgttatttaaaccggcaagtgtcagaatgttaacccacttcagagcgaaggctctaccagcaacatgtgtgttcactgcagaatgtgctggttacagatgatctttatctgtttgtcaaagcatttgcaagatctctattttatgtcatcccctttccctgaaagcagcagcagtaaacgacattgctcctcaaatcatccatggctcagacctctgattaatttaagctggccctgctagcgttcttataaatccccagcaagatgcaggcccaggagtggaaaggggaaaacatccggaaagcagcggggggcagggagggggaaggctgaagggaaaagaaaaaggctgaagggagcaataattgaggaagaaagaataggaaaaatgtagaaaggacccaagaaaatcagagaaatgagaggaaaagaaaggtaagaagaaaatgaggcaagtttacagagcagtaatgaaaatagtaatagctaatttactgtacaacagacactgtgctaagcactttccgtatgtccctcagtcctctgaccaacactatgagttaaattaccg

SEQ ID NO: 29899 - DNA, 1032 bp, Homo sapiens
aggatgaactttttttcatacgcttattagtcatttgaattgcttcttctgtgaattgtctgttcccaatttactaatttacagagagaaatgtaactgccaaagggaccggatacacgtgtcctccagccaacacgtcagctccctgcaggcacactccgcagaaagccaagttcaaatcaaaatggtgcttggtgagcacagaatgagaagggaggggtcagttatgggactccagtgtttagcagcatcggggcgagctagacctaccacgaggctcccccaaatccttggcctgggtcctctttttcctcctcttccctctgcctccctggctacccaagctttcttcagaaggacatgtatatgttttctttagaaactccactgcatccatttagggctgtctctggcctagtttccctctgggttgtatacttgaactctcagagggcaatcttcattccttttttaatatgtatttttttgagacagggtcttgatctctcacccaggctcttgatttctcacccaggctggagttcagtggtaccatcatcacggctcactgcaggcttgacctcgcaggctcaagcaaccctcccacctcaccctcccaagtagctgggactacaggcctgcaccaccacgcccagctaatttttgtattttttttagagatgaggttttgctgtgttgcccaggcaggtcttgaactcctaggctcaagtgatccgcccacttcagcctcccaaagtgctgggattacaggcatgagccaatgcgcccaacggcaatcttcattcctaatcccttgcctccttcgactgcctacccaggggtttgcaaggggtaactcacacgttttggggtgtctgcctccctggttgtctgggaattgtccccttccctcctccaaagcaactccagggggtctgccaaactccacaatgcagtccatatttggagcatttatatacttgagcatttttctggagtgagaatcaagcctctccctagaccctcatagga

SEQ ID NO: 29900 - DNA, 1021 bp, Homo sapiens
ttctttttcatggttatctttgtaattgatgtatcatttcctctaactcctctttagtctgtgtttttctgtgtcctcatataattcctcagcttcttccttgagaagttggatactgatatcatcacacgttggataagccttttcttaatggtcatgacactcttaaagccactcaccttcccctccctcagttttggccaccttcttgactgtttcaggcttgatggcatcccttgccaatgggatgcaagtactgagtgcaggagccacctaagtaattagtcttattttttcccttgtgaggattcggagtcatgtaggttaaacgtgtgtatgatttggccgcactgtatcttcaagcaccaggtaagctctcagttgaaatcaagtctagacctagtactgggggagcagcagattcaagtttcccatctcattccaggacagctgctcctcgagtggaatgtcttgcaccatttacattgttttcccatgtatatggttacgttttcctaggttaagtgcatctactgtatctctgtgtctgcatcacacaatatgttcacatttacttccctcctttagacattagtggataacagccagttccgttagctccaacctgctttctgtgcttccagctatgttatatacttgttttgtctccttggatccaatgtatggccccagagggacacgtactggctttggctttctgttctccctcatggtgctgggtgcacagtgggtaattccgttactgctcaataacccttcaccgtctgattttgagaaagagtcatcagacaaaagtagatagaccctgcctgtgctttcagcagaatctagagagagggcatgggcttgggagttcaacagacctgggtcacccgatgccaccacactcggggtcgtctacaaatctctctaacctgaatctgtttcctatttgtaaaatggtgttgctactgctcaccctgtaatactaattatagctgatacatgaatggtacacgct

SEQ ID NO: 29901 - DNA, 1259 bp, Homo sapiens
tgtttccagaattagaatttgtaatagccatgacatgtatgtgtgtggttctcccttgctgattctctttaatttataaatgttttagaatatttatctaaggaattctcatggtaattacttaagaaccaataccagcatgttaaaacataattagaaaggatcttttaaaggttttattgtaagaaaatatacagattaaaactgcactgagataacatgtcaacaatcaggcagaaatccaaaagtctgacaatatactgcattggtgaggacttcagaaacagaccttctcttgcattgctggtggggtgcttgtggtaccaccctcatggaggtgaatttggcaatgtctagcaaaattacctatgcatttactttgttttcttttcccccattcctctctttcctcagtccctggtaacctttatatgttttctgtctatgaatttacctattatagatatttcatatataaataacaatcatacaatatttgcccttttgtgtctgttgctttcacttagcatattttcgaggtttgtccctgccatagtgtctatcagaacttcattccgttttatagtggaataatattccattgtttggacatagtgcctttagctcatctgctgatggacacttagattgtttctgtattttggcttttctgaataatactgttgtgaatatttgcatacacgtatctgagtctatttttagttgttttggatatatacccaggagtagaattaatgggtcatatgataattgtctgtttaacattttaagaactagctaaactattttccacattgaccgcatcattgtacattcccaccagcaatgcaccaaaggttccaatttctctacatccttgccaacacttgtttaaaaaaataatagtcggccaggcgcggtagctcacgcctgtaatcccagcactttgggaggccgaggcgggcagatcatgaggtcaggagttcgagactagcctgaccaagatggtgaaaccccatctctactaaaaatacaaaaattagccgggcatggtgctgtgcacctgtaatcccagctactcaggaggctgaggcaggagaatcacttgaacccgagaggcagaggttgcagtgagccgagattgcaccactgcactccagcctgggcgacagagcaagactccgtttctaaataaataaataaataacagagcaagactccatttctaaataaataaataaaataaaatagtcatccta

SEQ ID NO: 29902 - DNA, 1088 bp, Homo sapiens
actcaatggcttaaaacaacagaaatttattgtcatggttttggacaccagaattccaaactcaaggtgtcagcagggccacagtccctcggaaggctctgggggagcatccttccttgcctgccttcactgctggctcctggcaccccttggcattccttggcttgcagatgcatcactctaatctctgcctctgtggtcatgtggcattctcccttgtgtgtttctgtgtgtctttgtccaaattttcctcttttttttttttgcattaaaaaaattgatacataatagatgtatgtattttcggggtatgggtacatgtgatattttgcctcttttaaggacaccagtcactatgtccttagatcaaattgattccatctgcaaagaccctgtttccagataaagtcatattcgcaggtactggggtgcgtaatctgggaggtgtatgttgtcctactattccttagtcaaggccccgcagttacagagttgcactgagaagtgaaagcgataaactattcactaataagcaggcctggcatgaactcaatctgcattcagatatatctctcttccttcctcagcgctcttgatatactttattgtgttatcaccttagttgattttttccttcaattctcctctagtctaactgccagattctcattttttaatccctttgccatactttgatcactttcatagacttcatgaatcctgcatcttttttgcaagatttaaatgttcaatttgccgtcaatttgcattgaatttacattaacataacaaaggacaaagtgacataaacgacacatagtgacagtgcaggaatgttgcttgaagggggtatgcttgtggggattaattttttataagaaattttcagattacagctcatttccccgtgtgaacctaaggatgtttaaagatgttaccagcacagttctatcagcaagctacatacgtcccccaaccaaaaccaatacttgatttattatttgttcacaacacttggaatcacaatctaaattttgctaaatataagaaaaattgatgcatgttcatatttttagattaatttttca

SEQ ID NO: 29903 - DNA, 1535 bp, Homo sapiens
ttcactatgtgtcaggcattgggtaggtgctggggacccaagagcgaggaaaagacctagtccctgttcttgaaggatttacagtctagtgagagaggaagagaagtgaacagttgtgctgtcctgtagtagtcggtgttgtgatagagataccatcaccattatagccaacaggtgctgactgctctggcagtgccattcccagtctctgagcttgcctgcattacctcctttcatcttctcaagaaaccttcgagggtaggtactagagatgtttctgtttcgtagatggggactcaggggaggcttcagtagcttgcccaagattacgtgggctcagcgccagagcctgggagacattgatatgggtgtgcacaccagcactccctgagcaccttccagtgctaagtatcgtgccagtgatgggcctgtgtgtcatctcaggtcctcacatcactgccatgaggtgggtcctgttcttatccatcttccacaattggaagaactgaacacagggaagtgaagctccttgctcagggtcagtatgtggacttaggcactgtggccccagaacctatgtgcgctaaccactctaaaccactctgctgtgcacttccagtgataaaggggcattcatcagtacaacaatagggaacggtgccctgtgcaaatgggagaggtgtgtgttcaagggtgcagaaacatgagaagccttggcgtgttctgatgggcacgtcctgtgtccttgcggtcctggatggtgctgctttccccagtcctgtcactgcttccagtcgtggctgctgcctcatccttctgccacgctcccccttaacactttctgcattttacttctcatttctcttcctgcaactgctccagcatctgggattgatggcaacaggacttggctttttaaggtgttgccagccagctagaggacgccttcagctctgacccatgtgtcgttgtcttagtcatttgtttgtgtggctcttttcatcatatctgacttggaggctttcttctacatgctcttcgagcctcagtctcctttgacttttcatagcgatcctctgagaccctgaaaagggaacacaggtatggcctggttctggtatgtgacagaaggcacagaggtagaagtgctaagtggcttagctcagagccacacggaagagccaactccaggacctagacctccagaggctgcgttcatccctgcactgctgcctctgctctcaacagcaaattaagacatttccattcattaacatctttttcaagataccatatattgagtctgatttatttttcaagccactcctaaaaactccacaatgatatagtagtattgattgaacacttcttatgggctatgcactttacgtgtcttatttaattcttgctgcaaccccaggaggtaggtgcagttatccctggtttgtagatggtcactgagccttagagaggtggggtcatatagctggtatgagaacgtgatggagcaaggattggaacccacgtctgctttg

SEQ ID NO: 29904 - DNA, 1077 bp, Homo sapiens
cattgtgttataattgtctacagattcagcacagtcacgtgctgaacaggtttgtagcctaggagcaataagtgatatcacatagcctatgtgtgtggtgggctgtaccatctaggttttgtgtaagtacactctaccatgtttacacaacaacgaaattgcctaaggactcatatcttagaacgtatcctcatcattaagccacacagactgtaattgttactagcataggtaactttgtgatgcttactgtatgccatacaccgtgctaatacttctgccttcaccataatccccatttttataaggaaattgacataaagagttgtcccatggtcttggcactgctgacttgaccttgggtccatctgctgccagtgttcttgcttaaactaagctgtgctgtgtcggagcccatcatcagaaattacttgccttgtgggtgtgagctactttgaagctgtgtaatgctccaggtgcatattggattaaagatgtgtgtttgattacaggtaatgtcatttgaggactagaaaagatctcaatttcccctgatgtcttcattttaggattttggaaacggaggctcagggaagttaataacttgcctaaaggcacacaacttgaagaggcaaagattgggcagggaacaaaactcccaagttcacttttgttccagtacatggtttctttccagtacactccatctcaaaaagttgaaaattgtatgtttggatatttacttacatttgtgcctcagtgaatttgagctgacttgttgagtactttaaatacaacttaaataggaaatacagaaaggaaatgtgaccatggaaaatacagacgcaaaacaagactaagtgaagggttactgtgtcgtccttggggccctatatggttactaaagtcatgctacaaatttggctctgagcttcctgagccaaaaagaaacatgattagttacaggattgatgtgtccaaaaaggaaaattctatccattcctcaagggaaacaaaacttttccttgaacttttcttttttttttttctttttttttttttttgagacggagtctc

SEQ ID NO: 29905 - DNA, 1030 bp, Homo sapiens
ttttcattaatattttctcaatagcaatttaggggaatttagaatcagatgatgcaaatttcattttctgtatatttgttcttggtaggacaaatattctttttaaacagatttatttcatgattacttttaacatgctttttctgtattttccagttattctgtcattatcgagctagttgatgaccattttgaaggctctctccgcaggcctctcagttggaagtccctggctgccttgagcagagtttccgttaatgtctctaaggtaacacaacatcagctttgccattggagtgtcacttaaatggttcagtttttttttttttcttaaatgtagtagaatcaaaaaagttagttgtagaaacttcataacattcctgccagtgacatgctggaagatttggggtcattcgtacccttcccttattgcgctagaagttgtcctcccctcatgttacattttattgtcccctccctcccaactgctgctgagctccaatgacggagctttggagtgtcccatggtgatctgatctgggtaggcattgcttctcttcccaggggtatcgttgctatgtgacttgttttatactgcaatttaacattcactcatacacatattcacaaaggagtcaaaacattgaaagtttgcagatctcttagagaggaagggacttgatatttgttgctaagcactttcccaccctgttgttatcctcatcctgaggatgagaaaccaaggttggagccgttgagtggctaatccaagatcacacagctcatgtgcatactcgggatccaaacccacagctctctggctccctggcttttgtttcactatatccttcgtgttgccatcagagataggagggactcagcttacacaaggactatcaagaaagaaagctgtgtgtgttctcattactcagtgatttgctggctgaaaacaaattgtagataccctctaatttcatcctcatgctgctggaggtgaggtggggctgaggccagagggtcttgcagggct

SEQ ID NO: 29906 - DNA, 1787 bp, Homo sapiens
attaaagttcaggtgggtaaactcagagaaattcatgtcatcccaaagattctgtgaatcatagtgtatctggaacatgtggtcccaagaaaatacatgaatacagttttgccttggtaacagagccttctcaggcaggctcttaagtctctcaccttttccccattgaacccattggacacgaaatctatgctgacttcctctattccttaattccccactttattacctgtgatgtccccatcactcagctgaaactgctctcttacaggtggcctgtgaccccctggccaggccaggacttctcacaggtctcattcccagagaccagaggtgtccctgttgacttgttcctgcttctgggcttctgtattgaaccaaggcgcctcctgtcatcttggcttgtttctctctggtctggccgagttgtctagtgtgtgtccgtgtttctgcattccctccctctgtgtgtagagccttaacgttgccattggctcctcccaacatccagtatgtctttgttgtcgtcctgtcttcttttcacaccaccctgcccctgcagacctgctggtcggtctccagggccccagcacgtcttcccttcagttggtcccacttatctccactaggctagtttctcataaaatgctcatcaacctcatttctcccttctcagtagctggccccgttacagcaatgccatcacagacctagctctaatgtaaaatgctagctttcatcccgcccacctgtttctgaaatgtgctagtagaataccacagcagaggcaagcttagctgttaaaatctttgcctggtgaaagtagatactgtatgcttgtaaggtttatattgttacattcattttctccagatgtttctgttctaaaggtgggaacagtatcatcattatatagaccgccctttgtgaaatgtagctgtggtgtcagctgtggtgtcagaatggtcttacatttctgttttaagaaatggtctttttttttattggttgtaggaggtgattctgagtcgatgggtttcttcacgagagaggagtgaccaagacgatctttaacaattcaacctcaaatttctaatttcaccaacaactatttattgagggctaggtaaaaagttctttttgttgtaatcgtccattaattcataagttttaaagggcatggtgctcccagcaccagaaaactatcagtgtttttaaagataaattacacaagggaggagaaagatccctgtgctaggactgcagattctatacttgcgttggcctctaactctccaatccagagcctcctgcctctggcgtcagtcttttccctcatccactcactggggagattggactagaggagtcctgagaggacacttccaacaagagacatttattctctgattttacctgaaaatggtagtagtttacatttatacagtacagtttatgaagcactttcatacgcaggcatctcttgttacctacatctaagctgttcccgaaagagtgttacagaacacaacagtattgtacaatattcgataagcatatcttcactgcacttgttataaaaatgagtggtgaaataatgtttggagacataatgaaagcgattaacatttggcaaaatataataaagcctttttgtaattggtgagaaagtcatgaagacttaagttgcctcagggcatctggtggcaagaggagggagatgggtggctgggcatggtggcccatacctataatcccagcacttgggaggccttgggaggccaagg

SEQ ID NO: 29907 - DNA, 1030 bp, Homo sapiens
gtcctcttgaccactgcagtgtggcccaggggttaagggcacagctttcatggtcaaaccctggtttgaaccccagttttgccactgtatgactttggacatttcctcaatttcccttttcatctataaaagaagcataatgttaagacccacctcagaggatggtcttgaggattgacaaggaagaataagtgtttcttctggtggggagtcctttatgaatactcattaaatgcagctgccgttactactaataatgagtaaagaattagactagagaagctgaatcctagtataaaatgtgaagaaatgggggcaaattggaattctttcatctttaccctctggggttttgttgatttcttgaacaccatggaatactagtcatagttctgcttaaaatggtatcaaattctgggtgggcagttttgtgtttgaaggaaagtacctgagcttgtaaatgcaaatgtcgctatgccatgcattctttcccattgacgttaactgtgctgaaacatggactaaatgcctatttggaaacaagctttaaggatctgtagcaagttttctgaatatctttattactaatgttaaaggataaaacacattaaagtttatttgagcaaacagccattcgtgaatcaagccgcaccaaaactgaagtggttcgggctcccgaaagagggtgtgaagggaggcttttagagggtgtgtgaggaggcacaggagagaagttggttggttaaagtttgagcagttgtcttatttaggttatcccagtggcaagtatctgattgtgtaactaacgctcagttggccatttaggattggctgatctgaagtttcatttagtttaatttggaactgggtgttggatccatctcggtgtaatggcttccccctaagttattttaacacgaggcggttattggtacctttaagatgggtttcatttttggaaattagacatcagttagtaccaaggctggggaataagattaagtgaagtagtacatcacatttggtcaaa

SEQ ID NO: 29908 - DNA, 1027 bp, Homo sapiens
gtcggctgagcataggattggaagtcagagggcctggttccaaattctgcttcagacacaagatgggaggtcttgggcaagtcaatctcactggacatctatttcttcctcttttaaaaaccaataaaaaatgtacaggtttgtgaggctcctcactgagaaaacgttaaagagctttcaaatattttgtattgttagtgataatttgccataaagtcaaatatttctcatttgtgggcaatgcctacctcatggtgcagtacaagaacccagtgaacaatggaatcacttattagatgttgccataatcaaatctccacaaatactgctttccttttgctgggtagtaggggttttttaagctacaaaactgcacttaccatttgtgttagttattccaacatgaagatcagaccttccatcatactctctgaaagaaacaaggtttgtttttttttggtttgcatgtatttggcatgaagaattggcatttaaagtaggaggatgccgagcacagtggcttagacctgtaatcccagcactttgggaggccaaggcgggcagatcacttgaggccaggagtttgagaccagcctggccaacatggcaagaccccatctctactaaaaatacaaaaattagccaggtgtgttagtgtgcatctgtgatcccagctactcgggaggttgaggcacaagaatagcttgaacccgggaggtggagattgcagtgagccatgatcgcaccactgcactccaccctgggggatagaacgagagtctgtccaagaaaataaatagagccagctggatgcagtggctcacgcctgtaatctcagcactttgggaggctgaggtgggaggatcttttgaggccaggagttcgagaccagcctggaaaacattgcgaaacctcgtctctactaaaaaataaaatacaaaaattagctgggcatggtggagggcacctgtaatcccagctactcggatgactgagacacgagaatcgcttgaacctgggaggcgga

SEQ ID NO: 29909 - DNA, 1095 bp, Homo sapiens
attacaggcgtgagccaccgtgcctggcctaattttcattttttaaaactacttttcagccttattcttatgaatatatagttataaaattgtacacaattccggaaacttgttcatgcttttgtagcaaagagccgatcttttctttctagactgcaaagcttccttccctcctttttctctgcagtgcagtgggagatgatggaagtaggcccacgttggtcttcccctgtcaatgagtgccaagagagacagtcagggagagatcattggcccttgtcagcattttggggactcctgctcaaaagaatactgggtcagtcaggcatcaggagattttagctcaacatctgtttggaactttcaggttctctgtgtggtctggtgctgtgtgtctgtcccactcaagtcccacagagacacttaagcataggtgatagatagcaaatgtccccctcacaatgaattgccaagcatctgttaataatcgataatcctgttagagtttaaatattggaaaagatggccgccttcttcacctcaacaagtgcagcagaaggagggccattggcatctggggagtgtgggagatgtgtgtgggtggcatgtctgtaatgcatctgctgtgtgttttgtttagatatgaccacacgaggccctctgctgcagctggaggtgctgtgggcaccatggcccacagtgtgccctccccagctttccacagtcctcaccctccttccgaggtcactgcatccattgtgaaaactaactcacatgaacccggaaagcgtgaaaagagaacattggttcttagagaccgaagtgagtaagcggaagccttttgttgcgtctttttgcatagcactcttgttaatgcttggtgctcctttctagcctcctcttgtcaagaggactcctaacctaatacacctccagattgtctgcgcggagagacttcagaactgttctgaagaggctccatgtggctgcagatcattcaaatgatacattcgccctcgtgcccaaggctgggttgagctccaagactggcctggtaaaacataaaaacacaatctttttgtcaacatgtaactt

SEQ ID NO: 29910 - DNA, 1080 bp, Homo sapiens
tgggtatccatgtgccacggtggttttctgcacctctcaacccatcacctaggttttcagccatgcatgcattagctgtttgtgctgatgttctccctccccttgcccctgcaccgacaggccccggtgtgtgatgttcccccacatgtgtccatgtgttctcattgggaaaccctattttgttaatagtaaataaggttcttggatgattgtgatttcatcttttggaatttctggtgaaggaaatgcctgtagtggtgaggcagttgagcaagaggtttagcagagagtgtgcccaggcttcgtaacatgacttctcccttagtaatctaattcttatttcaggtcttgtccagaatgccgtgtgatatcagagtttgtaattccaagtgtgtattgggtggaagatcagaataaaaagaacgagttgattgaagctttcaaacaggggatggggtaagtgcttttgagtttcgacgtgcccctgctgcctgcctggctctgctgtcagcccgtgtcctcgttctccttcccaggagtgtggtcttaggggcctcttcctctcttccttctctcaggcaccatgctgggctctgggatgcagcaatgagcaaggacatggtgatgtggacctgtttagttttggtgttttttttttttttttttttttttcggtgagatagggtctcactctgttgcccaggctggagtgcagtggtgcaatctcagctcactgcagcctcagcctcctgggctcaagcaggagcctcttgagtagctggggccaccagtagtgtgcgccaccatgcccagctaattggctaattttttttggtagagacaaggtttcgccatgtagcccaggctggtcttgaactcctaggctcaagtgatcctcctgcctcggcctcccaaagtgctgggattacaggcatgagccaccgtgcccggcctcaaatgttcctctttatcctggttgtcagcatgttgatattttgcctaggagtggagtggtttttctctacgcttatgtcactccccaagatgagcgaaattttagctattgtttcattaactttt

SEQ ID NO: 29911 - DNA, 1050 bp, Homo sapiens
agaatgctctcattagctgtgtctcaaagacacaggatgtaccctgccccccaccatcttgtagaggacctgggtcccctccctataaaacaaaacaaaacactcccaccttatattgccatctttacgaaccaacccatgctttaatcacattctagcagccctgagccttacctggggaaaaagaggcctctcttcctttactttcttcacacagtcagctaccagcctcttcattgctttggggcagttcttatatagcttactaagatctggggaggcatatcctcggcccaccatgaagatgatctaagggaaagaaaacagctgagctaatggggggtgaatgaacaacagataataacaagtcctaaccctctagctgcttaggctggcggaggcccaggggctcccacgagttgggtcctttcgcaccagcacagacttacctgatctcggttgttgatgtgagaataaggaagctcccccgtcatcagttcatacaatacgatgccataggagtagacatccgactggaaactgaatgggttgttatcctgcattcggatcacctctggggcctacatgtatcaccatatgacaaaagtgcatttatcaccatatgacaggcctcacagacatctaggggccaggctgtccctttcattagttatgaatgagtccattcttcagtccccacatagcttttcccccaaaggactccaactcaggcactggttaaaacagctcaggaatccttgtctttaaaggaccaagacccagcatttctgtcacccagcttattaactcctctccacactaagcttcacagtggttctgatcaacagcttcctcaagaaaatctacaattgccctgaggctggctgtcactaggggtcatgtggatttcggggaaatgtacagaaacgctttaagtttgcacataaatctccaaggcattccttttgccctataccagagactgctggtgggagcccagattctcaccatccagaggacagagccagtaggttgttcaacctgctgaga

SEQ ID NO: 29912 - DNA, 1050 bp, Homo sapiens
tgtactcaagctgatttgaatggcaaagaacctctgtggggaaactagccagtgcaaaagcccagaggtggagttaggaaatagctggtgagacagaagcctcaggagacctcgcagcagggatttatgttggggaagatgatggggcagagaggaagccaaagaccagtgaggaggcagtggtgtgggccaggctcaataaaggatggctgcttctgctgtttcctactttaggtcaaagctggttctgtgaagcaggagtttgaaaagcaagatgaactgaagcgctctgcaatgagggcagtggctgccctgctgaccatccccgaggtggggaaaagccccatcatggccgacttctcttcccaaatcagatccaaccctgaacttgctgccctctttgaaagcatccagaaggattccgcttcagcccccagcacagactcaatggagctcagctagtcccctcagcaccaaggtgggccctcgcttaagagaaaggagcccacccaagtccgaggcctccccatcccaccatcgcaggtctctacttttgcccttccaccatctcactgggggccctgtcgctcctggtcagggcttacagtgccttctccagggacccaactcaaaggcccccagcccaagctgtgaggctgccaacagttgggccccttccttaactcaggacagtcatccaaagaaatagggtgaggaagttttccagtgacttcacactgtacccctccatagtctgtctggttccttcagagggtgtctctgcctcacaaactagtagtatttagaaataggctgtgctgtcagctgtaaaagatcaggaggcagcagacaccactctggtttcttcactgcattcagcaatgcctgaagttagtgctcaggccgggcatctcaaaagaaaagatacttgagttattcacattttaaaattcaaaacggttcatttttaagtggcagtgatgaatcagaaatttggaagatgatacgggtttcttttttccagggaggaggaatgggttgggtagggaa

SEQ ID NO: 29913 - DNA, 1034 bp, Homo sapiens
gaatcctccccatagctccaaattaactgttctcaccctgaattatagacaaggggcctatgctggagcagggagggggcttgtttgggttgctcagccaggctggaactgaatccagatctgacacttgctcctcttccatgttgcttagaagggttgcctgtggtggaagggagttattccagcctcccacagagccaggggactagagagggtcaggatctgctgtatagccacatattaagttgtaggaagaagggcatggctggcaaagggagtagggagtggaaagaatgatggtgctgatagcacctggcagttctgcatgctccaacccgcgctgtgctccaggacttactccctgaatcctcgcagacagacaggggcccacagaggtgagggcatgcaaatagcaggggcagaattggcgctggcctctggtctgtggggccccacaactcccctgccactctgtgcctggccttgtgctgggcatcaggaactgactgacctgttcctatgtgtgcctgctctcatggggcacatagactgatggggggaagcaggccattaggagaagggggaagcacaggagaccttcctggggaggagggaatgaaggcttcctggaagagggggcatttaggacttggccttgtaggataaggcagaggttggggactgaagtcccagggctgtggggattctctccttaacccctacacatttcctagggaatctgggaaaatccagggcctgagtgacccacttacctcctgacctatgacccttcagggcacaggacatgccccctcctccagggagccttccctgaccacctcctgcatgcacacatggagccccacagctggagctgcacagctctccctggcaagtgacatctttgctgggtggcctgattacccacaagcattaggcccccctccccgcccctcgccagccagctgggagttgctgtagggctgggtcctctgtccgccccagatcctcatgtctaccctctcctccctggc

SEQ ID NO: 29914 - DNA, 1004 bp, Homo sapiens
atacaaaaattagctgggcatggtggcacccccttgtaatcccacctacttgggaggccgaggcaggggaattgcctgaacctgggaggcagaggttgcagtgagcagagattgcaccactgcactccagcctgggtgacagggcaagactctgtctcaggaaaaaaaaaaaaaaaaaagaaagaaagaacaacatgccctaatttagactgacactattgattttctgatgacaaatctgtgaaaatatgtgactgaaccaattatgcaatgttatgtacctcacatttataaataagtagatagctgtattaatcatgtgaaatattccacaactagctcttaacaaatttcttagtagaattttaacacttggaccccataactgggaaaatatccttgctgacttaaagaagacatgaaaggttgaactcctatggagaaccaccttttatggtagaagtggagcgacgtcttctaattatatctgtagaaaaattattctaatctatttaaattatgaatatatttaccactattttcatgtgcctaagaatgaagagagaagaaattttggaatgtggtcctgctaataattgatgactctactcacttagactaggtttttctggcatgagttccaactatataaatatcttcagggattcagagaaaaagttttaaattccatcaatgtcctaagaacagagattgttgaaagtctactattttggcattcatttctcattggtcttttaggcatgaacaaatctgaaaatttattaaaataacggcattctctcaatcacatgtatgaggaattatataataataaaaataatggttgcaatttcagtggagattattatttatcaggaactatctatatttgatacgtttacttaatttttttgcacgcataccatgatatggtttggctctgtgtccccacccaaatctcagcttgaattgtagttgccataatccccacgtgtcatgggagt

SEQ ID NO: 29915 - DNA, 1766 bp, Homo sapiens
ttgccgtgtgctgcttctcatcactgcacacaagtgccatgctttgccaccaccaccaagcacatctgtgatcctgaagggcggccgttagtcattactgctgagtcctgggtcaccagcagacacactgggcatggacccctcaaagcaggcacacccaaaacacaagtctgtggctagaacctgatgtggtgtttaaaagagaagaaacactgaagatgtcctgaggagaaaagctggacatatactgggcttcacacttatcttatggcttggcagaatctttgtagtgtgtgggatctctgaaggccctatttaagtttttcttcgttactttgctgcttcatgtgtactttcctaccccaagaggaagttttctgaaataagatttaaaaacaaaacaaaaaaaacacttaatatttcagactgttacaggaaacaccctttagtctgtcagttgaattcagagcactgaaaggtgttaaattggggtatgtggtttgattgataaaaagttacctctcagtattttgtgtcactgagaagctttacaatggatgcttttgaaacaagtatcagcaaaaggatttgttttcactctgggaggagagggtggagaaagcacttgctttcatcctctggcatcggaaactcccctatgcacttgaagatggtttaaaagattaaagaaacgattaagagaaaaggttggaagctttatactaaatgggctccttcatggtgacgccccgtcaaccacaatcaagaactgaggcctgaggctggttgtacaatgcccacgcctgcctggctgctttcacctgggagtgctttcgatgtgggcacctgggcttcctagggctgcttctgagtggttctttcacgtgttgtgtccatagctttagtcttcctaaataagatccacccacacctaagtcacagaatttctaagttccccaactactctcacacccttttaaagataaagtatgttgtaaccaggatgtcttaaatgattctttgtgtaccttttctgtcatattcagaaaccgttttgtgcctgctgggagtaattcctttagcaattaagtatttggtagctgaataaggggtcagaacttctgaaaccagagatctgtaatcatctctattggcctggggtgcctgtgctataaatgagtttcttcacatgaaaaacacagccagcccaagatgacttatctgggtttaggattcaatagtattcactaactgcttattacatgagcaatttcatcaaatctccaaactcttaaaggatgctttcggaaaacacgctgtatacctagatgatgactaaatgcaaaatccttgggctttggtttttttctagtaaggattttaaataactgccgacttcaaaagtgttcttaaaacgaaagataatgttaagaaaaatttgaaagctttggaaaaccaaatttgtaatatcattgtattttttattaaaagttttgtaataaatttctaaattatcttctggtgtgggactttaacaaacatcctatttttagtttcagattttttttttttggcattctttccaaaatgtctgtaaagaattcagccataggatttattgagaactgaattttgtggaaatctgagctttcagtgcttaaaataagttaatttttttttaagggcaactcagtatctagcactcagaagtccacactgaagcccactttgttttggcttgatttaaagtgaatgactcaggcttc

SEQ ID NO: 29916 - DNA, 1025 bp, Homo sapiens
ataggtgtgagccaccgtgccagccggagggccttgaatgctgtgtaagtgggtttgggctttctcctgatggcagcaggagtcatactgggtttaaggatagtggggcagaagccagtcaagcctggagcccaggagaaccctgatggtgagtaaggaacggaactggggtccaggagacggagagtcaccgagccactaagcattttctgtaccaatgagtcttgccctgaactctttctgtaaacatgggggtgaaggcctggacatgctatttaaccggtacacaggccattaacttgctggctttgacctccctggagcacacagccctagtgtctctaggtgagttatgccagtcctggacaggtctgcggagtttcctttcctgccttacctggtcagaggcttcatttggaaacctgggcagaggctgatgccaagggtgggagttagggttacgagagggaaagcagagagagtgaggaattgctgttctgtttctaaagctccagcgttgtgtggccaaccacccttctcttggaaaaaccaacatacaaataataaaccacctgaaacaaaagagtggggagggaatgatgggggaggcaggtgggctgccctaactgtggtcaggtatcagaattgcctgggatacttaaaaacaaacaaacaaacatattcagactcccaggcccagcctggacatactgaatcagaacctccagggggatggagcctgggaatctgtatttttaaagtttttcttgtggtttttttttttgagacagggtctgacttcgttgcccaggctggagtgcagtggtgccatcacagttcactgcagcctcgatctcctgggctcaagtgatcctcccacctcagccttccaagtagctgggactacaggcatgcaccaccactccaggctaatttttgtattttttgtacggaggaggtttcaccatgttgcctgggctggtcttgaactcctgagctcaagcgatcctcccaccttagatgat

SEQ ID NO: 29917 - DNA, 1064 bp, Homo sapiens
acacgtagtgactctgagtcctcaaaatgctgtccctggcccagcagtatgggcatcacgtgggagcctgcagaatgcagaacctcaggccccaccccagaccttctcatttagaccttgggggcagggctccgcattctgggttttcaagagccctccaggcaattctgctttgtatttaactttgggaagggctgatgacctctctggctgtgtgcctggggccgggggtggggctgggggaagggtcaggcctaatccttgcccgtgataactagagtgccagggctgcgggaacctcaggtgttctgtcatctgcatccttcctcttttttataatgggaggagtgtgtcagagacatgcataaaattacgcagcaagttcaaggcagggtataggtctggattcttatcttgcaaatggcagaaatcagttcaaacagacttcagttttattttttttatttatttatttttgagatgagtctttctgtgtctcccaggcatgagtcaccacacccggcctaaactgacattaaaaataaaaaagaacatttactgactcttttaacttaaaagcctggggccatacttcagcctggggctgagtccaggtgctgaaagatgtcatcgggactcagtttccttctctctgtctcccggctccgggtctctctatgcctgcttcattctccatggatgccctagctgctcaccagtgtagtgccgccccctgccccaatgtagccatctcaaccaagaaagagccttgtttttccccaatatttttggcaaaagtcctagtcatcactgtttttgaccaggctggtcaagtgcctatctttgagccaatcaagacagccccctctgattggctagggctggctcacgtgcccacctaggaggaggaggtggggtcagtccatctagaccccttgggctgagagcaggcctatgtgggtctcctcctggaacaggtttaagctgtccccagaaggggcatgggtgccagcaggctagacatatggactttagtgctattcttttttttttcttttttttta

SEQ ID NO: 29918 - DNA, 1049 bp, Homo sapiens
tggtctcccaggccccatgtcccagggaaccaggatgggaatctgatcgcacaggtggggcttcctcctttgcatctctttgctttgtgaacttggggaaatggggaaggttttgcagatgccagcagtgtgcctcacccactgccagcactgtgacaggatcagagccctctgccgtaagaggtgttccctgggtgccggtcctcatggcaggcttctgtgtgtgcgtgtgtttggggtgaccacacatttaccatctaaaccaggtttaagtgcacagttcagtggcattagtaccttcagacattgcgcggccatcaccaccgtccgtctccagaactttttcctcttcccaaatggagcctctgtccccattcaacactgactcctaactccccagtttgccctcctgccggccccgcacctggctttttgtacatgaactccttaagctgcagtgttgcaatgcctgggtactatttttacccttcttatagctgaggaaactgagacttagagagaccaagaacttagccaaggctccacacagctagtgaagggcttgataccaggtctgcctgtctgcagaaactgtctcttacctgctagtttgtcccaactggccttccccttgaattcccccaaaataacttcctcctgttggaagtatggagatctacagcccagaggcagaggcctcccgctgatgttattgcgtcctgggcaagggagcagggggtgtcaccctgactcatcaggggttcctaccattggcgggaacagtccgtctggcctaagagccatcatactgctgcgcctttcttggtgagacagggtagaggagtcagccatgtggaggcagatgcctgttgccatccaggctacccaagagggacacggttttttgtttgttttgagatggagccttgctctgtcgcccaggttagagtgcagtggcgcagccttggcccactgcaacttctgcctcctgggttcaagtgattctcctgcctcagcctcccaagtagctgggattacaggcatgtgcc

SEQ ID NO: 29919 - DNA, 1053 bp, Homo sapiens
gtggaggcattggctgatgagctgtcaggggtgatggggccaccaggcaatgaatgtgactgcttcttgtccattccatgtgtgattttcctttttgatgtctgaaaactgatttttatgtcctagatgaagaagtagaggatatgtaccttgtggatttcacacagaagatcatagacaagcgcaaagaaatggaggcatctggtgcccatagagattctcaaaaggcaggagaaagggacgacgatgaggaaaaccttcctgagggagagatccctcctccccaagaccccagtgaagaatggttggtaacatcatggattagctcagaggaacatcctcagacttgcgctgacattttgggagtgattttgttgggttgttatcgagccatttctctttattcttcctgggtgttcttttgagacttccctttaagttaggttggattaggttattatagttgtaaaaacagtagctcaaatgaagacataattacaataattacaataattacatataattacaaatactgactgggcttctgctgtgtgcccagctctgtgccaggccgaaggaaacccagtgcctggcagacttggcttgcctggctcactaacatgaaacagtgagggcagagcgccttccttttgtacctgtgctgctgccttacccgtgttcttgttctgacatggtggagagctgtcatctaggagaaggaagccggcagaggtggcacagtgtgttttactccgcctgtgacattgtttggcactgtggtgtggactcgtgggccttggatggttccatctgcaccttttactggctgtatgatcttaatcaggttccttagtctttgaggctcaggatcttccattataaaatagagattataatgcctcattcccatggccctttgctttaacacccccccgccccccttcaagaagtaagtgttccaggctacacaagaaagtgcagcctgtggagtataagcaggcattttgtaaacttttattattgtcattttcctgaattttgcctatatgtaga

SEQ ID NO: 29920 - DNA, 1050 bp, Homo sapiens
ttgggtagaattataccaattagaggaaataagagaaagaataaaaagtcagacttgaagactgtgaggaaatgagcaagttgagaatctcaggcacaaggcaaagttattaagatactgataaaatgtctggaattgtctcaactaggttaaagtaagttcgtagatgctgcagcaaaattccgtgtgggtgatttatctgtgagatcaaaggcataaatgatcaaaattattgttaacagtttctaaaactaatatttaataaggggcacaatgagcttattgtgtgtcagctttaaaaagcatattcctatcagtggtagtggtctctgaggttgggggctcttcttggtagtgaggcctatcttcccccttcactgttcacctactccctgacttaggggcttgtacatgtgtacaagtccttcttcacatctttttgctttcatttcagggtggattacgtggactctttggggcgttcccggcgctgtatgagaaaggatttgccagatctgctggagatggataaaaatcttcaggggagactgtaagtgtgtgtggtatacagagctctgccaaggtctgaaatgcagccacagggattgttttgtgaggggaggctgttttataattaatgatctctgttgctccagtaaggagatattgattgattgattgattgattgaagcactttttagtggttagcatgcacatacacacataatccacacttggggaacaacctgactggtggatgagtagagctgtctcttttacttggaaggatgtctgacaacagagtaacagaataaacccaaacgaaaccagcaaaccaggctttgtggagacaagtggtttgagaatatacacttgattatcccacaaacaagtggctctagggagagaacttactcactttttctttatgtatcattgcatttttgaagtaagggccttataactagatttttcagcagggcctaagacctaagacataactctaaaacgtaagacctaagagataactctgaaacatccaggggaat

SEQ ID NO: 29921 - DNA, 1050 bp, Homo sapiens
cagattcaagaatcaatttgcagatggattgaggagttacatatgaggggaaaactggaacatttctaagaaaatatttacagttacattcctgggataggacaggattttcataaatgaaagtacaaactgtaaaagaaaatagggataaatttagccttattaaatttaaggacttctgttcatcaaaagacaccttaaagaaagtaaacagatgaaccacagagtgggtgaagatatttataacttatcaacaaaaaattaatgtccagaatacttagcttttctaaacttaaacagatttactgctgcttctctgtgacttcatatctgtagtcacctgttgttagatttatcttgggatccccagccctacctgaagttgattgatcctgcaaatttaaagtgaattattacagaaataattctgtactaggcctctattaaatcagattgtcatctataaaatccacttttactcataatttgatgtatcaagccacctcttttagggaacccaatagaaagatacacctttctagtactctgtttctatactattcaataatattttcctaacaatattcctgtaataattcaaattcacatatttcttacattgaactatagttaataacagaggagaaattctgttgacatctaaaagtgataaaaattattagttgcagccacatgtttagatttattttttaatgtacagtacctattggctatccatttctttaaaaattcttattttctgttttgaggaagaatcagactctagacttttacatgcaatacttgtatttttaacaagtcagttgacttttctggtagacttaaagacgccttttccttccatctccattagttgtaaccaaactatagcaagaaaaaaagaccaaaaggtatctttgtgtttttttcttgtagaaacaagtaaaagttaagtttttaccatctattaaaacaataaacttatctcctcagtttcagacctaatcatattttgtgaaaatgagtaactgatactggtggtctcatgtc

SEQ ID NO: 29922 - DNA, 1575 bp, Homo sapiens
ctaaattgaaatgtttctacaaattaattttggtacctgtaactgaaggaggcggtgcagcatatacagataggtctagcttgctaggtctgtctgctatagagggcaaaatccacacaagacagtaccaaagatgaattttgattactaatatttttcaagtagtctggtttctccccacctgatagaggttgctacatctttccaaacaggttctctaatgatcttggttcaccatggctacaaatatggaggggctggttcagcacagagtggggacccagcaggtggctgaggtgagtgacaggggctagcacagtagctggcaccctcactttcgaaagaaaagaaaaatcagtgtgctcatttttttcaaaacagtcccttggaggtcagcatgtgatacgtcctagggtgctgtcatgggagaaaaaaatgacaagaacatttatttgtaacttttttttttttttttttttgcatgagtagggtggcctatctgcttttaataaggtgacttgaacttttactttaaaccgaaaactagtagaatctgattattattgaaccttgtgggtatagtttaaactccaaatctcttagtttctcgtacgcttgattcttcgttaatattatggaatagtagaagacgtgattatgtccattcagcagtcattgaccatttgccatggaccagggattgtactaagtgctgagttatatgggggtgaatgagtcatgggttgttcctttagtgatctcaaggcctggttaaggagttattataaaataggttgagaagtataattccatgtgagggatttgatcctggaggtggatcttccattatgagtaagcatttgtcagacccaagtaagtggggtggggaactttgtggtagattctggggagagcatcctaagtcagaaacctatgtaaaaggacgtaggcattaagtagcttggtatgtgcaggcaacttgacatgaaatgcatggtaaagctaaaacactaattgcatactttgggcattcattctgtaccatgccctatgcaagggctttaatcctcacaataactttctgaggttggtactgtcagtattcccatttagtaggtaaggaaaccaagtctcaaaaaataagtaattagccaaaggcactgtatagcaggacaagatgctgacgcaggtccgttcacctccaaagctcttccaattaaccatgggtcctactgcaaccaggagccaaaaggttgagattcgcattttttattttttattttttattttttgagacggagtcttgctgtctcccaggctgaagtgcagtggcgcgatctcggcccactgcaagctccgcttcctgggttcacaccattctcctgcctcagcctcccgagtagctgggactacaggcacccgccacaccacgcccggctaattttttgtatttttagtagagatggggtttcactgtgttagccaggatggtctccatctcctgacctcgtgatccgcctgcctctgcctcccaaagtcgcattttttaataatgctcatatatctagggcaaag

SEQ ID NO: 29923 - DNA, 1031 bp, Homo sapiens
actcctgggctcaggcaatcttcccacctccaccttccaaagtgctgggattacaggcatgagccaccacacccagtccagattttctgttccttcatgatgcagtcctggtaggttgtgtgtttctgagaatttgtccgtttcatctaggttatccagtgtgtcagtgtgtaattgttcatagtactagtttataatcttttcttatttctgttaacatttgtaataatgcccccacttttattcccattagatgaagagactttagtgttcgttcagtgccatatactcccacatctcttccctcccaataaaattatatcctgtttgtataaatcggtgttctggttatataattatgatactattacagatacttcctagtgtctccaacatagttgtaaaactctccagatactattttctattcaaatcagaagcatttttagtttcctttttttcctgtgaaaacattccttctaaaagcctctgacctcctgctgtagtccctactgattgctctttgaacttactgtgcacagctgtcatcctttacttctctcttgtttggagtctttgttttcttgagtctgtcttccttccttccttttttttttttttttttttttgatggacagcatgctgtattagcttcctaggaaagggtgcatcagaggtgattttcaaaaatcttatatgtctgaacatattttcatttacattacatggctaattgatagtttgatgaggaatagaaatctaagttgaaaataattttacctcagaattttgaaggcatcattttattgtcttccattttctagtgttgcttttgtgtataatagtcagtgccactgtcattccttatctacatgggtgacctctcttcctctccctcccaatctggttgttaagatcttttctattctgttctgaaatatacagtcatgtcctgtagtatatatattttttcataaatgataccgtgcactcagagggttctttcagtcaaagttcatgtcctcctgttc

SEQ ID NO: 29924 - DNA, 1053 bp, Homo sapiens
gaaatgtaaatgattttgtttatagatttttttaacaatcttgctcttacgaattctaataaattcatttagatttttatgttatctatgatttaatgacagtcttatctttttctttctaatccttatgtttttgtcttgacttattctggcagagagctccagtacagtgttgaatggaagtgttgatagcaggcatccttgccttgttcctcatcttaaaaggaatgatttcaacaatttgctatgagcctttattcgattaaggacattggaataaaagttgttatattcagcaaatactgaattttatcaaatgctatttttaaaaatttttttaatttttaattttgtgaatacatagtaggtgtatatatttgtagggtgcatgagatattttggtacaagtatacaatgcataataattacatcagggtaaatgggatatccattacctcaagcattcatcatttctttgtgttatgaacattccagttgtactccctcagttatactgaaatgtacaacttattgcggactgtaattacgctgtagtgctatcaaatattagatcttatttattgtatctaactatattttgtacccattaaccatccccgccactacccttcctagcctcggataaccatcattccattctctatctccatgagttcgattgtcagatgctctttttttttatgatctgagatgatcatatgatttctcttttttgatcaggtaatgtgaattagcttgactttgtaatattaaacccatcttgtattctgcagttaatctcaacttgataggttaatctggattatactctttatacacacacacacacacacacacacacacacacattcttagtttgctaacattttgtttagggattttgcatctgtgttcatgagtgagattaacttttaatttttcttaaatttatgctagcctcataaaatgagttgggagaaggttcccttttctcctccctcctataataatgtatataaaatgagaattatttggtccttaaatgcttataga

SEQ ID NO: 29925 - DNA, 1039 bp, Homo sapiens
agcctgggcaacaagagtgaaactccgtctcaaaaacaaacaaaaaaaatttaaattggcccggcatggtagcacacacctgtgatcctagctgctcaggaagctgaggttgggaggattgcttgggcccaggaggatgaggctgcagtgaaccataattgtgctactgcgctctagcacaggcaacagagtaagagatcttgtcccccccaaaaaaaaagtttctagttttaatgattattttctaatttttcttgtgctatttttgcttttggtgtcatctaagaaacaatcacctaattcaagttcacgaagatttacacctgtgttttctgagagttttatagttttaactcttacatttagatctttgatccattttgattttttttttttgtaatagtgcaaggtaggtgtccagatttgttcccctgcatttgatttccacttgtcccatcaccatttgtcgaagactgttctttgcctattgaattatcgtggcacctttatcaaatttgaacatataggtgagggtttatttctgcattctctgttatattccattggtctgtatgtcttgtctttatgccggtactgcaatttttttaagttacaaattgagtttatattgcatatatttacagtacaaagtgatgttatgatccgtgactacaatgtgtaaaaattaaatcaagctcattaacatatccatcaccttaaatacttatttttgccatgagaacatttgaaatttactcttagcaattttgaaatgtacaataggctattattaactgtattcgccatgctgtgcaataggtctaaaaaaaaagaaaagtattcctcctaagattttgtaccttttgacctgactttcatctccccattccccctgcccctcagcctctgttaactaccattttactctggttttatgagtttgattcttttagattccacatttaagtaagaacatgtggtatttgtctttctgtgcctggcttatttcacttaccataatgttctccagttccatccg

SEQ ID NO: 29926 - DNA, 2083 bp, Homo sapiens
aaagtgagattgtatctctacaaaaaaactaaaaaattagccagacatggtgatgcattcctgtagtcctagctacttgggaggctttggtgggaggattgcttgagcccaggaggttgaggctgcagtgagctgtgatcatgccactgcactccagcctgggccacagagagaccctgtctcaaaaaaataaaatagtaattcagaactattcatatgagctaaaatttatacttaagtaaaagatttatttaccattttgcaaaggtcaggatttatttacctttttgcaaaccttttttaaagcaggttctttttaccctttttatttttagtcaataatctttgctattatcttttggtatgctctaatataccctgacctatcttataaactttatatatatgctatatgtaaattctatgtatactataggaaattgtgtatatgtaggtatgtgagtgggcaggtgggtatgtgtgtgtatataaatagtataggaaatctgaagagctggttttgggttgagggacaaacccttgaagggattctcattgtactcagaaagaaatccaaactcgcagcagggccgttccacctccctctctaggttcctgggccatgctggttgtctgtgggcctgatagcagttcccaagaaactgttcctcccagggctttccatataccagaacatttctctttgctgggaacactaaacatttatttggctgctgtctcctcagccttgaatcttttttttttttttttttaaaggcatttcgctcttgtcgcccaggctggagtacagtggcacagtgttggctcactgcaacttctgcctcccaggttcaagcaattcttctgcctcagcctcccaaatagctgggattacagacatgcgccaccacgccaggctaattttgtattttcagtagagacagagtttcaccatgttggccaggctggtctcgaactcctgacctcagctgatcagcctgcctcggcctcccaaagtgctgggattacaggcgcgagccactgtgccacccagcccaaatctcatcttaaatgtcaccttgtcacagaggttttccctgacctctctttttttttttttttttgaggcggagtctcgctctgtcgcccaggctggagtgtagtggcgcgatcttggctcactgcaacctccgcctcccgggttcatgccattctcctgcctcagcctgccgagtagctgggaatacaggtgctcgccaccacacctggctaaatttttatatttttagtagggacggggtttcaccatgttagacaggatggtctcggtctcctgaccttatgatccgcctgcctcggcctcccaaaattctgggattacaggcatgagccaccgtgcccagccccctgacctctctttttaaagttaagtacttttgttattcagggttaccccaacctgatcttttccctcataacatgtaccataaattgaaattgtttactgactggtttgtttccttgtgtattgccagtctcttccattgaactaaaagtttcatgagggcaggagccatcttcatatgccactgtctaacacagtgtctgacagagtagcccctcagtaaatattttaggaatgaatgaaagaatgagtaagccatggtaaaaagtcttgactttttcctcaggagcgatttgataagatgaaagggataagacaagactgagtgaggaaaggagtatgtgagagcttagagggaagaaatactttaccaaggtcctgtcatgttctgggcagtgtaccaaacagtttcacacacatcgtatcatttcactttcctagtcatcctttttcatagatatataaatggagctcaagggcttatgtaactgctccaagttgacacagctgggaagtagaagagcaagcattcctattcatgtctgtagctaccaagccctttctcgggtgtttacagtgaaagaggtggcaaggtggatagggataaactggagaggctacctcatctaaagaggtagccaacccacacccgctccagccacctggcaccatggggag

SEQ ID NO: 29927 - DNA, 1064 bp, Homo sapiens
gaatacataaaactgaatgaaatcctgcactttgtgacaacatagatgaacatggaggacatcatgttacatgaaataagccagacacagaaagacaaatacgatctcactcatgtggaatccttaaaaaaaaaaattgatatcatagaaacagagagtagaataatggcaccaagactcaggaggggaaaagtgagagatagttgggaaagactgaccaactggtacaaagttacagttaagtagtaggaacaagttctggtgttctattgcactgtagccatagctaacaataaggtattatatattataaaatacctagaagaaagggttttgaatgtccttattaacaaagaaatgataaatgcataaggtgatggtcactctatctgatttgatcattatacaacgtggatatattgaaatatcaaattatgcctcataaatatggacatggacaattacaatgtatcagaaataaaaagagacaccaaagtaaaacaagattagaaaaatggactgtgtttaataaatgcattcctagaactgtgtttctagaaggctttgagtggctagcccaggtggaaccatatggtaatcctcttttgctgtgggcttcggcagtgacagtccccatgcttctccctgtgactatcccgcttccccaggggaggtttcgggcccaggacgtgaatcagagaggggctaaatgcaggagtgagaccctctgtgccaaagccacacatgcacgtgtttgctatgtgccactcgtggcaggacaggggccctgagccgcatcacaagcccagatctccaggaataggacccaggtgtgttcaagtggacagtagagttcagccgtcacctgtgagctcctactgtatgttagaccatttgtatactaagagcactaaggtcatgccatctgccagctgtcatataacctgtctgagtttcagtatttccatcatgaattcataaggctacttgaaagatggtagagaaattacgtgaagggtgtggccagtatgcttaatgctcaggccacgtggctgttggcatct

SEQ ID NO: 29928 - DNA, 1040 bp, Homo sapiens
agacgtgtcccacagcaggcactgttgtggcttcccacccatctgccatagcctccagcgttgtgttgcctaattctgccccttctggagctgctcagtcacacctctggacaggcctgaggatgcctgatttatgaaggggtcagaaattctcctagccttgaattcagattatgtcctgcaatttaggcatcattcatacggaagacaattattttatgattcaagattggggcatttctgcagtacacacaaaaggcccaaggtgagataaggtctcagtgctacagttaatttgtatattctttttaatataatctattgaacttactttaaaaggaacggaaagaggggaaaacaagcaatccaaaatgtatcagagagagagctggagttgaggatgccttgctgattttctgaaaatcaagttaacttttctaggcagaatggccacagtctgcagtcatcctggaaagccctgggggatgcatctgcatttcatcctgtctcaagctgtaaacctgactttatgtatatctcattgcagagagacaggggtgggggttctgcttagtcactaagcggctgagtctacttagagcttttctactattcagacagcttcacaaatgtggaaggacaggtaaatgcagcatgatcatactgtgcataaaatgttggaagctactctgagtttctttatgtcttaaatagacaaacaggtcttcttgatccagggatgcttgtgaacatccagcagcctttgatacgtgaggatggtacagttctcctggccacggattctaaggtgacgttctctactcatgctctctctcatcctttatgttgacattgcaggctgcttctctaactgtgtgcaccactttcttcctggccttcagagaccacatcaaaagcatgacctatgtctcggtctccttattgttgtgatagctatcttgtgatttgttttagagatgctgatggcttctcagatcagagctggctggtcataatcactgtaacatgtcagtctagat

SEQ ID NO: 29929 - DNA, 1517 bp, Homo sapiens
aaaagtcacttaggctaattgttcacctcacagtaaggggttggacacagcttaacctttttgtcttccttcccagcccttcactcacaaacaacaaaatagctaataaaattgggacaaattatataattatttagaaagtaaatgacaatttgtaattttatgtgatagtttttaaaactatgtgttttctagggtagtaggaagccagatgtccagaaccaatcatgtggggctgttcagactgggatccactcagggtccccgacccgctcccaggaacttcaggcctgggcagaaaacagaggaaaagccagtgttctaataatacccaaactagatcagtctttgagttcaatttgttgtacttaagaagtttgcagaagtttgactaaaagtactaagaagtctacaagtgagacttttcaaatacagagggaactgggggggggtacttttctgttttcagatcatccaggtttgaccagcacaagccagattgaaaaattccaagaaaaggcacagatggagttgcaggactatgttcagaaaacctactcagaagacacctaccggtgaggcattcaggcatatgcgctcttgcttggggctgcaaggagtgtggctgagtctgcagtttctaatataaattatgttaacctttccatttttagcagcctgatagagcctccattggatcacactctaattcttgagttttctttgttttttccaagctcccaagagctagagataattcttgaatgctagaggtggtgtagagtgtagacagtgccagcaggagggccaggactgtggctgattccagttttgctgtgtgactgtgagcgaggcctcagattgctactctttaattggaggagttggaacagatgctgtgtggcctgttctggggctaacactgtacatgaggcttgagttctcatggagattcctttgtccagaatagtttgaaaggtctgctcctctggtcagcatccattgaagaggcagtgctagagtacttgacagaaaagtgcttattgacagaaaattcttattgacagaaatcaaatctgacccctataaaggagtggatgagttatataaagtcattttaccctcagataaactaatggaaaaaagtttgtttgggtgcaaattagtggtattatttgtaattaatgtgcagtaaaaatatgtgtataaaaattaggaccgggcacggtggctcacgcctgtaatcccagcactttgggaggctgaggcgggtggatcaggaggtcacgagttcaagaccagcctggccaagatggtgaaaccccgtctctactaaaaatatttaaaaaaaaattagccaggcacggtggtaggcgcctgtaatcccagctactggggaggctgaggcaggagaatctcttgaacctggtagggtgggcagaggttgcagtgagctgagatcacgccactgcactccagcctgggtgacagagtgagactccttctcaaaaaacaaa

SEQ ID NO: 29930 - DNA, 1052 bp, Homo sapiens
agtagggtaagtgggaacagtgtttccaacttctaaattcttgtttggatttaattatatcattttataattcttgccttggcagcaaattttggagagtagtgggagtggccattataaaatgatggaaaggatttaattttgccagcttaaagtaatttttacttttctaaccctgatgtgttttcagtttcaaaattaagacaaaaaaccagctgagacaatggaattagggcaggtttgtttcatttctgcttgtgaaggcttttagtagcaggcatcctgcagctcagtggtgcctctaacacagattgttgcctgccttccgtcgttttgatccttgagagtgaccatgagggccatgttgcagttccctgggaatacaagcataacagctttcagatcccagttcttggtgttggtgaaaaggtctccaccagcccctcctctcattcccaggtcattcagtggcagccagtaggctgcttagactcaggctggataaggaagtgttgggctgtggtgaaacaaccttgcagaaaacgtgattttgcttggaaaggtgctgattctaacctggtcctgctctttaagtccccttgctggtgatggctgattccagggactgttttgggctttgaacacctcttggttggtttctgagatcctcttggccttactttgaagtggccttttctttaaggatcatgtccacgtaacctgtattcttgctgctttaactcatttcaagcctctgactgcaggtccatttcatctcctgtcaggttggttaagtaaagtcagcccaaagtcaagaattacttaaagagatgcaaaccaaatatttgggctccaactttcacagggcttatagcccttattagcagtttgtgaaactttgggtttcatgaagtgagacctgtcctctggctactgaactccatggagccacgttcatgctccctcttctactggcctggctgctcctccctcaatgaggagaggcagctggctcagagaggtgggacagacacatgctgtcatcagttaag

SEQ ID NO: 29931 - DNA, 1066 bp, Homo sapiens
aaaagatatttagtataaaaagtaggtacttggggcaatgtacgtatattgcggtaatgttgaaattacgtgaatgaatatgaatatgttaattattcttattaacagacaatagtatcggattgctcctttgtggcatcactggccatcagtgcagcttatgaaagacgttttaataagaagttaattaccgggtaaaaatgtgtctctctttacctctttttgtgtaattgtcccttaactagaaatttaaaacttaagccttatctgtatagaaagtggagagggcatatcattcagaatatggcccttctgtagaaattaagcagatgatttatgaatgtggaaagatacgctaaaacagtcttaagaacctatacacgtagttaatatatatgaaattaatgtgttttgaaataaatgaaattgatcaaagtaaaatcatgtcatattgataatactttatgattggactgttaagtgaggtagtcactagccacatgtggctatagacacttgaaatggattagtctgaattaagaggagatgcactgcaagtgtaaaatgcatgagattttgaaaacttagaacataaaaaatgcaaaattgcaaaatatctcatttttgtgttgattatatgttaaaatcatatttcgatttgtgattaaaacatcaaaattggttttactttttttcttttttttttttttttttttttttttttggagacaaagaatttcgctcttgttgcccaggctggagtgcaatggcgtgatctcggctcaccacaacctctgcctcctgggttcaagcgattctcctgcctcagcctctgaagtagctgggattacaggcagttttacctttttaacttttaatgtggttactgggaaatataacatatttctgttggcttgaactgctttagaatgtattaaaatgtttctgaaatactttttcagtttttaaaagatacattagcttaaaatcattcattgcaaaaactaagcattataattttttcaacttttcctgagcggtttttgtgtgttaagtcctaagagta

SEQ ID NO: 29932 - DNA, 1414 bp, Homo sapiens
tttctttaaggaaagactctgaactctgttataagggccttgcattgttaaggttctccaccacctgtccatgttgagatccatgcagcaacatcagcatcacctggaagtttgttagttttgcagaatttcaggcttcaccctagacctgctgaatcagaatctgcgtttcacctagatcccctgtgatccagcctgaaaatcattgctctgtagttcagtaatactcaaattttagtatgcacagaatcacctggcaggtgattatctgttattaaaacacaggtttctggacctcacgcccagagtttctgattctggaggtctgagatgagatcaaaatttgcatttctaacaagattccaggtgatgctgatgttgttgtctagaatactctctgagagccattttacctgatttacttaaaaagtaaagaaaattattgagaataattttactgaactataattcttgacctcttgtttaaagaatctttaaagatgtatggcataatcttcctattggtgttaaatcaaaattcttatcctcatatctctgagaacactttttttttttttgagatggagtctcactctgtcacccaggctggagtgcaatggcacaatctcggctcactgcaacctccgcctcctgggtgcaagtgggtctcctgcctcagcctcccgagtagctgggattacaggcacccaccaccacgcccggctaatttttgtatttttagtggagacagagtttcaccgtgttagccaggatggtctcgatctcctgacctcatgatcctcccgcctcggcctcctaaagtgctgggattacaggcgtgagccaccgcgcccagcctcagatcactttttaatatgaattagatactgtatctgatgacttcctctgttatttatatgtattttctagccataatgttctactcttacaactatacatgagtctttttataggtttagaataaaatgacaataatactgcatttaaaagtgaggcccttttgtaattattttaaatgtacatttctagaataatataggttgagtatcccttatccgaaatacttgggaccagaagtgttttggattttggattttaacagattttttaatatttgcagaatacctacaagttgaacatctctaatctgaaaatccaaaacactccagtaagtatttcctttgagcatcatgtcagtgatcaagaagtcttggattttggagcatttcaaattttagattttttatttcagatgctcagccttttaatttcagtgatagttacatgacatttaatcaattgattgaaggttatcatctgacagattagcttgtaaaattgaataaagacatcatattaaaaagaacaacattttgtaattggtatgattcta

SEQ ID NO: 29933 - DNA, 1273 bp, Homo sapiens
aagcaaaatatcaagtactgatacacgtgtaaaaaaaagggttatgtgtgagtgactggttgcttttggtgggtggtcatagaagacctctttgagcagggatgagaagagctatgaataacaaaaaggaaccagtcatgcaaagaaatcaagggaaaagcattacaggcagagggaacagcaagtacaaggaccttacagtgagaaaagatggtgtatttttgggacagagaacaggccaattgcctgggtaggtgtggtatcaaaagaggtcagaaagatttgcagaggtcagatcacatgaggttctgtacaccacaggaagggttcggagagtctttggcttgtcataatcaggaaaatgacatgtcctggctccaaatgaagatgcagctaggctgttggatttttgaatagagttctggggtaagggtagagatacagataggggagtcaggagcatatagatggagtttgaagataggactgcataaatcacctgtgaagagagttgtgggtacagagattaacacccaggatctgacccttggactctcagacaccttgaggttcagcagaggaaaaaggtaccacaaaagaatttgaacagagggcctgatgaaacagtgaggtttcacataacccaagcaaagaacatttttcaagagaaaaagaaaggacagttccatctattgatgtttgagaaatcaaatgagattaggtgagagaagaaactattgtgggaactaaatgataagaacttacgaacacaaagaaggaaacaacacatactgaggtctacttgaagtggggggagggtgggaggagggagaggaatagaaaagataactattgggtcctggcttaatacgtgggtgatgaaataatatgcacaacaaacccccatgacacgtatttacttttgtaacaaacattcacatgtacccccaaacctaaaataaaaattaaagggaagaaactattggacttagcatcgtggcagtcagtcattgttgaccttgataagaacaggcatagtggagaggtggggctagaagcccagttggattggttttaaaagagactatgatgtaaggaagcaactgttgacagttcttgcaagaaagctgtgcaaagaaatgggcagtgatgggaagatgtgatcagaagtggtttaagtcttactttgtttaatcatagggaagtatggcattcttccctattacaatgtgttgatggcaggcactgagtcttgctagtcaatatccctgcg

SEQ ID NO: 29934 - DNA, 1059 bp, Homo sapiens
atgagaaaaagaaaggatatagattccttgagtggaatagtgggctagattaatataccgaaatatttccattgtttcccttttttgcagagcatgtggaagttaaacctgcttgattctactatacatcttgggcaactagttaccaaatgaattgtgccaccataactgattttaattttgcattatttatgattttaaaatatttgttgcccaggtgttatgaaagaataaagcttttaagtatagactaccttagcatgaagatgctcatgcctaagaatgaaaattgttgaggttatctcccattcaatcatgtagcaagaacttaaagaaattcactactgcagtttttatttttaaaaaacagtaattgagatattgaagacattacaatttagtttgtgtggtctttttttaaattgctgtatcgttcagtctcttgtggcaatagcactttgaagaaaatagagaatttaatatatggtgattgggatatgtagcattcaaaaaaagtgaattgccaagatactggtgtcatgtaaattcccactttacataaaaacccatcaggacagaatgatgctcaatattttaaaattctaaaaatagggtgggatttttcattgtctctactttataattatcaaaacttattttgtattgctactaccttaaattgaaataaaatgtttatacttacggatattgcatagtttaagttagatttattgaaagatttcatctgtcgtgtttcatgtaaatgagaacagattatttgcatgaaaatatatacttcaacaaaaatctgttctttaacagagtagtggtagattattacactaatgagatttcactttggtaaatacttcatgctttcagttttagcctattaattttaggtggacaaatttaacaagttttctgttactttttaaaaagaaaaaatccagaacataagaactatattatgaacacatgatttgaacctgttgtggtaaagatcttgtacaggatgcaaactaaaaacctaatccctgccatcaaatttattagaag

SEQ ID NO: 29935 - DNA, 1070 bp, Homo sapiens
ctcacaccacctaccctagtgtaggtaataggtctacgctaggaccccgtgctgggctctcagcccatcatgagattttggtggatttaatggcaggtaggaacttatttatagtggattgataattgctttataattccttggtaatgacagctcagggaaggtttcacaaggtcatgatcaggagacttgaattgttactggatgtaggaattgtttcactgctcttaacttgctcaaactggggcaggttccaggaacttgaactaaaaatatctatttaagcctctctctctttctctcctccccaacttttttctgaaagccttgatttctgtagacagaactatggtttttggcatgttgggtcaagacgtgtttctataggaaatgcttgcacgtggcactggcttggtgagtcaagcttcctgagcttcagaccgtttgtcctgtcatctgtcctgcccaacactgtatggtttttctctagcacggcttcaattttgttctctgcacaaagcctttggtggttctgccctctgccctccagctttacccaccagagtaagcaatcttttctttttagaaatcaagaatttggcttcacagatggcttctcacagatgccctcctgccagccaaaccggacttgttcttcctgcctctgtgccttctctcattctccttctctccctccataccccacttttgaggttctgtgggtaccatctttgtggactcttgtcttttttttcaacccacatggagtgccctgtgtgtacatactgaccttttttttttttttttttttttgcttgaactctggtcggtatgagctccttaaaagcaggtactgggctggctgtggtgactcatgcctgtaatcccagcactttgggaggctgaggtgggaggattgcttgagtccaggagtttgagaccagcctgggcaacatggcgagaccctgtttctacaaaaagaaaaagggaaaaaaaaagcagggactgtcattctcatctcctccctggggtatccacaggaatggacattcaaatggttgtagcctggt

SEQ ID NO: 29936 - DNA, 1056 bp, Homo sapiens
aagagactcttagagaattgtctctcaacagagtttagcctttagtaagagcttggacacctcatccattttaaatggtagagggtgaggggtggggaagatagattattggaaaagattctagtacctcttttttgcttacttttatttttttccctagcaaatcaatagatgaaggtatcaggtaaaatttaggagtgggcatcaagagtatatggtttaaagagagatagagctgcctagaagagaaggagagggttggccaaggaaatgtagaattattgggtactgctgaagacactcctatagtgtgtgatcataaatttaaccagtcaacacaattgcgattgttttatccaggttcatttcatgcttaagtgcagggaaaggtcacgcagagagttggctttaaccaagattggagtttttttttaggacagtatgatggagaaagaatgtggtaagggccttaggggctgtacactgacaaacccttaattagtatgaatacagtcatggaccatggaatctaggctggataaaaaggacagtgaggaaaggaagccccatgaaaaattgatgaggccaaaggatcagagttcctgctaggattaaagaagagttagagtgtattagaataagtgaactaggaagatagaaggaggtagtcaaataatggaatgcctaaaatcaaggttttagagtaatagtatatgagcatgggagtgggtagctaaggtggggtggagaaaaagatcattagagatgaggagtcaagaaactgaatgaccagagtgtcagatgtatcatttagtgcttgttgaagtcaccaagaataacaagtcacagtggagagacagggacctgtatgctaaaattttgaatgaatgagaggaaatgactgaaaggtcagtagatgattgcaacatagaggggtggcaggtgccattgactgatggcaaactattcctttatttaataaatatttatttacatatggccaactaattactgtggggagaacaacttaccacatcctcaaggattacatgctaa

SEQ ID NO: 29937 - DNA, 1217 bp, Homo sapiens
tgtcttgaactcctgacctcatgatctgccctcctcggcctcccaaagtgctgggattacaggcatgagccacagctcctggccctcctcttctgtttctaatttcccctcttctcccatacagaatgagaactgcgaagagttgggaggaactggagaaagctagatggtatctggctttctcagcagtatatggtcattaggaacttgccccaatctccagagggtgctcctagccatagagtaggggctggaccctggactcgttgaaatgaatggcacctcaggtttggccataacagaactggatcagcttcttatagtctcgtcttccattcttgcctttaatttgtatagtgagtatactttacacatgttatttgctcttcagttcaagtccatgaggtagcctaaggatacgatgccatctggattttacaaagaggaagcagggcctaggacatgtctctcagtgacgaaaggaagctccagctcagaattcctagctaaaggactgtgttgctactcttggagtcgacaggaaatggaatactcacccagaaatgttcttttggttttgggcatgtatttcctctggaaagtttactgaatgaccatttatgatgtttatgcttcttacttgggactgtaactgtaagtagtctgagattgtgctgatggaggaaactgaactctgaattgaattacattggaatgtttgtgttcaagttttattcattttattcttaagaatcaaaagaataagcagtctgagtaaccctagaaatgtcaaggagataaagatagaaatactgtaatgcagtaaagattgttcaggcaagacaaattttactggagggggtcattccgtgcttggcctctacagactgttggcctactgagcaatatatgctctgttcatcagtttgttgggagagtttggcagtgaaagaatttcttaaattactaattcatatgcattcatttgttcatttggaaatgtgccagaccctgggccagatcctggggttacagcattgaaaatgatagataagctcctatcctcagattttaatgggactctgatcagaagactttatgcacctaattgattttggaaatctttctaattctttttctattgtactagtttgcttttagaagcctgtgtcttttcctacagtatcttatgtgtatgttgcctttttgtttacaaa

SEQ ID NO: 29938 - DNA, 1083 bp, Homo sapiens
aatgaaataatctacctcgaggctgtattttaacagattattatatcgaaagaaaaaaatgaatgtttataaaataacatttctttttttttttttttttttttgagacagggtctcacttggctcactgcagtcttgacctccaggctcaagtgatcctcccacctcagccttccgagtagctgggactacaagtgtgccaccatgcctagctaatgtttgtaattttttttttttttttttttttttgtagagatgtggggttttgccacgttgcccaggctggtctcaaactcctgggctcaagctatctgcctgccttggtctcccaaaatacttctgtaaatgtaagaaaaggggaataatgaagtaatagagacctctgatgattctcattacttgtctttgtaataagatacttaaaaaagaatgtgtggcaaacaaaggaaaataccagttctactaaataaatgtctgctctccctgaactctcccatacttttaaacatgaatctggattttctgtagtgttctcttcccctatccacccagcttaaaaaaaaaaaaaaagtgctcctgcatttctaccaatctttgttctgaaaaaccattttaagtgacttaaagttcaagtttttattcattctgcaaatacttactgagccttactgtgtgttgggccctgtgcttcatctagggagttgacttatacatgctgaatatggtcagaaaggcaaaaacattatattggtagagttgagagtatgaagagaagagggaggacctcaggcagggggtgttacttgagcagggcctagaagggtgagcagaaggttggtagaactgagagagcttggcacatgctgaatgacctaggtagggttttggggaagggcaggtgttaggtacctttgaggaccagcaggttgtccagtttggccaaaaaaccacaagcacagtgatccaggaggagtcccaagttcgtatgagttaaacgggactttcagctttttttttttttttttttttttcggtgattgagtagtagagagccgtttaaggtttttaagctggagagtaact

SEQ ID NO: 29939 - DNA, 1031 bp, Homo sapiens
ctttttggtacttaaattgagctaactccagccagagtggcttggaattcatagtgcggtggctcagagtataggctcgaaagcccttgagccagattgcctgggttcagatctcacctatactacttactaggtagatgaccttgagcaagtcacttaactgctctatgcctcatttaaaattacatacaactacatgtaaaagggagatgatactgctgcctacctacctacatgatagggctgttacggggattgaaggtgatcatacatgtaaagtgcttggcagagcactgcatgagtgtgttgtcgttattaatttgctattccttgtcctattcagaaaggatttcaagaggctggatgccttagatgtggtctaacttgaaaccttcatgtgggtgtgcgtctgtcttgtttattgctgtgccaggcacaaaataggtatttcataaatatttgttaatatgctcagagttgataagctggattaaagtgacttcttaaggatcctctggctctatgagtttgaaaaaatgtttcttcttttgacataagaccctttcccagcctactcaagggactaggttagtctgatatttgtatctttctcagattttatttatattttttcaaacatatgacaaagtagagatagtaaaatgacttctcgtgcatccatcacccggcttccatgactagcagcattctgtttttgtcagccctcagcttctttgtgggggtgttcttcttgctggtgtgttttcaagcaaagcctagcaattgtatcgtgtcacttctaaattcttcagtatatatttctaacagatacatcacctcagcacaaccacaatgtcatcatcatacctaacacaagtgacaatgattccttaatatcctctaagacccttctgtgttgtttcctcatggcctcaaaagtccgaatattgcattaggttaatgtcttttattttaattaattaatggcacactccttacaccccctacacatatacatggacacttttttt

SEQ ID NO: 29940 - DNA, 1023 bp, Homo sapiens
atttcctggagaaagggggaaatatggatggttgatttcctgaagaaagtagagaaaaaggaaatacagagaaacggagggaaactttgctccctgtaaatcttattaagggcctcggcaaatcttgttagtctatcacacaggaaagaccaagcagagaggcgtgaagggatggtgggtaagtccacctgggttcatatgcccgaactgcctatttccagactgggcaacaaatttcctctctaaaccccagtttgctcagctgtaaaatgtcttgctttaggcaagtattttaacaggtggtgtgtaggttttcatcggtgcctggcaggctgacacttcctgtgtgaaaactggataattcaagggcaatttcgagagcacaggagataaaagagctcacagtctagaatccacttcaaacgtgacattttggagcaaactgcaagtcaatttcatgtggttctgaactccccagaagtcataacttcagtaagtaaacagtcaggtggcacagataactgcttgataaagtttctcctgtttgatggactgctgtctctacactctaaattccattcctttttctctgagataccatggggattaatgaaaagctgttagctgctctttaagtgggtcaaaactcccattgctgacatacttactccctgagagtggctcttcatgcacctccaaggggttgctctccggtccatccagtgtcttgctcaccccctgtggtgaaagttctccaccatctccctctccggagggtgagctgggctgcttggcgaggggcacctcccctctggggcctgagctgggctctgggctttggtttctcccagccggagcactgcacacatccccagtccccggtttctcattctccagtgacgcgtgatccccacgtgcgttttttgcatctctggcatcctcggtgctgttggcagtagacaccggagcactgctgcctgccgagttcacagaggaatggtactgaggtataacaccaacgaa

SEQ ID NO: 29941 - DNA, 1110 bp, Homo sapiens
aaatataaaatttggacagattttagagacaatcattatataaaaatctcatgaacatttaaatcattaataatgtacttatatacatctaaacattatatctcacctacttctgcattcatatctaaaagtgtaaaactcaatgactagtctcatccaggacccatcactggtaatgcccattatatctttttcagcttgaaaaacacacaaaaaaaatctaagttacttctgattgacaaagaggaaaaaatgtcaattttcaattcaacagagttgaataggtagactattcaatacaagactcccacaaagatttaaagtaagacaatctgagttcctatatttaatatgagacagacatataaatagaaaactccaacgctttagtaaaattatttgcaactaaattacctacacttatgcatacgattctcaaaatcatgtccctgtagtctaccttgcaatgctaccaaataaatcttcctagagagtcaatttttacttaaagattgtatgtacatgtgggaagagggggcctctattttatttaaaaacaaatacagacatttcatggtactgaagtattcacccaagttttaagattaacaggaaatttcaaagaaattcagtgcttgtgcatttgtttgggtacctgctcactgttctctgtcatttcaaaatagttctggggagagggtggaaatcactagtgtgctaattctctctctcagaagaaacaaacaaacaaaaaataaataaaatgtgaggaaagacacaggccaatcaagggcagctatagaacaggagtggggaaaatgagctctcacaccaaccatgcacgtctccttcttgttctctccaccggggtaaaggccaatgctttggaggaagagaacaagagtaactcggcaagccatttaggagtgtggattggaaaaaattctttcccccaagagaaggtggctttacgctggcatatgagattgaaaagtgcaaacaaataattaacggtgaatcctgaaacttcaacacaccagaaaagggtgtcactccagagtgagatgggaaaataagaggaataaattaaggtagtcttggtgatgctgg

SEQ ID NO: 29942 - DNA, 2383 bp, Homo sapiens
tgtctttttgctgcatacatagcttttagtgacttacgttttcttttactctgtagcttatgtttccatggaagttgctttcaactgtgcatgataatcaatcctattgacagagttaggtgacatttctgtttttatttgtcataaaatatttgtggtgattttgcattgtggtgttaataaaatttgaggtgaaaattccaaagaagataccagcctacctaattttaacccctttcttttaattgttttgaatacttgtttttgcattaaaaaatcaaactttattagtgtccatagtgagattcatagtgtaacttactgaattacaaaaacatttgttttaattttacattactgggcgataagcaagaaggatgatttgttagtatttctgatatatggaattgggaacttgtcaatagataccatttcttaattgaaggctctagaagcacatgggggaaatgattaatgttcaaaaatcactgattttagaaatgatattgatacttatgttgaattctgaaacttttaaggatattttgtcatttttcttctttgtaaagaaagcatttggcttcttgttcaccagtgtaaccctagatataaagtgccaggaatgtagtagcagctcaataaattgcttattgaatgaatggagaaagtacatgttttctctgagttctgttaatttataaaacaattggttttggatttaccagtcccatattttgttcattgtattgtacctccaaagaaggcttgacatactcctttttcttgcctctgttttcactttgcattttcttaaaactttcgaaaattatggaagtagtgttgaaagttgatcaatactgggttataggaaagagaggatgctatatttaaataggtaactacttggtatatttccctttgaattggtgccttgaagcatcaagatttttggaatgtattgtggtattttctaaagataacttccagcatcaggacaatatcctaatagaaaacaaagtctttaacatcaaatttcataaagcaacaaatactgcacagatagttttgtcatgtgaatggcagaaattatgtttcacttttgtttaaaaaaaaaaagaataaaaagctaaagcagaagcccatgtgaaaaagcaatagtgacatctttccttggtttccttattttttttaatataagggatgaatgcagtcaggtggtctctgagtagaggcaggagtagattagtaagcaaggtgataattggggacttgagggaatagcagggagtgaatgctgcctggggaactgaggccggtatttatggggttgtattagttgaaatgctgggcttctgaactgtgcctctctcctagctttcatcttcattacagtcttgacagccctctttgttggagatccttaaatcagagggagaataatggcctaaatgtgctataaggtgggcaaagaaagggggactattgctaaagtgcagggcatatgcagaaatacactgtaggctgacccgaatcttattcctcatttaaaataatttatttggtactccatctgttttgtaaatgtggtgttgagtaagaaattgttgtaaaacaatattttctgccaaaatagatgcacagatctatactaaaagaactctttggttatgttaacagtgttgattaaaattcagagtgagcagctttgtagaaccttttacaaataccttgagatgataaataaatcatggaaatcatcaccagacttttctacttttccttagcttattgaaaataacggtcgacttttgagattatttacaaaggctcattactggattttagagaagaagccattatgtttgtcatcttaagtaatctagtaaatgaaaacatcactttcattttctctttccataattcatttcatcactctattcaatataatctatgctttattttgaaacagttaatttggttaattgttcagatggcatcccttatttgcaaatagctcaatcttttaattcaagagcctggtctaaaaatatgaagtagcattttaggccttagatttctgtttaagtttagaaagaaatgaagttaaaatgtctattgctgtggatgatttagtcagaactagttaaatactttggttgatactttaaaaaatgaggtatgatttacatacagtaaaattcacactggtttgtgtcgagttctgtgaactttgaccaatacattcagtcatttaatcaccaccatcatgaagatatagggcactaacatcacctcaaaaaactcccaggtctctgtgatctttcgctcccctcatccccagacaatggcaatcttcggttcttttttaatcagtaggaaattc

SEQ ID NO: 29943 - DNA, 1044 bp, Homo sapiens
ctgtggcatgccttttgactttgtttatagtatcttttatcaggcagaagttttaaatttagatgtagtcaaatttatcttttcttgtgctcagaatcccctccatcctcctcccactttgtttaattctctgctgttgccgtcttgaaagtcgtgcattttcatttctcactggggcacgcaagtaatgtagtcatttctgcttatatgttattttaggcttaggtctttaattattctggaatattttgggtgtgtgtgacttgtgtgaaaaacaggtataattattttgtattttttgcaaatggacagccagttatttcaataccatttgtttcatagttaatccctttcccatcatttggaatgccacctttcttatattttgaattcccttgtattcattggactgtctctggaatatgcattttgttctattaatctggtcatctattcctgtaccagtatcatgatgttttaattgctgtatcttcacaaggtttttcgatatctggtaggacaagacctttgctcttcttttctaagattacttcaactatcttgtatttgtttgctttccttttttggcatcaacctctcaattccttgcaaattccatttgggattttgttagggattatatgaattttataaattaattttggagaaaataacatcttcatagtattgagtcttcccatacagggacaagatatgtctcttctttaattaccttatgtccttcactaaagttttatctattttttcttaacaggcttgcataccaagcattttaaattgttattttgaatgggatttatttctaagttttttaaattggtgtatttaagagctaataatttctggttttggtcttgtatttgatctccttgctgacatccttgtagatctactgttgatctcttagcctgttgattctcttagctcttcatgtagagattttaaaatactgacagtgttgtgtgtttattgctaatatttgttttattttgctttttttttttcgatgctgctttagctaga

SEQ ID NO: 29944 - DNA, 1132 bp, Homo sapiens
atgtaatgtgttcatgtcatcctttctttcccagcccctctgctgcctctcatgtctctcatatagcagtggcccccacctgcttcctgttcccacttttgtgccatctcccatttcttccttcacactgatgcttgttcatggttctgaaattttactttgttcataacacctctgcttaaaattgtcaagggtttgtgattaaattcaaactctgcagtgtagaagtttatatcttatccaatctggccctcactcctcttctatccatgtttccttacattctctaatacgagttgaggtgcctagaaagcttaacaatattttacatgatttcaagtcctggccttccacatcatgcctgcagcggggtcctgtgtgtggcagcacccaaatatgctcctctgtatgtttgttaacagttgagtagtgctttttatcaagcgcatgtcaagttctttctacaactttcttttatatagggttttttcccccctataatttgcgtagtggaagatgtggtagtggaaatgaagtttcataagaaacctaggacaagttactctggaaacggtttgttatttagaaagtgttttcatagtgaccttgctggaagggaggacgaccacagctcttaatgatatggcagacctcggcccctggataggcaccagctctctgtcctccccacagtggactgcagccacaatgctctccccatgtgagatggaaaggggagctgggtttaattgtagcgcacagctggccaaagacctctacagcaataatctttcagtatttcagtgtaaatttgtgacttatattatgttcaagtatttaaaagtacgttgtattttccaacaataactttataaatggtgcctcttccattagttcaactttgtaacatttttctgtacttggaagctttagtaaaggaaaaacttacctctggatttcagttgagaagtctcaaatcccgatgttttagaatcaaactaaaattcttcacccgcacagtaataattattttaaagtgttaaaaagagagattatattgttaactcagagaggtgtttctctcaagagtgcagaaaaaagcaccaaagcttacaaattcccaagggcatct

SEQ ID NO: 29945 - DNA, 1050 bp, Homo sapiens
accccaaaatgataaaaagatacttccttctgaagcaagtagtacaaatattttataacaggtgtgacaacatgaatcatctctgctgaggtctggataagttttctgcctgccttgtctaagctttgctcattgtttactatgggcctaccttctcctaggctggttccttctggaattcccctctaatacagtctgcaaatgcctcctgctgtttacttgcaaacctaggaggaatggcttctcactattgtgttctccaccctgaagtattagtcatcttcatattttatatactactcatgaatcgggggacgatattcactgtcattatcagcagaggaacttcctgtattgaaatctaagccacaagtggatccttctgtggctgtcaacatggataccattacactacaagtgcttcaccattaaatatcctgccaaagggctgtagcttcagaatattgaattttatcacatccaatagctcacaggttacaatagcaatcccacctttttagttattctttgtgcatctgttttatttctgtaccatagtcccagtgcagcaattgttcttttttttatatatatactttaagttctagggtacatgtgcttcattctcagcccttagctcagggtctcacacatagagggcctcagtaaacgattgtcccaagaataaacaaatgatcctccaagtgttacagagtttaggaggcagatgagcttctatatctggactcttgagatggatgtgcatttattcagccttaacgtatattttatagctggaaggtgcataattatttatcctttggtgatacttaaactggaagatgattctaagaataataatgcaacttgtttctctgagcttcatcacacccagcttttcaagtggaactaaaattagtaatgagtattggaaacattgccagtgaacatatgaaaggagggcattcagctaatttggggctaccagaaaatgctctgccaggcctcctggataaatggggagtcagccgtgacagctgccgcttgcaa

SEQ ID NO: 29946 - DNA, 1044 bp, Homo sapiens
agtgcacatgaaatatattgtcctgggtgaagggaaatatttgcttcaggaaacagtaaaaattaggttggaaatacaggctgggcccaattatggaagccttttaactcaagtctaaaacatttgggattgattttttttaagccaacatttactaaagcctaattcatgcaacactagtcatgttcctcgggcaaaggacttcatcatcaaatttttataatgcaacttatcccctttggagattctcagtacacattagcatgctaaatatccttcatttttaactcagcatttctcaaacttatttggtgataaagcccttgtctcaagttctatctgtcagtgtcttaaagacttcgggaaactgttacaagcagtgaggtcactagatagtttaggactcactcggggactcagtgattggttctgtctcctctgccctccgtgttcatatattactcccagaaaaagaatgtgaatgcctgaagtattagtttaggaagaagttggttgtgaaggtctgtttcaggtttgacacatatgagatcacagtaggatgctcaaatggaaatagctagtaagttgtcaaaacaattatagtgaagcttcagatagagatgaggcctacagatagaattggctgtcatccaaatagaagggccgcttgagtggatgagttctctgtaataattgtttccttgtaacaccccatataatttacttatgcccatcacttgttgtctgtgtttctcctactagagtggaaactccttgagggcaagggacctttgtttgttcataacgtttcccaaatgccaagaacagtgtttggtacaaagccagcactcaataaatatctgttgagctgaattgaatacagaatgccgcatatttatttgttcaacaaacgagctcttactctccgtctgaccaggagctggagattccacagaaaaacgggatatggaccctcccctaagagggctccaggtcaagtattggagacaggcatctaagccactcataagtgtaagtgcagcc

SEQ ID NO: 29947 - DNA, 1034 bp, Homo sapiens
ttccaggataatatttgctacagatggtgtttaaggatggtagaatgtaagtgaggcatgaggaagaattggaaagatctgtgtgtcatttctgtagaatggggtttttttttcattcctgtatgtcactggtttaaactttctttagaatgagtgctgacagggaatcttgaacgtgaatttaggtctaagttgagctaccagtattttcctggcgggagggcatgggatctgtcgagttcctcccattactttttgtttgcagtgagctaggagaggtggcagcgctccaggcagatggccagcagtaaacacacagcaggaggctcccagtagcacaaatgcttagggagggtttcagatgaccccggaaatgcagagaagaggaaatgaaggaggaagccaggaagactgctgaaggagctctgaaacagtccaaggcttgagaattacctgggatgcttaaacatgccctctcctaagcctcatcccagacttcccagaccagaatctccaggcttggaacccaggaatctgcttatttaacaagtttcttgggggattctgaggcacacacaaaaaaaccttattattgttgtcctagaatcaaaagctttcctgatgcatcaccatagtcatttgaaccataaggaggtagggtggccagccatcctagaagcaagacattcagtgctaaaaccaggacaatctgggcaaactgggaccattgatcaccctgagaggagttcctgccactaaaagtgtcgtttcattgaaggatgtctgtcccagtttttatgaatctttacttgcctagtttagtttttttttattttgaaggttcttttaaaattcagaaatgaacaaagaagaaataaagtcatctataactgccacacccagaattatctactattaacatcttggcatacttacttccagtcattttttttcttgaataaaaaagcattcatttgttgttataaatctatcttttttaaaatagaaaaatgtttttaagtgacccaagattc

SEQ ID NO: 29948 - DNA, 1031 bp, Homo sapiens
agatggagcattgaagtaataacttaccgatacaattttgactgtgatgtgatttttttttttattgagctctatgaaaatggttcaaatgagttgcatctcattttaaatttgttagaaccctacctggacatttctcgggactcattataacttttcaggcaatatctgggtcttacttattagcaaagtgggattaaaccagatggggcagaaaagggttaaaattaattggattaattcaaagtgaggaaatattaagggttgccattatgtacagattagagagcctatagtgagatggtgagttatagagagatggagagttatggtgggaaagttatggtgggaagtgagaagtccatagaatatggtccgatgttagaggctttttggcaaaggatgatgagagattccaatttaaggtatgcattttcccttattcacgatcttcattgctgaagttattgcaaacaaagaaaaatttactgtaaaataaaggataaaggactgagaaattatttcaagtgccgtgaaaaacactgctgatgggtcactttcctcctaaaaattttagatagttgagaattcagaagaactcaattttacgtaatatgttacagttatttttgaattacaaaatctgataattgtgagcattgcctaggttaggattgagaatgaattattactgaatgctttttggcataatctgtacctgtatgtttttagacatggaaaaagagaaagagtaacctcccaccctggctaaactccacacttctcttttactcctccaataaaaatatctttaattttttttgaaaaagtgctagattgagaactttataacccttgggaaaaaaatctgcaaaagggccagtctttgcctctgggggttataaaatatgataattaatattatatgatgacattgctcagagctatcctgttcatcaaataacttgtccatttttactaatatgattggataaatgttttcattcatattggggtgccaagtccactca

SEQ ID NO: 29949 - DNA, 1156 bp, Homo sapiens
acctttgaatttttaagatacatgaactactacatgtccttatttgcttaagtctccgggtaggttcctatcccttgtaatggcttagcatataatagctgagagtcttcatattttgatgtagacttcctttcttgcttgtcttccttttgtttgttaaatttccctgaatcatcaccaaaacacattgtaactttgaaaaactctttcccttgggaaccgtcatttgatccatatagtggctatgtgatggtggttcaagtgatactgggcaccaagtaattgaacaagaatttcctaaatgtgtttggtggaatactaaagtgagacttctttttcaaaattttgtttttattttctatttttaacatttttgtgggtacatagtaggtgtatacatttatggggtacatgaagtgttttgatacagacctgtaatgtgaaataagcacattatagggaatggagtatcccctcaagcatttgccctttgagttacaaacaatccaactacactctttaagttattttaaaatttataattatgttattattgactatagtcaccctatccctatcgtactataaaatagtaggtcttcttcattcttaccatgtttttatactcactaaccatccccatctcctccccagccgcagccgccggccaaccccactatcattcccagcctctggtaaccatccttctgctctctatgtccatgaattcaattgtttttatttttagctcctatttgttttctggtttatctttcttccttctttccttcctgttttcccctagtgaaggtgatttttctctggcgatatgattcagcttcttggtttttattttttgtgcattcattgtatgttttttggtttgaggttaccatgaggcttgcaaatactatcttataacccatattttaacctgataacaacttaacactatttgcataaacaaagaaataaacaagcaaaaggaaaactaacaaaaactctatgctttaactttactccctcacttttcaactttttattgtttctacttatatctttttgtactggctatgtctggaaaagttgttgtagttattatttttgattgtttcatcattcagtctttctacttaggataagagtagtttacaca

SEQ ID NO: 29950 - DNA, 1044 bp, Homo sapiens
accctcggttttgcttgatcaacagctaaatttgatggtttcttgagggattcacagccaacacttgccttcacagaagttacattctagtgagagagacagatgatgaacaaacaaacacattgtataattgaaggtagtgataagtgcaatgaaggatcctaaaatggggagaggacagagaactctcagtggcaggggctactttaggtgaggtgctcaggagggcttcttccaggacaggaaatttaagcagagacctgagggcagtgagatctggggaaagggtgtcttagttaaaaagaataggaattataaaagtctggaggtaggaatcactggtatattcaaagaagagcaagatggttgaagcatgatgaagagaactgaggaaattgagtttggagacataagagggagccatgggaagatggttgagttctgttttaaatgtgaaggggaagactttggagggttttaagtggagagtgacatgatctaagttagatttttgaaggattactctggcagctctgtagagactagattgtgggagcatggtggtgatatggtttggctgtgtccccacccaaatctcatctcgaattgtaatccccataatccccacgtgttgaaggagggactggtgagaggtgactggatcatgggagtggtttcccccatgctgttctcatcatagtgagtgagttttcatgagatctggtggttttataaggcagttttccctgctcttgcttgcttttctctgcctttcctgccaccctgtgaagaaggtctttgcttccccttcaccttccaccatgattgtgtttcctgaggcctcctcagcaatgcaaaaccatgagtcaattaaacctctttcctttataaattaccaagtctcgggcagttctttatagcagcatgaaaatggactaatgcaggtggattgggggcgagcataggaggctactgtagaagtcaaagtgaaaaagggttatggccccaatgtaggcactctcagtggaagtgctgatgggattt

SEQ ID NO: 29951 - DNA, 1025 bp, Homo sapiens
atgtgctgaagttgtgatttgaaaaaaaatcacaaattaaaactggagaatgtaaaaactgaggcagaatgtttcagcacaatttatgaggtttatttaaatactgcaattcttgctaataacttgtgaacaaatctcaacttaaaaaaagtcagaatgagcaaaagattattttaaactcttccattatcttctattgcatccctcactattctcacttaccatgatagcctttcctgggagccaagacttcctgagatgctatacaagttaaggcaggatggagcatcaatcattaatgtttctttagcaaaattctgtcttgaaacctgactttatttgtccaagagatccaggtggaaacaactgtttcgttgatggtttttttggggaagaactggctcctacctctagaatattcgggttgtagaagcagccaattagttgccttaggaaagaacatgaagacagattgagaagttactgggttggggagcaatggtttaagtgtggctgttacttctttctatgagcacctgtgcacttctccccactaacatgcactggcctggcatttgtctattttctggatttctttggatctacatgatgataaatggctgggtagaaaggccaaccatccaggtgttttaactaaatgttccaggcatttcatcaacatttattgagtggttcttacaaataagggtgagtgctaaaggcattgggagataacaaggtgaataggatacattttctattcttaagaagtttgcagcagagtcaggctttgtgcagaatccaaaagaccttaactggatcctggggatttttaacaaattcaatgggtacaagtggaggaaagctatggtttgacagactgtatgtctataggccatatccatgaatcagacagagtagactctttagcctgtttcttcaaaaaacgatgtccattgcatagggttgaaagatcataattccagcaggaatttgcaacttcgctgactgatgcatttctggtg

SEQ ID NO: 29952 - DNA, 1014 bp, Homo sapiens
tttctattatagaccttaaaaaatggctctgcatttcatttattttgacttgtgttttaaaatttgtattttatttttctctaatctctgagcatttagaagtatattttaaatgttaataaatactattttaagttattcttttaatatattttaaatgatattgcattttggtgagggagtatggaatatatgatacgtatttttttgaaatttattaatactttgtgccctgatacttgattaatttttgtaaatgctctatatgtgttgaagataatagcattctttaattggagcaaggttctttcaatgtccattaaattcagcctgttaattttgctattcaaatctatatttctactaatttcgaccttttaattagtaagataaattttaaaaatctcctattagaatggtgaatttattaatttcttcttgtaatcttatgtatttcaaggctattttatttggtacaataaattttttaatcgttttctctttctggtctgagatatatgtatacactcttgtctctgtctctgtctgtctgtcggtctctctttttctatatgtcaattttttatccctaataatgctttcttgccctaaggactgtgatatgatataatatggctattcttccttttgatcagcacttgtctgccgtatttctgtatgcttttattttccacttttccatttctgtgcatgtaggtgtatatcttgtaaacaacatagagctaaatttctgttttccagtttgatttactgtaattttattgataatatagcactttttttattcttgtcttcattctgtttttaagtgtatcctgtttttcccctagattcgatttttcttcttatttaaatttttttcttaatttttcccctctattagtttagaatttatattccatttctttttggttagtgatcagcctttaactattaaccaagtttacaaagtctaaatttaatcagtatctttctcatgattctgttcaatgc

SEQ ID NO: 29953 - DNA, 1039 bp, Homo sapiens
actttacaagcagcactctggagtcttttctgattggtaatcacagtgtttccttattaatactgtaaaaaatgtaaaaggcataaacattttgcaatctctctgttctttctgtgtgggcatacatcaggggctgctttaagcattcctaatggctcacccatcacattttttatgagtttatatgggaagaaaattgtaccagaaaactgaattcaatgactgccattctatgaataaattctgttatctttgatactctgggtataataaaaacatacaaaagttaaatttcagcatccttgcagagttatgtcaactgtttttaatgtcaataagacactgctgtttcaaccaatgtcttttccctccaaaaaatactgcttgattttcaggttatgttttcattaaaacaacttgtttttaacagcaagatgctgtgtatgtttgctaatttatgtatactacaaagtctgatcaaaatgaagagttataattttaagacatggagctcagtaaaaattcatctttactttggatgaaagattacaataaaagtcaggtgtccataaaatgtgttttatgtaagttagaccagaaaatatcttggtagagtaactttgatcaagcaaattattatatatttttgtatttacatacatctccccctgtgattagaggagatattttatactgtatgctataggtatattctataagagttttttccttatgatcatctatgagttttttttttttcaaaaactgcagtcatctaaatactttaaaacaagagtagattctcctaaactatccaatttacacatttgcaaattaattcaaggcatttcctttatatgataacaaactctggtttccttattatatatgggcagcctgaagctcagagagttccctcaaagtattgacctacagatagctgcccatccgaaggtctatcattttctttttgggagaatttttacctccaaactgtccaacttgtctaagcatccattttcttattaatggcctagct

SEQ ID NO: 29954 - DNA, 1048 bp, Homo sapiens
tctgtggataaagctaatatgaaagagcactggcacatcaaatgtcttaaagaccatgtaggaatgccatgtctccatttttcaaaagccgcatcctcctattttgttgaactctattaccttgtttaaatttttattgcattcccacatagtgttatgcataactatataagaaatgccacaacggattaggccaatggtccgtcttgcctgcctctgagggacattttgcagggagctaaggttgtctttcttgatgttactctgaaaacattaggaattggctgcacatagttcttacatccccctcctttaatattccattatagaaccagcatctgagaattttcctaagccttttaaaatttatttatagtttcaccctttgttatacttttgggacaataagatcactgtttgatttgaataaaaaaactgctttcctcaagtttcaaaagttggttcctgtggcctagcattttgaggtttgatccacaagtccgtttacaaaattcccatcttcatgatttcctggaattcagttatatagtaggctgcttctaaactggttcctagtgatctctaaatcctggtatttataagcctttgtgtaaattcctttcttgtgcttgggctggacccaatgacttgcttctaatgaatagaatatggcaaaaatgatgaaatatcaatgtcaagattaggtaataaaagactgcgactttcaccatgcttgtactgtctctcttggactcctttcacatgccttctctgcaatagcaaactaccacattgtgaactgtcctactgaggggtccaaatggcagggacatagggtagcctctcgccaatggccagtgaggaactaaggtcctcagtccaacaatccttgagaaactgggtcctgccagcagttacattgagcttggaaaccgatcctcccctagttgaactttcagatgaggcaatagacccagctgataccttgattgcagctttgtaggagactctgaagggaagttgaagattactggggacagttttagaa

SEQ ID NO: 29955 - DNA, 1205 bp, Homo sapiens
ttgatgagctcaattttttttttcttttatgagtcatgcttttgatgttatatccgagaaatctttgccttgtgcaaggtcacaaatatttacttttgtgtttttttttctagcaacttaacaattttcaattttgcatttaggtctatgatccattttgagttaatttttgtatgtgatgcaatgtatagaatgtagttttgttttggttttgcatttttgcctataggcacagttctagtaccatttgttgaaaacagtatcccttctccattaaattattcatctttttacctttcttaaaatctcttaaccatatatatgggtctgtttctggactctccagcctattccattgatctgtttggtctgtcttgaataccacactgttttggttattatcgccttatagtaaatcttaaaatcaggtagtgtgagtccagaatcttattcaaagttgaaaacaacataatgtaaagcataaatgtattttctagtcagtgttagtgtatgtctaacatacactagtctagtctagttagtgtatgtcaagtatatacactaactttggatgatgtagtaattgtgaatgcggaccaagtgagatacacccaccttcaccctggggattttggaaacactgtaggatgtgtatatgtgtatgaaaaagaaaatgagagagactaacatgatggccagagatctgaaaactatttggatctctaatcaaataaaatgtcttgttaaggatatagatattcttattaaggatataggtacatttaaaaaatcctgtctttatatttttatggacatgtctacaaatttaattcagaaaactctaactcctttgggctgctgaataaagtttctaggtagaaacagaatgtgactattccctattgctcaccatgagataggacttaatattaaaaacttgcttgatgcagcgcttgactagttacaagtttcctctatgtatgtaattgcgttaagttctcacaacaacccttgaagcaggtcttcacctccccattctggagataaggcatcttcggagtcttcaaatcactgactcactgttactggcagaaagcgtctgccagtttgagttctttgtagattctggacaatgagaacacttggacacaggaaggggaacatcacacaccggagcctgtcctggggtgggggtaacggggagg

SEQ ID NO: 29956 - DNA, 1025 bp, Homo sapiens
agacaagaagtgtatgatttctgaaacaattagtcatttctctctggttgcttttatagtttctaattttctgttgagattctctattcacttccttattgtgtttatgtttttcctttaaatccttgaacatatttatactagttatttgaaagccctctgtaaattgcattatttctttcattttaacctgtgtattgtccaatttttcttctagttgtgagtcaaatgttgttacttcacctggctagtactttttgatggcatgctggacgttgtcaatccaacattcttgaatgtttggattttgtcctcttaattctggagtcttgaggatttgtttgtttgtttgtttgtttttggttttgtttttctccctggaagttagtcaatttacctgcaggtcacctcgatccattcaaagcttgttctaaaatttgtgagaaaagatttagagtagcattttgcctagggttaaaataaccctgttcccaagggttgaactttctagaatctttactgaatccctaagatgctcagttaagcctttccaacctcatcagttggaaccaaaacattccccagtcctgtgtgagttacagaattgttcttttctcagtagtttttctgtgctcagtctcatggtgtttaatcctgaacacgtgcaacttagtatttgatcaaagattcaaggggacctatatgccagaggccagatgttcaggcctaaagccattattgctttaggacaaatagttatattgattgcttattttgggatttcttcaccatttatgatatctgtatttatttttatacctcatacctgcatgtggcacagacttgaggtactaattcctctttggagaatttttttcccattggggactctgagcagatgacaaacttcttattggatcagtaaatggaaattttctaagctctttttccccaaataaaccattcttagagttctgcattccagttcttcaacttgtatgtgttcaaggctatgtgtcctatca

SEQ ID NO: 29957 - DNA, 1037 bp, Homo sapiens
ttttgagacacattctaccttgctcctagctcaataacacacttgcataagctttcctctattcctcttatttcttgcctgtttcccactccttttcattcactttacaaaatagcatatctgtattcaaactcttgtctcaggctctgctttctagggataatccatacaaaatcatacaatcagttcccttgacatgagtaaatgcacgcattcagctgatcccaaactacttcttcagtctgtgggcagcccatggtttacttacagcttctctctcctgtctttttgtgcctgcagagtcttcttggacagcacctaagatggtgcctatttcagcactctctttgcaaagaagcccatttctggtgcatagaacacatacaaatcctaagtgacaaaaactctgggcatgcaggctgactcgaacgcacccatctttctttgttctactaccagtcagcctctcttatgttaaatttttcaggaatggggaggacacaaagccactgtggcagcaaggctcaaaggactcattttaaactctccaagtattttcctcaaaactcattccctgcccattatggtctccactttgagggcaaggtaggattcatagcatcacagcagctctctccaaaatattaacttttaatttgacccttttatcttctccaaatttctttcgtagtataaaggtggatcttcaactaagaattgcaaaaactggttatcaaagactacctttacatgtcctgcatagatacctcacaacttgatttgaattgtgacctttattgtcttgggacctcagccaagaatagttcaaactgaatattattacatatacaaagaaaaatagttttatgggtgctctgagtccaagatctgattaggatacagaactgtttgattgtaattaatgttgtggcatatttgaaataattataaggatggaaagttcctagtgcttaaagaagagtgagggagataacaaaacattaaacttaagctctctctcaattttaggaaataac

SEQ ID NO: 29958 - DNA, 1070 bp, Homo sapiens
aagccccgcctttgactaatgccacgaatgcatgctgcatctcctcaaactgttctcaaagacagagacttatctttccttatgctttgttcaaaattacagtggttctcttatttgtgtgtgtgtagttatatatatatttatttttccccatatcatttcataagatattccataaggcttttgtctttaaatgaagcatttttttaaaataattaacttctagtttacttttagcttttaggtggtgtaaatctatataaaaagtcaaagctcaagaggtcacttagtctacctcaaaataccattgcctagatttttttttaactgaaaagatctctagtaacatactacatcaaaatagacttttatgaagtcagagtgcttctacatacattcttgttgcaatctaaatgctttcttctcttttgtgaaaaagtattcaatctttctaaatagctgagtaatttagccagcaatcttttcctgtggcaaatgctaagtaggtctcatattctaaccaatatgtaatatgagtctttaggattgaaaaataaagaaatgttcactagcaatatattatatgcataggatgatgtggtagttaagagcataattttaggttcagttagaagctcagcttttgcttccttagataccttgagctcccttagcctttttcctcatctgaaaatgggataatacttgaacctactgcacagagttaaaatgagggtaaatggaaataatcaatacgaagtgattagcatggtgtctgccacacagtaagttcttaactgttactctgttgataaagttatcattttaatagcccagctgttctactggatactctcaaatgcattctacttatggacctagaaatttccatattccagaggtctacaggaaaaggcaagttatacaaaagcctacatttttctgattccttgttcactcattctgaggacatttgagttacatctttttaaaaaacttttctttttagttttatggatacataataattgtacatattttgggaggtacgtgtgatattttgatacaag

SEQ ID NO: 29959 - DNA, 1125 bp, Homo sapiens
atcagtaaacatgattcatcacatcaacagaatgaaagacaaaaatcatatgatcatctcgatagatgcagtgaaagcatttgcaaacattcaacattccttcataataaaaagtcttgatgaactaggcacagaaggactatatctcaaaataatgaaggccatctatgaaaaacccacagctaacatcatactgaatgggaaaaagttgaaaatctttcctctaagaactgcaacaaggcaaggatgcatactttcaccactcctattcagcatagtactggaagtcctagtcagagcaatcaggccagagaaagaaataaaatacattcaaattggaaaataggaagtcaaattgtccctctttgcagataacaggatcttatatttagagaaaccataagacttcaccaaaaaaactctcagaggtgataaagaaatttagtaaaattctaggatacaaaatcaacatacaaaaatccgtagcatttctagacaccaataatgaaataggtgaaaaagtaaccaagaaatcaataccatttagaataactacaaaaaatctgagaataaatttaaccaaggaggtgaaagatctctacaaggaaaactgcaaaacactgatgaaagaaattgaaaaggacacaaacaaatggaaaggcatcccatgctcatggattggaagaatcaatattgttaaaatgagcatattgcccaaagcaataaacagactcaatgaaatccatatcaaaatgccaatgtcatttttcacagaaatagaaaaaacgatattaaaattcacatagaaccaaaagagagtcagaatagccaaagcaatcctgagcaaaaagaacaaacctggaggcatcacactacctgacttcaaaatataaggttacagtaaccaaaacagcatatgcatctaaaattagaattaaaaataaaattaaaattagaccaatgaaacagaatagactaatggatcagtatatgtaaatccacatatttagagccaaccgatttttgacaaaggtgccaagaacatacattggagaatgtatacccttttcaataaatggtgctgggaaaattggatatccttgtgcagaagaatgaaaccggact

SEQ ID NO: 29960 - DNA, 1025 bp, Homo sapiens
ctttttatttttctcaattctctctggtccagtggaaacccagctttccttagacatgtatgaggcaagtatgtgggaactcctgttgtagttggcctttctggaaatgggaattttaaagtaacaccgcctggctcaaagtaaggagagtatacgattttgttaaacgaaatagtctccagatgcattctgtgaggcttgcagagaagagtatcttttcacacttgatctgtaaaatcaagttgcttattctgtgcaggacactaaaccacatactcccagattctggaatgattgtccaatatggtgttacattaagatccatgaagaggattacaatttgttaatattttggcataaaattttattatgtctttctcatgttttccctattttttttttaccagaggctatcgtgatgagtggatttttagcaaataaataaataaaattcagataaatatttagccaatccagacagaattagtccatgcagctgctttctcctagacacactgacagcattactcagtctctgcaggtttcatgagccaaaaagttaagagagataagggcagagccctttcttctacgttggttctccagtggtcagtagaacatttctccaggatatagcacccaagcactgggtgtacaaaaatagcctttctgaaatcggggcggggtgggggagggttcttagtgtaagaaggaatcatttaaatcctcgtggtcgtggtcttggtttacttcaatggaactctctctagactgaatcatttcccgaaggaccatcaagcgaagtgccaatttaatctcaaatcctcaaaggaaaagcttacagttgtcagtggcgcgtccttctcaggatggaaataaaacagctctagctttctgctgggccaggaagcattgattgcaggagagagcaaatgctctcacagtctaatcaatctcacagagcagatggatacagcaattagtgcaaaaacaattttgccaagaatattaacacttctagagtt

SEQ ID NO: 29961 - DNA, 1105 bp, Homo sapiens
aatgcttgtttgaggctccggaataagaactaaaaaaaaaacaaaaaacactggtttcatgcttacggggtacacactttggtgcatcccgtgaacacaaattttaataccaaacaatccttgatgcttcacctggggctgccaagcagtttgtaaaacagaggaaaacatttagtgcagtctgtattatccttttccaacttttctgtttgtgcaagtttttgaagattcattggccaaacaatgaacaacaaaggttttctgagagaagacaaggtggacttttcattttgttagtaaataccagtggcactgttgaacgaaacaaatacttttatctcagtctttcaaatcagtattaatgtctgtgtttccttccactgacagctcttcttctagtttcactgaaaaaagggtgttagtatttttatcttggacactctcttccaaatccttcagcagctcctcttctttatattctgccacatcgacctctaaaccggaattgtccttcagtttgccgtggtgcttgagatagtaccgctggttctgaaagaacttgatgatggtgtacttgggaaggtcgagctgggcagacagagtctggatggcctcttcgtcagggtacaggcccacgtcttgtatgaaactctggaggattcccaaggcttccactgaaatttttgttcgtggccgggtcttctgtcggttttcctcatctgactctgctggagaggccaccgtgggttgccgtggggggagccgagggcctgtctgtggctgctgctgtggctgtggaggcggcggtgcctgctgctgctgctgctgctgttgctgttgctgctgctgttgctgcaaagaaacaaggagacaatcagagctctgctatcgtggagttccacacaaagccgtctccaatcaggaaaaatgtggtcccggatcctacatatagcttctttgatagggatgaagatttagaaagaaaaggtaggccggcgaaatggccgacagcatttacaaaaaaatcaaaatgatatgactaggaagggatgaattaagacagctttggggggctactgcacttacttatcagagatcagcagag

SEQ ID NO: 29962 - DNA, 1035 bp, Homo sapiens
ataaaggagaatacagcatgtattcatgctgcttttttcccctcatccatggttattgaattcactggaagttattcatcttttttcagttgatcatcattttatgccgagaccacaattccaaacatataggaattttttaaaattatgaattagggttcttttagggaaccaaccctcctttttaaagatacaagtgcccaccacaactcctagttttgtaaagcaaagcaaaaaggtataaatgattataatgagcaaaacatagtaaaacgttttccttcttggatcactttctgtccccacaggtcccaggagacattaaatcctcctgccttaatttaccaaaatgctgcatttcctaaccagtaacaatatctgtgtctgagaaagacatcaggtttggaatggaaaaaaatacattctcggtatttaattactgcttaacagtaatttattgtagcaggcagttgattttccaattctgaaagcctgaaatgaagctgaacagaaatttgaaatttttaaaaaaggtttttttttctttcttacactcttatatactcatctgcttccccaagttatcagccaagcccctataactgaaagtatgatatgctcctctgagttgaaccgagaccattttgcccctcattttttgaatttgctttttcctcccaatagtcttgtatagaaagcacatgggctctgttagaatacagaattatgcaattctgggtgcagtgcattaaatgacatagtttgataaactcttaagccttacagctcagatgttaataaaatattgtagttggccacaaatttcatagcacaaggctaagatcatttttcagaagaaaggggcatttaatctggattatttggttagttgctatggtctgaatgttagtgttcccccaatattggggttcatgtgttagaacctaatatcaaaagtgatggtattaagaagtagggcctttgggaagtgattaagtcatgaaggcttcaaccctcatgagtgacaggagtgcc

SEQ ID NO: 29963 - DNA, 1044 bp, Homo sapiens
caatgtgaagaatatatcctctgtccaaatgggatagtaaatgccattggtgcctccattctccaaagaaaagcaggaaatttagatgtatatgaaaaattgaatattaaatgttgtcaacttatccatattttgaagtacactgttagtccttaagctaattttgacctacagacaaattttgtatagcttttgcatgtatatttctactgaaggtcaaagtgtttatacccattggagaatagtagccactctttatctgcaagttatatgttccaagatccccagtggatacctgaaactgtggatagtactgaactgtatgtatactgttttgtcctatacatgcatacctgtgatgaagtttaatttataaattaggcaaagtaagatattactaacaatagctaataataaaattgaatagttatgatacactgtaataaaagagactatgatctctctctttcaaagttatcttattacactgtactcacctattttcagactgcaattgacctcaggtaactgaaactccagaagagaaacctcaaataaaggaagactattgcctgttttatctcaacctatcccatagccatgtgcctaaggactgtcttgaggatatttaatttttgtcatttttttaattgagtccactaattacttactcttcctagctgctctcttgctttcatgccagacttgctgccactcaatagtcagaaatatgcagcaacaccccacactttcctatagcaattataatgttagaaatactaggtatcctttcataacgcatgctgaccattttcttgtagatttggtcccatgggtacatccagattcttaaagtcattcaattcactgggccatcaggtctttaagttcttgacaacttggctgtacagattacaaattttattcgatcttcttgactgaaagaaagtcaacgttcctgggttgttttgtctaacttataaacaataacaatcatccattttatgtgttctgtgagttttgaatatgaaggggcagcatgag

SEQ ID NO: 29964 - DNA, 1050 bp, Homo sapiens
caagtagctgggactacaggcgcccgccactacgcccggctaattttttgtatttttagtagagacggggtttcaccgttttagccgggatggtctcgatctcctgacctcgtgatccgcccgcctcggcctcccaaagtgctgggattacaggcgtgagccaccgcgcccggcctgtcaccttcttatttcagaccatcttctctccccagaataccacaacagcctcccagctaatatctctgatttgactctttccataccaattccttctctagacattggcaaagtgattttctttaaaaaattgaaattagataattttatttcttgctaaaagcttacaatgacttcccattgtgttcggggtaaaatacaaatatctaaccacagcctacaagacccagtatgatctaactcctgtccatattgcctcacttatgctccagctcttattagttacaggaacacaccaagctccttcccatcctacggacttttactctgttctttcctctacttgtaaccagactttgcatagctagatccttccctttcttaggtcacagcttacatctcttgctgaccactgtatttcaagtggattcctcttcttttattctttattaatccttattttttcacagaacttatcacagcttccaattattttatagtatcgattgccacttgccattagtttttgaccatccaagatctaaattcccatatatttagagattctcctatataatgaatctaagcctatcctcaacatggaagtcacaagtgcaaatactgactttctcagagtcttctgcatcttggacacatgacctagatcataccattcagatcatttttccccaactttgacttagaagctagtgttgttatgaattttggtgagagaggtggcagcagcagcaacagcagttaaatccatttttcagaaactgcagagcctgtggttatgatgaaattggtacactgtccagctctaatgtggtgagaagctcaaggctggatatgtctgttcaacagtggcaa

SEQ ID NO: 29965 - DNA, 1045 bp, Homo sapiens
caacaatctaggttttaataagttttccagatgattctaatggcatgttacgtttgagtagttgattttacattggtactaacattgattcacccatacatggaataattggggggtttttttgaggtgtggtgtttgtcagatttttaaaaacattgttgactgggcgcggtagctcatacctgtaatcccaacactttgggaggctgaggcgggcggatcacgaggtcaggagttcgagaccagcttgccaatgtgatgaaaccctgtctctgctaaaaatacaaaaattagccaggcatggtggcgtgcgcctgtagtcccagctacttgggaggctgaggcaggagattcgcttgaacccaggaggcggaggaggttgttgcaatgagccgagatcatgccattgcactccagcctgggtgtctcagcgagactccgtcttaaaaaaaaaattgttcatgcaactaacctagtttgagaattacatgtattatgtactgctcacattacatgttatctgtatctctttataggagaatgccttcctgttagccacctgccagacatctttaggaaagtatgatccctctgtccaatcaagagtattctgctttttctctacttagggagtacccatagttttcagtcatctgtaccactgctgctctcctttcttgtcacaaatgatcaaggcctgataatacacaaaattaattaagaaatttagtgtaggccgggcgcagtggctcatgcctgtaatcccagcactttgggagggtgccagcacactggcagatcacgaggtcaggagttcgagaccagcctggccaacatggtaaaaataccagaattagctaggcgtggtggtgggtgcctataaccccagctactcaggatgctgaggcaggagaaacatttgaacccaggaagcggaggttgcagtgagccgagatcgcgccattgcactccagcctgggcgacagggcgagactccgtctcaaaaaaaaggaaatttagtgcaattattaactcttaagtgaag

SEQ ID NO: 29966 - DNA, 1028 bp, Homo sapiens
ctctgccgctgaggcaccgtgatgtccatcaaacaaaccaaaaaaacacacattaggtttgttaccaaaattactcactacagtgaatttatcattcatgtcagctttccatgtagaattcctgtcttcacaaatgcccactcctttaattaacagatgacatattttttgagaatatatgacactcctgtcaatgttatcaaaaatcttatagtatgctggtatttgttttttccaaagcagctcaaaagcattattaatgctctgtagggttttttcagtgaacataaaagatgacaatagtttagaaatcatgaactgtctctgaacagcaatcactgagggctgtggtttctttctacccatccattggaaacccagcgtggccagagctacatgttgcttcttatggagaaaaataccagttaggtcaatttcgtgcttgcatatggaacagggtaatgtggtcccttgctcatagacctgctcctcttcatggcgtttggtgtgtctcactggtcttgactttttctttctaaaacgttttcttttgggtaaaagtagaatatcctcatctgaatcaaatgttgatgttttcatattccattctcttgatttccaaaacactctgcaaacaggatgaaagatatttacatgccaggatgatgcagcgaaaatctcttcaagcaggctgttatcattgcaatttgatttggctcctcacaatcttatataagcctaggattaaatattctgagtcatatttctcaaaaaacatgtaagtactcaattaactggtgattgacctgtgtctccctgaaataaattaggcaaaaattccaaaaagtcagctagacatctaagcaaatgctcagataaatcagcacagtattttaccttagacatgcgaaagtatgtatttgagacctgagattctgatttctaatatggacatacagtcatgtattgcataatgatgtttcaggcaatgatggaccatatgcaacggtggtaccaaaagattataa

SEQ ID NO: 29967 - DNA, 1024 bp, Homo sapiens
tccaccccagctctgccacttgtgtgatcttaggcacaggtcacttagtttttctctgagcctcaatgactgcatgtataaagtggtgatcatgacttcaaccttaaagttaaaagaaaaaagtgtccccagaattcctagaacataaagatgctaggttaatgctggctaaataaacggaattgcctggtgctttactcgtatatcagagtcagtggccacaaagcatttatggagaacccagttgcttgggttctcggcaaggtgccacatttaaggagtttcatgggtacaggactataaaattagtcttaattgaaaaaataggcccagggcatggtggcttgtgcctgtaatcccagcagtttgggtggccaaggcagacggatcacttgagctcacgagttcgagaccagcctgggcaacatggtgaaaccctgtctctacaaaaattacgaaaattagccgggcatgatggtgcgtgcctgtagtccctagctactcaggaggttgaggtgggaggatggcttgagcctgggaggcagaagttacagtgagctgagatcatgccactgcactagaccttgtctcaaaataataataataatgatttataatctagaagtagcactggttgtagaatatacagagagcagaggtagatgtgccaccacaaaacaaaaagcatcctctgttggctaagggctggtgggtggggcactagaacaagccttatagttggagagcgcccccaacacctttgtatttgtcagtcactcccccagagagcaaattgtctttttcatttgtcagcatttagagcagtggctctcacccaggagctatttaacctcccaagggacatttgacaatgtctggagacattttcaatctttgcagttgggaggagggaatgcaactggcaactagtgagtggaggccagtaatgttgctatacatcccacaatgcacaggacaactccccccaacgaatgattatctggtccaaaatattaatagaatt

SEQ ID NO: 29968 - DNA, 1037 bp, Homo sapiens
cctttcatacgttgagacctgctgaagcatacagtgtggtacctggtagaataattgataatttttcatgcttgccttccatttcataggtcagatcacttaaagaaggctacatcatgttcactcttggctacaaacatagggaagtgtgaagagtatgtggacaaagttaaggaagctttctatcaagtgttgctaaaataatggtgttctagtacaggaaacctgggaaatgtacgtgtaagtagaaacccaggactacatgatgaagccctcttcatttctaaagctgggagctcacagaagtcttggaggagcctgcaagtgtgccttcagctgggtgtgccccgtctcatcttcctaagattgctaacttcttcggttctatgggtttcccttctggtccatggggcagagatgcagctggtgccttggaacctgcaaggctcaaccttagcctagaccttagctgtgtttgtgggacatcaggagtctggcttgtggatttggaatgtccatcttttgagatggactttcttggaactcaccacttcatggacacccactgggggcaatggtagcaaagtgtgtgggtcagctgcgtgagctgtagcatgcagattccagccagcagacaacaaaagaaaacaaaaagcaaagcactcaaatcaaataccacctttgggttttctgtttttctcttgtgtatatggcagacgacaaagtcaggggtgaggggatagctgtcatataattagtgtacattgttctcatgtaaaaccatcagtccacggctgcctgttaaataattttgtctctttctttattccatttttaggccgaggagtcttgtaaatgtaatggctggaaaaaccctaacccctcacccactccccccagagccgacctgcagcaaataattgtcagtctaacagaatcctgtcggagttgtagccatgccctaggtgagttcctaaatcttcaaggaaagtataacgagttcattgtagcgtgagactcttaacttactgaattct

SEQ ID NO: 29969 - DNA, 1021 bp, Homo sapiens
cagttagagtgaggttcacctgggtgttgacatgggttgggattaattaggagactggtaaatctagagataagttaaacaagtctaattctggtcagcatccccaaagagccaggagtagtctctggatctggtagagatggggttgtttaaggaaagtggtattttaggaagactaccctggcagcagagagaacagtctagggggctattttattatagtaggtttgacattccaatggaagaaaggtaggatggggaaatgcagtgtctctgagagagaatgaggaagctcagtggagtctggtggctggtaatgtgtggaaggtaaaggacactaaaggaatgaatgatgggcttgttggcagaaacagggccagcaagaggtagctgccattttgaggagggccatgaggagttcagtctttgagtcattttccgtgatggtggtgcacctattttgttgggatagggaggatggaaggtggggttcggggaagattggagctggagaagaggttagctggtgatgtgtatttgttgagaacagaaagttcagcgctacttcctcagagattgagttaggtgagagctgaaaaggatttttggtcaaaagggatctgtagttggcctccttggagaggggctacattggagggtctgagaagttggcacatttagacaactacgtatttatatagtgtagtcatagctgttcttgtctggctttcttattacagggaagcttctctttgataacaacttgtctggacctttttccacccttctccagcagactgtccactccatctactttcatttgatcttcctccacctcattgtttattctaggaagcttaacctttctcatacaatattctcctgcttcagtgctccccctaccactccagacctgcgtttatttcattctcagagtaagagctatcctcttctgctatgaaagttactcaccctttgtacaggggagcctctttcttctcttctgggaaactgttgctgc

SEQ ID NO: 29970 - DNA, 1034 bp, Homo sapiens
gccttttctgtcttgtcttcataacttgtatgtgtatgtgtctctgtgtgtatgtgtgcacacatgtgtatttaggactctgaaaatccacaaatgtgtatcttattagaacaaagatgagaagcttggatgtgtcccatccccactgtcttgagagaatagctctgtgtaattttttcctgtctcttgcatctcagaccaattttctgtcagcacactcggccagggatgaggcggcaaggttggaagagcgcaggggtgtaattgaatttcacgtggttggcaattccctcaaccagaaaccaaacaagaagatcctgatgtggctggttggcctacagaacgttttctcccaccagctgccccgaatgccaaaagaatacatcacacggctcgtctttgacccgtaagtggtactttctgttccttcttccttatttcctttttaaatgaaagaggaactgcttagatagtgaaagtcagccatagtcatccaccgaatactactgcacctgtcttgctgtggatacagagcttcaccaagctgattttcatgtctgaaagtgctaagagtaattttcaacaatttacaaattttcttgttaatgatgatgaaactttatattttacattgctgatgactctcctgtgcttcattctttatagcagtgagagaatgtaacactaagatgttctgctttcttcataatcaaaatattggttttggtatcttaactaggtgccattattgcccaggtctgtgggcaattattgggatataagacaggttaactttgaaaatccattgcttaaaaaaaaaaaacaaaaaactaggccgggcatggtggctcatgcctgtaatcccagcattttgggaggctgaggtgggaggatcacctgaggttgagagtttgtgaccagcctgaccaacatggagaaaccccgtctctactaaaaatacaaaattagccaggcctggtgacacatgcctgtaatcacggctacttgggaggctgaggcaggagaattgcttg

SEQ ID NO: 29971 - DNA, 1050 bp, Homo sapiens
agatacatgtgcttttatgttcattgcagcgctattcacaataacaaagacatgaaatcaattcaggtgcccatcaaaggtagattggataaagaaaatgtagtacatatacaccatggaatattatgcagccataaaaaagaacaaaatcatgtcctttgcaacagtgtgggtttagctggggccattatcctaagcagattaacacaggaacagaaaacaaaatactgcatgttttctgttataagtgggagctgaacattggggatatatgctcacaaagatgggaacagtagacactggagtttccaaaagaggcaagagagggagaggagtaagggttgaaaaactacctgtcaggtactgtgctcactacttgggcagtgagatcattagaagcccaaacctcagcatcacacagtatacccataataccccctgtatctaaaatgaaaacaataaattaaaaaagatctcttctccatactgattactagaggtacagagagcttaggacgcctcccattcccattaacagtcacttctcaggagcccacaatctttaaggtgctacatgaggtgagtggaagccatctgtaggtcattgcatttgagagtcccttggtgaagagaaggaaactttcaaattgaaacagtcttcagcatattctctgaaggtgtcgatttaagagattgcccttgggattcttttttttttttttttttttttttttttttgagacagcgtctcactctgtcacccaggctggagtgcagtggcatgatcttggctcactgcaagctctgcctcctgggttcgcaccattctccttcctcagcctcccgagtagctgggactacaggcacccgccaccatgcccagctaattttttgtaatttttagtagagaaggggtttcactgtgttagccaggatggtctcgatctcctgacctcgtgatctgcccacctcggcctcccaaagtgctgggattacaggcgtgagccaccaagcccagccaggtttcttttttcttttttttttttaaga

SEQ ID NO: 29972 - DNA, 1042 bp, Homo sapiens
taagaactgtgaaagtccagcttgggtaatgtagtgagaccctgtctctacaaaaagtaaaaaattagccaggtgcagtggcacacgcctgaggccccagctacttgggaggctgaggttggaggatcacttgagcctgggagtttgaggctgtagtgagctgtgattgcaccactgcacttcagcctgggcactggagggagaccgtatctcaaaaaaaaaaaaaaaaaaaaaaaaattgtggaagtgttaaaaatgtgaaaaggaagagtgaaagggacgcattagctccttgaaaactgagttatttacaggtgttttctatagcatttaaatgtttcacatgaatattttatatatttgtagtaatgatttcagtagcctacaccctttaaagtgaacacacatctatatgcttttctttctctcttctctctgacttaccactatttatttcagtacaagaaaataaagggtatggttgactcagtctagaattctgaatggaaggctgatttgggaatcaatattgtccactatgtgcaaaatatgttaaaactctttgtgtccatttccaaccataaattaactgatttttgcatcctcttcctctggaccatctcagcttcttttgggaaacccccatgggaagctgtgtgactttggggccctttcagcccctgtgcacatgcactctgatgacgtgcagcgataggtctagcagatctcgtcgatcatagcctacttgcagcctgctttctgaaagtgttttgcttggtcccacccgtgaaggttgtgaacttctccagttggataccacctgtatgcatagctgagtctcacaaggggggaaactgacctaattgagcaaggccagtgatgggctgaaatgtgtgctggacaaagttaaagctataaatggtgttcttcagtagggcagtattttttttcttggtattgttcagatgctgagtaaaatatttagtcttgtccccaagattatcttgtatttgaagacaagattgacaaatcagtaatttta

SEQ ID NO: 29973 - DNA, 1615 bp, Homo sapiens
tggtttacattatttcttgtcgtcattggttgtgactaggtaagaatgggtgatttgaggcaatgatgttaaatgtaaaactctctctccctttatgatcatgacctcgaattttctggtcagtgtttacttttaggaaagaaaagtgcttacctggaaatggttaatgttataaagatacatggacaaagaggagaaaaataacctcttaccttatgctgctgctttgggtctggtgcagtagttagaagatggctgtttggttatttttaagacacttatttctgttttgagatgagatcagcattggaaccaggccaacctggagtttttctggtttaaaatgataatcttatgcattgaaggtgagagggccgattaaataaaaattttcccaacgttgaacgcaggtagaatttattgcttggtatgatttctgagtttactgatcttacttttatgtaaaaacaaagataacaattttgtgtaggaaaaattctaataggacttactttgtggtgaatctaatatggttcttcaaatgaatcatgtacagtttataaacttacagtaataatattcaaagaatgtttcactcaaatagaacaaatatttctttgttaggtaaaaccgtttaacctaagactttttgtcactcttaggactgtattacatcaaagccgtttcagatggcagatcattgtttagcttttggtggtcaatgattataagtggatggatttgtggaaaaaccccagtttgaattaaacctaacatcctttgtttcttaggataatatttgttttaatggtctgaatctttaaaaaacccatattattaatatattacatatattatttttgtaaccttttttatgaacaattgaactgataaataagtgaactttatacacttctttgcttaaattttgacaaccccaatcaccggcaaaataaacaactttgttttaataagtttgtttaaggctcatttttaataaatgaaatccacatacagtatcatgtgatgtagactgcaattttgctattagataaatggggaaaggaactatataaaggttattatttaaataaacaaataattgaaccatagttctattaaaagtaaaagaaacgtttaactatagtgtcatctgaaatttggaggtttactttgtctttgagccttagtgacatcattactagttcatatgtaagctcttcataaatagagcaaaatgtgtattacaggttttaatttttaaatgtagaagtcacacataataagcccttcaaacagtttcagggaagatatctactttagttaattttctgacttgggaatttgtaaggaaattctcacttgtgggctgaggattggatagctgataagtttgctttagaagctaggtctgcagtgcagtggctttggctccttttattgattctaaaacagttgcttggactgggtcaggcagagagaaaggttatttaccttcgtatggcactccctttggcaagcaaagggtcctctgtgctgtagctgatagaaaatgtaaaactggttaatcaacacttatcagtgtgcttgtgttacttaatatggatgtttggtg

SEQ ID NO: 29974 - DNA, 1070 bp, Homo sapiens
tagatggaacctctgaattttggtgcatctcttaggtgatatctagttaagcttcttttggaatcatattgaaggaactgtatgtgtttaagcgttgtgcaaatctgttatttaaagaagttgagactatcaagtcaccccgaatcacagcattcagtgtagataaagttttatgtaaggcatttttagaggaagttattctaatatagtattggttaattttttttcaggttttgaataaacaaatattattttaaagaacacctacaaatgatttaatagattgaattatttcatgtaggagatatttgcctctacatatttcagttttttctcactttattgttgtctttgaagtaaaaatgcagtaagatagttttatttttgaagttgggttaaatatgtcatcctttttaaaaacattactcacagtttaatgggtaaatattttaaaacaaaactttatagctaagaaaaaatttctgctcataaaatcgtagcgtctgtagggccataggcatagaaaattacacttcatttgagtgaaatttggtatatgcttagagtatttcctataagtagtggaatatatttttcttggccttaactgtcatgttggctaacataactgacccatgacatttgcaagggttctatcctgaggccttcacagatccactgatcaataaatgttttcatactactgctgagttagaggtgctgggcagttggttagaattgctcgttaccttggtgccttgcacaccagcttagatggatagagtgggtcaaattgatgctttatccttacagacctctaacaggtagattcactgccccttataaatgactacaggttgtaactttcacagttcttcacaaattgttaaaagcaagatcttagatctgtgcatgtcagtgtgttcatttatacttcctcggtgctagtggagaactggcagctagtgggccagcaaatctccagataaaaattaaaattaaaatcgtcatcatccaaaggataacttgctcctctgtatcacagagaagctaacttgttcaaatgctat

SEQ ID NO: 29975 - DNA, 1023 bp, Homo sapiens
tggaaaggtaaaaggaaatagggatggctttacgtaagagaatgaatgagagcagaaacataaaaggggagaatttagtatagttattcttgggacagtgagtttaacaggttggccctccttcccatgtgggaggtaagatttgttaggactttctaggaagggtgttaaaattaccagttgctgtagtttgaggtttaaatactgagtaaaagagagtgaaattgaagttttgatttaaaaaaattgtgtcatagaaattaatttgtaatatggagtggagaaagatataaagagtttgggaatccagtaagaaaagtgttgcatgaatacaggttcaagttatataagacctggtgatgtgataccatgaagaccaaaaaaaaaaaaaaaaaggcagtggaaatgggagacgtttttgaactggcccaccttgttgatggtgtggttttgagagacaaaattaatgatgtcgaggatgactttaaagagtgtgatatttgtagactagaatggtgatactattggcagaagtggatttgtctctatggcctctacggatcttaaaattgataatacatccctctttatttagtttggctgcctggaaactcatagccttatttgctcctcagttttagtaattaattgcattttgtgtagaaacctcaactctctggttgtatttgatttttctacccttttccctcttttatatccatatcttcatttgtactttcatactacatatatttttgtcagccagctcagagtcttttcgagggaggcatattattggtaaacgtacaatgtgaataactgaaagtttatgtgaatgtgtattggttagcaaaatgctggcatagtttttaagaggagttattaacatgataaaatttaaatatacattgaggacctatgttatttatttagggtactgaattatttgtatccatctctttttcctttatctaaaacaggtaattgaggaatatttttaattcaatcctgtgagttcttgac

SEQ ID NO: 29976 - DNA, 1084 bp, Homo sapiens
gcaactaaataactgatttttaattttaatttagataccaatatgtgacttgaggctactatattggacagcatagatctagaaaaatagctttttaaggttaaacttataagtatatgcttaaacttatgtttatattgggtaagagtaaactacgaggtcattttgatggtgcttgtagttaggtatttatgttgtgtatgtgtataaatacatatatacataactacatactacgtaactacttgtagtatatatttatttatctcccctctgctatccaccattatattctaaggactcttaaatattgtgggagacaatttaagtaaaatacctttgtcagttctattaattggttagatatttattttaaatttcttatcaaaatgaaagcaatattgcaaatgattgtttttaatacagactgtgaggctactgaaactggaaagtttatggttcagcagtgtctgcagcccagagagagaaataggacttcctcaaggatgtggagtttaaaagcaaaaccaggactagtattcagtcccgatagttcaatgtgttgcttatttcactgatagaatgtggatgcattttataaacttagagaatttagaaaactcataaataaggaaaattgggagttcttatccatgatcatgaggtacattggagaagagttggctgggcgcaggggctcatgcctataatcccagcactttgggaggccgaggcgggtggatcatttgaggtcagcagtttgagaccagcctgacgaacatggtgaaaccccgtctctactaaaaatacaaaaaattagcccggcttggtggtgggtacttgtaatcccagctactcaggaggctgaggcaggagaatcacttgaacctgggaggcagaggttgcagtgagctgagattgcaccattgcaccctagcctgggcagcaagagcgaaactccttctcaaaaagaaaaaaaaaaaaaaaaagagttggatttatttttcctggagaggtgaagggtcatgacagcagtgatgaactgttttcagagccttaacattctttattaagcttattctgt

SEQ ID NO: 29977 - DNA, 1069 bp, Homo sapiens
aaaattaataattaatgaaattttcaagtgaatacgaaagtagaataaagttgtaattactttcttcaccgggaaagtaataagtaaataaagactatttagtggcattgagatttcaagagtaatttcttcagtaattttgcaagattattcatattacctactcaaccagactccataattgggctcaggagggaaggctttcccttagagaagcagagttctgttcgtctgaatgttgtccagtcaggctttgggacttaaaaatgcttttgaggattcttaggtccttttttttttttttttggcctgtggactgaacatagctgttcagtgtgtatcattatttattgcctttctcttactatagattatttctcacaggagaagaagttattgctggtagcatgtcagtttacatgtgtctagctcccatctctggaacacataattaagtgtggtcgacatatattcttcttcatttttgccgttgagaaagctgtcagaaatgttacatctggagaacaggaaagactaccctcaaagccagcgttggcctaagtgtactcttaaacatttcctgtggatgtgtggaccgcctgtctctctatctcttcatgacttctgcctgtgtcttgtgtgtgcagaggccaaatagtagtagcagagatggaaaaccttctcctacacatgtgcaccagcatggtcctttgtctctctctttcatttgctcttcaaggcttcgctcaaatactgcttccattctgtaattttctcttcccagcgcacccgtgggacctgttacattgagttagaggcagtattacacggtggtttcttttggagagactggctagactacgtatacatagcctcttggttagttacataccttctcagtgcctcagttccttcatctgtaaaaccacatggggttgtgtgaggattatatgagttaatacatgtaaagcactcagagtagtgcctggcatataagggctcaaaaattgttagttgttgatgctgttgttgctgtttataaggcttgcgtgcatttcttttcttcatt

SEQ ID NO: 29978 - DNA, 1061 bp, Homo sapiens
acacaaaacttaggtgggtgtgttggcttatgcctgtgatcccagctacttgggaggctgaggcaggagaattgcttgaacctgggaggcggaggttgcagtgagctgagatcatgccactgcactccagcctgggcgacagagtgagacgctgtttcaaaaaaaaaaaagaaaagaaaagaaaagaaaatagttatcactgaatagaaatataagatgatcaaataactattgaagttaaaggaaactacaaagaaaatctccaaaggacgccatcctagtttgtttttttgttaagcactattcacctgctgcactagagccagcaatatggacaaacaatactactactaataccattatttgttaggcacttatgaggtagcaggtctcatgcttcatcttttatgctcccagcagttctgtaatggcagagaatagcattttgtttttctaaatacattcaatctctgagcctcagtgttcccctcagacctctcagatcctgggccctttaccctacattttatggcccgcttccctttctgcttctttctgatcattttattttgtatttgatgttctgagttttctctaaagaacaacatatattcgttttagattaatggctttaagaaaatcatttattgttaagaatagtacagttttgtggctcagcaaaaaataattctactgttcagccataatcattttggcaagtttacagcctttttctcaagcgttggttagattaactgaacttctgaatacctttgtggtattttaaaaatctgaaatcacttgtctacaaatagtatttctttttttttttttggccttaaagttttaataatgaaatttttctatgtagtcctctttaaaatatttaagtatagtaggaagcagcagagtttgttccacctaatgtcaattcagagaacattttacattttatattaaaattatgatgccttaggatcgttcttttacctgtgtatttattcattttcacactcgggagttttagttgccactccatatcagtggcacagccatgatga

SEQ ID NO: 29979 - DNA, 1050 bp, Homo sapiens
ttgaccgactgatttaagagctattcaaaggtaattttgagtatgcaatttttgccttttgcaactaccttaggaccttattctggccgggtgcagtggctcatgcctgtaattctagcactttgagaggctgacgtgggaggattgcttgagcccaggagtttgagaccagcctgggcaacatggcgaaaccttgtctctccaaaaaatacaaaaattagctgggcatggtggcacacacctgtagtcccagctacttgggaggttgaggtaggaggattgctttgagcctgggaggcggaagtttcagtgagccgagattgcaccaccacaccccagcctgggcaacagagcaagaccctgtctcaaaaaaaaaaaaaagaacctaattctggagtaagatatgactttaccataatttgtgaattaaggattaacaaggtcagcagagctgaagccaagtgaaagcatttgagaacaaatgactgaaaaatactggatatatggtaagatatgtgtagaaaaagaactctttaagcaattttcattaaaagcttcttagtatgttttccagatactaaaaattttggtcactggaaacaattgggaagcaaagagattgattcaggataaacgtagttaaattagccaagattagggattccagtgaccttgaaaataaatgtgtagattaaaattcaggttattttaatttgatggctaaaataaaatgtgtgtattaactcagatttttttttttttaaattttgagatggagtcttgctctttcgcgcagactggagtgcagtggcatgatctcggctcactgcaagctctgctttctgggttcatgccattctcctgcctcagcctcccaagtagctgggactacaggcacccgccaccacacctggctaatttttttgtatttttagtagagatggggtttcactgtgttagctaggatagtctcgatctcctgacctcatgatccgcctgcctctgcctcccaaagtgctgggactacaggcgtgagccaccgcatccggc

SEQ ID NO: 29980 - DNA, 1072 bp, Homo sapiens
tcgactatttatgtattaggagatccaactcttccaaaaaacatggctagggtaaggttaccagcaatgatttgctatacccatacatttataggcaaatgctataccattagaggaaaataaagccagtgctgctaacctcatcactcagattaatttccacagctgtcattttaacagtgttattataggtcttcaaatgaaaattatgttaacaggtactccacataaatgtgctgtaatccaagggggcacatgtattatatttttgattgtagtaagctttttggcctaattgactatttctctgcaacaaaaaaattagttaaactggaaaagcataataaagctatatgctctttactaggtgatatcttggtggtttaaatttacaagttgtgtatacatacatattttcctgttgaagacttgatgactgactgaaaatgtaccagggtgtcatcaccataaaagttgttgcatctatgaactatacagcagtgtgtatgatggtgtgagttataataaactattcattagttttttgctgcatagttttaggatgctgtaacagtgatcttgaggactatgacttaaaaaaatgaataacactatcattcagcttgctactctgcagacaatgtgtatgaaaaagaatttgtgtgatttaacctcagacattaaaattggtttgccagtaaaacaaaacaagattaaaaaaaatttttttttttaattttttgagacggagtctagctctggcgcctaggctggagtgcagtagcacgatctcagctcactgcaacctctgcctcctcggttcaagcgattctcctgcctcagcctcctcagtagctgggattacaggcacgtgccgccgcatccagctgatttttgtatttttagtagagacgaggtttcaccatgttgctcagtctggtcttgaactcctgatctctggtgatccacccacctcggtctcccaaagtgctggtattacaggcgtgagccaccacacctggccaccagattttcttaaaccatattatttatgtccccgcagtagaaagaa

SEQ ID NO: 29981 - DNA, 1416 bp, Homo sapiens
atgtttaaaaccagtggcagtctgtaaataccaacaattattatcttttgatacccttttaagttatgaaactcatattgttgaagaaatacctggattcattaagaaaatgatttttttccctctttctttcccctcttcttcttctctcttcctttcccgacccccttcctttcctggaaggtctttctgttatatgaacagagtgacgagtccctctctgttgcccactgtgttgcggcaggctgcagtgcagtggcaaggtcacggttcactgcatcctagctcagcagatcctcctatctccgtctcccaagtacctgggactgtaggcgcgcaccaccatgcctggctaatttttttttttgtattttttatagagatggagtttctccatgttgcccaggctggtcttgaactcctgggctaaagtgatcttcctgcctcagaggcacctcccaaagtgctgggattacaggtatgagccatcgcgcccagcctaagaaactgattttcagtgactgtattccttcatatgtgtgttccacaatttaatcctagaattctttggtttttaaaataatgatacactggatattatttgtaaatattctgagtagctcttattatttctttacagcaaatgctgtgtaggtaataaatggagtgatgtcaaatagtatcccttttttttgaagagttttgataaatattgcctaattgcccttatttattcactcatataaaatcaataataattacagctaacttgtttagagtgctggtcaggacctgagctgtatgtggactgttcaatgtaatcctcaaaataactttttgaggaagttgttatcaatgtccttatcaggaaatatctgagtgcctactgtgtgtaaagcgttgtgttaggcagggggactgcagtaatgagcaaccaaccattgttgatgcccacattctagaggatgtgcttaacaattactgtcagttaatttaattgcgttgtgggaaaggctgtgaaagagaaatttgggctgctttgaaagtatatcacacagggtgagagaagcggtgctaagagagaaattatctttgtataaacatctcggtagcctaggtggagtagccaaggtaaaaggacgtgttttaggcagaggcggcagcatgtgtgaaggcactgaggtgctaaacggtggacatgtcccggaagctgaaatagaccaattgtgcctggaatactgaggtgttacagtagattgactcaagataaggctgggcctagatcaaatcctgcattgtgtttctggccacctgaaggatttagtccttcctaagagcaatgggaagcctttgaagtgtttttagggaggacccgtaagatgatttatattttaaaaagaatgacttacctgcttt

SEQ ID NO: 29982 - DNA, 1035 bp, Homo sapiens
atcttaccatgtaacttattttttgttgttgtaataaacatggttttaaaacagttgtcactgtttataattgtatcattcattaattttcaggtaataaatggacagatttggcttagtagttgaggcgtgatttcagggactgcttaccctgctttcttcagtatgttaaaaaatgaatgtgagatctaccggaggaaggagaaaggaaaaaaacctttattttccaagttagcaatctgcagttttgggaaacctagcttctggggaaactgaaagcacacgcttggctgaagggagggaaatagcagcatttaagccttccagggtctgtcttacatattcatcagatttggggaatgtctgtgaatgtttacagggaaagtcaaatgcatgtccagatataacattaatataacatacattctatattcactttggggtggggttttaacattaaaatgaggaggaatttggttctttgcatcaaaaggtgaactataagggacaaagatgttttatgtgccatctctgtaagccagttggaaccagcttagggtctatagctgcttatcaggagagaatatttgtaaagctggtgttttctctaatcagtgctgttggctggacccccaaggtgggggtgttcttgttagctagtgtcatgtggtctaccagagtcagttggataatgttttcctagaatgagcttctgcttaactgcaggaagaaaaccttatggcaatgaacaaaccttatagtagttaacagtgtaggcatacatgaccaaactcttttccctgctctggccacttaattttctctgagggtctcatcttagccacagagcccatcttgtctgtcatctaggggtacattgttgacagttacctttgttaccattcaccaatgcttaagatcaattaatagtagacattgtctctcattcacctattaggccatacattcaaataagcatgggagagaaaacacatttgacttattaccacggtaaggttcaaattactgatatca

SEQ ID NO: 29983 - DNA, 1178 bp, Homo sapiens
aggagattgggaagtccaagatcaaagtgctggcagacctggtgtctggtgagagcactgttcctagtttgcagacagtcttctcattgtatcctcacttgctggagaaagaaagaccttgtgtctcttcttttataatagcactaatcccatcgtcagggacccaccctcatgacctaatataacctcagttacttccaaatggcctcacctccaaattctgtaacactggggacttgagttgcaatatatgaattttagggagacaaatattcagtcaatagcagaggtaacacttacgttagtgaggaagaatttttaaagatttcatgtttgttttagatataactacttaaaatacatgggaatgtttctgtaatataaaaaaatgccattgtagttccatattcataaagtgaaacactttataaagaaataacgtggctgggcactgtggcttatgcctgtaataccagcattttgagaggctgagacgaaggattgcttgaagccagaagtttgagaccagcctgggcagcaaagcaagaacttgtctctacaaaaaataaaataaaataaattagttgggcccagtggcatgtgcctgtagtcccaactattctgagaggctgaggtgggaggattgcctgagcccaggagttgtaggctgcagtgagctgtgatggcaccactgcattccagcctgggtgacatagcaagatcctgtctgtttaaaaaagaaggagaaggaggagaaacatgtttttcttaaactttctttaatttggttttatgttaatgttaagaataaataaccagtaaataatcttgtaaatagaaaatactatttctgagaatttcattcgcagtaatattagaaatctattacatctcttagaaatatgatatacaaaatagtttgaattattgttattgaagaggatgtatgccagattttcaagagtaggtttattgtttgtttatgaaataaaacatcaactgccatttattaaatactttctttgtgccacaaagagttttgaatgcaatttcagtctagtcctcaaaatcatcctaaaagattggaggattatgtaaattttgcaaatgaaacttggcttttgaaatttggtcacttactctcaaagctttataaccagcaaggggcaagggctgag

SEQ ID NO: 29984 - DNA, 1058 bp, Homo sapiens
tttatcctttgtgtttcaagtaatccagttgtactccctgaggtctgttctaaatttataattattactgactgtagccaccctgttgttctatcaaatactagatcttattcatttttttttcatttttctatagcttcttgttggaaaaaaaaatatatatatatatatttatatatttacctgttaaccatctccactccccccaccccatgcctcccactactctccctagcttctggtaaccatctttctacgctctgcctctatgaactcaattgtttaatttttagctcctacaaataagtgagaacagacaaaagtttgtctttctttgcctcatttatttcacttaacataatgactttgagttccatccatgttgttgcaaatgactggatcccattcttcttttatggctgaatagtattccgttgtgtatgtgtccattttctttatccacttgtctattgatgaacagttaggttgcttccaaatctttgctatcgtgaatagtgctgcaataaacgtgggaatgcagatatctctttgataaattgattcctttcttttgggtatacttagcagtgggattgctggatcatatggtagcccaatttttaattttttgagcaacctccaaactgttctctgtagtggttgtactaatttatgttcccaccaacagtgtacaaggattttcttttctcagcatcctcctcagcatttgttattgcctgtctttggataaaagtcattttaactggggtgagatgatactttattgtcgttttgatttgaattttgctgatattcagtgatgttgagcactctttcatatggctgtttgccatttgtatgtcttcttttgagagacatctattcagatcttttatcccccaccctgcttttctttttgagacatagctttgtcatccaggcaggtgtgcagtggctctcactgcaacctctgccttttgggttcaagcgattctgtttctcagccactcgaatagctaggaggattacaggcacccaccaccacatctagctaattt

SEQ ID NO: 29985 - DNA, 1056 bp, Homo sapiens
attaagtctgatttttctttgttgactttctgtctagatgatctgtccagtgctgaaactgggatgttgaagtctccagctattattgtattgggatctatctttctctttagctcaacaatatttgctgtatatatctgggtgctccagttttggctgcacatatatttatgttatatcctcttgctgaattgaccctttatcattatattatgaccttcattgtctctttatagtttttgttttgaaatctattttgtctgtatagctgctcatgctttttagctggtattctttgcacacatatcttacaatgtaaaaaaaaaaacttctctgagcaaaagcaatttgacacttcataacgtctagaaatattttttcaaatgtgatgtatgaataggaagtagcatacaaaaacaaattactgtgctatccctcccccaagaatacatattctctcttcacaccacgtggctgctgctggggcatgggggaggggtggcattggcagttcaagactgtcctaccctcttcagtgactcttttagcaatatgaagttaaaaaccaggtactgttaccactcacctgatgtttaattctcatgaagatgcttttttgtgtagatagttgtcaaatgtgatgttcctgcagggaggacaattggtggaggcttctatttggccaacttgctcctcctcatttgtaaatatttcagtgggtacctgtgatttgctttgaagtacagtaattggagaaagggtaatgagagttaacaaatacggctaaagtggaaacgtggtcagtcttgagctgattattgttgaagctgaatgagggatttataaaggtctgttatgcttttctttctaagagtttgcttgaaatcttttatactttaaagttgagaaaaccaacaatgataccagctcagtacagtactcacacagtgaaggtttgttactttagctggcattctttgcagacataccttataatgtaaagagaaaacttttctaagcaaaagcaatttgacactttgcgacttctagatacaa

SEQ ID NO: 29986 - DNA, 1027 bp, Homo sapiens
cctactgagagatgcctcccaggtaggctacttgggggtcagggacccacttgaggaggcagtctgcctgttctcagatctccagctgcgtgctgggagaaccactactgtcttcaaagctcagttggaaatgcagaaatcaccagtcttctgcgtggctgacactgggagctgtagacgggagctgttcctattcggccatcttggctcctccccttccttaatgtttcttcgcttaattaatctttcttcccaatgtagttcatttcttagtttctttgtctttaatcattttcctgataattcagacttgtggaaaattgctgacacatgtccattcatcctcctggcccttttatttctccttgtcagtatagctcgtatctttgtaatttcctccattccaggagttcttgaggcttgggctctccatgattactttaggtttctctgtctcccagtctgtgatgtcccttccagccatatccagtctgttttcaacaaaattctgaccactctacttctattttcaaaagccccagtggttcttatttcctgcctgcaaagtatgtttctttttcagattttcagagactatataatatttcccttaccctatccaaccatatttcccactgtgaaatagttattactacaagttaggaaagtatcttattaccagttatgccttttgactttatttattgcaatttccccaccactaaaatagcttcatttttttattcctttggcaaaaacaccgcacattcttaacagctgagttccatgcttttcaggaatcttctctggtgacctgagcacacaccaacctctcctttctttgaacttctgttacatctaatgagtgctgaatagcttatcatctaaaatcctagatgcttctagagctggaaagtagtaggcatcagctaatcatctgtgcattgtataaatgacagaacatttgtgatttgcccttgatcatattatttaacagcagagcctaaattagatctgtcagttaatt

SEQ ID NO: 29987 - DNA, 1202 bp, Homo sapiens
tttgacttccttgactccctgaaaaggtctctgggatgctcagagggaggtccgtgtgccacatttgaaaatcatggttataagccttgcagaggacagtgtttaatggtccccttttcttacagttattaaaatgtagtaaccattctttttattttttattttttacagacaggctctcactctgtcacccaggttggagtatagtggtataatcacagcttaccgcagcctggagctcctgggctcaagctctcctcttgccttagcttcccaaagtgctgagattacaggtgtgagccacagtgcccaaaccctaacagctcttttgttttatttcatttactttggtattctctaagactattattatgaaactttgctcatttttctaggcctttattctcaattttattattttgttcaagggctgacatgaccatattaacaattatccttagatgaacctttacaagttaagtggtagataaaaaaggaagagactgaaaaagtgtttaagaaaacatttactagcaacctacgtggccactgaaatatttaaaagaaactaattgaagttaacttttcattttataacagtgattgaaaatcaactgctttgtctgcccaaagcattctaagtctattctgttatttgaggaagtcatttgactgtctgtgtctcagttctctgactagctgacattgctgtaaatttggtatgtatgtccaggaattgaaataggcctccgtggaaagaaatacaattatttatttaaactctctaacagtagtttagttgtggcttggatctaaagacaaatattagccaatccagtctatatccccttccccatgcattcattgtgtttgtagaaatggtatatgtctaagtatcaaacgagttgtatctatcaaagacaaaaatattctggttcaaattatagataacaataagattccaatcaaaacaaagaggtaaataaatatctggtcatgatccttttgtttatactgcaaatgtcgatattgcttagtggcactgattgatgatttatggccacacatgtacccattgtttctgcttcactcctcctggttggctttcttatagtaccattcttccatgaggaatggcaagtaaataaaccagttgatacctacggagcaagaaccaccattgaaccatggatgctgatttt

SEQ ID NO: 29988 - DNA, 1047 bp, Homo sapiens
catgatgtgcagaaattttatttgactattatttataacaatccagacagacctgttactcatttttagattttctttaaaccagattctattattaaacattaattcagcaagagattaagcaaatctcaactgatgacttaaggaaaattgacacattttctcaatatgttcataggaattctcttgtttaataatttaaagatattatagactttataatacaaaaaagcaacagacaagctgatatttttggtacgatattatttataattcaaagaaatgtaaagagtatgctaacttggagatgttttggttggaaatggtgcccacatttgatgactttctgcctccctttccgttttgtctttccatgtgtcttttaaaaaatatatactgttgcagtttcatagctgtcaatgtcttctctttctgaggatattaattaataaattcttcctccctctgtatagtcattcttcaagttgcttttttctgacgctttcaggtctagtaatctttggttggttgagtgtatttaattgtggaccaggttacttgaatctcctaaggcattattgcttatttatatactgtccagcttccaaagtttattgcttttacctctactccctgtacctccataatgatgtatttatgacgttttacaaattttgctctatcatttaaataggactttggaaggtagcagatgatagtgtgtattttgttctcatctttacttgaaataatttgcttatttaaatgaaagcatctagacagtaattgaaaccatgagttgagttcagcaagtactaaagtcaatatgatagcttaagaaaatgttttagcaattatatttttatattgatatagatcccattaaacagtcatatgggttcaggagtattagttatgaattatcacatgtatattttaattaaaatactatagggttttaaaattaaattatgaattatttaagaataagcctatttttatttacttaatgagttaggtagttctaattaggtaaatgtaaataga

SEQ ID NO: 29989 - DNA, 1024 bp, Homo sapiens
ataagcccctatgtagtttttatttctttaggatgacagacatgagttctcccattattttctcattgcctgtgctttattcatattaccatcattatccttcattgcgaagaatccattacatactatagtgaattaacaataaaattcaagatgaatttacacaaaaaggaggatattatttttacacaaataaatattaaggtaatgaaaacagttttgctattgttgacaatcattataaaattgtttaccatgtcttgtaattttaaaagtttagtttttatcatttaaagacaggtattcttattagacacttgacatctgttagtctcaaaatttgctatgttttggatcgcttacaagattagctgagtgtattagtcagggttctccagaggaatggaaccaataagatatatatacaaaagagaatttgttagggagaattgattcatgctattacataggtgaagccccgccataggccatctgcaagctggagaatgatggaagccggtagcatggctctctctaagtccggaagcctcaaaaccgggtaagctgacagtgcagctctctcagtctaaggctaaagacctgaaatcccccaagaggctgctggtacaagtcccacagtccaaaggctgaagaacctggagtctgatgtccaagcacaggtggaggaaaagatgtactgttccagaagagagagaaagtaaaaagaagagcaagcaaactgaatatcccccttctgtctgctttgttttagctgtgctcacagccagttggcatgggcaactgttctagttcctggccactttgttctagaccctgcccactttgagggcaggtcttcctctctcagtacactgactcacaggggtgccttgttatatttcccaggctggtctctaactccaggcctcaactggagttgtcatcttctctggaaacatcctcatagacacacccagaaacaatacttcagcagccatctaaacatccctcaatccagtcaagt

SEQ ID NO: 29990 - DNA, 1066 bp, Homo sapiens
tctcattgttcagttcccacctatgaatgagaacatgcggtgtttggttttttgtccttgtgatagtttgctgagaatgatggtttccagcttcatctatgtccctgcaaaggacatgaactcatccttttttgtggctgcgtagtattcgatggtgtatatgtgccacattttcttaatccagtctatcattgatggacatttgggttggttccaagtctttgctattgtgaatagtgccgcaataaacatacgtgtgcatgtgtctttatagcagcatgatttataatcctttgggtatatacccagtaatatataccaggtgtatatttggctgggtcaaatggtatttccagttccagatccttgaggaaccaccacactgtcttccacaatggttgaattaggaaacagtgtagctctctactgtagatggttaataaaatatggagaaccattagtgtaatcagagagacttgggttgccagtggctgcttgtacaaccttggtcagttgcttacattctctgtgctttagtttcttaatctgggaaaaaaaatggattgaactaaatcatttccagtgctaacatgttatacctttggaaaggaacttagatatagttgaaacaatttgaatttctctagtttttagtttttatttatttaaattttttctttttaaatcgtgggtacatagtaggtatatatatttatgggatacaggagatattttgacacaggcttacacatcaaggtaaatgtggtatccatcccctcaagcatttatcctttgtgttacaaacaatacagttatactccttcatatggtttggatctgtgtctccaccaaatctcatgttgaattgtaatcgccagtgttggaggtagggcctggtgggaggcgattggatcatggggagtggtttctcatgaatggtttaataccatcaacttggtaccatcttcatgatagtgagtgagttcttgccagatctggttgtttaaaagtatgtagcacctccctcctctctttctcctactcataacatgtgagatgcctgctc

SEQ ID NO: 29991 - DNA, 1030 bp, Homo sapiens
cttgaccttgtaatccacccacctcggcctcccaaagtgctgggattacaggtgtgagccccggtgcccagcctgtcttgtttttttaatccttgcatccactctgtgtctcttgattggagagtatagtccacttacattcagtgttgttactgataagtaaggatttgctcctgccgttttgttacttgttttctggttgttttgtggtcttctcttccttctttcctgccttcctgccttccttttagtgagggtgattttctctggtggtatgttttaatttcttgcttttagttttttgtgtatctttggtatgtttttagatttgaggttaccatgaggcttgtaaataatataaccattattttaaactgaagacagcttaacactgattgcataaacaagcaaacaaaaaggaaactaataactctaacttggtctctctgctttttaactttttgctgtttttacttatatcttgttgtactgtctatgtcttgaaaagttgctgtagttactctttttgttgttgttgttacagggtattactttgtcacccaggctggagtgcagtggcacaattacagctcactgtggccttgatttcccggtttcaagtgatgcccccacctcagcctcctgagtagctgggaccaaaggtgcacaccaccatgcctggctaacttttatattttttgtagataacgtgatttcatcatgttgtccaggctggtctcatactcctgggctcaagtgatcctctcgcctctacctcctaaagtgttgggattacaggtgtgagccactgtggcccgccatagttattatttttgttgggtttatgtttttatctttctactaaagatatgagtagttacatcacaattagtgttataatattctttgtttttctgtgtacttactattaccagtgagttttgtatcttcacatcatttcttcttgctcattaatacccttttctttcagattgaagaattcctttagcatttgttgtaggacaggtct

SEQ ID NO: 29992 - DNA, 1048 bp, Homo sapiens
tgtttgtctccactaattcctaacagtattagtttcctagggctgctgtaacaaattaccataatctgggtggcttaaaacaacagaagttagtgcctcacagttctgagaactggaagtctaaaatcaagtgtctgcagggccattctccttcagaaacctttagggaagaatcttacctaactggtctggtgtttgccagcagccgttggccattccttggcttgtatctgcatcactgcaatctctgcctttgtatttacacagcattttttctcatgtgtctgtgtctttacatggtgttcgcccctatatgtgtatgcccaaattttcctcctcttacaaggatatcagtcatactggtttagggtcgactctgattaacttacagatttgggaaggggattaggacttcaacttttttgggaggggctggcacaattcagtccataaagagcttgttctttaccagctgtgccacttggatctaccctgcagagcaggacctgtgtgtatacttgtttgtgaagacgatagaaactgatgttgccatccaactcccggcatctagtagggagagtcagagtggcaaaacaggcattgcctggctgccgctactacctacttggtacaggtcttctgtagcatggagctttgggaagcagtatctgctgatgttcaccagctgctaaatctcctaggaatagctcttctactcctgggacctacaggagatgagagctgctactcaactgaccccactagaatagctcttccataacacagagttgtgggggaatgggggtagtctcttatctcgaatgccatggcttcccactattatgactgaatttcgatagattttgttgaatgaatgttttacaatttgttgtaagccctctgatcaatctccagagactgaatcattgtctttgctaatttttgctggtttaataagtgttggagagaagagatttatccaagctctttatactcccattctagaagtctagccccttgaaccgtttttaaaagcaccaccttccag

SEQ ID NO: 29993 - DNA, 1109 bp, Homo sapiens
tctatatcttaagatggtaactatctctgtgtatatgttcatttattttaataatgcttttattattttagagatggtttgaaccttatattttgtttagtccaccctcatcattttgatgaagtaattaagtccagagagcatgtaacttcgtaagctttacagtctaaggttacatatataactctaaaggaaagaacaaaaaccataatacttccaaaaatccctgaagcagtgcgtagtattttttcagaaagctttcataaatacagtgtattttctctataatttaatattatcattattttgtctagcattaatttggtatctataataaataattgattttagccttaacttagctgtagagtcctaaggattatatatttatatattttttctattagacaggcattttcttgtctcctttcacaacatacgtggttcagtaaaacataaaatcacttgtcaatagttagtattaatataaatatataatatcgtgtctatacatttcacttaatttttgaatccatgaattaggaattatctagatttattaggcttaaacaaataattatttgctttgttttgtgctgtactgttgataaagaagctgtctatatgttattatatttgatcctcacaaccaccttatgaaggtaggttggacagcttttattatttctgttttattgatgaagaatcaggtttggtgtttaagtaaattgcctacattttataactttaataatttgctcctatagttacccatttatttttatgttactggttagtcatggtagtacttactgtcttgtttcttctagggaatacaaaagtcttgatttttattctagacgatttaagaagaccaatttgggtcatttggcatgaccccagggctagctcaggtgtaagtaatacggggtgagcatcccaaattcgaaaattcaaaacactttgtaattcacaactttttcagcaccaacataacactgaaaggaaatgctcattcaattctcaattggatttttggattttggatgcccactaggtaggtataatgcacatatttcaaaatctgaaaaaataaaatatccaaaaca

SEQ ID NO: 29994 - DNA, 1024 bp, Homo sapiens
aaaaattacaaaaacttagagaccctagttaaatgttttctttaatttaatgaagggaagaggagatgatatggtggggttggttttattaaatttgactttataattatgttatgtttaaattttgattcctgagtatttacttcacttgaggatttttttttaaatcttcccattctcttaaacattgtcttgggaacagatgtatttttattgtgttagcaagatgtgtctttaaaatattttcttgaaatacagtaattgcacttctagaaatggattcattttaacctgatttaaaataatcaaagtagtcagagtgattaattttatgtttgttttagtttatttttaattgtcaggaataacgggaaatactgaaatatttagagaaaaagagttaggatgaaaagagggaaaacatttaaagtctttaaatatttggataatactgtgaattttcagttgttaactcccatttaatacatggataagctgaagcctagaagcttaactgttttgccaggacctacgtagttaacctatattggaggtgacattttaacctgtgtctgtatgtcaggctccagattttcccacaatactgtaatgaataaaagatgtatatattctactgaattgtaaagagccattactctttaaaattttttctttttgcctgtttgataatcatgttttcagaatgcacagtttttaacatttatttacattaaatttttagctaaaatacagagtatttataaattggttatggaaaagtgaggaaaaataatttgcatctactatgcactatatttttttcttcttgtgaagcaagtgcctgtcatgctctggaaaatataaatatgaaatctgaacagttgatgattataaaaataattacaggttgccattatgaagcacacagtcacacctaatcctttaaataaatgtgcttaactacactaaaatacatgttttaaaatgttaaacagagacattctaaaaagacacgtgaaaacca

SEQ ID NO: 29995 - DNA, 1033 bp, Homo sapiens
ggggacacagagagcagagaggaacaaagaagggcatcaatctatctgggctcagtgtggagccaggagaacctcccaaacatgggaaagaatgagtgagtgtgagcttcctgggggagcacatccccctgcgcttataggctgaagcagagagcccattttgtgtgggggcaactctcgagtccaaggagaccactttgagacttgggccctggagcagaccaacactggcaccatagcaccaatagaaccttcagtcatggggcctgggagcagtaagattacaccacttctgccctcctccctccatccctgctggatgaggcttggtgtcagcttctggcctagtggtcctgcttctgtctgaactcggacagaggtcctggcttgctattgtcccaggaaggacccagatggcagggtgggccaccctacccacccctgccacaggtagccaggcaagcaatgcctgctagagtttctggctcagtagtccagcttctgtgtgaacttaccaagagggtgcaacctccctttgtcctgggaaacacctggacaaaagggagagtgacctcaccccaaccctgtcacaggtagccaggtagcaatgcctgctagaacttctggcaaacagtcccacatctgtgagaactcaggaagaaggtgcagcctactgttgcttgtaaagtgtctagagagaaggggtaggtcacctacaaagggaaccccatcaggctaacagtgaaaacaggcttttcagcaaaagccctacaagtcagaagagattggggggtctatattcagcattcttaaagaaaagaaattccaaccaagaatttcatatttggcaaaactaagcttcataagagaaggagaaataagatccttttaagacaagcaaatgctaagagtatttgttaccaccagacttgctttacaagatgtcttgaagggagtgctagatatagaaaggaaagactgtgttaccaaccatcacaaaaacacatttaagaacgtagactagtaatgctat

SEQ ID NO: 29996 - DNA, 1049 bp, Homo sapiens
tagtttagccattgtggaaagtagtgtggcaatttcttgaagaacttaaaacagaaataccattcaacccagcaatccctttattgggtatatacctgaaggaatataaatcattctccacaaagacgcatgtgtgtgctcatcacagcactattcacgatagcaaagtcttggaatcaacctaaatacccatcagtggtagaccagataatgcagtatggatataccatggaatactatgcagccattaaaaaagaatgagatccttcgctttgcaacaacattgatggagctgaaagccatgatgccccatgttctctcttacaggtcagaggtaaacattgagtacacatgcacacaaataagggtacaacagacaccagagcctcctagggtggagggtgggaggagggaggggattgaaaaactgcctgttgggtactatgcttattacctgggtgacaaaataatctgtataccaaacccctgtgacatgcaatttacctgtataacaaacctgcacgtgtacctctgaacctaaaagttaaaaaaaagaagaaaaaaataccctgggatcagacatttagagtaaattgtgaaaaattacactaaaacttagacatataagttgattttagttcaattaagaaaatttgtataacagaaactatgttctaattatagaagaacaatgaaaattagtgtttattggtattttttgtatgtacaatagcacataatttttacaaaaaaatagtaaattgcttctatcagtttttctaagggactctcttagtccttggcagacaagtcattctgaagaatttatcctgtcattatcctttttgattttctcatcagggcctttgaatgtgatcctgcagttctccatcatccctttaatggatttcatgaaatcttttaagtgattttcagtttcattataaaatggaattaatttgccctgtgtttgttgacaaaccaatctttatgatagaatggctgtgatatatttggtttacaatccagtttcttggtattagaaactc

SEQ ID NO: 29997 - DNA, 1037 bp, Homo sapiens
gttgtgcaaaggcggaggggtgggagggcagtcttgtggactgagccctcactttgtgggatctgaaactacctccagttaggtagtgtcagaattgaattggaggacacccagctggtgtccactgcagaattgattgcttgcttgttgtgtggggaaaactcttcacacatttgctcacagaaatcttctgtgttgatttttgttgtggtgtgagagcagaggaactgtggttttccgtacacagaatggtcgatacacatatagatatttggctttggtctaattttgtaagtggtcatttaattagcattttcattttgtgatggcatttgatttcctatgtactgtgtttttttcaaactagtatacatcaatattttttaacacaacatttcatttactcttaattatttatattatgtatagttctcacttcataaaaattataatcctaatttagaaaccaggtagattgtgaaatggcaaagttgatgatgatggctcctccaatgacagtgataatagctgccatttgtaaagcttctactctatgccagctgctgtactaggtagtttaataatccttcccacaacctcaaaagattgatgttaatcacctgacttcatggataaagaaattcaggaaattcgtagaggcaatgagtgtcttacaagttaaaaacaagccattataatgatcaagtttgtgtttttttccaaaacactatgtctttctttggtttatagaagcatttacttcagggttttctctataaattaattatatttttggtacatataatataaagttgataaaaattggaatagcccacagttgtaggaatacttttctatgttattatttctatctgtattattaatgcagtgggtgttaatcttataaaaattattttttccttttgctttttttgttgagaggtatttcacaaatactccttcttcagcagatttgaatcaaaatggaatggaagatgtggaatttatgaaattggattttcacaacaaaaaagtca

SEQ ID NO: 29998 - DNA, 1033 bp, Homo sapiens
tagaatttcaagttttcaacagcttttatgtacatctcttatgtacatgtgtattgccaaatgaaagcctgtttttcttcctaaaaatgactagatattatataactctataggtaatgttcttatgagggcacacataatcaccaccactcacaatacctagttttggaatcttaattattccttccataatattttcttaatctgctataatgtgagatatatgactacagctgagagatattaaaagcagaacaggaaaccacagaagtttcttaaaataaaaatacaaactgagctcagaaacatgatttttatatacatatctgaaaaagaaatgtagccagtgagcagaatatactcaaagccaaccacaaataagcagtaaaaaaaaaaaaaaaaaaaaaaaatactgcagtttattttaaaattgtacacatcttgctttcattagagtatataggaatttcattataaaatacatttttaaaaatttaaaggtacatatgtgctttgactgaataattctgtgatgttgattatactctaaagtatacatgtgaagctagagttgaatatgaggtgctgccttgttcttccagactgtaatagcgtgtatgctatgtggccaaaccctgtcctctgcagagaccagcaagtcaaacccatgtttctcagagcttggttacatgagctcttggtagcacatgtacctatatgtaaaatatttatagatagctctcaatttttaaaaagtaatgtacagtaaattttatgatcaccttctaattgcaagtgaattggcttctgtttttgaattgacagcttccctttgaaattcatttacttatgcttttttaaaaagtgtgttgattttaaaaatcagcatgaaaactagtatgaggatagggagaaagtacaaatgttacactcagctgactgaagttttggggactctgaactaaacagaactgtatagttgatattttaacttaaaatattacctgtttggcctacctaatttttacttgag

SEQ ID NO: 29999 - DNA, 1090 bp, Homo sapiens
aaatatgcaaagacctagggcagaaaggagtttggtccgttagacaaactcagagtaatcctgtgcagtgggagcttagtgaatgaagggaagagaagtgagagataagtttggaaaagtgagaaggaatcagtggggcagtctttctcccagatactgtcactttatcataaattaacttagtgaaactacactagagctaaaactgttactttaccttgaatataaagggagaaaatgctaagaacatttgattactgtaaaaaaaaaaaaaaaaaaccctgaaattgcgaacttctctattggaaatttaaaaaaaatcattttgttgaaattgctatactcttgtggtagtgactaaccatcactaccatcccatttcttctttattaaaaaaaaaattatttttctagagacagggtcttgctctgtcactcaggcaggagggcagtggtgcagtcctagctcactgcagcctggagctctagggctcaagcgatttttctgagcagctaggactacaggcacatgccgtgactacaggcgtgtgccgctatgcccagctgatttttaaattttttgtagagactaggttttgctatgttgctcaggctggtcttgaactctttgcctcaagtgatcctcccgcctccacctgccagtgctgggattatagacgtgagccaccggtgcccagcctcactttcttctttagcaggcctccctgccctataccttctgctcatatttaatgcataggccctacagtcagatgaaatcttcctgggaattgatttccctgaccttaattttctatagtcctgtttttacctttcgtgttctgtgcccagctctgttggaatgcttatgcacctactatcagtgactttgatctggctggaggggttctaagtccatatgctcccccttgatttagaattggattctctagtactctgtatttcaggtacagtgtaggttaagtgatttttttttgagctgccatgagatttaagcactttatgtaaaacaatttaattaggtaagtgaattccaagctctaagcactaaggtaggtagaccaagtttt

SEQ ID NO: 30000 - DNA, 2392 bp, Homo sapiens
gctctgtaatcctgccttgtctgttaatgtcaggtgtatctcacagctgatgctgatgaaactgcttaaagaaatcagatatgatctttagcagagccaaatctcatttccatatgtgggtttaagttctgttttgatcagcttcttgagggcagagtcctcaaagtcctacatcatggaatgcaagattgtgtggtagagacaaaagtcgtagtaatttagaaaaaccatcagcttcttgtactggcttctcacagattgttgcacttgagcacattacatctgtatgctggatgaataggaagtttttcaataaaggaggacattccaaaaataggtaacagcttagcctgatacataagtggtagctgctattattgtcatcattttgtttttattattatgattgtgagaactggataaattgggaaggaaagtaaaacaaactaaattttttcaacttatttgatgcaaagctagttctaaaatcgaatagaattacaaacatttattagtgtggatcatgtctgaatgctcaggctatttatctctttaacactatttcatataagtagttgtctttaataattgtagaatgtcttagcctgtttggaatgccgtaacaaaataccataaactgggtggcttataaacaacagaaatttctttctcatttttctggaggctgggaagtccaagattgaggcactggcagatttggtgtctagtgagggtccccttccttgtttatagaacagcaccctctccgtggctcctcacagggtggaaggggcaaccaagctgcctcaagcttcttttctaagggatcctgacctcattacctcccaaaggccccacctccgaatgcaatcaggttgggggttaagatctcaacatatgaatttagcggggacacgaacattcggaccatagcagaaagtatccgtaaaggaataagaatgattacaggtagttcggttcttaaaaggcgtgagtttattctgtagatgaataataaaactgtttgtctaattggtattaccaaaccagaacaattcagctattatatttattttcatggatttatttaaatgtataatgagtttttaatatgagacaagcatattgaagtgaatttttacatattaagagccatcgtcacattattgtttgacagatactgcttttgaaagtaagctaatcagttcatttttgtcaagtattttatatactcagagtagggagtagaattttgaatttgaagtagaatgactgttttcctctgtcaatacatatggcttatattttagatttgctggccattcagttttcatacattgtgacctgttgtcagaacccatatcttcatacttggatcagaaaatacaattcctgttaatagtggtccctgctgcctgaccttctgatcagttacagtttacccaagttgctgaattagaaagcattttaaagtacctgctatttgaaaagtacctataaaggattatgaaaaagaactctatttgaggctaatatctacaaagactttctgatttcagggtaggagtagagttcaaaatgaagcaaagtttaagacgcacatatgcagatgctattagcagtacttgtttctgggaagactaaatgtagtattcctattcctgatggtttaaatagactggttatagatttctgtggttacagggcagacgttgtaatagaggctatgagattttcttcacataaagcactaagtactatttctttctttgtatttattctttagttcttttcaaaaggtgaattggattagattttgcttctatctcaggtaaatcccctactttcaacctctgcaaatttgctactcttttattgtgtctgtaaaaaccaaccttgcatgaattgtgtcccttaagtgctatgattgtgattcccttttttatctataggacacagttttctcatgtttgtcttttcttgtcatggccttttttaagtgaaatgacatatcagaaaagatcatgatgaggccccaaaatagtctggcaattttgtataaaattagtccctgttatcaatggctcatgtttctctctttctttaccatctttaattatttgtgtgtgtgtttttgctgttaggtattgttttaagcactcaaccgttgaagtgtaggtatgaagtgcctgacaggccattgaaaataaacgaagataaattacagttgtagcagaggtttcagtccttgttattcttgatatgataccctcattgtctctggcgaattcctgtagacctttaaagtggcttgtcaaattgcttaacagaattagactttttctctaatgctgctagtggggtcacatctagaattgtctttcaatgtgat

SEQ ID NO: 30001 - DNA, 1052 bp, Homo sapiens
agatgtggcttaagttgagacaacatggcttcagggaaggatcaccttcttcctgcaccatcccctttccagctccccttttgctgagagccacttccactgcttaataaaatcctctgcattcatcacctttcagaccttcatgtgacctgatccttcctagatgctgaacacgaacccaggtaccaagagggcagagtgtaaaaggctgtcttcctgactctccactgagctggttaacagctgtctgcagatggcagctgctaaaagagcattaattgtaacatacccttagacagtgctgtggggccagagcccaaaagcacttctgcacctgcttgcctgtgtgctccctctcccacaaggggtttgagctcagtggtggccaggtaagcgagccatacccctgttgcaagtcccacaaaggggtcaagggaactctcccatcttgttatcttgttgtatatgaacatgacaagaaacatcattatatctttgcttttggcgttcatgcttacctatatgtagaccacaattgtaatcattcaatttgaataaataagtaataatgtagatatacaagtttatatctgtatatataataatggttatataacaactaatacttcttcaatgcttattgtttgtttatgaaatgctatttgttttacatacattggaaacatttaatccttaaaataattctatgtggttaggtatattatcactattttgcagatgataaatctgaatccttggtttcaggatggttgtttacttacccaaagtcatacagccagccagtagcattttgtcacacttcatagttggagttcttatctacattataagttaatgattaggtaattcctagaagtcagcctaagttgccagttatattaactgctacttaaactatacatttttaaatctcagttctgtaataatagtaggtttgcaatagacttagaatgtatatgcaaaccatagttcaggaatgtggccacagtatgcctgtgtattagcacattcacttgtcatcaaaatttttg

SEQ ID NO: 30002 - DNA, 1051 bp, Homo sapiens
ttgttatgaacccagttaatgaagtgtttgcactattatgcatttggatttttagttgactcattaaaataaactaaataaattaataaataaattacattcaggtatttcttgccatctgattttcttttgtttcctaagcttatatactgagagatactgcattaaccgcatatttttggcttctgaaatttgaagagccagtagcagtgaaagcttgaagagccagagaaaacagcctcatctcagagagtttattcttgagtttgggtagtgtgagttcagttagggagagtttggattgtgagggatgtgtatatcatgtcttaaaatagtatatcaataataaatagaacgaaagggtgatttaagacgttattacccctccaccattgttctattatgtacccattgaatataaagatattcctcaggaatatctattcctctccaaaaataattgtcacagtaatttaataactgaattttgtatacatcttaatgttctgtttgtgctggcttacatatatgtaagtaaaatggtttatcatgttttaatacccaagtattgggtattagaagaattgaaagattatctacataacaagagtgtatagtcttgaaaaagtggagtctgttatgcattatgcttagacagatggcagaatggaaagccctcttttaaaatcagcttttatagtatggcctagcgaataatatataacattatgctagcacactcaaccaatttgtttactcattcactcaacaaattgagtgcctgatatgcatgagactgtgtaaactgtatctgcttggtgcctggcccctggagattaaaatccagttgagttttctactattcaagagatagtatttgtagtctggaaacaagtagcttgggtttgcattctggctcttctacttactagctgcttagccttgggtgaactgttgaacctctttatttctcagtttcctcttatagtttaaaaaaaaacaaaacaggaagaagaagagggagggggatgatattaagagcatctacctt

SEQ ID NO: 30003 - DNA, 1044 bp, Homo sapiens
tctgcataatatcaaccattgacataattttttagatttatttttaggaccttccaaatacaggatactattctaaaacctaataagaataggggagatatatatatataaagctatgctttaagagttcatttagaaactttattttactgtgctggaaaatactgtgtcaagttgtacttaaattcaaagacaaaataaattaactgtgaccttaaatcaaaatttaattatgtagtacctatttctttatcttaaaatgtgaagcaaatagttatgagggcacagttggtgtagtgagaaaatacttctctagttactgtaattatgggataattaaataacctttctgaacttcagtttcctcatctacaaaatgtgaacagttcttgtactgcttacttcttagtgtttgcattgggaatcaaatgagatgataatgtgagaaaatgcttctttaattactaagtgtttttcaaatgtctgtgaagtcctaaatacaaatcataaaattagcaatgtagaagactctaggctgcagctacacatgtgtatcttcgaagagtatttacccaacatcctttgaaaagcaaagaagtaacctgagctttcattgacacacaaattttcatcttaatttttgtgtcaaagagatgttgcttcatgtagctgataagctagcatttattgacttcttattgttattttagatattatttctgctaatcaacccttatttctacatgtcatatcatttaatcttcccaacaatcctttgaggtaggtaatgttagtagcttcattgagggaactgaagtagaattgcttaaaggattatctaaaaccacacagctaataagtggccaaatgaagactgaactcagagctgtgttattccaaagcccaggcagctctcctggcccccaaagtaggcaattggaatcacactaggtataatatagcttatcccatattaaagcaccccctcacccaaatcataacttctaaaagacctattgtcataaaatagttttaaaacttggt

SEQ ID NO: 30004 - DNA, 1049 bp, Homo sapiens
ctggcagcagatagtaaatgggagaaaagtaaagccagtaaaaacggttcttaatagaaatgtaaaggaatttaataagtatatattctgttcttaagcctttgaaaaccatgagagattacttttataaaaatatatatatttttttttgcgtgaactccacttcttggagctcaagttcttggcccaaattgtctctgcaaatctgtattatgaaagtctattcttaggtatggtttttaaaggatgacccctggacagttatgttccgacacttttaaccatgtaaccctttcttcacacaaaaatatttcattgaagtacaatatctacagtgagccccctctgtttgaagtggggtaaagaaagaaaaacagaagtccacatatacacacagacatgcaacatgtatgcataaatctgtggtttcaaaggtcacagtttgaaaatcctgagtattttactatgttttcattagaaggacagccccagtttttcaaattctgaactagaccttgagcaataattattttaaatttaaaagtacaaactacaggaagaagattcctgaaagatggtagcagtagtgacattgttctttaatctcatcataaaacagagcaagtaggatatcaaaaccaaaaacctacagatagcaacaacctcaaagctaagtatccttataaacccccaaatactagcaggtaaggacaaactgccaacaactacaaaatcagtgtgggatcagtaaatgtgtggaaggaagcaaatgtaaggaaacaaggtggttgatgggtcctgagaagaggaaagcccttgaagtgccagcaaatactcattggaaagcacagcaagccaattacatagcaaccactgagattgcttgggcgtttttgtaatgtttaattcataggtgaataaaggagactggaaagtgattcagtttgatagtgctaaagcagtctgggccttaaaaactcctgaagcagacaaaccaaagttgtcttccagaacaaatgctgtcactgaaggaagctacttgaagtaga

SEQ ID NO: 30005 - DNA, 1043 bp, Homo sapiens
tagtgctgcaaaggaacacctgccttgtggagtgactgtgctatatatggctgttgttgtgtgtataccttatctacttatattcttctaatcatccatccatccatgcagtaaacatatagggtaagagggatacagagatgacagacagtcctgtgaggggagaaacttgtttagcactggttctccagtacctggaacagagtaggggctcaataaatatttgttgaatgagtgcatgggctcccgtccagtgagaaaacagaaaagtaaacagacagctaaaaggcagtactggcacacctcgtttgacagtgcttttgtgtttcacatatactgttgttattgttttttttttttaacaaattgaaggttagtagcaagcccgtgtctgtcagccccatttttccaacagcgtgtgctctttcatgtctctgtgtcacattttggtaattctcacaatatttcaaactttattattatatcctttatggtgatctgtgatcagtgatctctgatgctactattgtaattgatttgtaatggcctctaagtgttcaagtgaaaggaagagtcaaatgtctctcactttaaattgaaagatggagataattaagcttattgaggaaagcatgtcaaaagccaaaacaggccaaaagttaggcctcttgtgtcaagcattagccagttgtgaatggaaaggaaaagttcttaaagaaaatacaaagtgctactttgatgaacacaggaatgatttaaaaaaaaaaaaaagcaacacacccttattgctgatagggatttagtggtctggatagacagtcagaccagctacaacactcccttaagccaaagcctaatccagcataaggccgtaactctctgcaatcctgtgaaggccgagaggtgaggaagctgcagaaaaaaagttggaagctagcagaggtaggctcacaaggttttaaaaaagaagccatcttcctaacataaaattgcaaggttgagggtgaccaaggaacaaggcaggtgcaagatgtagaagcagt

SEQ ID NO: 30006 - DNA, 1045 bp, Homo sapiens
catttcaacatctgagaaaatgaagaagaatcacaaagagtaggcagagaggcaaacgtttcgaacaaacccacatactaagtagtctactaattgtgatataagtgaatgtaggaaactggcttctccctggaataattattacgagatttacacaattccaggaaaacttaagcaagtcttgttgagcaggctttcaaaggctttgttatcatgagcttcagcagataggttaaaaagtggtgtttctattatacctttcatattgagaacatatgaccatgagtgccttacaaggttagtctcaggatcttcccaagttgccggtggtgttgggccacagacgtagttccatattctctactatttttttcctaccaaacattagcttttgatgatttttctcattttccctagtggatcctccttacctgactgctctaatatacccaaattcccaataccaaaaataggggaaatataaatcggggaaagagtgaaattagagaattggagggaaaagagtagaatctgggatctttaggaacctaagttactttttttttaattgctttgctttttgtttttttgtttttttgtttttttttttttgtctttttttttaaagagggtctcactctgtcacccaggctggtatgtggtggcacgatcatagctcactacagactcaaactcctggactcaagcgatcctgctgcctcagcctcttaaagtgctaatattacaagcatgagccaccgtgccccaatttttttaattaaacgttgacccaatcaatattctggatagagagctatctcccagcaccctgttaagttaagcaccctgttaactaacagcaccctgttagttaagagggtgaactctggctccaagccctgctccacccctttctccacgttgggcaagagactcagcctccttatgctccaatttcctcctgtgtcagctccttagaaatccatgtcattaacatattagagttttaggacatggttagtcatggtgagtgttagctattatt

SEQ ID NO: 30007 - DNA, 1025 bp, Homo sapiens
agtggtttctaaaccgtgggtagaggaaagcccccattgcaagtggtctgaacaagaatgactctctggaaataggtatgagttactcctgcaaatctcttgccagttttttggaaatgcaaatgctgtctgtcaagatgaagttgataaagctttttggtattaacgcttcttaggtattaaagaaacaactacctttttttgtgactattttatagtgggagttgggttggcaaggaggactgaagtcaatatgtatttttatatgcgttgtgctccggggaggaaatttttgcctacgtgtgtaggtcttaaaatacagttatttgaaaagattcaggtaaagaatcaggaaaccaattttccaaactttgagtctaatgtacagtcatgagtcaaacagcgggagtatgaatgtctcagaaatgaaacgctttttgatagtagaatttagcaggacacaaatacgtgtcaattgagattgtgaacaaacccctttctaaagttgacagatacgtagggacaggaaatgtcctccagtaggaaggtttatagaacctcccccagtcgtcgtccttaaaacctgttcctcattacatatagctcgtccgtcctcctacccgcagaaaacctttggaaaggaaaacgtatcctttgtgaattagattgctctgtgtgtgtgtttaaaatttttttaactacagtgctgcctcggtgagatttttaagttgtaacatagccccattgggctttatatgataggaggaggaaaggttataaaattaggcaccgtttagaaggtggaagaagcttagaggccctaaactgtcgtattaattgatgctctaagtgcctaggtaagcaaaagacaaaggccagggcttggtgtgaactgcctggtggcttcggcctatgagtgggggatggggccctttgtgaagtcgagggttggtgcggagggagaaaactgcaggtctccagtctatccccagtgtgagctagagagcggaccatgaaggaagtgg

SEQ ID NO: 30008 - DNA, 1050 bp, Homo sapiens
ggcgcgcgcggggtgggggcggcgtggccgggcggtggcagcccaccgctggggagcgacctgcggtctgggcctcccgggcaccccgccacggctggcaggtcactcgggcccgaggggcctcgtggggagcggccatgttggcttcgtcactgaggactccgggcgggtcgggtgttgagcgaggcctcggaccttcggcctgtcgggggcgccctgccggggtgggcatgggggcatctgaggggtgaaaggggcaagggaggctggaggctggcgtccttcccacgcaccgatggctgtgatctctccgtgctggggagaggtgcaggggagggactgaggaaaccggtcggcaagtgagaaactttaaaattaggtcctacatggaaaacaccgaggaatagaactgccctggtgtgcgaggcaaggttggaagccaaactttgcagatgagaacaggagattccaggctgcctcacttcctccgtgaaaagtttttttcctaaactagggacctgaagttcttgatgtgtagttcctctttgcccagtagaatccagtgatcgcgcttaggtttatctgcagacctgcacgctacaggtgggaggcttccgcgccttaatgcttcttgtgtttgtctttcccatttctcccactccagaattcagaaggagctggcggacatcactttagaccctccacctaattgcaggtgagttgcttttcggattttttccatttttaaaattcttctaacctttgtcttgggtttttctttttattatatactttttctttgattctttggctaatgcttgttatggcactaacatcacgtaacagctgaaatttattaacctgagtataatgttttgatgagcctctgacaagctcagtactgttgagaagaagtaatggatttatttggagtggatttttacatatatgaaacaaaactaaagtaaatttaaaggtgtctccttgcctaatcatgggtctttgatatgccattaaagatgatgtaaaacctttcagatgcgaaggaca

SEQ ID NO: 30009 - DNA, 1034 bp, Homo sapiens
ttgattattgcaaatcagtagaattgctcctcttgaaggaaggtgcactgtttgtgttcactaattttggcacttggcaaaaatatttgaagttactgagcatcaaaacttatgtgaaatgcaattgctcaatatgttataatgtatgaaaacataaaattaaattcttaatgttgtatattatgttgggtggatattttttagaacacagtacagattgtgttcaatgacctggtccaaagtcattttaagtaagtattttcaaactgctttatgttgccatagaaatcaaattcttaattttagtatctgtgatttgtgtgtgtgtgtatatatatgcatacacacacacacaaaatagtttcccaactcactcttcattttggttaggcttttattcccatatcatttagctctattcttttagggaaaaaaatatgttaactttgtaatgattccctaaagcgtgccagatcttagattgtaaaattatgccttttagatagctgatgaactctgggccaccagagtcagttttgcagctgttatttatagcccagggctcaaactttgctaaattgactagttataactagcctgtagacacgaatatctgtagacagtatgtctatacagactaaatggcatattttgcctaagtcctttaaacttcagattttatttaatggatatatttgtttcatgagtaaatgtctcagtgacttaacctagaaattcagatggggtgctattttaggataaaatgtctgaaaagtcattaaacacttcaagcatgggtgagaataataaaaatacatttctttctttctcactttttttttgagacagggtctcattttgtcacccaggctggagtgcagtggtgctcactgcagccttgacctcctgggcttaagctgtcctcctgcttcaggcccccaagtagcaggaactacaggcgttcgacactacactcggttaattttttgtatttttttgtagagaccaggttttacctattggccaggctgatc

SEQ ID NO: 30010 - DNA, 1122 bp, Homo sapiens
ataggctaaaagctcatcaaagtccctgcttgagaaccgtaatccaggaactttgctgtatgctaatggctcttttcttgaaacatatacacagtgattatggattgctttgtagagtccatgccacattacatagatgatcaacctttggaaggccaagttgatgtcccatcccactcaggaaatcttacaaagccaaaggttttcacatacagaacatatttaagttgtcactgggttttgctacagtgacagcaaaccattggggcagtgtgttgttcactaatacttttaacagagtagttaaaaactgaattctgtctgctctccaaagtacatgctgacccaaatatgacaaagtgaatgcaaagccctcttatatagcattcaaaggcagatttgccacaggtgccacatctgacttgtctgtagtgatctgagtcattattaaattttaaatagtaatacaacggagtagtcttagtagagtctactagcattgaaatgatgatcattatccatactgccagtacattggccatttgtatttattaaaattgatcgatggaaaattggtgtgggatggacctctagtaaattctacagaaaaaggcattgaggcacatttccaaacagatgagagtaaatagagtaacttgggatgatcttacttggagaaaagttttagatgtgatgcagctcaaaaagtcagcattattatgaagcaatgttgtacatgtgacagcagcatgagtagatcagatcgtaatcatttaaaacattagagtgtctgctgtgtgctaggcattgttctgtaggtgactaaaacagacctggcctctggcttgtgaaacctgaattttagtagacagtgcaaacagcagctaagcaaaaggattagtacaagttgtaatggctagtaggaaagaaattgacagagtgcagtgatggagaataattggggagggtgtgagggttacctagagaagccttacaaagacatttggtcaaagacctaaaagataggaaaggaaatggccttgtgaaaagtaccagaagacatctgggacagagggaaggtaaaaacaggccctgaggcggggacaagtcaggtgatgctga

SEQ ID NO: 30011 - DNA, 1047 bp, Homo sapiens
tttgatttgcatcgaccttttgtattctgttcaagctggagaatgcactagaatgagttggatatatgtatttacttttaacacagcataagttactcatcatatttaatgtttttcatcccctcccccatccccccacccccaacccccgccaccgcccttccagagacggagccttgctctgtcgcccaggctggagtgcagtggtgccttcttggctcactgttacctgtgcctcccgggttctagcgattctcctgtctcagtctcctgagtagctggggttacaggcatgtgccaccacgcccagctaatttttgtatttttagtggagatggggtttcaccatgttggccaggctagtcgaaaactcctgaccttgtgatccacctgccttggcctcccaaagtgctgggattacaggcatgagcctctgcgcccatcctgtttttcatccttttaatatgggctgttatgttaatgctttacattggatatacttagaactcttaaagcaatcatataagcattgtctttttaattgtccactgatcatgtcttaataatttgtttcagattatgccagatactcttggtcctgcttaccttgataattgagggtagaattaagaaagttttaggattaggaatcattcttctaattcagagagtaattagttggaatcacaaaagcattaggtgctgaactgccagagacaagcaacaaataatatgtggaaccacaactgttttggctacgtaggaattttgctccacaagtaatttaaattgttcctactaccacttacaacctttcctcctctatgggggtacatctcaatttttaagttaatatattagaattggtgttataaaaatttatttcttagcagactttgctacaacacatttatcctaaataaaaggagattgttgactttgcagagaaaaagaccctaaaagaaaacatttgttttattacaagcacccaggaggattttttataaacatgaaagataactttcctctaacctaagtaaatatttc

SEQ ID NO: 30012 - DNA, 1916 bp, Homo sapiens
agttgttgccattttctgcattcacactactggattctttgtagatgcggggatttctacttctacattttactgtaactatttacatttacctgtattgggaggaaattctatattgtagcaagttaaaacacatgattttggtaaaaaagtaaaaactgttaagatcttggagcccagacttatttgttatggagatttggagctaggagggacccgatgctcccttctctgtctctgtgtcctgtttattgtgaggtgtatattgataatgaatttgtgaagaaaggcattctttgatgacttagcagagaaaaaagtgatagtaattttatccattctgtctccagatgactggtactatgttttactttctcctcttttctccagagccactcttaaaatctttctgcagttaatggtttgttatagtccaattttcattgctttccaagatttgaactttctatctgaatgtaagtccccctccaaaagcagtcatctttcagttctgtagctcctctgatactcttcaagcccctcaaggagcattaggtttgaggatggtaacatttactcgttgtcctttgacctgaagatgcgtagaaagaaatgctatgttggatctcagtatacctaataacagtcttgcaggctgaatttgcattttcctttctggttgaaatcttgtcagtttactcatgcatttctgactttctcccattctggtgtgcttcctccccttcctgctcccttaagaaaaaaaaaatggttagccagttcggtgaagttttctcagaaatttcttgtggacagtgctaacttaagccggaaaacagtttgtgacacttgacttttcaaggaggagataagattttgtgtacccagactgtatatatcaattattatggggctaaactttgaaagtatgactagttccccaacaagtatatacgaaaccttgtaggattagtaattatatttcttgaattaattttaaaaatatgtaacatactacacacacatcatttgcaccatgagaattgtccatactaataagagatttttgtttgttccagttaaatcttactcctagttttgcaagtgtattcaggcctgcatggttgtcagtgactcaggtggggtgggcagggcagtctccaacctgccccacctgtgtttctctgcctgtttacttgtgaccttggctgagcagtacaaatcattgacaacactggcagtgctttggtctgtgcctgccctggcttattccattttttggccctttgattgaagatgcagttacaaccagtggctcctgactgtatttagtcattcgttctgatatttatcggccatttattgttgtgccaggtactgaagatacagcagcaaaaaagacactgtctctgtgctcatggagattttattcatatagagggaggtacaataaaagaaacaaatgtacaaaagtaatttcagaaaacagtaccaagaaattaaaatagagtaaaatggcttggtgagtgactgcgcaggttgggacattggttggtgccacattggggaaatgaccctgaatgatgacaaggacccaaccatgagaagggcattttaggctgaaggacagcagatagaaaggtgctgagtggggtaggccagtgtggctggacatagtgaatgagggtgagagtggtaggaaatgaggtaggcaggggtcagattttatttgaatttcagtagaaagccgtgggagagctttaaatggaggagtgaaatacgaggtatttggagaatacctcacgtaaaatttcctactcatgaaaagagagaaggcaggtgcagtggggcatgcctatattccccgctgttaggagactgaggctggaggatcactcaaggctgggagtttgaag

SEQ ID NO: 30013 - DNA, 1026 bp, Homo sapiens
aaaggaaagaggaactgagaaaggaaaggggtctagaagagcggttagaaatggggactttggttttcccctcaggcttagctcactactttctataaataagagatgtctgaaagagaagcagataaaaggagaaagccttcagcaaatttgtgagttgataagcatggattgattggctctgttggcctgggttcttgaggagtttgctgctatttcggaatttctgtagagaaaccctggcattgtcaggatatgggtatgccacatgtttcccttcctcccccttccctccactccttcttattacctagctagctacacctggaattttggttctagaataatttaaaagatactttgtcaagaaaatatctttggaaaaatcatgcatatattatttttccttttttctttttaactacttcctggttctttaggctcctctaattcttacatgcatgtgcttgatctctgggccatgcttgcttctagttaagtagcctttcaggatggtgtttaatttattctgagccctttataatatcccctgacaagagcatggagtggatagagggagtcttagtcaatatgtattataaatagatttagggttcacaaaggtcagcagccttcatctcttgccctacccccatcacacacaaaaataaaaatcacaaataataaaggattttaagagttataccagtcgggagtgggttcatttttttgtttttgtttttgtttgtttttggcaagctgaagtcatctgttggatccaaaaatgcataaaaatcttcaggcttatagaaccaacagcatcaaaggaagagcagtgtgactcaatattggggtgggggcaggtttggggttttggttgtgtagaagctccttatgagagaacagtgtgatgcttggagctgtggagaatccagccactgctttttctctcttccttaccttattactcttcttgattcacctggatgtggaaactgtccctgtttaagagtggccttgtcaatg

SEQ ID NO: 30014 - DNA, 1434 bp, Homo sapiens
ttgtttggcatattgagtaacatggcaggttctggagccagactgagttaaaatcctagctctcacataatagctatgtaatttggggaaggaacataaatctctactctgtttccttatctgtaagatagggataataatgcctacctcatagagtttttaggatttagaaatgtatataaagcacttggaacagtgcctggctcacagtaagcactaacactaacaaaaaagttatactattattttcacctcagttatacaggtgaggaagttgaaacataaaaaagttaagtaacttgcctgtgatcataaagctagaaagtttgggagccagaattaaaatacaggagtctgagtgctctgtttagatttaggacctgagccagggagtgtgttccaaacccagcactaatacttgagaagctctcaaaactgtaagtatccccaggatactggtgtctcaaaaagatagtaatgtgttaactgtaagctatttagtgatacatttgctttcttctgcagagaggagggactgaattttgggactgttgcctgcaccatcccagtccaacttgctatgtgtttttatttttagccattggctgattccaatttgaaattcagaggatttgtgatatattatgtgatatgttttaaaaattactagctccttgctgcattttataaagcgttggagatagtttttctttggttggctgattggttttggtgttttgttttttagaggactagcctacacctggtttgagtaagaaagttttgtttgagaagcagcgtttttaccaccttcaatcttttgaggaacttttggcatgtggaaaattaaatactacaaactttcaatagaaggtagacaggtaatatggagaactgagaattagaaatcttgaccatgctgttgggaatttcccttttctttctgcttgtccactaatctgcattgcttattaaaacaggttgatacttttaaggctctgcaaagaagttcttttcattggttagtatctaataagtgatagctggtacaggactttaaaaatatataataggggtttattttctttatttttattatttattttatttttttttgagacaaggtcttgttctgttgcccaggctatagtgcagtggcacaattacagcctactgcagtctcagcctcccgggctcaagtaatcctcctacctcagcctcctaagtagctgggactataaacgtgagccaccacacctggttaatttttgaacttcttggtagaaaatgtttcgccatgttgcccaagctagtcttgaacttctgggctcaagtgatcctccctcctaggccttccaaagtgctgggattacaggcatgaaccaccatgcctggactagcggtttcttttaaacagcatataattgggacttg

SEQ ID NO: 30015 - DNA, 1072 bp, Homo sapiens
agtttgtttctccatataatgtgtcatctttttgtctggctacttttaagaattactctttatcactggttttacacagttagattatgatataccttttgatgtagtttttttattttttgtatttcttgtgcttggtgtttgttcagtttcttggctctatgagcttatagtttcatcatatttggaaagaaagtttgttttctgtgtttcatttgaataatttttatggctgacttcaagtttcttatttttcctttgcatagtctaacatgctgttaatttcagtatatgtttaatctcagttgttgtatttcttcatatctggaagtttgatttggatctttttataatttctatgagtccacttaccatggtcaggtatttatcattttaaatttatgattacagttataacaagcgtttactgtctttttgtccactaatttcattatctgggtcatttctggatcagtttctattgattggttttttaccttatattttcaagcccctgcacatgcgtgataattttttgttggataccaaacattgtgaattttgcctttttgagtgctgcctttttgtattcttaaaaatattcttgagctttgtcgtaaggtgcagttaagttggaacttagtctgatccttttgaggcctgcttttaagcttttaaggcctccttttgaagcctgcttttgagagtgaccagaacagctattaaggctaatttttaccattcactgaggcatcaccattctgagtattctgctggatggcccataagttaccagggtctttttctttctgactaatggcaatgcaaactattctcagccctgtgcgagctctggggagtgttctctctgttctctggtgattctttccctggcattgcgtagtgtcctctcatgcatgtgctaattcatgcttaggtaaatacttgacgggaccctctacagatctccggagttctgtctctgtgcagctctggtacttgtgaactctgaccacttaggttattccttcctgcaccacaggcgattgtaggtctcaatatatttagtttt

SEQ ID NO: 30016 - DNA, 1028 bp, Homo sapiens
tttaattgttttagggttttttttttaagaatagatgattgatttttttctgtctctctactcttcttactcagaattagatgtgctttgagcacgtattaattctaatacgattaaaggtcaagccataccacaagaatatttatattatatgtgttgattagagttggacttgtaatggccgcattgttagagattgcatttctactttccatgaattctgttggatttgcagataaaatgttttctgtctaatagggagaaaatataaatatcatgcattcatctctcatactttttcatgtatcatgccattcacagttctaggattctggagccacatttgtagccaccattaaccaaaacaaaaacaatcccacatgactattacctttgaattcagtattgtactgtattattctgacacagaaatttgaaatccaatgggttggtgagtgaaaaagtcacatgcagctgacagtcacagtttttatatgactctcctagatctttttgttttgtggacgtatgtttgggggtagatggtttagagttctattaggagagagatgaaggtattctaggtgagtgttgagtggctgactgctgttagagggcaaaatgggataatcttttacaaaaaacttgaggtacatgatttagtactttgattatcctagtgattgttacactgaatcagaaaatgcatttaccttaaaacctttattgtaactaggtgaaagtaaatgtggtgtaacttttggtttgactataatgggcagtggaatctcagatgttaggatcaggtaagaagaaagattgaactatgtcatgacccagtaagtgaaggggtgtgtgtgtgtgtgtgtgtgtgtgtgtgtgtgtgtgtgtgtgtgtgtgtggtgttgttgttgttggcgacagggtctcaattcgtcgcctaggctgggatgcagtggtgcagtcacgactcactgcagcctcaacctcatgggctcaggcagtcctcccacctcgcctcctgagta

SEQ ID NO: 30017 - DNA, 1042 bp, Homo sapiens
ttatcctgcagttgtactgacttaacgatatcttcttgatatttcttccaccatgtgtaattttttatgctcttagggctcctttaatgaaggcaactcatatgtaaaatgggagtatgtaaaaataatttgtgggagagccatgtgggtggggtttgtgagtagtctctaaggcgcaggctacagctagctagcctagtgtttgtgagccctccccttcccccagtaaaggttgattcctttttctcctctttcctgcttgtttattttattctattttatcctcattttctacttctgccccaaaagcacccattctaatgcctttcactatattgtttgtgttcttgtaaaatgtatttagtgtttgtatttttaacttacataaatgatgcctaattctttcttacatttttctaagcacaatgttttaagctctctccctgttgctatgcaagcatctaattcattgcgttgaacagccacatagtattccaaggggtatactcattttatcttatagaagaccagatcgtttccagctctccatccccactaacagtgaacattctggtccgtaatcttttttggacctctgtaagaattaagcagaactgcaaggggatcatagggcttacttaaatttgatttgacttaagttgtaccagattgttccccagaatggctgtactcatctccatgcccaccagtagcagagcatgagaattcctgtgtcctcttaggtgcgttctgattttctaatttttgccaatcatactctacacttacatatggagaatatgttcatgaacatgtaggtcagtcttaggtgttatgcgtgggagatgggttgttgctctcccagatatgaagacgtgctccaataatactacactgtatttattaccgtagccctgtggtaaggtaaacagaccaatgaagctgacttggagcacccagagatggacatgtgtatatgtaggattttaatatataatatataatttatggcagcaccaaacactgaggacaagatgggatt

SEQ ID NO: 30018 - DNA, 1043 bp, Homo sapiens
tgtttaccaagttgcccccattttatttagcaatgaaattgtaagccacatgacaattccctttttctaagcatatgtaggagtagagtgtagatcagtgttttctgaatatattgtctgtatcagaattacttgaggcagttgttaaaaatggaaattcctcttttgtccatctccccactgttttggtttctctctctctctctctctctctctctctgtgtgtgtgtgtgtgtgtgtgtgtgtatgtgtgtgtatgtatatatataatttttctttttaaacaaaacctctctagggtggagtttggcaaagttatttagcagaagtccaagtagtaaatattctaggcgtcataggccatttgatctctgttagaaccgttcaactctacccatagtacaaaagcagccatatacaattcataaatgaaaaaatgtggttgtgttccaatacagctttattacggacaccgatttcaatttaataattcaatataaaatttattaatagttttcacgtgtcataaaatactagttttctttagatttttttaatcacttaaaaatgtgaaaacctttcttaactagtagaccaaacagaaacaggttgagggcctgatttggcccatgtgagtcatagtttgccaactcttgctccttaggcaactaaggttttcaaaccagtgccctagcttatctgatagttaactgtcattctctgtattatttgggaaaagttcttacatcagtaacatgaattttcagtacctgtaagagaaagtagttcttaatggtcaggaagggataattaaataaatgtcttacataaatctagtttaaggtaaatgtaatgttgaaacatttggttttttaaattccttttaagcctattcaagagtgggtaatagagctgggtgcagtggcccattcctgtagtcctagctacttgggaggcttgaggtaggaggattgcttgaggctaggagtttgagttcagcctgggcaacatggcaaggccacagtctcttaaaaaagagaatg

SEQ ID NO: 30019 - DNA, 1019 bp, Homo sapiens
aaaattaatgtcatgattatcaagaatgtttccagaaggcagggctcatcagtccttgacaaaaaggctgatgaaaaaaatggagttgagtgcagccgatcacctcaataatcctagcagtttggcaagctgaggcaggaggatcacttaagtcccggattttgaggttgcagtgcgctgtgatcacaacactgcactcggcctgggtgacagagctaggctgtctcttaaaaaaaaaaaaaaaaaagagagagaatgagaaatgccatttaattttgagcctggcaggtctttggtgacttttgagactagtttactgtggaatgttgaggtaaagtaggactgaatcacatgtagagggatctgtgtgtatttaggagaagcatcaggaaattggcactgaagggcaggagaaagctggcccagcagcctggaggggtagaggtgttcaggagtatgttttagagtctggtggttttttttttctttctgcataggaaagtttgaactttttgtaaccaagtgttctattcactgttaaagtaaaagaggaattaggtaaagaccacatgtttatcttagaaagaagcacacatttttgtgaaatgaaagaagagaggagtgaaaatagaaattttcatgtgggaagaattgaagttgaggtagcaaggaataccaagacaactgagaagtccttataaagaacacattcagtacttttaagatgttattttccaaaacatacacttttgggttgcctgtcagactggagatgtatgcctgtcgagtcacgttacactgaatttatttaggaaatagtctgacatacagaagtttcacttctcctgccacttgtgaaggatttgtctcattggtgtggtgtcagcctggtgagataggacttgcttgtggtttggaagctgtctgtgggcaactccaagagctgttgtgctctgcctctttatgaaccttctgtgcttatggaaatggttcccagcgtgtgctcctcaggaatgagt

SEQ ID NO: 30020 - DNA, 1040 bp, Homo sapiens
atatggttaacagttatggatttttaccatattcacaattaaaacaattatttaaaacatctatgattgattttaaaataacaaaaaacatattaatataaataacattttaaatgaaaactgtttttcaaaattaaacagcctaggctgggcgcagtggctcgtgcctgtaattccagcactttgggaggccaaggcaggtggatcatgaggtcaggagatcgagaccatcctggctaacatggtgacaccccgtctctactaaaaatacaaaaattagtcgggcgtggtggcgcatgcctgtagtcccagctactcaggaggctgaggcaggagaattgcttgaacctgggaggcagaggttgcagtgagcctagatcacgccactgcactccagcctgggcaacagagcgagactccatctcaaaaaaaaaaaaattaacctagaagactggtactatttcacatatttgcagatgactttaatgtctgacttcttagcagacaggtagattttcatacctgcttctgcattcaggctgtggccctctcacacctggtgtagattcaggaaaatctcacagtacaaatgtgagaaaatgggagtaaaaatggtaagtcatgttttagatttatgaaaatagttttgactttatggggctcccttgaaagggtcttgggagaactgcctagtttttccctgatgatgtaaatgctaccttcagctgaaggcatctttatccttcaaattcacatgagctctgtactgagggaaggtacagggagccggacctaggatgagagaccccatggccctgggagggtgcaggtggaggttgaggttgaagcagcagcaaaatgtcagaattaggcagtcgggcgcggtggctcacgcctgtaatcccagcactttggggaggctgaggcaggcagatcatgagatcaggagttcgagaccagcctgaccaacatggtgacaccccgtctctactaaaaatacaaaaattaggcaggcatggtggcgtgtgcctgtaatccca

SEQ ID NO: 30021 - DNA, 1037 bp, Homo sapiens
tctcttctgtctcttaaatgaaggcatcagactttgtaaccagttagcagagggcatcttgaaggagtttgtcttgttcagcatcaaaacccctgacatttaaccctctgcctagtacatgggcattcagtaagtgagtgaataaatccaattcacatcgtacatttatttaaaagagtagttttgctgggtgcggtggcactctagaagccaacacaatgctttagaatggtattgtggccaaattatggtgtacccaagtgtatgtaacagtgatttatgataacagctaacagggttggaggaatgtctcaagtattagtatttagagaacccaattatagaatacacattgaaatgaaaattgaataacctgtaactggatacttaccattctcctcccacctaacatggacatactttttacattataaaccatctattagattcttttaaaggtgagattatggagatagaagagcaaggaagagccagttagtgggtcagaaaatgaaacttctgtgcttaaaatggtcataagtgatgtagctgtgagcaaaaactgctcgcatttgtcactaatttcgcttctaggtgctgagatgtgtttcccattttaagtattgtttacactttcctacgtgtccaggagagttttgagaattgaggaaagtttcctgcttattcgtagctaggtaggcttagaatggttttaacattcttttatcatccagtttgcttgaccaatggctatgggtttgttgcagttctgcatccgtttctgtacttgttttgtaaagagaatccacacagtaaacaaaagagaggagagaggtaatctttccatctcttttaatacactgtaaaaattgggatagtgccaccatctgcttatttgttgacgtattattcacagtgctggtcccaaaggcgataacatctatgaatggagatcaaccattctagggcctccaggatccgtgtatgagggtggtgtattctttctcgatatcacttttacaccagaatatcccttc

SEQ ID NO: 30022 - DNA, 1055 bp, Homo sapiens
tcacagtattcacaatgccgttaactggtgacattgagctaagggtcacatgaacacagctggatgttcattgcagtctgaagccttgaccgttccagtctctactgaactcagcctaacacataagagtaaagaaactccaattgagtgttgtttgttgggagaaaaatggaatgaactaagataaagacagaccagtacactaaagcctaagcattccctcttcccccaacgttatgtttttttgaaattttgatggaaaaatatccagcatggtggagtggtgtttcgaagatgggtttgatcacacatactttgtcgtacgtatctacccaagctgtcactattcgctaaagtttaaaatgttcttttcctttctccaaagtaatctacattcttttcttccagccgaccccttggtgggaagtattgccactcagtatatgaccaacagagcagaacatgacagaatggccagacagtggaccaagagatacgctacataaattggggtttcacaattcttacattatttgtctgtcacagaagagagctgcttatgattttgaaggggtcagggagggtgggagttggtaaagagtagggtatttctataacagatattattcagtcttatttcctaagattttgttgtaacttaaggtatcttgctacagtagacagaattggtaatagcaacttttaaaattgtcattagttctgcaatattagctgaaatgtagtacagaaaagaatgtacatttagacatttgggttcagttgcttgtagtctgtaaatttaaaacagcttaatttggtacaggttacacatatggccatttatgtaaagtccctctaagactacatactttttgtttaaaacaaaattggaatttgttttcccttcttggaagggaacattgatatttaacagagtttttagagattgtcatctcatatatataaaatggacacgtggctataaaacaccatataagagatgagtagtgcgttttattttatatgccaatctactttgtttaaaaaaggtctga

SEQ ID NO: 30023 - DNA, 1026 bp, Homo sapiens
cagcaagaactgtcaaaggcctctctgaggagcagcagtgaactcatcagatcttggaaccactactgtcttccttcctgtctgtacattgagcttgagctccctgtgctccagtaaggccatgccttgctggcaggatgaaagtgggccagagctccagttttctaggggaatcacatactctatctcatctttcaagccctcctgtcattcttcatcacccagggtttcatcttcatgtatctccccctactgtgacctccatctccctctcctcccaactgcagaaactcgttcactttaccccttagaattcagcaagactaacccccactgcatcctccacctctgcgtcctccacctctgctttgaatgttccttcacctttcctagttgccttgcagtcctgcttcctctatcactcccctcctaccactaccacaaggttggggtaagatgtcctccttgtccctcagtgctacctccaatggtgtccttctctaaaacccctgcagaaagctgatgctatcagtctgttgtacctactaatcccaggccggccccccaactgctcctcatcacagagctgactcatggtcaacctgctctcgccgttactctggtcataattcttagtgatttcactggccacgtagatgctgcttccagtaacctggtctcttattctttgacttctccaatggtctcatcatccttacctcagccattcaccactcccgtggtcatatcctagaccttgttttgtttgttttttttaaagagacagggtctctctgtgtcacccaggatggagtgcaatggcttgatcatagctggttgcagccttgatcttctgggctcaagcgatcgtgatcctcctcctcagcctgcccagctatttttttaatttttagagatggggtcttactttattgctggagctggtctcaaactccttgcttcaagcaatcctcctgcctcagctccgcaaagtgctgggattacaggcgtgaactaccacatcca

SEQ ID NO: 30024 - DNA, 1049 bp, Homo sapiens
tccagtggtgagccaccatgcctggcctgatgtgtcttacaaatataatgttgagtaaaagaagccagacatggattaatttaattcatagaaaatccatagggcaaaaaataaactagaccatttagtgacacacatatgtggcaattaaaaataaaaagaatgattaaccaaaagtcaagggaaggaatgagttgcaactggacagaggaacacagggagccactggcctgtcctcaatgttgtactttttgatccatgtggagattatgtgaaggtttgtcttataattattaaaccatatatgcaatgctttcaaaattccgaaagtatattatttttgacctagagttccatacccatcaaaattacaattcaaatgttagtgtaaaataaagacagtttcaaacatgcaaagcctcagaaaatgtatcacgtatattttctcagaaaactatttgaggagaccctccataaaaactaatatgtaatcatagaaacaggaagaaacagaacctaacacagatatgaagtaaaggaaatcacaagcacaattagtaaatatctcaattcggaagccccagggtcacgactacgtcccaggtagagggcatgttgaaggccatcatcactggatgttctgttctactgtacaaccttttcaaccccagaaaagtactggaaaatgtgctccaaaaaaaaaaaaaaaaggtataagccaaaagaagaaaagaagacaagagatctaggaaacaggaaatcaaaaccagggagaggccgggtgcagtggctcatgcctataatcccaacattttgggaggctgaggcaggcagattgcttgaggccaggagttcaagaccagctggagcaacatggtgaaaccctgtctctactaaaaacacaaaaattagccaggcatgatggcgcatgaccgtaatcccagctacttgggaggctgaggcaggagaatcacttgaacctaggaggtggaggttgcagtgagccgagatcgtgccactgcactccaccctgggtgacagagcgagac

SEQ ID NO: 30025 - DNA, 1059 bp, Homo sapiens
cccatgacgctctgggaggccgcagctttccaccggaaagagggtggctgaggtgggggaggagcccaaaaggcattgtgggagtacagctctttcctttccgtctggcggcagccatcaggtaggctgcgttgaggatctttgctcttccatccgcctttgatcgtcttcctcttcagccatccaggtccggggaccctgcgtcctcggagataggtctccctcctgtgcggccagagtttggtcaggatgcgggacagcaaaggggtggagaggcggcccccggggcgggttgagcgaagatgtgatggcggcgcgaattcgagctgggcccggatcctggaggaggcgtggggctgacgaatggggcgcccgggacaaggcagcctaaagtgaggctgctggttgggtggggtagatgcattttcctcgagagttaatcctcggtggccgcagcagtaccttgtcctgtgatgtcagcggcatctcctttcaggtcctccttggggacgccgcctgccgcagccacccgcccccttggtgctcagttctggttctgttaattcgccccaccaaaacgtgccgagcaccgctctgtgctggggttgcggaagtgactgaacgcggctccgtgggcgcagtggtgggggttgggctagctgtccccggcagttggtgcagagccattttcattcccggcggtttccttgtttttgttggggaactaagatggacggatacagtcgtcttattgtacttaaagcggatgatatttaatacacagtttgatttcacaggtaagccaagatgggtgcatacaagtacatccaggagctatggagaaagaagcagtctgatgtcatgcgctttcttctgagggtccgctgctggcagtaccgccagctctctgctctccacagggctccccgccccacccggcctgataaagcgcgccgactgggctacaaggccaagcaaggtacgtgatcgactgcgtggatgcttggataaaattatattcgagaaaagttggaaaccagctgttaggaagacactgct

SEQ ID NO: 30026 - DNA, 1159 bp, Homo sapiens
caacctcccatgtgggggaccattgaatatttttgtatactcctgcctcctgttgtaaagggaaaaaaatactcttgctgatgaaaacatctatgggtgatctacataggtttgcctgattttaagatactttattgcaggcttatgccaaatgactggtttataaacatattgtatgacaaatttaataaacacaatatgctaaatgaaagtgaatgtagggttacatagcaataaagttgcatagtgtattagttacctattactgcataacaaattgtcccaaaattcaggggcttacaaatgcaaacatttatttaatctcacagtttttgagggttaagatatgatatgagagataggatatgatatgtgcctctgactcagggtttcttaggaggttatagttaagctgtggacagggctgtggtctcatatgaaggcttgagtagggaaggatctgctttcagttgtatgtagttatcggcaagattgagttccttgcaagctgttggactgagcacctcagttgcttgctgactgttggctagagcccactcttagttccttgccatgtgggcctctccacagggtggctcacagcatggcagcagcttttctcagagtaagtgagcaagagcgtacctaagatggaggccacagtttcttgtaagctaatctcagaacggacatcctatcaattctgccatattttttttcattagaagttagtaagtctaggtccacttagtaggaggaggttgcgcaagggtgcgaataccaggatgaagggatcattggaggccattttaggggctgcctaccacacatggtgacatacaaatgggagtgtattccatatgtattgaaaatatgtttatatactacattattttattttgctaattagaagcagttgaaatcagatgacatctaattttaaaaagtcagaacctctatgttcttgtgaataaaaattcttaacagtaaagaattttgattgatcaaatgttttatgtgatatatatgctttataatatagtaactagctaacgatttgttactgagattttgagaaatttgtcaacttttgcctttattcagatgtataaaaccttgctttctattcgttagtgacactgataagcaagaattttat

SEQ ID NO: 30027 - DNA, 1732 bp, Homo sapiens
tcttttttcctaaataacactacagggattttgtcatattagatttaatttataatttgaaaaatcatctagtgtgtgacctacaggcttagaaatggtatagtcaaagacattttatccacatttctaatagtggacttgattaagtagataagatcagcatctgtttatggtagtaggagaaatagccaaagttgaggattttatgtatgttttcctgtttacctggaaaatagcaattaattggattttttggtaaagattgccttctgtataatgtttggattatataaaattgcaaaaatgataacagcccgctttactgtactaagcctgttactttcatgacgtgtgagcagaatgccttattttgtaatcttgtttaacttgttgctactgggacttgatttactgtggcactagttaagtaagttaaaaaaaagttaaaccctctcattattaaagaggaaaggcgatggtgatgtctgtagtacaatataaaccataattgtgatttaccttaagtaggtataactcttatgggatatacagtatagtttttgtgaatctttacatgatagcattatctttttataattttttttcctaagataaacaaatgcatagttttcttctatgggtgatagaaacagctttttgaagtaatgaaaacctcaaaagatcatgttgattcttaatttttgccttttgcataagcctctttataacatgtatctttaaaacaattaagtctttaggaatgtgtaaccagaactatgttagtattgcttataaaactttagttaggttcaatatatacatatatacatctctatataggtatatagatttgcattttgtcttgtaaaattttatttgaataaattcttcctgtaggtaatgggaaacaaaattaatagttcatatgtcactcatagcatttctatatttgaaagtagcccaatataaaacttttgattctaaaattaaaccagcagcctattacaagcacattctttgattgagtcattggttataaacttactaaatgcagagaaagcagccaatttaggaaacttctgagttggtgggacactgttgattaataatgtactgtatgaattaagtgatgctttaactttgattttacattttaaagttaaaatgtgggcattatgtcagcaaacttaagggcattatgtcagcaagctaaaacattttttttcctgtgcttttaatgtatctctttacatgatctgagagaggattcaagttgatagaaatagctgaggggaaaagggggaacatcttgggatgaagcttgtccttatggtgatggtttaattacagattaaaaaattagaaggaaatttcagtggattaagtgtatagctttcatatctacatttcaagaaattaccattgtaacttgataagagatgatttattttatgtaaacatctttgcaaagcaaggtgtagcagctcagctagatttattactgtgcacgaaagtaaatacctatctcaattattctttttcttttccaatataaagtttgctgaatgtacaagaagagtttatcacttaggatatagaatttttttaggggttgggggaggggatctgttaggaaactgttacctataaacaaagattgactggattcgatccaaaagataaaacttgaagctattctggaactaacatggaaaaatgaaatggctattgt

SEQ ID NO: 30028 - DNA, 1035 bp, Homo sapiens
gctgagaagtgacttgctagaatgtgttttagaagaaacattgttatcttgtctttaatttatttaaaatattttatactggacagtgggttttaacacttaatgaccttttttcattaagtgttgaagaagtacatcactatgttactgggtatatttaataattacattcaatattgtagtgaaatagggacgtgatgctttccagaagagaaaataatcaaatagagatttacaaagccatttgctcatatctccatgacggacacaagccttagtctttatgcacaggtgtatgagaaatgtaaatctttatcttcccatcaatatactcccagcatgagctccattattctgggggttccttcttctatctgagtttcatgtaagtcagggggttaggatgcaacagaacagcgattctccaagtgtggttcccagagctgcaacatcagcatcacctgagaacttgttagaaatgcagattctcactctccaccccaggcctgctgaatcaggaactgtgtggctgggctcaggaatctgtgataacaagctttctagataattttgatgcacattaaaatctgggaaaattttcttatggtgtcaagtcgtgggtgacgacagctagtctgtaatgtcgtcagtccacagtccacaatggcatcagctgagacgttgtcttcccctgttgatccacgcagggtccagctttgctcctcatgcctgactgcaagctctttcatgtcaagttttctctttctctcagctaatttttgggccattcttatggccctgttcatatgatgattctattatttctctatcaaattgagctttgggaaattttgtggttgttatctaaactcaggctactttgggtctctctcaacatcgtgaaattatcctgccatttccttgttactctgaggcttggagaactcatacatcacatgtccatttcttttatggggtcttgctgtcttcatagcctcagcccaagaatgggagtccaagtcttcttcactctca

SEQ ID NO: 30029 - DNA, 1054 bp, Homo sapiens
catttgcaatgtttttatgacaagctggatgtcatcaatccttgtaaatatgtgactcgtaatcactattttggaggaagaagttgcaccagcacatttttagttttgcttataatccacagtaatttaaagtggtcagaatctaattatgcccatttctgatagacattcaaaataagccagtttcttagctctaaagcttcatgaggcgcccatgcaggagtagctgagatcttataagaagaacagaaaatacaacccccttaccctgtctattttaaggcacccctctgtcaaagtgcacttcccatttcccagatacctttgcatggaatcaccatggcattgaatgaaagtgttctgaaacgtggaagaagaattaactccttgaggaacatgttttaaaagttctatttgtctctgctacatgaattgtcagagaagcctctcaaactgcccactggctgtgattttgggctatatcattagtcagccaagctgattaagactaattttggtcaaaataaattcgtgcctgagcaaacaacccatgtgcagaatctcaaccaaaggcaattaaatcgagattccttttatgatggagactcaataactactgtggtttttgacatcattctaatgaaccaacggcaaagaaatgtccccagtgtatcagactatcctagaatttattttctatatttcttctcactttagagttgctctttgattctggcacatcattctctctgataatggtttcaaatcagcttgtctgattcatggctgcacagagaaggttttctcaggagctagtggaatggttattaaaaaaaacatggagaggcagatggtaggctattttactggctcatctgcttttgcagggaatgattatacattcaaagtaagtggcaccagaagtgaaatctaactgaggttgatctcccatgtttccttgtagagaacataaaatacagcagcagagacagcctaaaagctgatccctgaggacatggtcatggtcgtgatacaacctggggctgaagcagat

SEQ ID NO: 30030 - DNA, 1062 bp, Homo sapiens
tgtctgaggtctctgtgtccctctgattccagctaggctcccattattgcaaactcaaagacagaagagagctggaagccaaggcagcaggagtcattccaggtgaggaaacttagcttctttttaggtgagaccaggatcacttatcactcagcctgcttacctaagaggctcacagctgtccgtgaccctctctatttggtatctttctgggtcctcttgaaggtatacagagcaagagacaagaatcttacgaaatttttttaaagttttccagaaaacataaccccatttgattaaaaaagaagaaggttagaggcaggatggaaatgtaacagataaaataaaagcagtattagcagttaaactatggaatacttattataacccaggcactgtctaatcactttacaaatatattatcccacttaaaaaacctttcaacagctctaagaggtagacattattgtaatccccattttaaagatgagataagtgaagtttgaagacattgggtaacttgtttaggattcttgcccatgtagctgactgtagagactgtggcatcagccaccacagggcaggcctgataaagttcaagtgtcccaaagggaaagtcgaagaactccggtgggacagctctacagggtgccctgaagatgggacaagcaagagtgagcttataggaaaagacgaaagatttgtggggatattaagagcctggttctatgaggggcatttaacttattcttgaggattaagaaacgaccacacagtcatctcactgggatatgcactgagaagaatacagacctaggctctaaccatgatgtcacatttggataacttaatctctttgatcttgattgtccccgtctgaaaatggggttaatacaagcaaccctgcaaatcggttagaaggattagattgaatgtgggcaaacctgagcacctgagtgtggtaactaggacagcataggtgcagaataaatggaatctattgctatcattatttctcaatgcctggaatcagggggatgaataggatcttgatgggcctta

SEQ ID NO: 30031 - DNA, 1107 bp, Homo sapiens
tctactaagcatcttgtattcaaacagagactgtttccttttgcttttaagatgcatagatttattttaaatgattgatagagacatagatggactctatgaatgaataaatgaatgaatattggtatcaattgtgagtgaatcaaattgggtttatgacattattagatcacaaggatgctagagttttctgttggcgtttcaccgtaaactgacatggttttagtgccagcccatacaatgttgagatacaatctggccacatacgctaagagtaaatctcaattgtattgcaaacaaatgtattttgcgcacgcacacacgtgcacacacacacacacatacgtcctacatcctgactcctttgaaaaactttattttgcttttttttctatatagccctttcaatttctcagatctcctcaaatatatatatatatatatatatatatgagagaaagagagtccaaatacaaacctttccaaagggacatgtatagttttgactgcactcaaatcagagctcagaacactatttcactattacttttgaataactctatttccaactgaaacactcaatttcccaggtaaactggtaattcccaggagctttcaaagcattttcagaaaacctaaaagaccagttcttttatatgaaggataaatataatcatgtgtatatgttcaaagtagagcagctgtgtaagtccttcatgccttgtaaatgggagtctttgcaaactttattatgttttggtatatgattgtgagattttcaaaacacaatttaaaactttaccatgagtcacaatcctcaaagaaaaactaaatagacccccccttttcttttaaaaaagaaaaaccactaaactgaaaaagaatgggaaattaaatgaacttagacatttaaagatgcaaattgatctcttggacattgaaagacacaaattgatttaagaagcaaagattttggggagccctaagacaataaagcgatcagcacaaagacatctgtcagggtggaggcgacctgaggtaaagaacagttaaatctaatgcaatcaggaacttaggccagtttaatgttttttttgccttatgagc

SEQ ID NO: 30032 - DNA, 1028 bp, Homo sapiens
ttaccatgtcctccttgtatcatgtaaatggtacatgcgcccttttccctcttattggactctaatcaatgtatccatctcttaatctccacaggtctaagcacaatgctataacatgatgggacctcaataaatattatttggaaataattgaacataataagaacagatcaaaataccccgaaactgaacagagcacatacaggtttttattcatttaggaatttctatttactgagcaataatgtgctctatgcaaggcagagtcagccataactggttagcatcaaagttctgcaacaaaaggcagctcagccatcaacagatactgtagcatagccttagacaagctctgtgagcagggaagacagaaagggcagctagatggctttattcttccttgtcctcaggctgtgtaaaccaaccgtgtttttactttggcatttgtatcggatgccggagctggtatctcaaggccatctttctaagacctctgaaacactgacttaatcggttagtccactaacatctgggatggggtgagctggtcaccagagggcaggctcctggcttgtgtttcccagtgcctttgaatctacccaggtggctttgcctggcctgggaacttttaacagtagcctgaagctgcagtgcctgctcgcttccatttatgtaggtctctgcaggaactctgccccagctgatgccatgagacttgtaaatttggaatattcggacaagggaggagagacatctccaaaatagtgaaaagttaaattgttggctgtttctaaaggaaatctgctattactacattcaagaattgctatggaagcgttataggttataggacctcacagtgttggtgtgaaagtacttcacaatgttgatgtgaagaatacatgagccaacacatggacaaggtctagccttgtgcagaaatacagtaagtgttcaaagtgtctccccccgccccccccccccccttttttttttaactactagtaattacagagaccaaatccaca

SEQ ID NO: 30033 - DNA, 1038 bp, Homo sapiens
gactaatacccctgctcatatctcacctttgttcacctctatcataacccctagtgtccaggccgatatcacctttcacctattatttttgtcctgacatgatagatgtgtgtgactagtatcactatttaaagataaactgatttgctatattttgcagattatataagtttcacacaatctaatgttaggaggttgaacatcaattaagaaagagcttatacctttcatggtaactcaccaattcaatactaagaggttggatatgttccaaggtagaagtcctttgtgagctgagaaatatgcttggtggatcccacgctaaagcgacagattatggaatttcacttttgccaaatttggaacacagtactatgtttgattgttaattttaggaaaatgaaatcagattaatttctaccactaaaaaagagcaaatttaaataatcataatcttgaatagcctgtttttttctcttggccagcacagtacatataataaaaaacctagaaatacatttaagagactgagaatcaagcatgttcaatgttgtatacagatttttttgacaaaaaataaaaatgaaagcaaaatatttgagtgagaagtatcatcaatgtcaaccccagaactgttgtagcaggcttcccctctttcactaggaagccactgttctgagcataaccggcatccttgagttcacttcactttgtatgtggtacatctgagacgtggaaggttttacctctctcaaaagagcagtgatgacgtcaatgtaatcatgtaaacaagagtcaagtgatcattcagtggtatcattggactcgaaggtcaagaaaaatctaagtctcaattttctagggatagaagcagttttattcacaaaagagtaacaggactgcaagaagaatttgttcaattgtaagcccactttatattctctgttagtctttttgtgctgatcctggcttttgcttttgcattgctctgggctgtagaaccagtctcatagtaactttcccttttccttttatttc

SEQ ID NO: 30034 - DNA, 1075 bp, Homo sapiens
tcctctgtctagcgtatccatgctgtatattctgagtctggtagtcacttagtcatttcaattataggttacaaaaacatagcatatatagggtttatatatctacagtttcaagtatccactgggggtcttggaatgtatgccccacgtataaggagggggctactctactaaacctgaagtagaattaagatatcatctttatattatactgtactgtatctgtggtacctgcccttcggcagcctagagttacaaactaaatgtaataatcaactaaatttatagagtgtggattccaaagcaggtcattcagttacatagactcacagaggctggggtcagctgagagaaatactggagctttagtgggaattgtgaggcaaacttttgaagtaccaggaggacttggatggaaacaataatgcagaagaaataatgtggggaaaggcacagaggcagagatggccagaaaggagaatagccccatattaacacagagcatgtgctgaagaataaggaaagaggaggctgattgatggggtgatggcagccataccctgtccaaatcaggagcatccattttgagatgcctcatctaactggggctgcagacaaatggcttgtgaaaagatccgtactaacagagctttacaaggattccacccaagattttggccatttaacttcatggatgaaccaaccgagctaaccagccacagatgctttgtttataaccagaggaattcatgtgagcttggtgatgacaattccctgtctataaaacgctgatagttaaacagtgatactgtgtgaagcacttggagtctctatctcgggaggcagttcttaagtgtaatggtttaatggtcatttagcatgatgggcctttggagtgtaatatcatttgcctgccagttaaaatgaacacttctctgtgggaagtcaaagatcatgtcagcgtaacctggattaggggaaggaaagcatcaagaagtgaatgccaaaatagaaaacagggaataagatttcttgtacgcctggcctgttcataaatccaatttaattagagaac

SEQ ID NO: 30035 - DNA, 1058 bp, Homo sapiens
aatttatttagttgtaaaatttctcatttttatttcttctcattaaaaaataaaaatacttactttgtatatctaataatatccatatctgaagtcattgccagtctgatatattaactggctttcacacctacttttcttttatgttttatatattttttttctcactgtagacttagttttcctggaatttcatttttggtaatctttaaggcctgagttaaaaattgagttccagctggacacggtggctcacgcctgtaatcccagcactttgggaggccgcggccggcggatcacgaggtcaggagattgagaccatcctggctaacacagtgaaaccccatctctactaaaaatacaaaaaattagccgggcgtggtggcgggcgcctgtagtcccagctactcgggaggctgaggcaggagaatggcgtgaacccgggaggcggagcttgcagtgaggcgagatcgcatcactgcattccagcctgggcgacagagcaagactctgtctcaaaattaaaaaaaaataaaaaataaaaaaattgagttccagcagaaaggatctccatttttttttttttttttttcttaacctgggaggattaacaatcaagaatcactttaaagctgggtgtggtggctctcctctgtaatcccagcactctgggaggccaagtgggagtttcacttgaggccaggagtttgagaccagcttggaaaacatagacagaacctgatcttttaaacaaaaaaccgaatcactttacattcttgacttgagggatttaggatcaccgtggcagaagttaacttaaatactgtaaacctgtgtgaggtcctgctaggatttcccagttctcagtggagagatttttgtctttcacttttcaccaggattcaagatgtgtagattttcttgcagatctcagatgggtttttagttcacagttacattaagggtgtacattttgagaatatttattcagggagttttgtcctgcgtgaatcccatcttgcaaagttcttgagttttgtgttacgcctctgtcctac

SEQ ID NO: 30036 - DNA, 1035 bp, Homo sapiens
tcaaaataagagcacaatgatggctgtggcaggtggtagcccaaggctccctgtgcagagtggaggaaaatagtgtctcaggagtgatgactgctgaaaataatcaaattgatcattttttgaactgtttgatttgaggagagttgtacttcagcagagtttttgaatgaattagtgaaattaacaaaactagaccaaaaatattgactcaatttttagctcttgggaaaacagttttatgaaaaaaagatacgtaattatgtgccacatgactcagctatagattatatgaatattgccataacaatgaaaaattgaatattgaaaaaatgaaagtctaatagtgacttgtatttggagaataagagaataatgtctataggaggctgataggtagaatgacaggcaagacttaggagatttagtaaataacattctgcattaaaatcaatagcaatataatttttaaagaagatatagcagaacaagtagctaagagagttgagttacattaaacataactgattacagtcggccctttgtacccgtgaattctggatgtgttgattcagccaattgtcatttaaaaatttttaaaaaattgtgtgtactctagatattccttgttattcactaaacaatacaataaaaataactctagcatttatattgtactaggtattataagcaatctagagatgatttgaagtatatggaagggtaggcataggtgacacacaaatgctatatcattttatatcaggaatggaacttgataatctgcagaagctcctgggagcaatcccccatggatacaaagggtgactgtagttaattttattgtcatctatgggaccataataacatccatttcaacttcaatattttctcagcacaaacttggtattttgtggtgtatttactagagaagaacagagttgcttacatttttcatagtttaactgccccaacatcttcaaatctgtatagaagccttaacttgttacccagtccacagacattccccatgtctct

SEQ ID NO: 30037 - DNA, 1035 bp, Homo sapiens
gctcactgcaacctcatactccagggcacaagtgatcctcctgtctctacctcctgagtagctagaagtacagatgtgcaacagcatgcctcactgatttttttttttttttaattttgtagagatggggtctcactatgttgcctaggtgggtctcagacttctggactcaagcaatcctcctaccttagtctcccaaagtactgggattacaggcgtgagccaccgtgcccagctgtaaaattgtttttatggatgtaatcatgtgcattttctaggaggaatgtttgtaacactttcacttgcttttcagataaagccagtgactacaaaagctcaaaacaattatactttcagtgtacctaatacaagcctgtgcttttattatatttgaaatatttgttgaacaaacaaatgaacaaataactgaacagaaagagatggcagaatcctattcaaatgattagaaattatttcctatacatttttagtctttgagaatctttatgtgtgaattgttttattttttataatttcgacttttctcacagattaaaggatacatgtgcatgtttacctgggtatattgcatgatgctgaggtttggggtacaaatgatcctatcacccaggtagtgagcatagtacctgataggcgatctttcagcacactgtgccgcccccgcccccgccctgcctctctctaccatctagtggccccatctttgtgtctgtgtattcactgtttagctcccacttacaagtgagaacatgcaatatttagttttctgttcctatgttacttcacttaggataatgacctccagcttcatccatattgctacaaaggacatgattttattcttctttatggctgcataatattccatagtggatatgtgccatattttctttatctagtccactgttgttgggtactgaggtttattccatgtctttgctattgtgaacagtgttgcaacaaacatgtgagtgcatgtgtcttttttgtgtaatgatttattcttttgaatat

SEQ ID NO: 30038 - DNA, 1011 bp, Homo sapiens
ctttttctaggccttccattccttttatactcaatgaaatcttaaaaccagagtgccttctgtccagaaaccatcacagtattttccatagaacacaatgctctgaggctttttttttttttcttaaatgttttgttacaatttgggtaaataggtttaaataaaactttaaaagaaactgccggacatctaagaaacttccttttgctaatttgcattgtgaattgccaagaagacatttgccaaatacagtcatccaaaacttattcactatggaacctttttattttcccagaagcatctcgtggaagtgggagaaaataaaatgggtgttgagaaagttagtccaacttctttcatcagacaaatggaggaaagaaagactttagacctcatggtttatttggcattctgtgatcttaaaaatagattatttttcacttcaggatagaaaggccatggagttaggagtcaagcccggagtttgagtccacacattgttggtggcctgactggtacctacagacactgctgtgactgatgcttcatcacgtgattagggcattgctttctctcatacccaacccactggatagttttgagcaagaaagaccatgcttgtgaaatagcctgcaaaataaataggaaataaatgaaaaataggaataaattataaatataatatttatattgtatattatataataaataggaataaaatgatttatatataacaaataggaataaattataggaataatttcagagtgttagcattgaaattatcagtacaattagacaataactttaatatttgttacatgattatatcaagatagaaattttaaatttagtgtaattacacagtataattatagcaatgtttgaaaaataaccttatgcgtagaacaaatactggaaggcacgatgcccacatgttggcaatattttattttggtaaggatttggggtgaatactttttcttctacttttctattttatatatcaat

SEQ ID NO: 30039 - DNA, 1023 bp, Homo sapiens
agtgggtacatgcaggagaaaagtccagttgcccaaactacatgtgtagggtcttccatccagatccttcctttccattccaatctcttactactccccagctcagagtttacattttctatattttgtgcagaaggcccttgcccagttcagttgtcacctttccccaaccagtcctttgttggctaggtgtgcatcctgtgtgctttcataatactcgcacctacctacatctgagcatggcgccaaccctaaaggcttgtcttttccccagtaggctgtgagctacttgggaggaagcaggggtggcatgagcatggcttttacttttgtattccaacatccaatgtaggacctaacacatagcaagtattcatgaaacttgcccaattcattcaatcacttgttaacattttatcattctcacatccaattctgttatttcttctcattgccattctctgatttagattttatcactattctctttccgtatgcattatattccatctaaaatgaaatattgcttccccaatatatctgtcttgtctgctcaattcttttttttgtattttttagcatttttcttccatgctctctgttctgtcatgtcttttctgctttcctgccatgaaagtgatcaccctcccttttagaactaattctcttccccctgaccccagcacacgtaaactttatttgcattgcattgctattattttgtagcagtcactattcccttgttagattgtgggcagggattgttcctcccttactgtcttccctcacgggtctatctcagtgctttggtcatagaaggggctcagaattgaattggaactgaacagaattgaataaactatccgtttatgaaataatttgctttagagttgctagaattaaatgactgctccagtggcaatattactctaactcactaatatcatttgatccactgaggagctagttaattaagtaggtggattaaaaatataatctggaggaagaatgttttggctggga

SEQ ID NO: 30040 - DNA, 1049 bp, Homo sapiens
aaattaccagcacctgacgagcaccttattttcccactttcttccctattccccaagtcctcgctgtcctgccttctgacagcatagatctgtacagctttcttttgtacactacatactatataatcacacagtttgagtccttttgtgtctgacatccttagctcaattttatgtttttgggatttattcatattgtcctatgtagctatggtcggttctttttcacttcccggtggtattccattgtatgaatataccacatctcatttattcattctattgctttgacatttgggaagtttccatttttgaagcattaccaataaggcactctgagcatccttgtacatgtcttttggtgaccacgtgcacattaccagagtatctacctagaagtgaaattgctgagttgtagggtatgcataagttcagcttattagtttctgctgaacaatttccttaagcccaaaacagcttttaaacaaaatggaagtcagtcctgctgaaggcaggcatactgatggcaacggcaatgagagctagaataatgtttaggagtgcttagctttcattcaccaaagatgtcaaactatggtcaatcatgcctatttaaaatggcaagggagggcaccttccataatgtaatgattaaagtctggactcttatgataagtttctcttacttggcaatgttatttttgtaaaccattcatttcccactataatctgctcttatgaatgaatatagattttgttatatatttctagacatgctgatggccaaccaaagcatagaaatactagtaaaaaaataatccagagatgccaactcaccaaagccatgcatacagagcattttcatacatttctgtgaagatgcaatacatttgattcatagtcagcatagatagatgggagttttgaggtcaaatataaagcttgtgtgctcccagaaaagcagcattttgaaagtttgaaactcaggccaaagcactctagtggggccctatccttggcttctttgctttctcactctgtgctggcag

SEQ ID NO: 30041 - DNA, 1051 bp, Homo sapiens
tccttcattctattgatgtaatatgtcaggtttattgagttacatatgtggagacattcttacatccctgagatgaaccccacttgttcatggtgtattatctttttgatgtgctgttgaattcagtttgttagtattttgttgaggatttttgcgtctgtgtctatcagggatattagcctgtagttttcttttttgttgttgtgtctttgtctggtttttgtatcagggtaattttggctttgtagaatgaattagagaaaatttcttctctcctcaactttttagaattgtttgagaagaattggtgttctttggaagtttggtagaatttgacaatgaagccatttggccctaggcttttctttattgagaagttatttattaccaagtcaatctcattacttcttgttggtctgttcagcctttctatttcttcttgattaagtctaagtagattgcatgtgtctaggaatttatatatttcccctgggttttccagtttatttgtgtatagttgttcataatagtctctgatgaccttctccatttctgtggtatcagttgtaatataatgggcattctggaacatgctgtttcatttacatatatttgtacaatttccaaagtttctctagttactgagttttagtggtctgagcagatacttgttatgattttgatttttaaaagtctgttgagatttgttttatgtctttttttaaattatactttaagttctgggatacatgtgcagaacatgcagttttgttacgtaggtatacatggaaccatgttggtttgctgcacccatcaccccatcatccacattagctatttctcctaatgctatgcctccccttccctgccacaacccccggacaggcccgggtgtgatgttcccctccctgtgcccgtattttctcattgttcaactcctacctatgaatgagaacatgcagtgtttggttttctgtttcagtgttagtttgctgagaatgatggcttccagattcatgcatatccctgcaaaggacatgaactcattctt

SEQ ID NO: 30042 - DNA, 1070 bp, Homo sapiens
tggtccctcacagattcccttgtcgaggggagggagttccctcaccccttgaacttcccaagtgaggcaatgccccaccctgcttctgctcatcctccatgggctgcacccactgtctaaccaatcccaatgacatgaaccaggtacctcagttggaaatgcagaaatcacccgccttctgcgttggcctggctgggagctgcagatgggagctgttcctatttggccatcttgcccgggaatcattttatgtcttaacatatctattctgaagaatgttccaagtactgattagagggaatgtgtatactgtagctgttgggtgaaatgttctgtaaattaatgttagatccattagtctaaagtgcagtttaaatctagtatttctttgttagttttctgtctagatgatctgcttaatgctgagagtggagtgttgaagtccccaactattattgtattggaattcctcttcctttaaatctaatatttgttttatgtatctggatgctctggtgtcggatgaatatatggttcaggatttttatttcctcttgctggactgatccttttatcatgatataatgactttttgtgtctctttgaactgtttttgattttaatgtctgttttatgaagtatagctactcctgctcatttgtggttttcatattcatccaatatcttttttcatccctttactttcaatctatatgtctttaaggtgaggtgagtttcttgtaagcagcatataggtggatcatgtttttaaaattcatttagccactctatcctttaagtgaaaagtttaatctgtttacattcaagattattattgatatgggagggcttactcctattattttattaattgagctattgttattttgaatattctttgtttctttctctcctgtttatcattgtgttttgttttctgtagttgtaaccattggaccctttcctttccttatggtgtgtttgctctaccagtgttttttatacttttgtgagttttcatgatggtagatagtatctttttgtttccaggtgtaggactcccttaaagc

SEQ ID NO: 30043 - DNA, 1067 bp, Homo sapiens
cctcttaagtagctgagactacaggcatgcacccccatgcctgtctaatttttgtatttttgtagacacagggtttctccttgttgcccagactggtcttgaactcctgggctcaagtgatccacacgcctccgcctcccaaagtgctagggttacagccgtgaaccaccatggctgtccaacaaatttttaatcttacaattctgaaggtcggaaatccaaaatgggcttcactggctaaaatgaaggtgtcagcagggctgggttccctttgaaagctctaggggagaattcattcccttgctttgcttggtacaagctctagaagccacccacattcattggctcatggccccaattccttcacctcaaagctggcaactctcaacctagtcatccttacactgccatttctatagttctcccttctcattcctcttccagctttaaggactcttgtaatcacattgggtccatctgcataatccaggatcaattcactcttaagttcagctgattataactgtatctacaacctaatatgttaaatatcatataacctaacatattcacagatcctgggtgttaggacataaatatctttgggggctaatattctgcctaacacaatattaggcttttaggggctaatattttgcttaatacaacaataggggttctagcccttcggaatccaaaatggaaattttttctatcacttaaatttaaaattatgattatactatgcaggcatcctttctaatgtttttctgtcctttttcaatgattgaattattcacaccttttccccttatctttgttgacctcaattatttattggagttttttatatattaagaatattatatgtatgttgcaaatattttttcttaattttacatattttaaaatttatggtctctgtacagaagtttaaaatttttatgcccacattccttgatcctttttatcagactttgttgtcgtatctttgaatttaaaccatcatggctatggattcaaccgtgtccctgcaaaattcctgtgttgaagccctgacacccctg

SEQ ID NO: 30044 - DNA, 1053 bp, Homo sapiens
cattgattttgtatcccaaaactttacagaattcatttatcagatttaggagctttttggatgagtctttagggttttctaggtatacaatcatctcattagcaaacagcaacagttttactccctttttattgatttagatgccctttatttctttctcttgtctgattgctctggctaggacttccagtactatgttgaatacaagtggtgaatgtgtgcatccttgtcttcttccagttctcaagtggaatgacttcagattttccccatacagtataatgttggctgtgggtttgtcatagatggcttttattaccttaaggtatgtcccttctatgccgattttgctgatgttttcatcaaaaaacgatgctggattttgtcaaatgcttttttctgtgtctattgagatgaccatgtcattgttgtttttaattctgcttatgtgttgtatcacatttattgacttctatatgttaagccatccctacatccttagtatgaaacccacttgatcattgcggattatcttttgataggctgttggattcagttagctagtattttttttttctttgaggatttttgtgtctatgttcatcagggatattggtctgtagttttttgttatgtcctttactggtttggatattagggtgatattggcttcataaaatgatttagggaggatttcctctttctctgtcttttgtaatagtttcaataggattggtacccattctttgaatttctgatagaattcagctgtgaatccatctgttcctgaacttttttttgttggcagttttttaaattaccatttcattctcactgcttgttattgttctgttaagagattccatttctttctggtttaatcaaggaggattgtgtatttccaggaatttgttcatctcctctaggttttctagttaatgcacataaaggtgttctagtttgtgcacgtgaaggtgttcatagtagccttgaatgatcttttgtatttctgtggtatacattgtaatagcttctgtttcatttctaattgag

SEQ ID NO: 30045 - DNA, 1087 bp, Homo sapiens
cgagactttgtctcaaaaaccaaacaaacaaaaaacaaagaactggttggaagaatcttgaaaagcatcgttctttttctctttagaacatgccgtctggtgtctgtagttttatcttatttttgaatatgactgacagtccactgaatcaacttgcagggaattcaaggttgaaactgggatttgtctgctggctgttttcctcagctctgtggcctttgaattacagtttgattttcagcctgtagggacttgctactgtatgtgtgtcataaattcaggggagctggatttaaaattcctgcctacggaatactggaggctgaacatgtgtcagagagtagtatatggctgctttgaatcaagcaagacaattgttttcaagtccaacagtcttaattgagtgaaagagcttcttcttttttttcaggaaagaaaagaaacatgacttcaaaggcaaatacaactaactcatccataaaaaatttctcaaaggaactatggctgttttgaactagcccttccctagatatataacttctttaagtcctctctggatggttgtttacatctgttgtttatacatctaaattgcatgattcatttgtaattgttaacatgttggaataatgttacaggtactccatggcattttatatttggcttagcagagttagcacttaactgtatatattggtcaggcactgttgtataacaaaccatcctaaaactaaatggcttaagacaacaattctttatttagcctgcaattctgtgggtcagcagtttcagccaaactcatctgcatggttcacctggacttggctaggctccaccatgtatctctgggcagttgtaggttagctagttggctctgcttctaggggtgctgactgtgggctggggagactcagctctcctccatgtgatccctcattcccatcaggctggccctggcttgttcgcagaggcagggttccagaagacagaacaaaagcacataaggtctccagaggcttaggctaagaagcatctcattactacttctgccacactattggccaaagcaagttataaggtcagccta

SEQ ID NO: 30046 - DNA, 1031 bp, Homo sapiens
tttagctttctttgcaccttttaccacttccatttgctttgtgaacacttctgtctgtctttaaaggcagtaaagactagtaatcataataacagcaaatattttttgactgcttatgctctgccaggtactgttttaggctattaacaaatttaatattcataacaatcccacaaggtagaaaatagtactatccccatttaaaagacaaggtaaggcacagagaggttatgtaacttgtctgagatcacacagctaataacaggcagaggccgaacttgaacctagggtatctggcagcaggacccaagcccccaaccactagactacctctgcaataagaagcctctgctttcagctcccttttttttcctacagaacctggctggacatgtggggatgcttagcacatagcagcacataatgctatggaaacagtcatttccactttccttctatattcaagtggtatgtctggcttatcaaacatttgtcgcaataaaaatatgactgtatgcaggctgagacaaagattactgctctttgaaatttctggagttgcctgatgacactcatgtaggatttagttgatcaaaagctttacttgatttggcctttgaaaaataatcattttggtcaatagcagagcatgtactcaacaaaaagtttcaggcatcactgcatttagaacccagtagaccagcactgttcaacagaaatatgctaacaacaaatgcaagttacacatgtaactttaaattttctagcagccaaattttttttttttttttttttttttttttttttttttgagacggagtctctctctgtctcccaggccggagtgcagtggcgtgatctcggctcactgcaacctctgcctcccaggttcaggtgattcttctacctcagcctcccgagtagctgggactacaggcgcgtgccaccatgcccggctatttttttgtatttttagtagagacggggtttcaccatgttagccaggatggtctcgatctcctgacctcatg

SEQ ID NO: 30047 - DNA, 1056 bp, Homo sapiens
tcctgggccctgactttgtgcctggcaccgtgcttggctcggagcatgcagagggaaaggacacacacctgctgtgggtccagtgttccagacacaacgtggagtcaagtggctaccagcgaataagggaatgaatggttttccaggctgaagatttcatactgtatcaattattatttttaagtaattttatattccaaaacagataatatggttcatacagaaagtttagaaagcagaaaaacacgaagggacaaaaaccatcatccttatctcctctcagatgagtttcttcaaaagtgcctgtcacttaattcagaaaactaaaaagcaaagacaccaaaatgtgtagctaggaaatactaattatgaagtaacggggctttgttcagagacctgacccttcccttacaatgtcactcagggcatcccatttgagggtaaagctcttggaaaaatccttctctcttcaagagatccagtccacagaaaaagttctctcacaacaagccaagactctgagcctcctgggtgagcccaagctctccaaacaactgacgggcacatgcatatacagaaagacaaacctagctctctgccggggtcccgcggctgccaaatcccttttccagggaggtgtgttattaccacctcttcccactgtttctgtcccaaatatcaaatgagcttaaggcagccttgggaggtggaacctcccagctcaggagcacaggcccagccttcagcgacccctgatgtgccttctctctcgtttccagctgtcaggaatgacaggaacaagaaaaagaaggagacttcgaagcaagaatgcacagagagctatgaaatgacagctgagttggacgatctcacagagaagatccgaaaagctcaccaggaaactttcccttcactctgccagctgggtaaatacaccacggtaagagatactcctgccccaggctgctgggagtgtggaaaccttgtacgtgcatgtgtgcagacacacacacacacacacacacacacacacacacacacactttgcactgggcc

SEQ ID NO: 30048 - DNA, 1033 bp, Homo sapiens
gagctgcagtcatctaaagaattccagaggctggaagctctccgcctccacaatcgctcatcacatttgtctaggaatttagtgctggttattgatgggaggactcagtttcttcctctgtggacctgtccgtggggctggttaactgtcctcttgaaatgtcagctagcttccccagagcaagagattcaagagacagcaagcaagaaggaagtgacaatgctttttgtgacctagtttcagaagtcacacaccatcactttcaccatattctatttgttaaaagcaaatcattaagtccaggccacactcaaggggagaggaattaagctccaccccttaaagggagtaggatcaaagaatttgcacacatatttttaaaccaccacacgttatacctcagttttaaaacaatgttatttcttattccaaaaaccaaaagggtggtgggatagaaaataatgggttttaggaagcattttcactgaggctttagaggaggtgacatttaagctgaactctgagaaaagagccatgtgaagatcagggaaaagcactgaagccagagggaaaagcaagtgcaaacactttgcctcagcagtgagtcatcgaagcttcacaaagaagaccaagatggccagaagttcatgagcaaaggaaaggaggagtagttaaagttggcaaggtagggagaggccactgaggccacagaaagaagtttggattttattctgaaggtgactagaagccatttgaggagttttctcctctgatgaacattttggacaacatgctctggctgctgtggattgaccgcatagtactcgagcaggaatagaaatgaaggatcacttcagaggccctcaccgtaagagaggtgatggcagcttggtggacaagtccctggctctgcctctggggtcccacatcatcagattcttccagggttccattaacaagtgggcctcccccaggacacacactgaacacacactcccatcaaaagcaatagagagatgcacagttgtctttg

SEQ ID NO: 30049 - DNA, 1074 bp, Homo sapiens
agaggctgagaaaacagcactcctgtgaattcctgagagaaaaactttttttttttcttttagtggtgattctttataactcactagcttaaggaagtacagaaactaaagaaatagactgtaacagctggatgtttttcaatacatttgaacaaaataatttacagcgttcttcccctacccattcctccacacttgatttacatgtatattccttagcctagaaagaatatgttttcgctataattttttcagattcataacccccaccccattctttgcagagacttaagactaggagcctcaaaatatgcaaggagtcgaaggcccagagtagtatctttagcttccccttaatctgaccaaaaaaaaaaaaaaaaaaaaaaaagcttggagaaaagcgatgcctggtctccttatgctaatgctattggcatctctgccatcatgccacacagcacctgttcaatgtcctcaaaaaattagagattctcgataaataaagactttggctacttccacgactaccttaggaggctcttaaatgagctttctgtgtcctggtaattacatttcttctggccctgatgctaccaccccttcagttgcaaccctacttccctttcataagtggttttaaaatttgttttttaaataaaatgtaagtgtttagatagatggtggcacaagatgcagcataggatccaattagcttttaaccaaagctgggaaagagttcaacagagcttttaaacattagaggcaagttatctccctgccgctccaggcaggaaaaaggggttttcagcatgggctgttaacagatagccagtctaaatggtagaaaagcaaaaagcagaggagacagttaacatgcaatgaagaacatttgggggaacaaagcttattctctaggaaactggtcgacctgccagtctttttttctgacttttgcacttttcctgactttttctgactttttttttggccaggtaattaactggctaaccaattatttagccaggcatgctggctacaaagataaatcctatgactacagtatacagtatagcc

SEQ ID NO: 30050 - DNA, 1094 bp, Homo sapiens
tgacctttaaagtaatctcatacggatgaggagactgagaatgagagaggttaaagatttccatatatctacactttttgaatttagacaaggaaatttgggaaaaaagtcttcatacttgctctcttcacttgcttaccttccagttactcataagccactccaatcttgtgttgtacccaaggccacacagctagttgctggtagagtcaagtctggttagaacctaggtaatttcatttccagtccagtgctgtagaccatgccaccttttgagtattgattaaacaaagacttgttgagtgtctggtatatgtcccatattgttctggaccctagggaacagtagtacataggacaaacaaaattcctgctcccaataaagcttatctagtggtagaaaaaacaattaacacccccttttccccctacacagacacgtgcgtgggcacacacacatacacacacacatttttacagattgtgataaacatgaagaaaataatgtcatgtggtagatggtgaagagattagtcagtgaagagctttatgaggaagtgtcatttgaattggaatctgagggatgagaggaagctaggcagagtgtgcttggccatcaggtagcaaatacttaaaatatttaacttgaacgtgggtcagagtgtggaggggatccataaggaaagatattgggaaagtaggtagtcactaaatgcctagatattgcagaggctgcaagtcctcaaaggctggctgtgataataaagcatttggattttttctaatggcatcaaatgcctttagaatcttttaaagagggcagtaacataatttatgtgtttattatcctcgctacagtggtagcatgcattgtagaggggtcaggtcataagtggaagaagggagacaggttaagggataggagcagtagtccaggccaaatatgtttgtatcttagcccaagatggtaatagacagatggaaagaaatatacagcgtcatgaggagaaattgacaggacctgtggttgcattgaataaggatggtgagagaaagggaggaaacagtgggcaccgtggctcatgcccttaatc

SEQ ID NO: 30051 - DNA, 1051 bp, Homo sapiens
catgaactgctgtattttcaatcgtttgtactctgttaatgtacataagtattttttgtgttcaaatttccccagatttggccagagttccctttaagctagcttctggatctttgtcatatactctcaccatttttttgagcatttcctttttattccctcacacaaggtatcactgcttcatcttgtacctaccctggccaatccatacaattagttatttctctgagaagccctggttccttttatttgggcacagtattagagagtaagagctggtcactagaactgcatgtaatttgggtggtttattaatagattgcctttaggaaaagaaaaaaaaaacccttaagagagtaaggaaaataggagacgggaggggaaaaatctgagcaaggatgtggtttcaggtcttaacctaatcagctctggtgtaccacatggtacatacagtttattgtgccttggaggcaagggagctgggctttcatgccctttttcagtcattggttactgtagtagttgggagagggacagcagcaaggaaaacagcaaagggctaccatggccaggggcagtcctgagaaggttgcagatgtgaatgctccaacattctctgctgcaggagggataccagctctatcctaaaaataatttatctgaatctgttaggaatcttagttggatagtaagagttttgatagtagtgagagttcagatagtgacaggtcagataggaatgggtacttgcacacatgtatacatacacacaggtgtgtgtactgcatccagtaaagtgtcacaggttgtggttaacaagtttgaataacactggcttaagatatacctaaggtaggctaagctgtacttttttttttgtcttctaggccatcgtacatgctgttctctctagaatttctcccatcttccctatccccaggtctactgaattcttgttcatttttcacaactcaatttaaaatcagtttcttaggagagttttcctgattgccaccacctccagttaaacatttttttttaaggtttagga

SEQ ID NO: 30052 - DNA, 1033 bp, Homo sapiens
caatttgccattttagtccaattttggaagttgtgtttaaaatgcacaccagagccaccggaactttgagtcttcccagatcaggcccctctgacccatagtttattgtttattgttttacatcactaaatttgatgagtagttgttgcacatagtagtcattccccagtgtacgaaggggattggtttcaggagccccatatttaccaaaacctgtgcattctcaagtcccaccatgggcccctcagaacccatgtgtatgaaaagttggcctgaaaagttggtataccatataggttcgcatctccaaaatattgtattttcaatctgcatttggttggataatatctgagtattaagtggacccccacagttcaaacccgtgtcgttcaaggatcaactgtaataaggagattacttctttttctgtagggtttgaaggtggtaagcattttagttcctatatatctgaatgtccttaacctcactcataattggtagtttagagactctagaattctttgtaattctttataattctctctcagaactttgaagttatttctccattgtcttgttgcatcatgtcttgccagtgagccatgatgtaaatctgattctcattcctttatgtaggcagtgtttattcccttttgaagcttttaggattttggggtttcagacatttcatcagagtgcatttaggtaatccatggtccattgctgtctgaggactcaggtctttgtatttgcctcagtatatttattatacttaataataatctaaaatcttctttcctatattcttttaatgggaaactttctggtcttttggggataaatacctatatatacttttttcacccgtggcctgaaggcagcagaggaggtgaccatttggctcctactgagtcactttaattaataactgtttagtttcctccagggaagttttcttgctttccatatttgctgcttcagagcatggagcagcacccacttttggcatgcgtgtttttcctggatactctat

SEQ ID NO: 30053 - DNA, 1058 bp, Homo sapiens
cgaaatggggacactcccaagatccgagttctccgatgccacctaagggccaatcttgcaagcaagccttttaaggatagcagtgtcatgcctgctatgttaactcttttctgcacatggacataataaaagttacttagcagtaactatttgtgtatgcctatcatgcctggtgttatgccaatggaatcatgagtaataggcttatatcaatcataaatacagctgaattattttaaaaataactgaacaaagtatatagcagtccttcttatttgtggtttcactttccatggtttcaattacctgtggtcaactgaggttctagttttatcatttcatatcatcatcataagaagggttagtataataagatatttatagtacaataagatattttgagagagaccatattcacttaacttttattgttacaaacattctattttattagttgttgttaatctcatactatgcctaatttataaatcaaattttatcaggggtatgtatgtagaggaaataaacatagtatacataggatttggtagtatctgcagtgtcaggcatccactagggggcttagaacgtatcccccatgcataacaggggactactgtataatggttattacttactgatccagtggttctcaattgtatgtgttagctcatatgctcattatcagactcaatagcttattatgattatcttgtttctgaaaacaggacagttttgcaataaaattatatgtagttggacataaatacccttgaataaaatggctagttttcttctcacagaggaagatgcagtatattttggttttagaaataaatgaaactttactttaagttctgggatacatgtgcaggatgtgcaggtttgttacataggtaaacttgtgccatggtggtttgctgcacctatcaacccatcaacccattacctaggtttctttttttttttttctttgaaaccgagtctctctctgttgcctaagctggagggtagtggcgcaatctcagctcactgcaaccactgcctcctgggttcaa

SEQ ID NO: 30054 - DNA, 1070 bp, Homo sapiens
gatgatatgcctttatggtgacggaataccctggctttattgactcagtaggaacagttgtattccatctcaatacagattactgcagttacagtgtctgcttatttcttgtcactcacctacacagactgaactagaccatcctaggagaaaagtcaaagctatatttggaaatttgaaaccctctttaaaagcagctagatgttcattgaatcctagattgtgtcagtacagtgtacaaatttaaatttaggatatgttgcattgtatttttttcctggtatacctcccatagatatattttatgcctagatcgcaaaatttgaacttttggaaattagaatatctgaagatttgacttaagtgtactttgtgatgcattagtgtgaaaaatcttaattgttcctttccctctcattttggcttcagagatcatctgtggttgacttatttattgttgagcatattgaggagctctttcatttcattagtacccagtgattttcagagtagacctaaataggtctactatttactgcttccgtgattaaggcttcatgcaacttcttttgtgttatctttttctttcatatcttccctggtgaagtctgtttagatgatgagattcaaattgtcatattcttagagtagaacctttactttgcctgtacaatcgatgtgtattggatcctcatctctcacacacaggctaaatcagtgatcctcaaacgttcattgtacttcagaattatctaggaattaaaacaaaacaaaataatagtgcacatgtttctctccacagagagataattgcattttttttcccaaagctttcaaggtgatttgaatgtgcatccaaggttgagaaataatggattagccaaaggaacagaatgtctccttaaagcagcccatagcaacaaaccatatagattttgctcatttgtgtatcttaaagttacataatttattatctaaagcactcttctatataagccataagtttttggctgtttttgttgttagatttctgtgtgtgtgtgtgtgtgtgtgttggctatttcttgacc

SEQ ID NO: 30055 - DNA, 1060 bp, Homo sapiens
tagtcttcattgttgaatgattgctgttaaagaatgtattacataatgatattttgcattagtgaatggaatatatcaattttcttctttccatttcctttttgtattagaggaaaagttccaagatataaggaagtaggtcatggtatctataaactgctgaggaactgaagtgtatattatgaagtaaagattgaagctcagttgccctctaggggttcaattttaacacagcacatgtagaaataatttactgagatcttgggggaagggtagatctgctgaatgtgggagcctatttttcattttctgttagagcctgactggtcattaaaaagctggttttgattatttattgcaaaagagaagaatatatcccagttttgtaatatacagacagtttaatgaaacatcctttttgtttgcttaattttaaagtcagggcttttgtgctggaataatccaaccgtcaacacattttcaggtattatttggtgaccaattctcggattcttcctaacactcttttgtcttctcagtgtcacctctatagcacttttaaatcagcttcctcccttattctgcccaaatccaagaacagactccagtgaagtggcttcttcatgaatcctctctacgttttatgagatgtgatcatcatgaaacttttccttttggtttcagcacctttgactggcatctttgtctggattagtaagactatttctctcagtttgaaacagaatggctactggctctctagtttaattgatacccaactttgtattgattgaggtccacataatttatgttggaatctttctctggtgcaaagtgctctactttgtaattgcagagttagactcctactgttttggtaagagggagcaaatttttttttcctattattgaaaatgttaactttgacttgtgtaaatagtaaatatgtttattgtatgtgcagatatttacatgttttaaataagcacatttctatactaaatttgaaaattcacatggttattggtatactttaaaaagatttgtgtgttttaatata

SEQ ID NO: 30056 - DNA, 1084 bp, Homo sapiens
gacgaacaatgatctggaataaagtaacagctgtacctttaaacatggacatgtgttgtagtggttcattacagtttttgtgcttgcactgttcatgtatttgtatacacacacattatgtatttatatgtatataatatatataaagatagatacatttatatgcaaaaacatatttctctgaaactgtgctccagtcataagaaaaccaaactgagatgttggtctggttcaagaaaaacaggatggagccttttgtgaaggtaaagaatattcttttgtgtttaacatgcaaatggctcagcttccaagttgcataggtagcccagcctgagtctacaggactctacctgtagagtagagtcctactctacaagtcttggagagtatcagatctgtcaagttttgatttttatgcccttaattataatctgtaggtaactcatatggctcattggatatgaattttggaaatctatgcttccagattactttgcttaattcttgcgtcctcatactttttctgtgaagggatatatacctaagacactaggaaaagcacatccgaggtaagtaacactgatgaatatttagtacatggttaataacctagtttgtgaggtttagaaatagtaaattatattttatatataatattctatataaaatatatttttatatataaagtatacatattacatatataaaatatagtatgcaatgttagtacatactaagtattctctaaattatttttatttctaataaagtgtacatttatctgtggttctgctctcttaaatttattttttaaaatttgaacattttcatctgaatttttgagtttgctaacaagccaaaaatcatttctatttgattaatccaacaaataatttactcttctttatcttaaatttgaagagaattaagaaataaaagaggaggaacatctatttcatgttctgtttagtagtaacagttgcaaatatgtaagcattttattcttggattcactaatttccctgctcaacaaagatgggtcagtatgttctgttttttttctgggaaagtctgtagaaataat

SEQ ID NO: 30057 - DNA, 1046 bp, Homo sapiens
cattttaacattgcctgctggtcatacttggtacatgccttttctcctccacctgacgtccaccacacacacacacacacacacacacacacacacacacacacacacacacgctaatagcaaatgtacaaaccattctgaattattctctgtaatatgtcctgcctgttcatctccagaccttctgtgcccttccctttgtccagaatactgttccctctcttcatttgctaacacaacacagtgtacatcatagcttaagagtatttcacattggaattccctcctgagtgtgtctgaggttcccgttctgtgcttccatagcaccctccctgcccagagcaggtatcaactcaactgttagcatttgaagattacttgtcttcctcagggactattgttagctcccacagagtaggaaccctctctttcttactctacatggtaaccccagaagctagcacagtgtttacacagtaagtactttgaaaatgtttgttgaatgaatgagtgatattttatgagcccctgaataaatgagaaaatacttaaatattgtaatttattgaatcagctaaaacgtgaatcattaattaactcattggacagtgtctattataaacacaataaatattagctattgttgctatcatgaagacaggaatgtagataattttttctttttcgttctactttggtaattaaagaaaaactaatgcagtatttacaaatgaatcttttctttaaaattaaggtaatgatttggtgatttcccatctgcagtgtatagatttgcctttgaaaatggaaatgtttttaaagatgtagtgcagtgaagaagccactgtttcaatatatgtcttgtgagatagcaatccccaacctttttggcaccagggatcaattttgtggaagacacttttccagtggttttgggatgaaactattccacctcagatcatcagccattagttaagagtctcataaggagtgtgcagcctagatccctcgcatgcacaattcttcacaagagggtttgtgctcct

SEQ ID NO: 30058 - DNA, 1068 bp, Homo sapiens
ttgacaaaattcaacaacccttcatgctaaaaactctcaataaattaggtattcataggatgtatctcaaaataataagagctatctatgacaaacccacagccaatattatactgaatggacaaaaactggaagcattccctgtgaaaactggcacaagacagggatcccctctctcaccactcctaatcaacatagtgttggaagttctggccagggtaatcaggcaggagaaggaaataaagggtattcaattaggaaaagaggaagtcaaattatccctgtttgcagatgacatgattgtatatctagaaaaccctatcgtctcagcccaaaatctccttaagctgataggcaacttcagcaaagtctcaggacgcaaaatcaatgtgcaaaaatcacaagcattcttatacaccaataacagacaaacagtcaaatcatgagtgaactcccattcacaattgcttcaaagagaataaaatacctaggaatccaacttacaaggaatgtgaaggacctcttcaaggagaattacaaaccactgctcaacaaaataaaagaggacgcaaataaatggaggaacattccatgctcatggataggaagaatcaatattgtgaaaatggccatactgcccaaggtaatttatagattcaatgtcatccccatcaagctactaatgactttcttcacagaattggaaaaaactactttaaagttcatatggaaccaagaaagagcccgcattgccaagtccatcctaagccaaaagaacaaagctggaggcatcacactacctgacttcaaactatactgcaaggctacagtaaccaaaatagcatggtactggtaccaaaacagagatgtagaccaatggaacagaacagagccttcagaaataataccacacatctacaaccatctgatctttgacaaacctgacagaaacaagcaatgaggaaaggattccctatttaataaatggtgctgggaaaagtggctagccatatgtaaaagctgaaactggatcccttccttacaccttgtacaaaaattaattcaaga

SEQ ID NO: 30059 - DNA, 1056 bp, Homo sapiens
gatactgttgtttttctcaaacccaggagagttgcataatctgtgatagcctgcagctaaaaatggatatatatcttcctataaccaaagtattgtagagcgaaagtatgacaactttggaagaacaatcatttttctcattcacatgcaaacaataaaaccaatttctatcataagtagccgtttatcttcattactattccatatgtatttattcatactgtttcattaaattctagtattgggctgggtgcagtggctcacacctgtaatcccagcacttttggaggctgaggtggatggattgcttgaagccaggagtttgagaccagcctggccaacatggcaaaactccgtctctattaaaaatacaaaaattagctgggcgtggtggcacatgcctgtaatcccagcttcttgggaggctgaggcatgagaatcatttgaacctgagaagcagaggttgcagtgagacaagatcacatcactgcactctggcctgggtgacaaaaccatactctgtctcaaaaaaaaaaaaaatctggtattattcaaaactccttgcatgtgttgtgattttacctttttgggtacatcagtcacaaaatagatatacattgtaataaaaatggatgcttcataagaatttatattggctatactccatcttaaatacctttgttttaatgaacgcaaaaactatgtaatattttaattcaggaagaattgatcttattttttaattttttcaaattctgctataacatttaaaaataacatgtatgggctgggcgcggtggctcatgcctctaatcccagctctttgggaggccaaggcaggtggatcatttgaggtcaggagtttgagaccagcctagccaacatggcgagaccctgtctctactaaaaatccaaaacttaactgggcttggtggcaagcacctgtagtctcagctacttgggaggctgaggcaggagaatcacttgaagccaagaggcagaggtttcggtgagccaagatagcatcactgcactccagcctgggtgacagaatga

SEQ ID NO: 30060 - DNA, 1026 bp, Homo sapiens
aataaagcagggacattactaccaattctacataaataaaaatgactataagagcatactgtggacagttatacagcaatgaattggataacctagacaaaatggacaaattcctggaaacacagaatctagcaaaactaaagcatgaagaaatagaaaacctgagtagacctgtaactagtaatgagattgaattagtaatccaaatctcccaacaataaagaatcttagacatgatggcttcactttgaagtctaccaaacacttaaagaacaatactgatccttcaaatcctacttttccaaaaataggagggcacacttcctaactcattctataaggccagcattactctggtacaaaagacacataaaaacactgcaaagaaagaaaagtataggccagtattccttatttacattgatggaaaaagtcaacaaaatactaacaaacttaattcagcagaatagtaaaagaattatacactatggccaaataggatttatcttggaatgtaagaatagttcaatatataaaaatcaactaatgtaatacaccacattaccagaatgaagaaaaaaaatgatcagcttaattaatgtagaaaaagtatttgacaagatgcaacaacctttcatgatttaaaaaaaaaaacactcaacaaactaggaatggaaggctactatctcaacataataaaagccatatatgaaaactcatggcaaacattatattcaaagatgaaggattaaaagcttttcttctgagatgaggaacaaagcacagatgccaactttcaccattctattcaacatagttctgaaagttctagccagagcaattaggcaagaaaaaagaaataaaagatatctagcttccacgaacgttgtctagaggcactcagaatggtccagcatttgacataccatcgtagggtttcctacaatacaaccactaataaaactaggctttcctgaacccctggcaatagaattgtttacctttatacaaagaaggttgggaaag

SEQ ID NO: 30061 - DNA, 1051 bp, Homo sapiens
cggtggagttgggatttaaatatattctgcttggtacaaagcccttgctttctttcaccttatggtgtatatcagactaactgcaatataataagtttgtttgactttttgttcttatatctctggggaaaattaaatcatgtttcttgatccttaaatcacattgtggaggtgtcttcctactcttttaaaaatcattcctgatcccaaatagggccttctcaattctgaacaggcattttatttcatgtgttgcctttgcatgctcacaaatggcttaaacaatgtttccgctaccctttcttagagcgtgggtctcctttgtgaataaatttgcaagcatcttgaagaaaatggagtgcgagccattaaccattttggctttttggagaagaatccaatcttctgtgacagaatggcaggattgataattcttgtgaaggcactttggaaagaattctattaccaactttagcaacccttttcattctgtcccacactaccaactcatcggtaaactggtaaatggattcagctgatacagattttcccatttgctgggcttgcaaacccatgttgtcttcaacagctcttttcttggtctagcctcatagaatcagtctttgcaagtggtaaaaagaacaagcttttaaatcagacggctctgagttggaatcctggctgagaacctttgtaactgtgtatggtgtttgagaaattacttaatctttcaatacatcagtctttaattttgtaaatggaaatggtagtgcctaaagacctaaacaaggacacataaacaaaaatgcttggtgtcagaagaccagtaggtcccgagaaattctactgctacatgaatttgtttaaaaaacaatgtcagttaggaatgcagcaagtaacaataacaggaacaacaaaagtatgaaaaatagctagagaaatcaggattgatttttctcacttagtaagtctgtagactggtggctagcgatgttggttcaggacctctatggcatcagggctgtaatctctgtgattctcttggctttgt

SEQ ID NO: 30062 - DNA, 1032 bp, Homo sapiens
gtaataattatattacaagtatgcatccatcatattttactgattcattttcccagtggtaggcggtctcactcccagctatgacaagcaatactttattgtgtcaaaatgtttctgtggtatatgtttcagtttggattgtctggttatagcatatatagtaatgtgtatcactctcaagtatggttatattttttttattgttagtgcaagcacatttgtgagaaacatatatgaaaattattcttaaccatcacttaaatttttccattctcatgggatttaattacatttcttttattaatagtaaatttgagcatctctttttgtgtttgtgggccatttggttttcccctactgtgatgtgatgtgtgtgtgtgagatgatgtaattttggataacatagtgatgtaagtttggaagccgccctcattcttaatagctaccttatctatctaaaggaatcaactgctaatcccatcagtaaattactcttagtaaagacaaagggttagggctgggcaccgtggctcatgcctataatcccagcactttgggaggccaaggtgggtggatcacctgaggtcaggagtttgagaccagcctggccagcatggcgaaaccccatctctactaaaaaaatacaaaaaaaaaattagcagggcatggtggtgtgcaactataatcctagctactcaggaggctgaggcaggagaatcacttgaacttgggaggcggaggttgaagtgagccaagatcatgccattgcactccagcctgggcaacaagagtgaaactccatctcaaaaaaaaaaaaaattttcaaaggattaataagattccctcctcctcctatctctattaccagatagagagttaaaagctttgttaccaccagtttctaaaagctaagaaaagtttctgtgcatctcattgcaggcaagaagtttgaccctattaatggaggcactagtctgatagagactatccaagagaagtcagagtcagagactctaatttctcatataaccc

SEQ ID NO: 30063 - DNA, 1058 bp, Homo sapiens
agatatggcaggaatgttggaattattggaaagggaattattaatatgctaaaggctctaatgaaaaaagtagacaacaagcaagaccagctgggtaatataagcagaaaaatgaagattttaagaatcaaaaaagaaatgctacaaataaaaactattgtaacagaattgaagaatgcctttgatagactcatttgtaaaactcttaagtgcctctaatgttatgagtatacagtattcaaatgacactttaaattttaaaacaagtctcaactttacaatctctgtgaagcacgttgctttttacgtgatacattctggtgctgcttatttcattcttgactttgaaatgttcacggaagggaaaaggggagtttttgaagaaatagtatgggaatcagaacattatgcagtgccttcaaaggtacgatgtacaactacacattcattctgggtgaataaattttcatttagaaattatttagtgaaaattatttttgtcttaatgaagttgaattcaaattgtggcataaaagattctgacatcagctttaaaatttggatacttaaaatttgggaggtgtgaagatgaaaattagaaaaaatgttatgaaatgctaagatattttatttaagatttacagcacttttttggtcagtatattctatcaatacttttttcccccagagaaatcttgcatctcatgttttgtgatgctatataagttgttgcttgtttttaactgacaatagccatcaactatgtttggcttatgcaaaagactgcaaattaggctgggcatggtggctcatgcctgtaaccccagcactttgggaggccgaggagggcagatcgcttgaggtcaggagttcgagaccagcctggccaacatggcaaaaccctgtctctactaataatacaaaaattagctgggcatggaggtgcgtgcctgtagtcctagctactctggaggccgaggtatgagaatcgcttaaaccagggacgcggaggtttcagtgagccaagatcatgccactctactccagcctgggtgaca

SEQ ID NO: 30064 - DNA, 1047 bp, Homo sapiens
tgcgttcatcattctttgtctagctgcagcccgagtgggcgcatttatccattttgattagaaggtgaatcaataatcaagcatacagggtccctcaggctcagtcttaagagctgctttcagcttaaggaaaaggaaaatattctccctccttttctatcatttcttaccggaatcagatgttggatgaagtgccttggggccctgatgagtgacatatgaagattcctgcacaccctcctacctttacatcatttgagaactccaggtcgactacatgatttgtttggttgtattataaatctgaagtgccacgtgacaatgccccagaaatgttttcagggaatgtgactttatgaggcttcaagggctggttacaatgatgttgaccaaataaagaaataatcaacagaaaactcgtgtgatgagtcattcaacaaattttcattgagcacttagtatattccagacccgctatggcccaaatctatgcctgtttttttatatgacctacaagctaagaatgatctttgtagttttaaatggattaagaaaaatcaaaagaatattctgtgaaatgtgaaaattatatacaactcaaaattcagtgtccataaataaagtcttactggtaccttgccacatccttttgtttactgctctctctgttgctttctgccctaaaacagctggaccaagtacctgccaaaaagatgctatagcttcagaggcatgaaacatttactatctggcttttttttgtctgagacagagtctcactctgttgctcacctgggctgcagtgcagtggcacgatcttggctcgctgcagcctccgccccccaggttcaagcgattctcctgcctcagcctcctgagtagctgggattacaggtgcctgccactacggccagctaattttttgtatttttagtagagatggggtttcaccatgttggccaggctggtctcgaactcctgaccttgtgatttgcccgcctcggcctcccaaagggctggaattacaggcatgagccactgcacccg

SEQ ID NO: 30065 - DNA, 1926 bp, Homo sapiens
aatatataggactggggaagttatcaaacaaagcattatctgtgaaaaaaagtctttatagatagaagggaaaacagacagctagatgttgacagtgaatgccaagtttcaacagttagctttactaaagccatttatttgcagcaattctcagtggggttgatcacacttctaataatgcctgtgaatcatatttcagagctactctaaacatgagagaatcattcacaaggtacaattttaactcataagcttaaagtgatgtaataatggatagataacttcattttaaaaaatttgaaaagaggatattttgattgaaatataaccagtgcttgtctcaagtttttgtaaggtagcaatctcacataattgtatcatcctgagtgtgataatatggaaattgcaggttgaatgtggacctatttttctgtattcaatgaatatattgctgtaaagctatatgtaaatcacctttaaaaatcaattgaatcatctttgatatgttagaggatctctctgagaaaaaaatccatttgggaaagatttcatagactgctgtgtcatctcctagtttatagtatttaaatatggattttctcagacttgtttaaagtgtgcattgtagttaatcgtcctgacatcctgatttgacttagctatgtgactattgcacatttttggagaggatgggatgtaaaagcaaaacggtatgtgaagttaacaactaagagagggaacagattcctgcatatgtgttttttgttagaatcttattttttcaatgttacatatagataattttgaaaattatacagttctgtaagattcacaataaccaactgtagtcctctttctccctttctactcagctcaattccttcctcccagagtcaaccatttctaatgtttagagctgtttctcttgagttttaccttaatctttccaaaaattcaagcttataccatcattgatttgattctgggtttcattttttttcttttcttattttcttttgcttttactatgcaccatgacactcaatgtttttgagtgttagacattaactattggcattctttgaaggggaaaggctaggctctttccttcaccacaagtgaaacagattctacctacctctcctttagaggtgtataatagtctttgtaagaatcaatgtttggttttacaatatttgattatgtaaatgtgatgggatattaaattgtttcatccaagaaaccatgtaacaatacacaatttcaaagtgaggtagaataccaaaatgaatgaccaagaaccagttgcttgtacatggtagggaaggagagtttgctgtgttggaggcattactgagataaattaaagatccagttaaacagaatgatatacccagagcttgttgaggcaagctgggtatgtcctgtgaacatatgtgaaccccagtagggagggctagcccagagccctcgttactctggcccaagaagaccttgggtgtgtgtatgtgactgtgtgtatggggggtggttaggtagggtgacaatgtagagggagtctgtgttgagaggtagaggggtagaaagagtctgggggatctaattgctttgttatagagacttttagccattcttcttgttttctgctttccccccgtatttcataggtatctattgctccccaaacctggatccttctggggcttgcagtacaaatacttttagaaaggggcttccccactgctgacacacttcccctggtctgctgatttcacatgctcgccagccttcaaaagtaactgttgttttttttctcctcttctttgtctttttttgccttaaaaaaaaatctctattgttgtgattggtggggttttgagtcagagtggtggtagacatatgtgttcaatctgtaacatttacctg

SEQ ID NO: 30066 - DNA, 1032 bp, Homo sapiens
atttaactcaaatttgaatttttaattctcaaaaactctgtgagttagctacaatttccatttctatgtaatagatgtgtaaactgaggtccatagagattaaatagtttacccaaggtcacagaactgccaactggtagagctggaatttgaacccagaataatgatagcatttcccagcatgatttaggagaaaagataaactctacttttttctttggccttctggaaaattcatattagctcttgtatttaatgtaaaatcataggaaattttttctataagggaataatatgaaatacatattaggttggtgaaaagtaattgcagtttttgcaattaaaagtaatagcaaaaaccataattacatttgccccaacctaatagattgcatttttaaaattatatattgaggaaaccttactcaaaactagtttaggcaataaaggagatttatatggaattcaaagaatggttaacttacaaaactgtagaaagaatacaagtcggcccaggaacagctggtgccagagaattaaaccccaccgggactttcttcccatgtttcatctgtgcctctctgtgcctgttgactcctccctttctcattgtagacaggctttctagttagtgcaaaaagcatagctgctgacaacctaagtgtaacattttatatgacttaagccaagtgagagggctcaatttccttctcagattcaggttgcaaaaccccagggaagaactgagtcagagcctcatccttggaacacttaactgtagcctgagaatgcagtcctaaagaatatggcttcccttgaggcagccttgtaggcttgggattatggagggtgagggcagccgaatcagtcaggaatacttttggctgcaggtaagaaaacagagttaactaatggtggcttggtctaaagggatatttatgattcacttatttaccattataacaaaaaatctgaagttagggttgaaccattatgtcagtgatattattaagaaccttataatgttctatt

SEQ ID NO: 30067 - DNA, 1046 bp, Homo sapiens
ttatacaataaaccactaatttcaggcttcatttacaaacaagtagcacgctgctgttaaataaacattaaagagctttctattatccagttattgttgaaaatactggtcatgtaataacccagatagtcaatatatttttgttaaattaagattgacatttaataagaaattaaagatatttaataagaaaaatgtgtgctaaaatcagagtcagaatacatcattgcatagcactaaagtatgttaacctctttaagatgtcacaacagtatttcagatgctgtccaatttttcatggacatagttactaaacggcatgacatttcaaacatgttagaatcttcaaaaactgcatacccttctctttactctggtttctgtttcactatcaggaaacctgaagaacaatgagtattactaatgggttgacatttttggaggtatattgtgtgccagggagtgtgctggagatttttaatatattttctctaatccccacagtaatattcctattgtatggattagaaaactgaggctcagagaatttaagtaacttgcccaagagtatgtaactcctagtgatgaagaagagattcaaatgcaggtccatctgcctctaaatttaagaccctttccattggaacaactacatcagaatctctaggggtaggcctcaggtgttaatattctttagaagatagccttggagattttaacatagagctttgattggaaaagattgcatttgtaccttttgtctttcatgagcacaagtaaagaaatcagctttgctaatgtggtttgtttatggggacaaagcgatatagactagcaaaagtaggaatatcttcattttgcattttcttcagcttcctgtttggagttgctccattccttacaacaagaggaagaaagtatgtattatatgtgcaaatatatgtgtatatgagactgttgctatgtgtacatcattcatgtctgtaagaatggaaaactatttaaaatggcagatatgtagatgaaatgtttatatagaaaaagta

SEQ ID NO: 30068 - DNA, 1096 bp, Homo sapiens
tatcagaacatgtttcttcattatggagaactacccctcccacccctcttctccccattcctcctgctttacagccttattgttggaagacaattcttgtggatctttcatatttctgcacatcttgtgtcagctcttgtttcagaggatcttttcaaggatgtttatagtaaacagccttggataatagagatagggcttccctgcaggaaatggctaggtttgtttcctgactagaataataaagataatatctccctccagggtgaagggtgagcaggtttgctagcagcctccttctaagatcaggggtttcctaaacttgaggccctcacatatgaggcaaatcaactgtatgtatgcagcacctacctgggccactctgtatgtttttcaagggacttgtggagcaaggggagccaatgtgaatatgaagcacagactgctttctgtgccatgagtaatcaagttttttgtctctgacccaagggtctagcagcatgtgtgaagctgtgggaggctctcttcttaactggcaaggaaggtaagatctcagacccctcacggctcttgacagctgactgttggttggaaagcctggccagtgagagtagagcaggctcctgtccacaaggatcactttggtatagtcggatgacaaagatcaggcccataggaagggtcttcaaggcttttgctggagttactgggcaagggatgtagaataggagcctaggcatctttgtggttacctggggagagccccttgagaatgagtccctttacagagtaaagcagagtcaagaaaatgagagaggggaggggcagaaagcaagggaaattgattgaggttgaaattgagattgattttatttgggagtgttgattgagagcctggatatcgcgctgccttttctgttacataagtcagtacattcactttgtttgcttaagccagtttgtgtgggaatttcgatattaacaagtgaaaaagtcctgtcaaatacagttgcaaaagagtgggttgaccatcccaagagggaccactactctagaggtttctactcaagcttttcctgtgtgagcatataacctt

SEQ ID NO: 30069 - DNA, 1050 bp, Homo sapiens
gaagtatgatacagtacctaactatatccaccattcagacggtgctctgtgttaaattggttgccctggaaacagacgctgaggcagagatttatatgtagatttttgggggcagtgatctctggaacaatatctataagaaagtgagggtcacaggattaggcagaggggaaagttgaattgcagtgcaattgcaaatgaggcttcagccaaacccaagggaagactccaattgggctgatcctttaggattatcccaagggggcccagcttttgttactgcaacatccagtcattggatgggggctacctggggtggatggtttagtgtggagctccctttgaccaagggcagttcctggagaggggtgcagctatgagctgtcagtaggcagcacttctgatagctgcaggattgagtgcctgtgtcctgaaggggatctgagcacacagcacagtatccactatatgctcagtaattttaaattgcttctcttcaattctttggcatccatttcctttctcttgttgtagctctaagtttcaccctgattagcacttgtctttttctctagagagtccccaattccgatgttgctccttttgagttgaaataggttattttatgactttcatctttcttaccttgggagctagttgcagcaggggttgaggggtgaattagggaaaccagttattcatctctcattgtccaatgattaaagacttaaagtggaggtggtatctttcctttttaaatttaatggccacctctgaacatttgatgttgaatcccctcaattttgtgatgaacagatttggaaggctgtgtctgtgctaaacgtgaaagaatgctgtgctcagttaatggtgtataagcatatataggcctagtatactctcacaacagaggacacttctgtaaccccaggtgtgtgggagtttttcctcccacacaccagtcaagcaattctgtggcggattctccagcagacaccacctggtgtcctcaattcaattcgattctgacagtatctacctggagagagt

SEQ ID NO: 30070 - DNA, 1048 bp, Homo sapiens
taataaatttagagtggcttaaaaattcaataagcatgtttgctttttgccaatctactcattttgaatagaacaatttcaaaattaatttttttttttttttgctaaatccaagtgctactcgaataattagcagtaactggtgaaaaactctgagggagtaagtaataactaatgaaaaatgtttggaaaaaggaaaaatgtttctattttagtatgtatatatcttaagatacaaattgtattttattgaaaacaatgtatatgaaaaacaatcaaataaaaacattctcttgaatttttaaacttttttttaaccaatgaatatactcaaatatatgtgctcagacaagaaaataatatcagtgaaatgattctaaagagtttatctgcctctgtcaagtcttctgaattatctttatctgttgtgtactcaagtgtattcacatataaaatccacttctaaacatgggaaatagggtttcaaaagagctcacccttgtgtcactgatgccctgtgtctattactctgacaatttatctgtgaattaaaacaaaattgccaagtccaataatgtggtacagacaataaaaggagcttagataagagataaataaatgtggttcatggcagacatgttggggtatctattgacaggtatatttctttttttccaacgaactcctattgcttgttgtacacatttaatttgcactcctttaattttattcctttaaattcaatgttgctctttttgccacttccactacagtattgaactactattagaatgctttctttttgatgttgtactgtgctttattggaaagaaaactggacttagaacaaatcattggatttgctctgaagtagagcccaaacacttaccaattatgcaaatttatcttttttgtctataaaatgggagttatagttatgatgatcataataacaaatgtggtgttaaggtgatcactaattgcttttctgactcagtgaagtgaagggatttacactctagactctgaatcaggaatcagcaaacta

SEQ ID NO: 30071 - DNA, 1091 bp, Homo sapiens
ctgttattgattactattttattccattgtggtcagagaagacatttgacatactttcattttttttgaatgttttaagacatctttgtggcctaacatatgttctatccttgaggatgatccatgtgctgagaaaaagcatgtgtgttctgcagccattgggtgaaatgttctgtaaatacctattattaagtaggtttgacgttgaacaaaggacagtctagattacctgtttaatgctgaaagtggggtgttgaagtctccagctattatcgtattgaggtctatctctgtttagctgtaataatatttgctttatatatggggggtgctccagtgttaggtacatacatacttataattgttatatcctcttgctgaattgactttatcatggtgtcatgaccttttttgtctctttctatagtttttgtcttgaaatctattttgtttggtatacatatacctactcctgatcttttttgtttttcattggcatggactgtcttttttctatccctttattttgtatctatgtgtgtctttacagttgaagtatgtctcctgtaggcaatggatcattgggtcttgtatttttatccatccagccagtctatgtcttttgattggagagtttagtccatttacattcaatgttattattgataagtaaggacttacttctgtcattttgttatttgttttctggttgttttatggtcttgtcgtccttctttccttccttcctttcttcctttcagtcaaggtgatttattcaggtggcatgttttaattttgtgcattttattttttgtgtatttgttgtgtgttttttgatttgaggttaccgtgaggctttcaagtattttataacctgttattttaaactgatgacaacttaacactgcctgcataaaccaataaacaaagaaaaaattaataactctatactttaactttatcccctttttaactttttgttatttttgtttacaccttattttactatcttgaattgttgctatagatacttttttgatagatttatcttttagtctttctactcaatatatgagtagtttacataccac

SEQ ID NO: 30072 - DNA, 1032 bp, Homo sapiens
agcgttgctgcaaaaatcgcttgctattcgagatagccagcagagggaatcggaactttgcttgcagcaggggttgaagcagcctttttttttttttttcttggaggaaatactgcagccttctggactgcgtacgctgctccctggagaggctctctcggttccacccaccggctggaaggaggggaagtgaatgaaaggacaggacaagccccgaacaccatgtcactctgggagggagacagcagcaactaagctgtacaaggttttttttttttttttttcttcctttttttctttttttttttctttttcccctttctttttctttctttctttctttttctttctttctttctctttctctctctcttttttctttttctttaaggtggggaaagagacaaccaagagacaggaagctgatctgcaaggattcggagttgtgctaaaaggactttgatttttttccccctttacgaacgctggcaattgacatcactacagacagcctggttagagaacaaactgcctcatcccaagtggaccccggcagctgggggaagccaggcaagatctgggaaggctgtgtgtgggtgttttttctacagatctcactcctcgccctttttttttttcctttggtgtgtgttttttgttttgttttgttttttaaaaaaattcttgctgtgttggaactagcgagtggtggagtctctgaagcctcatcagtcaccgggactgtcaggaatagtggtttaagaggaagctcggcctggggcactataccctgtcatccagttccctgcctcggagataaagattccagctacatgggcaaacgcctggatcagccacaaatgtacccccagtacacttactactatcctcattatctccaaaccaaggtatggcttgacccacggtctggcgatcagcgtggtatcgttctgcacttgggatgggaaacagacaggcgtgtgaattattagttaacccccacccccatcacttcttcctgcttctttgaaa

SEQ ID NO: 30073 - DNA, 1047 bp, Homo sapiens
aactttctccaatgtaaatatttctgcattgcttataagcaattacatttgtatgttagtcctattttaagtagctcacttacagctggtactgagcaatgagtaagcatgtggttctctatttataaagtagcccctaatctctcaccatgataggccagctatacatagtggtctgttttgagagaggggttttctagaggtcaggattatgtggctaaagagcagggaaacccaggaaaatgtaagtgattcaccacagtgtgctattggtgtttccttgggaccatgatgttgttcagtgcaaggtgaaagcctgagaagaacagatgagagacgctgtttagagtgacagacatgtagtaagtggctgcctttgattgtaggatttcaagaaaaaataaaagaaaaacatgttatttatgggttcgaataatattacaataatccaaaggtagttttattctagcagtgtggaaaataaaagcctttgtaaattaattgcttgtctatgatatgagaaagcacagagcaagcgctgttgaacataaatcaacttgatttataaacaatttgttattcatctaagatatttaatagtatatattaaattcattttgttatataaaaattaatgagtgaatgattggtaaatgcataaatgggtaaattacataaatcaagaaaattacccctcacacttttgcttttgagttaaatttatgaaaaatgcactagattcctcaccactaaaactttctatatattggaaacccaagttgttttttgttttaactagcattttgtaagcccattaagtagtataaatttctgttatttttaaatacttgtcagcagtatgttttgcaattggaatgaatacttagacaaataaatgttgagtttaacttctcatagagttacaaacttctcatagagagttcaggaagtgtttgaattcatggtggctttacttcattcacctgtatggttggggacaattccattctaaatacatttattcagcacctgccatatatcaggcac

SEQ ID NO: 30074 - DNA, 1076 bp, Homo sapiens
ctatttgtatttctacttttttatattaagtaatataataaatattcaatttgaccagcaaggttattaaagctcaaggaggtaaagtgaattgtctgagcttgctcatttctctgggagcccatcagaggctggaacattgcactgatgacccccagctctgtggtcttgtccctagacctccacttggcttctcttcctcttactgctcttaactaacagcatgcatttgtctttagtggtttataatcctttataagaatttctgcctatttaacatatatgaaattattatttttcacctcccaccatctaaaataataattaccctcaaacaaggaagacaaactaaagtcattttttattctgaaaatgtagaactgaactcttcattttcagtatgatgccaaacactactaactggatttcatttaattggattaaaactgacgggacacatattctctcgaatgtgcaacctcacccctcttgcttgatcttcataaaacatcatgtatttagtcagattgcatccctggagatacagttggagtagctggtgactctagagaagtctgaaagtaagaatacgattcttgatgtgataaggagatatatttttgaagtaacaacatggaataaatcaagaatagtctgtgctgaattttgagttatttccagaagtggaggcttcaggtgtgaacagaaaatggaaacctggttttcttaccaattgatttactagatcatccgaggagatttgagacctagttctttctgctactcacagatgtatggaagagctgcccagtcataaaaccaattttgaggccaatttcaagtggacagataatggtaaatctttaattagtttgattatatttttagccagttgcctttctggatttggaatatgctaaaaattaatttacctgtgccttacccattgtgtctattattggcacctcccatttctatttgaataaggtattgaaagtttagaatcattgaaaaaagtatttttatagtatctttaagaatcacagtacaataaatagctaatttaaagcttggat

SEQ ID NO: 30075 - DNA, 1053 bp, Homo sapiens
tccaggcattattcagcaatttggtcacataattttctctaatattagatttctgcttccaatggtgggtggcatagttgaagaaagaactttatgaagacataaggtcttgatctaaaccctaagaagggaaagagtaagtaaatgaggttatatacctgaaggcatacttttttacttcagaaatttttattttccttcggagtgtataaaatcatgtacttttaatctgcagagtagttttcattctaatctactagtatactttgataaaagcataatttcataggtatattacattcgtgggtctcgtgtttatggtggttacgtctttaaaaaaaatctaaaccttatttatctacatcagttgttgactttgcagatcacagagaatacagagccagtcatgcagaaagtacctgtttgtcatcctgagagttcagacatgaactgtaaccagtggcccattaagtaccttctcttgttgtttaaagcatatcctagctttgcaaattaattgttaatgcagaatgttgtaacggagccatggaatgaaattcctgttactccagtcatagtagatgttgcgtcaagtactctgagttgtgttccattgttttgtgattctgtgctgtcggaaagtctggcctagagagtgtttagaaataaggaaatcaagaaatagtatggtttgcttttttggactctgtgtgtgattttccattgatagtaatattgtaataatttctgagaaataaaattctttttctttgtttataaaaaagttacttgtcaaaatactcacaaatgctttccataagaaaacatttaacattttttgctgtaaaagtgattacatatactacatttaatgcagtagaggacattcttgtaatattgatacagtaggacaatatgcatgccattgactattgttaacagtccagttgtgagatgaaatccactatgaaacacagtaatgtttaatttcatatttaagacagagctaaatttcagtttagaaggttcttatataaaaatttcaggaacacc

SEQ ID NO: 30076 - DNA, 1099 bp, Homo sapiens
tttggggagaaggtgttggacatgctgagttagagtctctggcatggcaaccatgtggaagatgtcaaagaggaaattgtaagaaagcccagggctacagatgctgactgaagtcaaaggaatagataagattaccaaagaataatgtgtagaaggggaaatggagtggagtgaattagggtgggcagttgagaacttggagaacatttgagaagaaagctgggccatggccaagggatgttctgtcactcttggcctgtgggaagcatgtggcatgttagaagcattagaatgcgaattatagtgcatctagacctgcccaacccatatacaaagtcttgggtcagacagttaataatattaatcaagcaccaatcagaagcacaaatactgcacaggtaagcaacacctggaaacctcaatagatagactcataaccggagcggtcaatatgaagggatacttccttatgcagagttttgctcaagcatgctgatatctgttgtcacagtacaactctgaagaccacgaaaatgtaaattgccaacatgcaaaaactgtacccttctataactgtgaaggtttgaagaaaaagggatgtaactaaaaatgggcggtcagggtctccataagcaaattatatagtgggagcgtgggtgcttatcaggacaaattatactatgggtatccttatccttacatcagctcctaaaatccctatccacgctattttgcaacagcttatttaattttctgtttctgtagagagattcctaaaatcagtggaaacagggcctgtgtgctatagaaaacttacctccaaagtgggatgtgtgaagggtgatacaagactgtttattggagaggctaaaagaaaatattagaatttacatctctctttgttttttatatcaactttttgtgaacattacatattaatataatcttacaaatacatagattttaaataaatatgaaaatgttgagtttgctgcttcaaaatacttttatctctagtgatatgaatactggtctcaccaataaatatggaagaagaaaaggagtaagagaaggaggtaaaaaaggaaggaagagaggg

SEQ ID NO: 30077 - DNA, 1029 bp, Homo sapiens
aaaatacagatgctccagttaaatttgaatttcagatacataatgaatacatttttagtacttgtttcatataagtatttttattataatgtgtcacatgcaggtattattcattgtgtatctgcaattcaaatgtaactggccatcctgtatttttatttgctaaatctggcaacctagtcccaatattaagaaggtccattcattctaatgatctagacatagcaatggtagtcaaggagccaagtgtagctactgagcacttaaatgtgcttagtccaaactgagatgtgctgtgagtgtaaaatacaaaccaagttttaaaaacctactattaaaaagcgtgcagtatcttgttaataattttaaaattgattgcatgtcaaaataataatattttttatagctagggttaaattaaatatatttaattttacctgttccttttactttctaaaaattcggatactagaaaatttgaaatatttggggcttgcactacatttctattggacagtactgattttttagatttaagggaaatactggtttttcgttagctgttttatcttgcaaaagatgttttcagtgagttaaatatacaccaacagcatagaaagtgaacaaaagttgtgcaaggtttacacaaaacaagtttagccaacataaactgagaagaaggagagtatatcttcatttcgatacatatagtttaataaacacgtagggagggtttttttagatcagaaaacacatatgcactatatacaaattaatatgaaggatgtattatgctttattcctgtgtctcagcgaaacattgaaagtgctgatttctttgtgatattaaaaatacatgtagtatttcttcatggggttccagtcataattctttggtgtttcattctattcaaggaggttaaagaatcttacagcatagacacctaatttggaaggaatctcaatgaaatacctgctaaggtcaaggttcatgtcaaaactaatattaactgttctctctgcctgtag

SEQ ID NO: 30078 - DNA, 1079 bp, Homo sapiens
gcccatttctcctccttgtcatttctcaatcagtgtggtcctttgtgggtggggataggtaatggtataatgatgagcctgccttgaagttcttgttccaaaaaatcaactttttgacagaaaaaaaaaggcttttttcccttgtgatccataatattagtaaaaatactttggcttccaggggcgtctatgaggaatgtctgataactcaacaattctttctaaatgccgtaataattttggaaaatacctaccgtgcagcccatagcaactttctggaatgctgctttaatttgcttctctttttccctattccaacaagaacaatgacaacaacaaaaattaacttagagaagcatctgctggaacaagtggtgattatttccaagcccaaacaaaagtaggtagggaaagaattattcagagaaaacatttttcaagatcttctccagtgtgtgagagagtatgtgagaaggaaaatgcacatgtggataaaatgttttcatttgacgtcgaaaatgatagggaagtgagagtctgaaaacggtttcacaatgagaacacatggacacagggaggggaaagggaacaacacacgccagggcctgttgtggggtgaggggagaagggagggaacttagatgaagggtcaataggtgcagcaaaccaccatggcataagtatacctatgtgacaaacctgcatgttctgtacatgtattttatgtaaaaaaaaaaaaaaatgaataaagaaaacagttttagtttaaaaaaagaacaaaaatgcaaacaaagaaaaactcctttaaaatttgtgatgtacttattagaattatggatagctgtaaattgcaaaaatcacaatgataggcatgatagtgtaagcttctttatggtgaggaccctgttgtcaatttcttttgtatctctcttagcatggatataggcatgtagttgggagatctttttaagacaccagatgggcaatgtggcaatagagaaagcagtacatggagaagcaatatgctctctgctgaacttggaataatctcttatctcaccaagcctcagtgtatccat

SEQ ID NO: 30079 - DNA, 1019 bp, Homo sapiens
tttctctttctcctaattgcattataactatcactgtaaagacaataaataatacaaaacttcttaaataatgtgaatatatgagcacataaaaataagaacattccttgaggctctacttttttacagctttctattacactatgataaatagatgaataataaccttgccaagttatatttgttcttttatttgtctctagacatgtacaattttggtgccatcatttcatctctgactgcttttctgttatcttgagggtctcagtcagataaagcattataaataataaatattcttgagtcatctgatagctcaatcccagaggaaataaggcgttcaaatttccatagaagatttttattaaccttcatataaatataagtataattatttttcaatagttttagaatattattactatcctttagtaagacatgttgacacaccacaggtcaaacaccagaatcccactagaacaaaatttgaccctaaccaaaataatcacacatgtccccgtattgctgatgcttattgattcatttgtaatgagattttctacaatgaatagcctagtttaagcatgtttttttctagtctttgtaaatcactatttgtctatctggaaacctattttgttctgtttgcagagtacctttcacttgctaatgatctgtgcaaattaaacagaaaaggggaggagaggcatggttaacttttcaaaacttctttcctctgggtggatggtaagcaagaagcaattatcctctgactctcctcactcccaaaaaacttcacaaccaaaaagaggaacaagcgacacatacatgtgcatttgcatgccaaccagaagagcaaaccagtgtgcagaaagtgtgtttacaacacttccttgcaaatgaatgaccgttagattagatactttccttattctgtataaactggtgcctgttgtatttctctgtagagctgcttcagttcagagcctgggcatgtgctttgatgtgagttttaccaa

SEQ ID NO: 30080 - DNA, 1037 bp, Homo sapiens
ttgagtggcttaagaccaattaacacacaagccagggaaaccaaattgaataattaagttcttagtgcatttcagaatctagaatctcatttaataggattgatttaagaacacattctaaccaatttttgtatgaatggatagtattctgaattaaatacttgcaactctctccttgtaaccatcaaaaagcctgctatacatacacctcatcatttatgatctaatttttagaatgatctaatttttagaatgaaaagtctgcaaaacataagaaaatattttaagagaaatgtgaatgaaaacagtaggcaagctctgaactagccattatgtgtttatcttactagctgcttcctcttatttcttacgtctttcagccctgaatgatgaatcaattatttgagtaatattttagttatttttcagtacaaaaaataaatctttcataggaaattggcatgcttatgaaggttcatttgtcccattagactgtaggtttttctgagaaagaactttgatgtttatctctcccatcttccttaaacaattcaaaccctttgaaaacaaggactgcaccttactgtttcttccaaacatctagcccaatgcctggcacagaacaataccaatatcatttgttaaataaataagcaaatacctagttgtggtagacagaataatggtcctctaaagatctgtaaatcctaatccccagaacctgtaaatatgttaggttacatgaaaaagagtaattaaggttacagcaaaaattaaggttgcagctggaattaaggttgctaataaacagaccttaaaataggaaaattattgtgttagtttgttctcgcattgatataaagaactacctgaggctgggtaatttataaaaaagagaagtttagttggctcctggttccacagggtgtataggaagtgtggctggagaagactcaggaaacttacatcagggcggaatgtaaaggggaagcaggcatgacctacatggctggtgcaggaggaagagagtgaaggag

SEQ ID NO: 30081 - DNA, 1031 bp, Homo sapiens
agtgatgtgaggaaggggctgcaagccaatgaatgtaacagcttctagaacctgaaaaggcaaggaagtatatgcttgcctaaagcctccagaaggaacagggccctactgatattttaatttcagaattctgacctccacaaaagtaagagaatagatttgtattgctttaagccactgagtttgtagaaatttgttacaacagccataggaaactaatatacttcttttactccaatttctttctgtattccatgccattagatattgcctccagaatcaagcatctatgatagtgcttagcacttaaattggatgatacatttaagttcaacccttgtgtcatagtggattggattttactctttataaaatgtatattgtgaacttctattaactcaaggtcttttctgtttttgtcacgagaacgtaaatacattcaaatgaaaatatgctgcatatttttagaagacaaattttccttgaacttgatccttatagaacttaactctgtttactggaaagtaatattagagtttaaaatctagagatagcggatcatatagataagcaatgcaggatttcagtgatttctatggtcaccagtacaggtgtgatcttaaaacatcgacactattgaactgaattcataggtatgtatttagcttgcatttgtttattccagtagccactgaggtgtatttctttgtttataatctataatcaaaatcctttgctatgacatacaaaaaatgtatcgagccacggacgttgaccagggttttcttccttcattagttgaaaatgaactgtatctgctattgtttatctggggaataaagagccaaatgttaaaagttgccttcagctaggagcagtgcctcacacctgtaatcccaacactttgggaggccaggaggggtagatagcttgagcccaggggaccagcctgggcaacatagcaaaaccccatctctactaaaaatacaaaaattagccaggcattgtgatatgcatctgtagtaccagct

SEQ ID NO: 30082 - DNA, 1031 bp, Homo sapiens
tgtatgtttatagcggcactattcacaatagcaaagacttggaaccaacctaaatgtccaaatagtctggattaagaaaatgtggcacatatacaccatggaatactatgcagccacaaaaaatgatgagttcatgtcctttgtagggacatggatgaaactggaaaccatcattcccagcaaactatcacaaggacaaaaaaccaaatactgcatgttctcactcataggtgggaattgaacaatgagaacacatggacacaggaaggggaacatcacacaccggggactgttgtggggtggggggagtggggagggataacattaggagatatacctaatgctaaatgatgagttaatgggtgcagcacaccaacatggcacatgtgtacatatgtaacaaacctgcacattgtgcacctgtaccctaaaacttaaagtataataataataaaataataatttaaaaaaagacctaaaaccataaaaaccctagaagaaaatcaggacataggcatgggcaaagacttcatgcctaaaacaccaaaagcaacagcaaaaagaagccaaactagacaaatgggatctaattaaactaaagaacttctgcacagcaaaagaaactatcatcagggtgaacaggcaacgtacagaatgggagaaaatgtttgcaatctacccatctgacaaaggtctaatatccagaatctacaaagaacttgaacaaatttacaagaaaaaaacaaccccatcaaaaagtaaacaaaggatatgaacagacacttctcaaaagaagacatttatgcagccaacaaacatgaaaaaaagctcatcaccactgattatcagagaaatgcaaatcaaaaccacaatgagataccatttcatgccagttagaatggcaatcattaaaaagtcaggaaacaacagatgctggagaggatatggagaaataggaatacttttacactgttggtgggagtgtaaattagttcaaccattgtggaagacagtgtggtgattcctcaagg

SEQ ID NO: 30083 - DNA, 1139 bp, Homo sapiens
agaccatgtggactgtcagttgaaggaaagcccgatacctctcttctctcaaggtataattagataaagcattagggttcaaacacatttttaaaaactaaaaagaaggtattgtattagaagttccaattagagtgtgcaatagatgttcagcaaaaagaactattcctaaaatgttcctatctttggtttaatcacaaggtgtttgtttggttggttggttggttgtagtaattggccaaggtatctgattggcttggggatgtctttcctgaagaattatacagggaatcctctcagattgcttgactttcttctttgttctgggtgggaggaagtgtgtgactagccaatagccttgtcccaccttgtctcaagggtcggagctgctgttgctagcatcacaggccacagcggctttctgccagatggctgcctcagtatctgactcggaaatgctgcaggcaattaaaaacctcctttcagagaacatgtctttcaattctgggcccatatggtgatcagggcctctgggtttgcaatcatttaagaggtcaggctcaagagaaaagcatatggaaagaactggaagatgagaaatgcctgtaaaaaggtgaagaataggtatttaatttcactaactccaaaatgactggagaaagggaaacaattattaaaaactgggttctccacagccttcccactcaacatatagtgggctggcatcacccagggcagcagctcccttcctatctgtaaggtcagtttcgtgtgtacttggctaggttctggtgcccactaatctcattgttgctgtgaaggtatgttgtagatgtgattaacagctaaaatcatttgactttaagtaaaagaaatcattctctataatgtgagtgggcctcatccaatcaactgaacagccttaagagcaaaagctgaggtttctgagagaaaaaatactgcctcaaaactgcagcattgatttctgcctgagttcccaggctgccagtctgccctataaatttcagacttgccagcccccacaataccactatgctacacctgcaggttaaaaatattcccaaagtacttgtgtattaatatttgagaagcagtactctaaaacagtaaattctatc

SEQ ID NO: 30084 - DNA, 1029 bp, Homo sapiens
aaaaatagtggagtttctgtatactcttaactcaactttgcctgttgttaatatctaacctaaaccatagtatggctatcaaaaacagcaaattaacctggattcagtgttcttaattaatccatatacgtatttgtacttccaagtccccagtaatgttcttttctgaaacaggatccagtctaggatcccgcattgatctaatgtgcatgcctccttagtctccttgaccttgtgagagttcctcagtcgatttttgtcttttatgaccttgacacttgtaaaaagtttaagacagttatttagacggtctctcactttgggtttcactaatgttttctcatgattagattgagattacatattttgggcaaaattaccacagaaatgatagtgtgcctatcttcagtgcgtcatatcagggggaataagatgtccatgtgtctggttattaatgttaaatttggtcctttggttaaagtgggacctgctgctatttgtccatttgtaagtaatacatgcctttgacctgtttctaaagatactaaatacctgtttagcaaaggtactagaactttcttattcatcatttacccactaatttgatgatctatgactaattcctgcctataacaattattactataatgtttacttaaggaagattttctgtttttcttgttccttctatatttattaatatgcattctcctttaaaaaagatctgtctcttctgacaccatcccctgttctttgtttactaattatgtatttatatcagcaggggatttggggtatttgtttcattatatgagtatccagtattgtcattatttattttgttgctcaggttgccacagcttgggtcactggtccaaactacccaacattttgcccaaggcagattcagttggcaccactgctggctctgattcttcatcctgttcagaatatgcatagccaattctccagcgtgggtccgggtcaccccctcccatcctgcaccctgctgaacctcacatgttttcc

SEQ ID NO: 30085 - DNA, 1046 bp, Homo sapiens
agattcaaccaagttgcctcttaggtggcagagaattctggaatattgagcttaaatctgagggaaggtcccattgtgttctatggccctgttaaattttgtttataaagcaaatttcaatacagtggataacccaattattataggctccaaccagctgatatgtactctgagagttcacaaatagccattcggaggacatttgccacattttccaagcccccttggtcctgggttaaaacattttgtttgcagcctctgctacttactcctgggccttcacgtcaggagtttatatttgattccctctggattccaaatgttttcttctgggaatcttcagctccataaggaaatacttagcagatgcaaaacaagcagggtttgtcaggcagctgtagtgagaagtgactgtggcatgcagaaggctgtgtacaggtgtttgcaggctgtgctcacagacttgggagaggcctgagtgagcacgcgtgggaaagaggagaccgactcctcactctggaattaaggaaagcaaagaagaggagaatgccctggaaggaacgagaaatctgtctgttgggaacatcctaatggcctcttatttttccttgttaagaaatgctagctaaggctgtccatagcagggcagtcattctggactcataaagaggctgatccaaattgtttgtttgggggcactttgatgagggcaatggtcagagaaaaaagaaaacgataggttgtgagtgagtcagaaccagctatatgtctgacacacccaggaaggagcccttagtgaagaatgagagagaacagtgtggccctatctcactgagaagactgttctttctactgactaaaaccttttattgcctcttttggatgaattccctcaaccatgaaggccgaggctaagttgttggtttccctaagggcaaggcaaattcagataagaaacagaaacaacaaatcaggcacaatcgggaagacaaatggagcaggaagtctggtctgtgccagtcctggcccagagccacttcagcaga

SEQ ID NO: 30086 - DNA, 1049 bp, Homo sapiens
tgcataaagacaacattggttataaacattagaagctcaatataaggatttacatcataatctctgacccagttgttaatgaatatgggctaacttaactagcccttctgtacctaatcaatttttatactctctataagttttgagtgtttgagaaaatgttaacatttatctttattgttatatcttagtattcgtctgtgcacacgtgctctccgaaatgaaggatggaaaggttaatattattctcaagtgaccaaatcatgtttttcccctcaatttgtttacttttaaaacttaatgatcttagggagtgaaaatactgcagttaacttgaattataaagaccccacaattcaacagacctattgctaaactattataaaaattttcaaatgcacaagaaagttgaattttatagtgaacactcatatactctaaccacctagattctacaattaatattttgctttagcatatcttcctatccattactacttttaaatcctgcttgtagacagacattgttactatgatatgaagaatgccatctttgttccccaacaccatgataaagaggatttatttctacatagtgtttgttttctatattatttgaacatatgtatatacatgctgtttcagtatcctcagagtgaagttaggatcagattccatcattccaggttttggttagcaacttacctgagtgcattgtaaatcagtgcattagccccacatctgttaaatgacttgagtttgctgaatctggtgtctcagaagaaactctaaagtggttagatggatattgatgttgatgttggttttgttaggtgtaatttatgtgaaactcctaaattccttgaattattagaaggcttttataggtcagcctgttgtctctgccatctttcatccagaggtaatggtttagctttagtgtgattgcaacagtgacttctgtaaatccctgcaataaataggaaaaaagaaaaacatttccaaatagtataggacccactgatatactatatgggccaaattaatac

SEQ ID NO: 30087 - DNA, 1058 bp, Homo sapiens
taaagtaaattattatacatcttatttatgtaacccacatcagaaatggagtacagaactatgggaggcagcactcttgtacagttatattctttgaaaataagtcttaaatgtttctataaacaagagcaaagaaatgagttctgcaaaggatttcattagaggagaaaagataattcagtttcagtttttaaagcaattttcttttatgatgaagtatgacgcatcctgaaaaatataaatctaaagtatagtgaacacccatgtgactattacccagatcaagatcattgccactaccttagacgacctggtgtgtttctcaatcccttccaccccctgactttatagtgatgacatccttcctttttctcataggtggtaaactctgtgtgcattgctaaacaatacaatttagttttgcctatttttaaacttcagataaatggaattgtggcttttgtgtctttttttttctttttttgtttttttttttttttggctgagcattttctttaagattcatccttgttggtcaaaggattgttgacaatatgtacgtaagtaataaagttcagcaataatttttttgtttgtttgtttgttttagatggagtttctctctgttgcccgggctggattgcagtggcgcgatctcagctcactgcaagctccacctcttgggttcatgtcattctcctgcctcagccttctgagtagctgggactacaggcgcccgcgaccatgcccggctaattttttgtgtttttagcagagacgaggtttcaccgtgttagccaggatggtctcgaactcctgacctcgtgatgcaccctcctcggcctcccaaagtgctgggattacaggcgtgagccaccacgcccggcatttcagcaataatttggctaaccaggtgtcttattcacctgacggggttgcctgttcttttatagcgggaggtgcctctaggaaagagaaagggaaggtatttttcttttcacttgagatttaaaaaaattatctcaaggctgaacccttgaggtggagtcatccttgac

SEQ ID NO: 30088 - DNA, 1024 bp, Homo sapiens
agtacatgatttttatatgtcgatttcgtatcctgcaactttactgaatttgcttattagctctaagagttttttggcagagtcttttggtttttccaaatataagatcaggtgatatgcaaagtgggacagtttagctttctctttttcaatttggatgccttttacttttgtcctcttacctgattgctctggctaggatatccagtagtatgttgaataggaatggtgaaagtagatatccttgttttctagttctttgtggaaaggctttcaacttttcttaattcagcatgatgttagctctgggtttgtcatatatggcgtttattattttgaggtgtgttttatgcatagtctgagagcttttatcatgaagggatcttgcaaattcaagattaagttcaaaattaaaaaatcaaatgttttctccttattgagatgatcatagggtttttgtcttcattttcttgaagtgatgtatcatatttattgatttgtgtctgtcgaatcatccttgcttccctggtataaacccatttcatcatggtgtattatctttttgatgtactgttggattttgttgagaaattttgcatctgtgttcatcaaggatattggcttttagccagttgtagtatccttgtctagttttggtatctgggtaatgcctcatagaaaaagttaaggagaattccctccccttcagttgtttggaatagtttgaggagaatagatgtgtgtttttccttgaaagtttggtaaaatttgacagtgaagccatcaattcctggacattttttgttgggagaacttctattactaattctgtatcattactcatttattggtctgttcaggttttttttttttttaatttattcttgattcaatcttgataggttatgcttatccagaaatttatcagtttcctgtaggttctctagatagttgttcgtagtagtctctgatgatcttttgtatttctgtggtactaatttgtagtgtctttgttttcatttct

SEQ ID NO: 30089 - DNA, 1024 bp, Homo sapiens
cagcaggatgcagtttaatggggcctgtgttctcaaaatggcaccatgttgtagctgcttaggttcgagtgattcgtgggatccagcatgagctgtctctctggagcagtgctttcgcgtggacttcaggcagctccctgttagtcttgggacctgagagggtcaaggagctctcctgtggctaggattttaggagtcctagtggttccagtgggaatgtagaccttagggggtctctcaccctttttctgcattataagccactccagcctcctacctgatcccagccgaacaggcttgtttccctctttttccttgcttttgatgcttcccatcactactctcttgaatttcattgttctctctcaggtgatcttttttactcgctattgtggttcctctccatagatgagacaagtaccagatacatctagtcaactatcttcagcattgatttttattggttttgattgcttatctaaactagtagagcaaattattttagtatgcatggtgagtgcctttaacattcagtcatttaacaaatatttattgtgtgataactatgtgccagacacagtactaagcatttgggatatatacaaggatctttgttgtgatggagcttatttttcagataggcaagcaaacaagtaaataaaaagatcaagataattttagttagtgataaaggctattaaaaaagtaatatgctaactagtgtttgatgtgtttgtagaccatggctatggggccactactgtagattgagaagtgaaagaaggcctttctgagataatatttgaactaaaatcagaatgacaaggaattagggccctgcaaagatctgggttaagagcattcctcttagcagataaaaagttgatatgttgaaggaacagatataatgcccctgtggccaggatagagttagaaaagtggtgtgaatagtgttaggatagagccagaacaagtgctgaaattggtaattgtggaaattagacccttattcagacgttttttt

SEQ ID NO: 30090 - DNA, 1025 bp, Homo sapiens
gaaaatgttaattaaacatacgaaaccctttgccacctcaaaatttgttttgaagatataaaagccttaggttaattttaaggctgagatataatttttaattttttataattatgggtacataatagatttatctatttatgggttatatgtgatgttttggtacaggcatacaatgtgtagaagtcaaatccaggtaattggcatagtcatcacctcacgcatttatcatttctttgttttagaaacatttcaattccaatcttttagttattttaaaatatgtgctaaattatttgttgtgctatcaaataccagatcttttttcttaaatactagatcttattcatcctaagtatatttttgtatccgttacccctccccacattttgcccccctctctaccacccttcccagcctctggtaatcatcattctgctctctatctccatgagttcaattgtgttaatttttagctctcacatatgagatataacatgtaaaattcgtccttccatgcctggcttattttacttaacataatgacctctccagttccatccatgttgttgtaaatgactgagtctcattcttttctttatggctaaatagtactttattgaatacaagtaccacattttctttattcattcatctgatgatagacacttaggttgcttccaaatcttggctattatgaataatgctgcaataaacatgagagtgcaggtgtctctttggtacactgattttctttctttggatatgtaccaagcagtgggattgctggattatatggtagttctatttgttttcttgaggaacctccatactgttcttcgtagtggctgtgctaatttacatttccaccaacagtataggactgttcccccttccccacatcttaaccagcatttgttactgcctgtcttttgaatacaaaccattttaactgaggtgagatgttatctgattatagttttgatttgcatttttctgatgactaatgatgttgaacatctttt

SEQ ID NO: 30091 - DNA, 1031 bp, Homo sapiens
tcccaacactttgagaggctgaagtgagaggattgcttgagcccaagagttggagaccagtctgggcaacaaagcaagacctcatctctacaaagcataaaacattagctgagtgtgatggcacacacctgtaatcctagctacttgggaggctgtggtcagagaatcacttgagacttggaggctgaagctgcagctgtgatcgcaccactgcactgcagaagcatgggcaaccgaaacaaaattctcatatgtcctttgagtttgtgaagtaccagatgctgtgcttggtgttggagacacagtgatgtcttcttaggagtatttatctatttgaatagatattaaggaaacagatgtgaaattttatctatgtcaagatggaaaaatgacagaatctcttagaaatgtgttgaagtttgcaggatgagttaactgggatagggagggagacatcagtgatacaggcagaggggattagcagtcttaacgatcctgtaacaggaaggaatgaggtgagcttggaggactgaaagatggaaagaagagaggtaatacggtgtgagatgagactagagttatgtatgaggtagactgtgtggttttgaccattatgttaagaagtggaggtttttctgctttaattttaaagtgatgaagtctttgaataattcagagagttgcaatatgatcacatttacattttgaaaagaacttccttcttgtggcagagtgcacagattggggaactagaagtgggcagaatggatgtaaagagaccagttagaggctatttcagtagtctagttaaaagatgatagcttggattacagtgctagtagcagaataagaaaatagtatacagatttcagagatatttaggaagtgacaaccttgttatgatttttgtataggatgtgagagagaaggaactttcaaaaatgacacctagatttcttcaacttaggtggcggtaagagaatactgaaagcagatatagtgcatatgtttgttttgggagtggatggtag

SEQ ID NO: 30092 - DNA, 1035 bp, Homo sapiens
ccaaactcaaggataagctagactaagaccctgttttgataaaaaaaaaaaaaaaaaaaaaaaaaaagttagtgggatcagtaaaaaagttacctacagttaacattgttaaacattttgaattttaatcattcttgtttcatattctccctgatctttttatgtattcctccagatatgagctagttctttgtatgcaacacaaaaaggtgtgggtttttttttgtagtttataaagaaggcaaattgttttgagatgttgctttcaaacttatgtaaggtaaacaaaatgtaatgatgaagagtacatacattaatatttttgtgtctcattttatatgtaattaaattttccatttttttcttcctaggtttacccagggttgatgataaccgctggccttattcattggattttaaatacattgaacataactgttcacataagagacgtatgtgtgttccttgcaccaacttttagcggccttacatctatatctactttcctgcttacaagagaactttggaaccaaggagcaggacttttagctgcttgttttattgctattgtaccaggctacatatctcggtcagtagctggatcctttgataatgaaggcattgctatttttgcacttcagttcacatactatttatgggtaagtgacatttaatgttttgctgccattattactcgtgacctttctcctgaaacactttaggctgtacgcagatttgtcttttacaaattatgtagttgcgtacagagatctgtattactgttcataatcaatttaataatggataacattttaaaatatgttaggcatctctcaagttatgtgtaaatatcctttttaaataagtcagaactccaaaagaagagctatcataaaacaatctgttgatatttttgtttctttgttttggggagataggtaagaaatagttacccaggaaagttgaagcatggtttgatggctaagaattttaaattgtttctgaaactagcattatttattttgctgctgccag

SEQ ID NO: 30093 - DNA, 1044 bp, Homo sapiens
ataaaaatgtgatagataagctgcatgtacgccagctttgtgataatgggttttcctgagggtgggtgggtgatactgaggtgggcaatattaagggagcttcacctagctcagctaaaaaaattttaaatcaaatattctgaagcaaatgtataatttttgaatttgaaagtctgaatagctaggttcataactattttaatattctctacacttgtgtatgtttcaaatactttataataaatttaaaaaataaaatattctattttgtggacatttatgcaacagaaaaatacaaagaaaaaaatcacccacagtgaactaccatttgcattttttaattttgagcacattacattcatgaataagtcccagttggtcatggtatataatctttttcatatgctgctgaatttggtttgctagtattttcctaaggatttatgcatctgtgttcataaggtgatattggtttataatattctttacttgcagtgtctgtctgtcttaggattagggtaatgctggcatcatagaatgagttagaaggtgttcccttctcttcagtttttggaaaagattgaggaggattagtgttggttcagttctttaaacgttttagtagaattcaccagtgaagccatcaggaccaggacttctcttttttgggagatttctgattgctgattcagtctccttgcaagttgtctctgcagattctctatttcatcatgacttagtcttggtaggtttttgtgtttctattaataggactttgttgatgtaagctattcaatttgttggcatacaagacttgataatactctcttaaaattcttcttgttccctatggaatcagtagtaatgtcccgctttctgattttagtgatttgagtcttctctcttttttacttaatctagccaaagatttgtcaatcgtgttgctctttttaaagaaccaacttttggtttcattgatttttttctgtgttctttttcttttctctcttttagtgtatatgctgctgaagcaagcactctatt

SEQ ID NO: 30094 - DNA, 1079 bp, Homo sapiens
aaacatagatctagttgtctgtactgacccaattactataacttcattgtacatttttaaattgggaagtattgtagatttttatgtattgatcatatattctgtgaccttgctaaatttgcatgttaaaatttactttttagattccttaggattttctacatacaagatcatgttatcttcagagacagagggtctttgctacttttttcccaaactgtatacctttaattttttttccttgcctggttgtactgactggaacctctaacatcacgttggacagggtactttttcctgccctatttcctgaaataattctcgtaggattggtattacttcttctttaactgtttgtttggcagtatttaccattgaagccatgtggaccagggaagatttttaatatgaattaagctttttaatgacatcgtattattcagattttcttttttcatgagtaatttggtaatatgtatctttttaaaagtttttttattttatctaaatgacctaatttgtcggcagaaattgttcataatatttctttataagtctttggatttctgtacaatctgtagtgatgtcaccttccttattcctggtactgataatttgtatcttctctcctttcttcattagtctagataaagcttatccaactttgggtttcactgatttttttttcctttatattttcaattgcattgatttcttcgtcttcattatttccttctaattcacacttggtttactcttttctagcttcttaaagttgaagcttaagttattttctccatttctacttttctagtataactatttatactagaatatactgtatttacttctttagctgtagtctctgtgttttaatatgtggtgttttcattgtcatgtggttgaatattcttcgaattcatagtttctttgactcatgggttttttctaagcatggtgtttaatttccaaatatttggggttttcttagcatacttttttttgttgatttctaattctgttgttgaagaccatactttgtataatttgtctttttaagtatatggagacttgtttta

SEQ ID NO: 30095 - DNA, 1074 bp, Homo sapiens
aaagaaatccagcttcagaagtgattgtcgtgtttcaacataagtggacttagctataataaaaacataaatgacataaggttttctcaggcctagtcagtttctagttgtgcctttgtgtgttcagtgtttgtctaggatttgacttctcagctctggatatctgaaaggcctgttgatcatagaatcttagtttataattgttgggagggatctacaaatcttgtccaacccacattctatagtgaggaaactgaagcttttgctgttaagtagttgtaagattacatagtgatcttcttctcagtttttaattttctttatactttagtatgcatggttcttttttttttctctctctttcctgcctctgtgactctcctttatcagggcttcaacaggctgatttgtttaaaaaaataatttgtagacatttcgggtcatgtgacggggaaatttttgtttaactttgattacatttgggtttgggtacgtcatagagggtaattccattccaacattaatgtgtttggaaagaacgttatctgatggattatgtctgttgtcttctagacatctggtcctccattagcttgaggtcagtggaaactttacttactttggtccttcctattaaatttatgagcttcttactgtcttcctaacactgtggtcatctcttatcatatagattgtgaggcaacttaatatttgaaccagtagcccctaacttccttctctagatggatttcttttaaaagcaaatgaatattctttctcatctaagttgggtgaggaggaaagtgtgtagtacactatgctacacagtatataggatacacaaatacgtgtattcctaaatataccccccaatctttgtttttgatagagtagtttatttgccaaaaactattaaatgatgtgtaatctgtataaatggggtagtttttacgttaacttatttcagatgggctttatttctaatgaatttttagtttcagtgacttcaaatactttctctctaatcaattgcgtaacagtggtctgtgaatataaagcaggtatttgacacaa

SEQ ID NO: 30096 - DNA, 1061 bp, Homo sapiens
gatttgtcttttataacattttcatctttagtaataattttttattcttaagaattcttaaggatactgtttaattgccatagataggaagaaaatttaattttttctaataccatctgatctaagtttttttgtttttttaaatctgtgaaacacaagagaatatatatctgttgtggtttttttttttaaagtgctgttataaaatgagttaatacatttggttttgaattagactagttcaataaaactttttttctctaaaatgttttcctggagattagaaaatatctattgattataatttatgcccctcctctgttcctgctgttctgtcttgttactccccaggtggctcaataaaaaacaatttattgaacagacatgctttctgatgtgataccagaaggacttgtgtccaggtctaattaaaggacataagcaaattatgcatgaatgactggaactaacaattagacacatacttcaagagttcagcctgtggatcactaacgaatttgaaggataacccaagttgtagaatgttattctgattaggttaaattactaggttaacttgtgcagttatattataaagtaataatataactgtaaaataaattatacagttatatataactgtaaagtaaaattgtaatattataatataacttgtgcagttatattataaagtagtcaattaattgactactttagaatctcagggtgtttcagtaataattttttcagtcctttccatttccttcacctgtctccatgccagcttcatgtcaagcaaggcattattgtgtaaggtgtaattattgggtaaagtatttctgctacaggttgagtattcaaaatctgaaacgctctaaaatcatgaacttgttgagcaccaacatgatgctaaaaggaaatgcttattgaagcatttcagaatttcagattagagatgctgaactggtaagtataatgcaaatattctaaaatctgaaacactgctggttctaagcatttcagataaaggatattcagtctgtagtaataattccaaaagg

SEQ ID NO: 30097 - DNA, 1037 bp, Homo sapiens
ttgtagtgctagaaacttgtacaattataggatctggaccatgagtgacacatgaatcaggaaagaaagaacagcacctgtaggggttcagtttaaaggattgcacactcattgttctctaggttaatggatcctggatgaggccctgttaatactgcatcattcaagaagatttaacttaaacctcatgactcagtaatcccattcctatgtatatatctaagagaagtgagtgcatatgtctaccagaagacatgtttaagaatgcattagtaattttatctacagtaacccctaatagtaaatattccaaagtcatcagcagtagcatgaataaatttttgtatatctgtagtggaatacaacacaacaatcattaaagaacaggatggggaaataagagaagccaatacaaaagagaacatttttatgtggttacattcctgtaaagttcaacaataaggaatactaattctttagaagtctaaatagtggttaccttttttgataggggagggggttgttactgactgagaagaggcatgaggacatataaaaatgttctatatcattatgggttgtagttacacaggtgtgtatatatacaaattcattgagatacacacttaagaatatgatgcgatgtattttttagtcaggaagaaaaatttaattagcatcagataaggtaggagctcacatgactcactgaatttgtaaagttatacatagccttcagccagaaatagttagagtcttttcctgtggttagcacattatccagaaagctctggctattggaaatttgtttcaaaaattttttttaagtttcttggcagtaactttgcaggttcctcctttgattaataacttacgttcttctcatcccgtttttgttttaaagcaggttttatgccagatattggcactggctttttatagattttaaatctataaatttattttgcctggagatgtcatgcacaaatatgtttttatctgccagctatgggttttttatgatgttattgacaaat

SEQ ID NO: 30098 - DNA, 1033 bp, Homo sapiens
caggtgagcgatcattgccgcctgagctccgcctcctatcagaccagcggcagcattagattttcataggagtacaaaccctatcgtgaactgcgcatgcaggggatctaggttgcatgttccttatgagaatctaactaatgcctgttgatctgagggggaacagtttcatctagaaaccagcagccctccgccatccgtggaaaaattgtcttccacgaaactggtctctggtgccaaaaaggttgggaaccactgcttttttgtattagattgtgtcttacctctttcactaaattgtgagcttttagaagatggacatccagcattgtgcttttacatgatgaaggcacaaaagataagagtaattgccactgatccagaataaaggaatcttttgggaaaaatgtatgcaggtgtcgtgtgatgcagatgaagtaaagcctcagatttcctggtcaaatgtcaatgctgtaatgtttcccttaactgtgattagtaaacattatttttttgtattaatcttctgaaatttaattctcccagtatggtttttatttgtggatttgctttagcagtcagtgttaaaactgtgacatgtgatagatcactgtttctaaatgtatgctttgaacattaatattacagaagtcctaaatttctgtgcatcttaaattatttttaaactttgtgaatagataatacactcatatggttcaaaagtaaagtataagaggatatacaataaatgtctacccccttcacgtgattcaaaaataaagtataagaggatatacaaaaaagtctaccccccctaaaaaaaaaaaagttcctctataggtaataacaatgtattgtgtacttgtaagttgctaagagagtagatatttcagtgttctcactacaacaaaataagtatgattgatgcatatgttaattagatcgatgtagccatttcacagtgcatatttcaaaacatggtgtacaccataaatatacacaaatttatgtgtcagttaaaaatgggggggcg

SEQ ID NO: 30099 - DNA, 1046 bp, Homo sapiens
aatatcacttaattgttttaatgtctgcagcttctattggtgttcctttttaattatagatatttcatttttcccccttgaattcatacttctttccccccacctctgccatacacttttttcccctgattttccttggcaggttttgtttttttttttttctttacatcaattttgttagctgttttttttttttctttcaaagaccagctcctcactttagtgctttctacagtgttagttcattattttgtgccatttccttggggtgggcggagggtcatattcttttaaacttggtgtggtgattttttctttcctaatatattgttacagatttactccgagcataatttagcctccattctcacaggttttgaggtgactaaatgtcattaagttaaatgtatatttaatttccattgtacttcttttttaagaccatgagttatttacatgtactttctaaaaatttccaaatatggtggttttctaatatccttttattatcaacttctaccgttgttgaattgtagtcagatactctataattttaatcctttgcaattggttgaggcttgctctgtgactcaacttatggccagtttataaacatatagattattattatattttgccaatgaaacatagtgtcaaatgagcacacggtgctttcagagacataagtaaatgttttttgaatttttggtttttggttttttttttttttttgagatgacgttttgctcttgttgcccaggctggagtgcaatggtgtgatctcagctcactgcaacctctgccttctgggttcaagcaattctcctgcctcagcctcctgagtagctgggattacaggcgccctccaccatgcctggctaattttttgtatttttagtagagatggggtttcgccatgttggccaggctggtctcaaactcctgaccttcaggtgatccacccgcctcggcctcctaaagtgctagaattacaggtgtgagccactgtgcccagctgaatataaatattttacatatatataatt

SEQ ID NO: 30100 - DNA, 1055 bp, Homo sapiens
gctctgattgtttaatgtgcccattagcttgaacaagttaagaaccacccctgaaatggggtaggggccaattccacccaaatggcatggataaaatggggaagttgtagcttttgaaaggaagtttaaggaaacttctagaaagaaggggaatggaggctaggcaataaattatggaagtcctccacacctcctgaagggataagggaattaaacttcagatacattttctttggggaatcctttgtgtgagggagtaactcttagcacaggcattagtcaaggtaataggctaagatactgcaaaagacataataatgtgacaaagaacaagagacttgtcttcctctcacatagaaatactccagtggtttgctttacactattattcttggtcccatgttttttgtttttttttcccctgtaccatctcctaagccttgtaaccctcagtgtgatcaaggctaagttaccaaggttttcagctcacagaaagggggaagagaaagtgtagaggaggcaacccactgtcttgagggctctgggctgtcagtggaaaccacttctccctctcacatccaacaatgagaacttggtccatggccatgtgtagctgcaaggactgctgggaaacacagtccctggctagatgactagcgaccagcttacaggtctgtgattatagagaaaggggagaaggaattttggctgggagttggcaatctccatcacaacccccaaactaggtttcctcagaggctggcccattccgaatgatgttcctgtgacagacacgatttcctcagagaagaatcttcatccaaggcctttcattttgggaaccaggaatgcttaatggggactaagtcagttatagttaggtttaaatacatatgacagaaaacctaaaataacagtggtctaagcaaggtaaatgtttgtgcatttttctctaatgtaaagacatttgtggttggtgtagcatcatggtggcagagacttgtttgattccactgttctgccatctcggcatgtgctgtcctccttctgctcta

SEQ ID NO: 30101 - DNA, 1031 bp, Homo sapiens
attggcaaactggaaaatagatctgaggatattaaagtagcaaagaaaatatttgagaatttaaagattaagtggaagatagaataggacttgaacatacatctgataggagttacagaagagagaaaaaggaggcaatttttgaagaaaaggctgaaatttgtcccgatttaattatgtgcattcaattttatgttattctccataatgtatttccattaaaatttaatcacatggtctttatagctttttatgactgcatataaactaagttgatggtgaacgtttttgaggaaatacgctttatgaagaatctgtgtggataatctaatttactgaagctgtgattgattcaagttactgaagcaagtgatgttacctttggtaggatgggagacagcaggcctggtactgtgggaagacttgttctagctcctgcttaacatttaatatccatgttgtttagccaagtcagctaacttctctttgaggttcatttttctcattcgtaagtgggaataatatctgtgcagcctacctcataggattgctgttaaggtccgtaaagagcaggaaatcaacatattaaaggagaaaaattaaatgatcatggcgatatctgcttgtggcagaaacaatgccatgtgttcactaaattattttttcttttcttttttttttttttgtagatacacagttaaattacatttcccaacctccccagcagttaggtggcatcacatgattgagttctagtcaatggcatagggagagaaaagtgccactttcatgtgttctgtctggttctttattatttcttctgtgcgtgctggttgtatatcaatttccagtatgttctggaagccatacattgaagatgatggacccccttttcagccaggattctacaagacaatatggagaaagtaccccccaatcacattggtctgtgattgataggtacaaaaattattgtattatgccactgagacataggagttacttgttatagcagctagcataacttcact

SEQ ID NO: 30102 - DNA, 1050 bp, Homo sapiens
ctaaaatgacagagatgggccttctaccttggggtggatttgggccaggcatgaagtataacgcctttgggtttttttctgatttattatcgatatgctctgtgtactgcgctttttcaggaaatacaaaagtgaaagaaatgtaagtggcccacaatcccattactagaaataatcactgttgacatgttagcatgtatccttttagatttcattaagcgttttgaaaaagatgggaaaacatgtaagcaaaatcacccttattactactatagtttttatttttgacagagctaattatgcaccttttttgtttgttttgttttgttttgagacagggttttgctctgtctcccaggctgaggtgcggtggcaccatcatggttcactgccgccttgacctcttgggctcaagcgatcttcccatctcagcctcccaagtagctgagaccacaggcatgcaccaacacacttggataatttttaatttttttctagggacggggtctctctgtgttgcccaggctgctctgaaactcctaggctcaagcaatcctcctgccttggcctcctaaggtgctgggattgtaggcatgaaccactgtgccccaccttatgcacatattttaaagattcggtcctacaggcagaaatataagtttctcccagtgtcttcatctctttgagctctaaacaacgtgtttataatgctgtttattggtgttccctcacccacccagtcatagacattatccattgcctttctactctgaaagatgaggctttagctgggatgccctcttccctgcctccaattatacataccctcttcctgtctcccaatataggtccaaacacttctgatggttcaacttaggaattttcagctttacagatgttgtaaaagcagtatgcattcagtagaaatcatacttcgaattttgaattttggtcttttcccaggctaatgatattcggtagatattttttcatgatgctggtcagctctcagccacccatgccatcaccagcgcaaaccacccatcctct

SEQ ID NO: 30103 - DNA, 1032 bp, Homo sapiens
taatcatattttatttccttatatgcagaactatttcttaaccctatcttgttctattcctgtgtgaattcccaggcccttttaattattatagtgttatcatgtattttaatattcaatagggtaagccatacaaaattttctatttctttgctatcgctgtatacttatactaacattcaaggtgatttttagaatcaatgtgtcttaaattccatttcaacttggattgtgatttcattatatttataaactaatttgaggagttgactttctgatgccaaatcttaccatctgggaatgttgtatctcttcatttattcaggttattttatgttcttaaagtgctgagttttttccagatgaatcttaggcatttcttactcagttttaagtattttcaatttctgataaatgggatttgtcaaaaatgaattggatttcactcatttctgattatttgtgatttataagaaagctgttaatttttaaattttggtcttgtgtgtagctatctcgagttattctcatactttttgaatatgggtggttttcattttctttttatacttttttccattattgcataggctaagattgccagtataatgtcaaataattgggatgatgtagatatccttggcttgctcataactttaattggatatttccaatattatgatagtacagttttaactgtagggtctgttattctttattgagttaaggaagggaagttaactgtgtaccctttttaattaggaatgatttgagcagtatgaatgggaatggacctaggagataggattgttttggtggggaagtgctttttattgaggtgatcatttgaggtttgtttacttccattggctaatgtagtgaattgtattaggaaacctaatgttgaattattcttgtactcttgggataacctctacttagttgtattattttgataaactattgaatttaaatgttttttactcttggatttgatttattaatatcacatctagggatatcgtggctatg

SEQ ID NO: 30104 - DNA, 1031 bp, Homo sapiens
ggtgtcagagacgctgcccacttctgtcggttttccctgttctctgcagtgggttccatcttctgatccaagatactgcttcatttcccaccatcctgtctgctccagccttcagtaggatggagaagtagaggatccctttcttcaagatccaacctggaagttacatgtatcatttcctctggcatcctgttggtcagaatgtacagcatggccacatctgactgcagatgaagctggggaaatgtggtcctcatctacgtggccatgtgaatagttaaaacccacttcttactaaaggcagaatgtgagagcggatggtatggacaaactatattctgtgctgtgaggggccttgcagtcacctatttgctgctattctcagctctctccagtcttcccgtaattgaggtcaagagtcattgtcatttattttcttgtaactgatgtgtttcactcatttatgttacctgcttggtccctgtaggcatttgagtttgcattctcagctgtgccctgatcatctctttcaacacacctccatgcttttatatttgttgccgcctctgtttagaattacctggcctccctttcaggcctggcaaactccttctcaggataacgcagccccatgcttcccttcccaaattgagttatctctgttaaccatcctaatatataagctgccaattttacataataccttttagtttacttacctttatatacttgatgcccagaacagcactgggtacataacagactaagggtcagtcctgtttactgagtgttcattcagtgaaagacacttcctagaacttaaaagcatttttaatatctaacagtgaaatagtgtattagtcacagcctgtacagctgtagatgatggaaacgtggctaaattggcttccatgacaacaaaaaggaggagcacttactggctcgtgtatctgacaagctgagctatgtgtcaagcctcaggtatggctggaaccaggagttcaatagatagcaggactcagtctctcttc

SEQ ID NO: 30105 - DNA, 1062 bp, Homo sapiens
gcacttcgtagtggccaccaatcaggaggaagtccctgattgacctagctcaggtcacatggccattctcagtccagtcaatgtggccaggcataagtgaggggggagaatagggtctggaagcagggaacctaaggctgattcacgctgatttcctagaatggaattaaaaggaaaaccccaactttccatgcccaagtaacaaaaggatcataagctacttcctttgcacccccacccactttttcttcgtggcagatggaaaatggaaagtactctgattggtccccttctgcaaccaatcagactggtcgtgggcctagtctttatttgcataggggtataactttgtaacttcacttcagcctttgattggttgccttctgcaatcaatcagactggtcatgggccacttctttatttacataggctgtaaccaagtaaccagtgagaaacctctagaaggtatttaaaccccagaaaattccataaccagcatgcttgagcccactcccatactgtggagtgtgctttcgtttcaaaaatctgtagtttcattgcttcatttgtgtgttttgtccaattctttgctcaaagtgccaagaacctggatgactcacagtcaagacccgtcactggtaacataagtagtctggccatacctgggtcatctgtctacttctggtacctggggtggagtcgaccctactcaaattacattgaaggaaaggtaggtctccaacacgagagaaaataggcaaaaaaaaaaaaaaaaaaaaaaaagtgacaattatatttggaactacctttgtctcattttataaataaagcagctgagggtgagagagattatcgtgacctaaggtcacaaccaggaggcggcagaagtgggattcacaccagatcttcctgactctaaatggtagactgttaattcagtgcacccaactatttctgaagggagttatcctggaactccccaagccccatctctgcatggggacaatcctgaggtttgatgctcctgtgtatgactattagtatgtagagataccttgtagg

SEQ ID NO: 30106 - DNA, 1032 bp, Homo sapiens
agggccgcaggttggacaagcttgctgtagcgtgttgtccaggtgcacttgtctgccggaaagggcagatagatgtgggctccagccctgcctgatagcctctcggctctgagcgtgggcagatctctcaaggccctctgaaacttggtttcttctgctttaaaggtggaatggtgaggtgcagtggcagcctatttgtggctgctttgcttaatttggggttagctaatagctgttcctttttttgtctaaagtggttatactgacccaatccattacaaagttgctttgaggactaaaatgaaacaatttaaggtgtctggcacttacccatcatttttattgggcaccttcttaataatgtttgaatctacataaggtaagatcatctacattctttcagacacacagccatttactcctctgaatttgaagtttttcttcaattttttgtcttcataagaattaaaatgttacagagtcataaattttgttttccaagttttacctaaaaccctcagatattttgctcctaaacaggttaaggaccaatgtgatactgccctcactcttaaaatcttgaaatccttcagctgttaataccattaaactattactaactgatttatttttgtagtgttcaaataaattttaatataggttgggtgaaatctagaaaagttgtatattttgtctttatgtataataggaattacaaggaagtgccaattcagagtaaagttaaatgaaaacatgagagttagggaaataaggctttattagaatacacaaatgccttctgtggtcgattagattgtgagaatccaaataaatattttagaaaattattatttgaataaaagtgcacattattttatgtgtccgccattatttaatgtattccctcaaccatatggagatggcagaagagatattgattcaggctttggttgtgagtgaaggagataggaaaattatctggaggctgctggtaggattataaggaaaaccactaaagaatctggaaatatg

SEQ ID NO: 30107 - DNA, 1028 bp, Homo sapiens
ccaaatgagtaggaaatcaggaagcttcagagagccatggtgtcaaagaaggcttcctggaggaggtgggatcagaaaggagccttgaaggatggatagtagaaaagaagggagagatccttccaggctaggagaggggagagaatatacagtaagtattgagcacaatacctgaaatattacctgaggtaataatattagcagtgatgccagtatgctagtatattaacaagaaagccagtctaactgaaatagatgcatagaaaatgtgggaccagccacccaaacctccagcaaataccatacttagtgatgaaacattagaagctttcttttataaaatcaggaacataaggatcttattaccatttatattcatcgtaggccctggaggccctaaccagtgtagtaagacaagaataagaaatacaaggatgggggaaaaaggaggccagtcatgatggtgcacacctgtaatcccagcactttaggaggccgaggccggtagattgctcgagcttagaagttcaaggtcagcctgggcaacatggtgaaaccccatctctacaaaatatacaaaaattagccaggtgtagtggtgcacacctgtagccccagctacttgggaggatcacatgagcctggtcaaggctgtagtgagctgagattgtgccattgtactgcagcctggatgacagagtgagaccctgtctcaaaaaaaagaaaagaaaagaaaaacaaacagtcattattcataatcatattatctacgacaaaaatccaagagaatttacaaaatagtgttcagcatgattgcttaatataagtcataatacaaaagtcaattccacttctgtacacaaacaataaacagtttgcaaatatttctaaaactttatatattacctttatggagcaaacctagaaacttcattgaaagataaagatctaaataaatgggaagctgtaccattttcatgaatgggaagcatcagtattgtaagatgtcagttcctaaataaacacat

SEQ ID NO: 30108 - DNA, 1024 bp, Homo sapiens
gtgttaagatatctcattcagttcttttccagttaaccctatgctattaaaatcaattcatgttgctatggatccatctattctgttgctttgaattgctttcctggtactccttggagtgtgtagcagttagtatgctttgtgatgaaccatcccaaacttagtgacttaaaacaatggtcactcctttttcgtgagtctgtggggttggttgagtggtttggctgatttgtgtctgggtctgctgatctcagctggtgtcactcattcatctgtgatctgctggagactgcatgatttaagaggtccatggcacattgttgtcatccttcatcagtttggcctaaacttggtcacctgatggcaaggccaggaatccaagggaggagaattgtgcaaggcctatacttggaacttgaccacagtcatttctgccatattctgttggctaaaccaaggcacgagtccaatccacaaatccagtctggattcaaagtgtggggaaatagactccaccacttgatgggaggaactgaaaagcgacattgcaaagggatggttatagggagtttaattagagccattgattagtcagagtatgcatccaccaccttttgcctattcactcttccagtgatggaagccaaagttgattccaactctggaagctgtgataaatatctttgtacatgtcaccttgtggagctgtttgataatttggaagctatattctcaggagtaagattgctgaggcaaatggttacatctacctggaatgtctataggaacagcagaagatgagactggatacttccttgttgagaagttgggatttggtgctaaggtttagtgggcaaccttgagttttaggtaaggttaatgcatttagactcatgttttagagggattatcttggcaatagtgtgagggttggaagagacgggtactacattaggtccttgggtgcctcattggaagctgacttaggccagctgagaatctgaattaaggtcataaaaatgga

SEQ ID NO: 30109 - DNA, 1047 bp, Homo sapiens
ttagaaaagatctcccaaatgcaaatgtgttaaatcaggaaagcaacctgtgggatgtcagcggggattaagtataactttggaaagatacacaagaaactaagaacattgtccacctctagagagtaggcaggaaaagccatggcaaggaagaccccaaagggtgattccagggacaaagagatttctccctgtttaacctcttatacttttccattttttaaccaggtcagtgtgttatctatttgaagaattaaaataattagaaggaattcaacccacccttcctcctctcataaagatgtttgcagcaagcagtagccctgttagcagtgctgagaccctgggagcttctttctgtgtttaggtctcaggaatggctggttttatttttatcttattgtgagaaatgtgaaactgcgcacaataaaatcacatctgcccaccacttagctttagtcattattaattttttttttttttttttttgagacagagtctcactctgtcacccagcctggagtgcggtggtgcgatcttggctcactgtaagctccgcctcccaggttcacaccattctcctgcctcagcctcccgagtacctgggactacaggcacccgccaccacgcctggctaatttttttgtatttttaggagagacggggtttcaccatgttagccaggatggtctcgatctcctgacctcgtgatccacccgcctcagcctcccaaagtgctgggattacaggcatgagccaccgcgcccggctagtcattattaatttatggtcagtattgtttcatctatgtccttacctattcttctttcagcaggattttaagtgaaattctagatggcatatcatttcgtccataaatattttcataggtagccctaaacaataggaattttccttaatttttttgaaaatattaaatttatatatatgtgtgtatatacatatatatatatatatatttttttttttttttttttttgagacagagtcccactcttgtcgcccaggctggagtgcaatggcaca

SEQ ID NO: 30110 - DNA, 1033 bp, Homo sapiens
cctttccttctggtgcagggagggcatctttttatctcctgctttcaggaagaaaagggggcagtcagagcacccctcttgcacctgttgtttttgaagtgtctttagctcaaattaatcctatgccaaagtggcatatttcagggtagcatattctgccatccttcagtgaactatttaaaattttagctcatttggcagcagcacttattccagttttagtgggggcattgatttatgaccatccccggtgggtcattacatgcctatttaaattgtgaaatagaccaaggggtgcttctgtgcaactcagttacaggggggaaagttccaataatagaggtgcattattatttgcatgcttaaaaagcctccacaattgtcagtgcagataaaaggccatgctgagccatgaataatcacttgctcctagagtaggggaggggacctctctttttttaagactcaatggaacagaaacgtcacagtaggcatctaaattaacaactcttgtttctgtaagcctggactttctaagcttttcagccaaactatctcacgcctctgagagtgaacttactctctcaggggtcttaaggcgaggcctgaaactacccaggttaaattttagtttgaagttttgtcttactttttaaatttttgtgagctgtctcctcccctacaatatttctggttgtgattttcaatgaaaaggtatttatttatttctctgtgacagtgcttcttccctacctatctcccacatttttgaataaaactgattccccatagtccagcagatctccaaaattagttgtgcactgcagttttccttctcatcattcattagtcacaaaggaagcccaaaggggtgagcagctaactgaaatgccagtggagctttcgaacccaccaaggggagggatattcctctcccaggagcagtgctgtcagtggcttcaaccaggatgggggcatttattaatgagacttgtgaagcagccagctcaggatgactggcatgaaaccttct

SEQ ID NO: 30111 - DNA, 1041 bp, Homo sapiens
ttttgtgtgtgtgtttttggttgttctttgtttgtttttgtttttgagatggagtctcactctgtcacccaggctggagtgcagtggcgtgatctcggctcactgcaacctccctctcccaggttcaagtgattctcaagcctcagcctcctgagtagctgggattacagggcccatcgccacatttgcctaatttttgtatttttagtagagatgggatttcaccatgttggccaggctggtctcgaactcctgacatctcaggtgatctactcgcctcggcctcccagagtgttgggattacaggtgtgagccactgcacccagcggaatttttaaattactatattgtccttgtagctctctttcactgtggcccagggaactggcatttcagttggaggagctataagatttttcaacttgaatagtctctgatccagggcctatttctctatagcaacaagacctcatgtttctatgaaactcagtaacattctagaaccctctgaagcttcacatatccctccttcatttctgtagcccagatttctttttttaacctttatgacgatcctggtttctttgctcttctcttttctttcatctctccacttattttcactacatttcctccaacccaggcattccccggacatgtttacttttgggagtgttaaacaagactagggaagtcacaaagttaggcattgtgagatagtgcctgagagaggcttgtaataaactggcagagcccccagtgtggggggcgcacagagggagaatgcccctgccttctactcacgtctctaccaaccctcttccccttccccatttctttccaagggaaatagcagtttcttgtttctttagagttcagaaaaaatgggccatacttactgagagatgggatcattgcatgttcacaggtcgtagactcagagagtctttctttccccatctcctctctggccccctcgtccacatgggctcgtgcacaaggcccaggacgtcagggcagttctggccaggctgagctttc

SEQ ID NO: 30112 - DNA, 1031 bp, Homo sapiens
ggcccactcgactcatttatgtgaactgacactgtagcaatccgagattgtaccccggacctagattgcctgtgctacattagaaatgatacactttcctcagatgcactgccgccgtattcactcctaagtgaactccctgaggttatttgagcaaaactacaggctttcagatgttctccgaaataaaaacagcataaccagaaatcatttgagaaggatagtaattgaaccaataaagtagttttagatggcaaagcctggtatcaagaaaaggtagtgagtgggtgattcaatggaggtgaaatgataacttttgctaattaggatgtgccctaaaccccacttctattatgctttgttttctccagttctttgccttcctggtcaccatctgctacgctggaaatacatatttcagttttatagcatggagatccaggaccatacagtgatttaccattttgataattaaaaggaaaaaaaaaggaagactctcactgtaaaaacagctgtaggtataatgtatattcccagagaattgtatttaactaattaatgttttttatattcttaaatttgctcacaaattgtggtttgttacaattaaactggatacttatttgcaaagtgttgtagcttataatgaactcttaagtatcttattaatgtattaatgtcttcatagatcatattttcttagacaatgtttaaatagataaattgctaatattgagaatgtgtcaagtttgtaaacctaacttttaagatgccagattcttttttgattaaatgttgcaaaatcccaagtaatgttgtgtttgattggagaaaggagacctacctgttgaagccagaggctaggctgtcaaggctggtgggaggctgggaagtctccctcttcacagggctgcatcgtatgatattgtcaggtgacacttatccatagtcttagggcaaagaggcgggagattcatctccccaattctggggatcatagatcagtgttcatgattttcatatgctaacag

SEQ ID NO: 30113 - DNA, 1031 bp, Homo sapiens
tggtcttgatctcttgacctcatgatccgcccccgcctctgcctcccaaagcgctggtattacaggtgtgagctgccgcgctcggctaaatgacttttttttttttgagcgagacagagagggtcttgctctgtcacccaggctggaggacagtggtgttatcatggcttactgcagccttaacctcctgggctcggcgattgtcccacctcagcctcccgagtagctgggactataggcacccaccacgatgcccagctaaattttgtattttttgatacagacggggttttgctatgttgcccagactggtcttgaacttagagattcaagggatctgtccacctcggcctccccaagtgctgggattacaggtgagccactgcgcctgcatgagactcttttttttaatagctatttttttttagccctattattgttctagtaattacatactatataccatgtgtgtataatctcattaaatgtttctaagaatccagtgaagtaacatgtttgatagataaggaaacgggctaaagagttaaagagacactaaagtcacacagctcttagcagtagtggtggaaccgatccaggcctaatggcctgatctccaaaactcataactctggcagagttgttgcttgttaatagttctagggatataaaagccacagtgagataacacttcacacccacggagatgacaacaatagaaaacaacaagtgatgaagatgtggaggatgtgaagaaattggaactctgatacagtgctgatgagaatgcaaaatggtacagccactttgggaaactgtgcagtttctcaaaagttaccatgtgacccagcaattctactcccagctctacccaagaaaatgaaaacagatgtccacatgaagacttacacattcatatgtgttcataacagcattattcataataaccagaaaatgaaaacaacacagttgcccatcaaatgatgaatgtataaacagcaactaaaactaagtgctacattcatacaatt

SEQ ID NO: 30114 - DNA, 1095 bp, Homo sapiens
gccctggcgcttcctgtgcagcgccactggacagccatctgtttcctcccctctgccatctgcctcgcgccgggcccagcgtgcggccctggaagcctggctcggccgccgcccgcgcacgctggccttctttgttactactttggctcagtggtttcctgggctcgctgctcattccctggcagggctcgcggcgtccgcggcgactcctgggatcggcaggggcctggcttccagcccagcgccggcagcagcccgggggctgcggagcggaaagggggctgggacgcggtcactgctccagccacccggcgctcctgggcggaaatcgcgagcagagcccttctcagcctcctgcagaaaacgcgcctcacctgacttgtgtttaaatcagcaagggcagtgacgcggctcttccttttcctggggcagtcactctcctccctctgctgagcccgctctctttagtttactttaagcaaaggttttgtttgtttatttgtttgtttggttttggtttttttgagacggagtctaaaaagtcttcagtctgtggcccagactggagtgcagtggtgcaatcttggctcactgcagcctcctcctcccgggttaaaatgattctcctacctcagcctcccaggtggctggggctacaggcgcgcgccaccacgcccagctaatttttgtatttttagtagagacggggtttctccatgttggccaaggtgatctcgaactcctgacctcaagtgatccacccgccttggcctcccaaagtgctgggattacaggcaccagccactgtgcccggccagtttactttagatagttagaaagaccgattgataaccagagaggcggtaacccgcagtttccacttactactcccaaagggttgccctgaagcttcagaaaaaagctgtgtcatgctcatttgttttattttattctattttgtttattttattttattttatttttcgagacagagtctcactttgtcgcccaggctggagtgcagtggcatgatctcggctcactgtaaccttcgcctcctgggttcaagcaattaattatcctgcctcagcctcc

SEQ ID NO: 30115 - DNA, 1033 bp, Homo sapiens
tccagcctgggtgacagagcaagactctgtctcaaaataataataataataataataaactttggctgaggggcccagggacctgcattttaacgcatccccttgtggatacactctctaaaggatgagaatgtcaagtagtgactttctcactgccatacagatcacaggccaccttcataacttcccttgccttgtgtcaagcaaaccagcagggacctgagaccatcagcacctttgtgacacctgcaggtcgtcttccactgtcatgctgccttttcagtaggccctcccgttgggattaagtactttctttcatgctactcttcatctcctgataagggagggaaactgaggcagtggaactgctggattcctactcctcagtgaaatcttgggtacatcacctgccttctctatgcctcagttccctcttccgtgagatgggggtgataatattacctgctcagggttactgtgcagatcttctctgaagtatttaagctctgagtgaatgttagttatttttttattacctcctttcagtagtctagtgagatctttaatcttttctccagaagttagctgggtctgttcttgctattccatattcataatattttctacaaggtcttcatttcctttttccctttgcacatctccaacttgcctctgcaaatctatgctagtccctttgataagaatattagattagcacaggtctgtgtctgcatgaggagagagcccacttggtctttgtccaaggtttctcagacgtttcattttgtatttagctgtcatctgtagagcatgtcatacatgccaggcctgtgtttttgacttagcatagacatcaaggtgatgaagaaagactattgggttggctcttggctctgctgcccactacatgggtaggtaatcttgggtaaatcacgtcccttctcttggtctcagttttctcttgtgaagtaggggaaaagtttttgagatcagcattgttctaattatgatatatatgtgcacataagtactt

SEQ ID NO: 30116 - DNA, 1027 bp, Homo sapiens
tggaattccactgagggatggagtctctcctctgaaggtcagcatgggggcagaaggtcactgtagagggtggccaaacctcccaacactgatgctccacatggccctcccacagcccaccatcacacctctctgccccctctctctgctgtctctgaagagagggatggttgccccctgaagcttaacacctgcccagctacagtgcagggtactggaagaggcacacaggagacctgtgcccactgtgtttccgggcccacttgaggagattcccactgtgtttagtaattcaggttgcacataactgtttagccctggaatctctatagctaacattcatcatatgctgtctgtgtgcctaggaccaaacctgggctatgaggaagttagaagaaatttttaaaatatggtccctgcttataagaaagtggtcatctagcttaggagacaagacacatgaaacaattagtaaacaaggcgttgtagtctagaatagcattctgtagcgatataataaactgttcaattatgcagtgcagacagttggggaccgggatggtatataacgtgctaattgtgcagaacagacaatgagaggccgggacaggctctaataggctaattatgtgctgtagacaattggtacaaaaggagcccaggaaaagaaacccggggaagaagtggatgtgggctggtgggggcagctgtttatgtaaagcagcatctgggcttgaaaagaaaaccaaaccttgttgaaaatcctacccttagctgcccctgcgccattctcactggacaccagtggcggtgtagtgaagtggaggcctttgtgtgggtctgagaacacctaggcacccggtactgcagagtgcggactctggagccaggctccctgggctcccatcccatatctggcccttgctggctctgtggccttcggcaaaacagatgaccgcctgtacctctgtttctttagctgtgaaatggaggagcagggtgggtaatcctagcacccacccagcag

SEQ ID NO: 30117 - DNA, 1050 bp, Homo sapiens
gtgtggctgggaaagaatggccagatagggcagtagtggatgaggtcaaagagaagggaatttcaacatgggagaactgagcatgtttaaatacttaggcagaaaccagtaagatgggtgggtctaaagacataggtagaaaaatggctctctaaagataggattcagggctcaggtttggggctaactcttctctagaaatagaagggaagagagtgaagaagagtattttgcttgggcagtttgtgtgggttttgtggaagctgagggaatttcctgctgagggccgaaaccatcaaaatgactgatgacctaagtcagaggctaaagggaattcccttctcactccagtcaggccagtagaagcaaccagacaggttaatggcaacaagattgctaccaaaatcaacagatacatttcatagtaatagtaaatatcttatcctacaaaacattttcattaaaaagggacaaacaacagttcagcggtttctttaaaaactaagcatatatctaccatatgacccagaaatagaactcttgggcaactatctcagagaaatgaaaacttaacatttgtacaaaaaccggtacgtgaatgtttataacaattttattcatagtagccccaaactagaaacattccagatgtccaatggttaaaacaaactgtggtacatccataccatggaatattagcaataaaaaggagcaaacttgatatatgtaatgtcctagatgaatctccagagaattattcaaaggaaaaaaaaaatccaatctcaaaaggttacatattgcatgattccattcatagcccattcttagaataataaaaataataatgatggctaacaaattagtggcagccaagagaaaggggaaaggtgtggctacaaaggggtagcacagggaagcctctgctgatggcacagttctgtgtcttgattgtggtggtaattatagaaagctatccacatggtaaaattacatagaattacacacacatgcacatacaaatgtgggacctccctgtactttttttttttg

SEQ ID NO: 30118 - DNA, 1985 bp, Homo sapiens
ccgcttcttcgtgggaaaagcagacaagagaaagtcaccctggagcacacatctgcctataatatcgcgtggctgaggctgggattcacctgggctgttttgaccacatgtggcttcctctggtcattgactcctgtgaaattaactttgtaaaaaccacttttttttttcttgatagagacgggcgggggtctcgctatggtgcccaggctgatctcgaacttctgggcccaagcgatccttccgccttggcctctcaaagtaaaccacttatttaaaaaggcataaaatcctattgtctctctacagtctgtgctcctaaaatcttgcatttggtacttaattgctctagttcctcgaaattacttaatctcaatggttttctttatggattattgctcccattcctagaatcttccacattaaggaatataaaattatttcctgaccttgtccggaatgtttcccgcaagaaattcatattctttgtggcatccaggttttattggaaagaacttaagtgacaggatttaaaagtgatggaacttaaaatttttacagtgaatttaatttaaaattaaagaaaaactcagtgtgctgtggattttagtaggttctggtcacaataactgacaaatgaacttcacttggaaattaagccaattctattttaggtacagaggaataaaaatcattagaggatctcttcaataatctaagaagaaaaacaacagaacaaaggccttgagagggtataaggaatgtgctgtgaaattttggataggttgttcagggaaggcctctggtgagatgatatttgagcagagatatgtaagaagtgagggaatgagccataagaaatgaggaaaggtggatgagggagagactattagacaggaaaacggcatggcctgtccaaggctggaccaggggaccaacatcttcctccttattttagaatagtgtctgtgttccccacatttaccattcctacttgctcataccattgcgcttgcccgaaatcacccttttagacctaaagcccatccagttttcaaatcctcagtcataaagccttctacttgttcatttattcattcgcaaagattgagtgttgaataatggatatgacacactccctgcctttgaagacctgctgttcagtctgttggaggagacaggcatatcctagctgcactcctgtttggtaagagctgtgtaatgtgtgtagttgaagaataaggtccacagtgattaggggactgtttttttcattggtttaagtttataggccatattgaaggaaacttcctgctttgatataaggttaaatttgaataaaatagatgagtgtttagtgtagctcctttgaatctctgctcatctccatctcatctgctgtgtttctggcctttatcttttaatatgatctatgtcgcattgagtagtcttctcactggtgtttgtctcttgtctcttcctatcccatccattttcctcactgtcgccccccgctttttttatgtcctaagacattcattgaatcctgtcattccccttcctataaagtttctaagactgtacatgctttgggcatcaagtcatcattctttttatttaatttttattgtattttctttctccttttaagtcctcacggttttttttttttgtttttttttttttttttgagacggagtctcgctctgtcacccaggctggagtgcagtggtgcgatatcggctcattgcaagctccgcctcccgggttcacgccattctcctgcctcagccacccgagtagctgggactacaggcgcccgccaccacgccctgctaatttttttgtattttttagtagagacagggtttcaccatgttagccaggatggtctccatttcctgaccttgtgatccgcctgcctcgccctcccaaagtgctgggattacaggcgtgagccaccgcgccctgccgtcctcactcta

SEQ ID NO: 30119 - DNA, 1114 bp, Homo sapiens
taatttttatgtttaaattacagacataaatatatttttaaaaatataagtacaagaatttttagttctggtgaaaggaaagtggggaagggagctatatttatttagcatctctaattaaaaacaggccaaaggacgactggactgaagatgtgactgattctaagacttgtgctcttttaattatgtcatattgccttcttggaaaagggaagttgggaatcttcactgactgctgacatgtgccaggctaggacttcccaaagttagttctgttgacaactggttcttttatttttagtttattaagatggggtcttactctgctgcccaggctggagtgctttggcacaatctcagctcactgcacactccacctcctgtgttcaagcaatcctcccaccttcgcctcgcttgtagctgggactacagatgcatgccaccatgcccagctaatttttgtattttttgtagagacggggtttcaccatgctgcccagactggtcttgaactcctgggctcaagtgatccacccgcgttggcctcccaaaatgctggaactacaggtgtgagccaccacacctggccaacaactggttctttgagatgctcctgttgtctaggcagttatcaaaaagtgcccagatcataagtgcacatacagtttggtgaatagtttgctgtgtatccttgtagactttatacttattcagaggtacatatttgtgtatatatttttataaaacatgggattcagttgtacaaagcagtttgcaatctgtttcttttatttaacaacatgttgtaaatatttttccacatcaagttatatagacttaataactgttaatgtgccattgtattcctataccatgatttagttatcaaatctcttgaagaatatttatttctagacatttagtattatcgttttaatttacaattatttaataaataatgaggctgaatttcatttcacgttattaagccattcatatttactcttctttcagcaagtttctggtgtttgaggaacactgtgaaggactgtggcagggttcttgaagataagggagtttgtttatctaggcaactcctggaagccattataga

SEQ ID NO: 30120 - DNA, 1074 bp, Homo sapiens
tctgttctttaatttatgaaacacaaatagttaaggaaaataaatgtgatttgtctggtatttcttgtcagaaacatttgttagcattaattttatttccgtaaaattattattccaggagataaaaggtatgttgtgggatcattttttttaattggggttttaatgaacttgaacagaatagactaatataccaaatttgaatgagctttggagttttgagaaagaactatatgaagaagcttagctgtggagatatatcttgtttataatgaaaaaaatatgattaatcctaatgtcaagtcgttttagcatttggatcaggagatgattgattaaatagaagatattctgctttgtatctggcttggggcttgaattggggattggtctggtgataatggcaatgtttcttgaatcctggggctagacttttggtgttcaagagggctgataacagtgatggtgctgataggatcagctagcatatgttaagtgttcactgtgtgacagggctctgccaagcgcttgtatgcaacttctcagcttgttcttctcagtagccctatgaaatagctatataatttttcttattttaaaagtggaaaagccaaggcacagatagctgtgtaaattgtccaaaaacacaaagtttttgagtagtaagagctacatgaactcagttgtatttaactctatagcctgtaattttagttactgcttcatgctgttagggagtcatgagacctttcctgtaatcatgagtaccatgatactctatagtatcaccctaaagtgtgacacaggtagagaagcaagttgtcccttcaggctctctgtaatcctttataggcataaagtaatttttaaaccccattaaaattcaaaaatgagaataatagctaccatttattgaatgcatactgggtgccaaattctgtattaagtgccttttatgccttatctcatataatcctcacattcaactcttgaggcagtaggtgcttattatctcagttttaaaaccagaatttaggaagtctaatttaaatttacacaactaggaaggggaag

SEQ ID NO: 30121 - DNA, 1031 bp, Homo sapiens
ttgaaacagatgtgacagaaggtttctataacatgtaaaacaactagtaaccaacagaaaaaacatctgtaaccaaataaagcaatagatcagccaggaacggtgctcacacttgtaatctcagcactttgggaggtcgaggcaggaggatcacttgattccaggagtttgcgaccagcctgagcaacacagggaccctgtctctgcaaaaaaattaaaaaattagctgggcatggtggcccgtgcctgtagtcccagctactcaggaggctgaggcatgaggattgcttgagcccaggaggtcgatgctgcagtgagccctaattatgccactgcactgtaggctgggcgatggaatgagaccctgtctcagagaaagaaaaaaattaatacgggtgaaagacaagaggcaacacaggctgaaaaatacaaattcccaaacatgaaaagatgcttagctgcagtggtatttaaagaagtgtgaattaaaatcagtggagacttacagtttaatagacatactctgttctgttccttttttttttttttttttctttgagacagtctcattctgtcacccaggctggaatgcagtggtgcgatctcggctcactgcaacctctgccctctagggccaagcaattctcctacctcagcctcccgagtaactgggattacaggcgccctccactacgcccggctaattttttttttttttttttgagacggagtcttgctctgtcactcaggctggagtgcagtggtgcgatctcggcttactgcaagctctgcctcctgggttcccgccattctcctgcctcagcctcccgagtagctgggactacacgcgcccgccaccacgcccggctaattttttgtatttttagtagagacggggtttcaccatgttagcgaggatggtctccatctcctgacctcgtgatccgcccacctcggcctcccaaagtgctgggattacaggcgtgagccactgcgcccagcccaatgcctggctaatttttgtgttttta

SEQ ID NO: 30122 - DNA, 1031 bp, Homo sapiens
gtaaagatgactttcggttgccataacttcatgaacacacacaatttgtgctgctaataggaaacttgccaccagtaatatctttgtgcttttcctcctcctaaaaaaaaactttagggtaacctaaaaaacagtaaaaacaagcccaaaacactaataaaatcagaggacaaatcccaatacgagtaattgtaaactccaaataaaattccataaaatttgttttatttagtcaggacaggaggtatgctgaacaaagtagtttgtaccttcagaaataaattcattttggatttaaaaaaattaacttgtttatgctaaggaggacattttgtcctgaatatctggtacatattatttcagacttggcagaggcaaggcttatatttacctgggcagtgtataaatatgggaaaagatctgctaaacaaaaatagtcccaatattttaattatgtatgatccttttaccttaaaacttatctggcacactttctggctatcggtgcttgaaggtatggattattattctacgttttttagttccattccatcgtgggccagtttgttttcatctgttgcatcttcgtatctagccatttggatcagttttcatggccttagcaataagaaaagagaagagaatatggatgaatccatgtaaattgattaccacaactaggaaaagaagtcagaacggaagtcctcacaataatggtttaaaatatccactttttcattaatattgcatggccttctctatacacaattagttttgatcagagaagttttattgtattttttagcactgtgtagtatgttctttattaaaagtcatatatggaagtgcaactataataagttacattcaggagcaataagtaacagtacagaaacatttgtgtttagagaaaagactttttgcagggcagagattagttttgcaaattcatattgattgactccggtttgttctggtatgtgagaatttggatgtcattataagataactacttgggattccacctgcag

SEQ ID NO: 30123 - DNA, 1026 bp, Homo sapiens
tggcgtgaacctgggagacggagcttgcaataagccgagatcgcaccactgcactccagcctggacgacagagcgagactccgtcttaaaaaaaaaaaaaaaaaaaatttgtgtaggtgtggggtcttgatgtcctgcccaagctgatctcaaacttctggcctcaagcaatcctcccaccttggcctcccaaagcactgggattatagttgtgagccaccgtgcctaacccagaacatttttattactacgaaagatccctcatattgccctcttatagccatacccacttccactcctgctcctgccccttatttaacccttggttacgactaatctctttttaatttctataattttgtctttcaaaaatgttatataaatggaatcatacagcatgtaaccttttgggattgatttttttcattcagtataattcttggaaaattcatttaagtttgctgagtaaatcaattgttgttcctttttattggtgagtattattccatggtatgattgtacctcagtttaatcattcaccttttgtaggacatctagctttattccattccagtttggggctgttacaaataaagctgctagaaatattcacaggtatttatgtgcacataaatctttgtctctcaggatgaacgtccaacagtgctgcatagtaggggagttacatgtctaatattttaagaaactgccaaggccaggcgtggtggctcacgtctgtaatcccagcacttagggcggccgaggcgagcggatcacgaggtcaggagttcaagaccagcctggccaacatagtgaaaccctgtctatactaaaaatacaaaaaattagccaggcatggtggcgtgcacctgtagtcccagctactctggaggctgaggcaggagaatcgtttgaacccaggaggcagaggttgtggtgagccgaaatcgtgccactgccccccagcctgggcgacagagcgagactccgtctcaaaaaaaaaaaaaaacagaagaaaagaaactg

SEQ ID NO: 30124 - DNA, 1025 bp, Homo sapiens
caggcacctgtaatcccagctacacggggggctgaggcaggagaatcacttgaacccgggaggcggaggttgtggtgagccgagattgtgccactgcactctagcctgggcgacagagcaagactctgtctcaaaaaaatcaatataataggcttggcaggtggctcacacctgtaatcccagcactttgggaggccaaggcaggtggatcacctgaggtcaagagttcgagatcagcctggccaccatggtgaaactctgtctctactaaaaatgcaaaaaaattaagcgggtgtactggcgcatgcctgtaatcccagctattaggaggctgaagcaggagaatcgcttgaacccaggaggtggaggtggaggttgcagtgagcccagatggtgccattgcactccagcctgggcaacaagagtgaaactccgtctcaataaataaataaataaataaataaaataaaaataattttacgtgtttcttttaatgttattttttaaacgtgtctgttagaaaaatttaaattacatttatggcttcaattatatttcttccttttttttttgtcttttacaaaaaaatctgtaccacaaactttcactacaccacacacaaacttctggcctcaagcaattctcccacgtcagcctcctggataactaagaccacaggcatgggctgggctcggtggctcacgcctgtaatcccagcactttgggaggccgagacgggcagatcacgaggtcaagagatggagaccatcctggccaacatggtgaaaccccgtctctactaaaaatacaaaaattagctgggcgtagtggcgcgcccatgtagtcccagctcctcgggaggctgaggcgggagaattgcttgagtgcaggaggcaggggttgcagtgaaccgagattgtgccactgcactccagcccagcgacagagcaagactccgtcccaacgctccccccacctccaaaaaaaaagactgcaggcatgtaccgccatgcccagctactttt

SEQ ID NO: 30125 - DNA, 1029 bp, Homo sapiens
tgagccaagatcgcaccactgcactccaccctgagcgacagagcaagactccatctcaaaaacaaaaaagagtaaagaagtaatttcatagatttagtcatataacaatatttcttttttctttttctttttttttgagacagagtctcactctgttgcccaggctggagtgcactggcgcaatcttggctcctccaacctccgcctcctgggttcaagcgattctcctgtctcagcctcctgagtagctgggattataggcatgcaccaccaggcccggctaatttttgtatttttagcagagactgggtttcaccatgttggtcaggctggtctcgaactcctgacctcgtgatctgcctacctcagcctcccagagtgctgggattacaggcgtgagccaccgggcccagctatataacaatatttcattgttgcatagtggtttaataactgtcatgggtatgaactgactcttacatgttgcttattatagaacatctttgttattcgttctgagattgtgatattagctgaacttaatggaggctattcaagagtctgataaagagtgtaacagaactgaaaaaggtaggaaataatgttggagccaacatgggagatgtctgtacaagaaattaaaatcaaagcatacaaaatttcaatgaaaaaaaaattttttttgagacagggtcttgctctgtcgcccaggctagagtgcagtggcacaatcttggctcattgcagcctctacttcccaggttcaagcagccctcccacctctgcgtcccaagtagctgggactacagatgtgcaccaccatgctctgctaatttttaattttttttttttgtagagacagagtctcactgtatcgcccaggctggtctcaaactgctgagctcaagcaattctcccacatcagcctcccaatgtgctgagattataagcgtgagctacagcacctggcctgaaaatgaaattttaatttaattggtcatttctaaaatgggaggccacaaaagggat

SEQ ID NO: 30126 - DNA, 1047 bp, Homo sapiens
cctcccatggtagtataaggcataaacctcaatttcgttatgcttctcaaggaccactctacttttctgtgttgttaagagttgaggggctgcctttctaagattctaggaaccaaattctagggtagttttctaagattctaggaaccaaaagttagcaagtgaagaggaaacagaatacttttgaatttgcccagctgtgctttttataggaagagccatttctagtcagaggatttcagaacatttcaaaactctgtggtgatatactggttacattcttccttagactaaaattacaacctgaatgcacttaatgatacatatgtgtattgtaatttgtaaacataactcaaaaccctgtatctgagtgaggtcatttgtggttagccattcagacttcatttctatttgacaagggtttattttaagattgctttgtggagcagttgtttaacattcaagtgatctattagtattaagtctttaaccagacttgttttaaatgagctgtctgtgaagtagaaaaccaaatattatagaaacttagatttccaatccaacttagcgaaatcaatgtaacttaaacgttgtcttcacatatgtttgtttaacctgttttttttccttcagtattcctttagaagaatagtaactgtgtgaataaaactttttagttactcttgatactatggtttagcaagaactgtagacttaattggttgagaaaagaacatttaaagtaaatgaatgctttagtaagttaattatttcttagcatatcacaaatatatgtagaaagaataagatctcattctatagctttattcctaggttattaaaagcaaacttctatggaagttagttctcattaggctatatatatatagtgtgtgtgtgtgtgtgtgtgtgtatttatctatacatatatacatacatacatacatacaggctatgtattgtaatccattggttattttgttggggatgtgggtcaattggatgaaagctaaagatgacttatgtaaatagccaaactgtgtttca

SEQ ID NO: 30127 - DNA, 1069 bp, Homo sapiens
cctcagccccccaagtagctgggactacaggcatgcaccaccatgcccagctaatttttgtatttttttgtagagacggggtttcaccatggtacccaagctggtctcgaactcctgagctcaggcgatctgcccaccttggcctcccaaagtactagggttacaggcatgaaccaaccctcccagatgattgtttcttttatacagcccacctataacaagttctctacctgggctataccttagaatcactgggaagctttttaaaattccattgcctgggccatgccctacatcgcttaaatcagaatttctggggataagatggaggctttatgggattccagtatacagccaaggctgcagatgacagctcttctagatcatcttttacctccccagcaggattttcatgtcttgctttgtgtgtggcagtattgttctgtgctttgttttttaacgggaagtgtttttataggtaatactcagctggccttacagatcatcaaaaggaatcagctgctccctgcagtgaaaacacactctgaagtgagaaagaagccagtgtttcagcctgtccacccgatccagcccatccaaatgccggctttcaccactgtgcagagaaagtgatacttcacttttggaaaactgttacctgagacccaggggagaatttactggccattttagttgtatcacagcagaatgaataaaagatggtgaaggctgttaattttgagtcaattctacccctgacatttggccaaaagcttacttaaaattaaggatttactaagtcatcatcagctgtttttcttaatttcagccagactattaattttgagccattatgtaatatatgccataggcaattaaaacataattttatcagaagtcttttacacttttattgactattagattattttagcatctgaggttttgtgttaacgttcaaaaattgacaaagaacatcagcagtagatgaaatagccagttcagaagctgacctgggggtgaaggggagggaaagagagttgacgtgttttatgtctagttatgactg

SEQ ID NO: 30128 - DNA, 1045 bp, Homo sapiens
ttctacccctttggtaggactttctgtggtgctgtatttgttcatcaggagtcatacaatgtttggttttatcttttttcagatgctagtgtcgatgcttattgtctacatcattaatttattggggctgcaaagtggtgatactcttaattctttttcttcccacttagtggaatacttttataaacaggcacttcagttctatttgagtgcctagtgttatattttatataggaaaggtgggggaaatgcttgattctatccttttatttgccagttttagaaataatgagatatataaaggtatgatgagaaacaaaatatttacatagtttcaaatagtctttccactagataaatgttaattacaaaaggaaaaatgctaactataatagggcagtctggcagacaccacttaagcaaatgatcaaagttggcatcactggtaacaatacagatagacatcatatgcctgctcatgcgatgtagagcacaatatcatatctgtggcattcctgacaaaaatttataacccgaatctaatcatgaggaagtatcagatatacacacaaggacattctacaaagtaattggcctatttgcttttaaaaatattgaagttatgacagataaaggctgaggaagtgttccagattaatgggtactgaagagaagccatgacagccaaatgcagtatatgatcctgaattggatcctgggtcagatttttttttcttttgcattaggaccattaatgggacagttggcagattttgaataatatctgtagattagataatagtaatatattactgttaatttccttattttgataattatactgcatttgtaaaagaatattcttgtttgggggaaatatttgagaatttaagggtaaacgggcatcatgtctacaacctactctcaaacatttcagagaaaatgagagatatatatataatatattaaatatgtagagaaaacgataatgcaaatgcagtataatttagctttggcaaatttgggtgaagaatatgcaaaaatt

SEQ ID NO: 30129 - DNA, 1090 bp, Homo sapiens
aaaaaaaaaaagataagacaatattataaacaactttatgccaataaatttaagaagttagatgaaataaattccttgaaagtcacaacctaccaaaactcgcaaagaaatagataatctaaagaattctttttttttttaattttaaactccatcaagtcctggtaaactaaagatttctatacatattaaagaaattgaattggtggttacataacctttccttccaaaaacatgcaaaaccagatggtttcaatggtgaattctgtcaaacattaaaaaacaaaacaaacatcagattctacataaactcttccagaaatttgcttgtttgtttagagaatagggtctcactctgtcacccaggctggaatgtagtggtgtgatcatggcttactgcaacctcaacctcctgggctcaagcaatcctcctgactcagccttccaagcatctgggactacagatacatgccaccatgctcagataattgttttattttttttgtagtggcagggtcttattatgttgcccaggctggtctcaaactcctggcctcaagccatcctcctgccttacctcctgaactactggggttatagacatgaaccactgcatccagcctcatttaacttattcagtactcattatcagtccatattcaatttccatgttgtcattttgttttgtgattgtgatgcttgttctccagaagatatctcaggtgttaatgggaacaatattctctgagtttttatacattgataatagtttgtgccttttatacttgaaggtcaattttgctggatattaactagtggttcatattttcttttcttgattatcttaattatgctattccattttcttctggcataaagctttgctgtttaaaactctgatgatgatctaatctttattcctttatgtctctatatgcttttttatattgtttatatatccttgatatcctctttaatttttttttgctttttacttattgtgaaatatttaattgataaataaagattgaatatattcaaggtatacatgacaacatgatgatttaatatatgtatatattctataatg

SEQ ID NO: 30130 - DNA, 1032 bp, Homo sapiens
agcccgccttatcctagcagtaggggtatgtttctgttctattccattccattccctattttgtttactggagggggctcccttaccattggtcttggtgacttttaactccagcctcagaaaggtcttacttgctcattattttccatgactacatctgaagtggatgttagggaatatgcccttactggggactgtacatgttgaaaatccctaatccaaaaatcagaaatctgaaatgctccaaaatctgaaacttttttgagcacagacatgaaactcaaaggaaatcattggagcattttagatttcagatttttggattagggatactcagcccatacttatttcacagccatttcttacctgtgtagttttgggaaccttaggattagttgataatcacagcatgttttgggccaggtttctgggttttttttgtttttttgacagaatttaagaacttagtagtcttctaattaccacgctctaaattcattcttagactgtagccccagacgtcttttgttttgttttgttttgtttcctgttccccatggctgtttctcactggtatctatcttgagacatctgaaacataggtgtgggatgaaggagagcaactttaatctgatctttgctacaggtcttggttgttctgtttaacagagatttgcagctcaaagtgcttttcaatcttatttttactatgtggcatttagaaatagttgacttttctaacaatctgaggctctaagtttctcttttctcttcccttttatttctgcttgcaaaccaactagttatttgttgagtactctttcttttaatgccttgataaatataggaaggagaaaccattatttgctaaccttttggcacttcgtaatctcttctctagatctgcattctttgtctgctgtccagataatcataagcaattatattacataacatgtctttatcttgccagcttcagatgcatgtttcctgtgctgttacccactagatggacacactagacagatgtca

SEQ ID NO: 30131 - DNA, 1031 bp, Homo sapiens
tattacaaagacttctgcttctacttcagaagaacatgaaagacttttgctcccatgataatcataaaagttaccaagttttaaaatcatacttgttatagggcaagtaaagagcagcagacaagaggaggtctgaaaagtctgaatttcacagaaaaataaggccttcataaatgagtagagagccacagcagcttcatacctaggggtgggtgcctggtcatggtacaagtgggtctgacttagacactaaatcacccatgccctagaggcccaaatgcaaagaggaatcatttagcctagaaattcttccccttccccaccccaccaacccatagagatttctctagagagaaatcgtctagttcttcacattctcgcagagattgattcagtgtacttgccacatttgaaccaaaaagcaaacaaaaagtatcgaaactgcagctaaacccttctatatcacttactaacaagattttttttttaatatagtggctcaagggtttgggtattgagccaaacacagctgatctaagtgtacttttagctgtgacccagctccagctcaactctagaaggattacaaatgagcagacactaaccttaacttccggacagagggaagggcttgtactctgggaaataacaagccaaaataaaattatactacattcttaactattctgtctggaatgtgttctaaaattatgagctacacaaattagcagaaaaatgtgacctattaacaagagaaaatagtcaatgtagtctgatgttttggtgacccagttttggaatttagtagatgagggccttaaaacatctgtgacaaatatgttaaataatttacaggaaagatggatgtaaggattgaagagatgagatatttcaagggattcatggaagttctaaaagaatcaaatagaatttctataactgaaaaatctcaaattttaaaaatcattgaataggcatttcagcaattattcactacacaagaaaggattagtgaacttgaagacaggtta

SEQ ID NO: 30132 - DNA, 1364 bp, Homo sapiens
gttgatatatagattcaccaaaatccaaatcaaaattttactaaattactttgtgagcaacaggagcaacaagaactcttattcattgttggtgaggattcaaaatggtaccgccagtttagaatacagcttggcagtttcttacaaagctaaccataaatgtatcatttagtcaagcggtcgtatatttaagtcacaaaactggttttgtggatgttcgtaaaacctgcttggaaaagcaagctaggtgcagtggcttgtgcctataatcccagcaacacaggaggctgaagcaagaggatcacttgaggccaggagtttgagactgtcctgggcaacatagtgggacccccatcacttaaaaaaaaaaaaaaaaaaagttaatatggagaagccaaagactgagaagaaccagcacagtactgaataagaaaaaagtcagaggactgacactattggactaattttaagacttagtataaagctccagtaatcgagacatgtagcattggtgaaagaatagattaatggaccaatgaaacagaatagagagcctaaaagtagagccacataaatagtcaactgatctttgacaaaggagcaaaagcaagtcaatggagaaagtatacatttttttcgacaaatggtgttggaaaaattggacatctgtatttaaaaagatgaaggtagacacagacctttcacaaatatcaactcaaaatggatcatatacctaaaagtaaaacacaaaatttctagaagaagtgtaggagaaaatctaggtgaccttagatttggcaatgaacttttagatacaacaccaaaaacactactcatgaaaggaaaagtgagtaaattggactttattaaaatttaaaacatcttctctgagaaaggcactattaagagaatgaaaaccacagactgagagaaaatatttgccaaatgtataataaaggacttgtgtgcaatatatgtaaagaacttttaaaactcagcagtgagaaaatcagctgggctctgtggctcacgcctgtaatcccaacactttgggaggccaaggtgggcagatcacttaaggtcaggagttcaagactagcctggccaaaatggtaaaaatccgtctctactaaaaatacaaaaattagctgggtgtggtaatgtgtgtctgtaatcccagctactgaggaggctgaggcagagaattgcttgaatacgggaggcggtggttgcagtgagctgagatcacaccactgcactccagcctgggcaacacagtgagactctgtctcaaaacaaaacaaaacaaaacaaaacaaaacaaaaaaacccatctcaatagtgagaaataactcaatttttta

SEQ ID NO: 30133 - DNA, 1050 bp, Homo sapiens
aaaaggaaaacacatccagtgactcacctcataaaaagggccaaagcctgccactatccctagagtgccccagtgattggctgcatcctaaagggctggggggaggctaagccagttttccttggcttgtattccatattatcactaggatgcctgaaactcttggttataagttcttccaaagtgattcccaactctctgaaaatgattctcataagtattttcaaaagaggtcacagaatttttctacagttctacaattacatgtataaaagtaaataccagtctgaaaaggaaaaacaaatgatttgatttacctgatcactaacaagaatgtgaataccggtgggaccctgtctgtaaacctgattaatttggtggagagggatattaaacaccagcgcaagttttcgagcaacttctgaggcaatcatttcttccaagtagattgcatgataaactgaaattaaaaaaaaaaaaagaaaagcattttaacagtaatctttgatctgttttctgcctgatctgtaggatctgtacgaaggtcacacctttcaaagtaccaaaaaagtaaaaaaacattttaaatgggaataaactatttctttcccccatcttactaccttgaaatcttgaactaccaatctaaaacgtaagaatacattatttatatccacaaatataatttaataaacattaacagaaatccctggacaaaaagatttgaggtttgaatttttcttcatatttttattcaatgaatatagtttcatgtattcaaaatttaaaaacaggaattggctgcaaatggacatgggggatcttcttgaaataatggaactcaaactgaattttgacaatggctgccaaactctctaaattggctaaaataccattatatacttacaatgggaggactttatggtatgtaaattatgcctgaagaaagctgtttttaaaaataatatatacttcatgtatttctagcaatatacaaaaagaaccctaaaagagtcatagttctttttgtttatttttttaagacagtgt

SEQ ID NO: 30134 - DNA, 1082 bp, Homo sapiens
ttttgtggtgatcagtttctttagagagaaagcttctagtcttccatgaaaaagtctgcttatcagctttctaaattttatcctggggaatggaggttggggatcttaacaatcatgtatgcagtctatcaggtacatctatttttagtatgacacctgcattagggttaggttcatttctgtgtggtagatcccaaattatctgagttaagattttattttgtaaaaagttggcaggtaggtagttctggtagcccagggctggtgtagtgtttctgtggagttaattggggctcagattcctttcagctttctgctgtttgaaacctagaatattgttctcaggtccaggttgcaatcatatccaagttccaggtagtaggatggagaaaggcacggggctcgccctttagggtgtttcctggcaactgttccacaacaccctgcctatatgttaccggccattttgtgtgtccttctgataggatgctaggaaaaggaattttcattatgagcagctgtatactcagctaaagggacacagttttgttaataaggaataggatagactgataatgatgtagtcaattagcactccctaccccacttagcagtgcttgatctccaccttagttatatttgatatctctgacatttttttcttttttcttttttttttttttgaggtggagttttgctcttgttacccaggctggagtgcagtggcatgatctcggctcaccacaacctccgcctctcgggttcaaacgattctcctgcctcagcctcctgagtagctgggatttacaggcatgaaccactctgcctggctaattttgtatttttggtagagacgggctttctccatgttggtcaggctggtctggaactcctgacctcgggtgatccacccgcctcggcctcccaaagtgctgggattacaggcgtgagccactgtgcccggccaatctctgacgtttttttgagagtgaacctaccttcagagtagaggatctgggagcctgaagttttctttgaaggattttcaaccataccttctcgttccagcctcacattgaact

SEQ ID NO: 30135 - DNA, 1156 bp, Homo sapiens
aatctccttcaatctggaccagttcttcagtttttctcgtctttcatgaccttgacatttttgaagagtacaggctaattactttttagaattttcctcaataaaggcttgtctcattttcttgtgatttctgcatttttgcataggagtaccagcgaagtgatgctgtgttctttctagtgcatatcaggaaaaataagatgtggatttgttctgtagtggtaatgtttatttttatcgcttggttaagatggtgtttgccaggtttcttgaccttacagttaataagcttgttgtactaattagtaaatattttgtggggagatactttgggactatgtaatatcctgtttcattacacacttttcattattttatcatttattgatgaatcttaccagaattagatattatactctgaaaggtaccaaatggtaatttttctaatttcatctagactatggtaccgtaggatagagttttccctattcacctgtttatttacctccgaatggtggtcttttcctcaatgggctcttattttttactgttattttatttagattggttcagtgcttagccattgggagccccttaaagctacctcctgtgcccttttgacatgtcctcatcattttttgagtacttccttaactttctggcatagcaagatgttttagacttgaatattgaattttttcagtctcagcccttgagtcagccatttctctaaggagcacttggctcattttaatgcaaaagattatctgggcagtaggtgtgcttattgctactgtgaagtgttactgcttataggccctcttagcatatacatttaggaaatacatagttacacatttatacttgtttttatttctctctgctacctttaaaaaatgagttaaaaactagctgggtgtggtgacatgcacctgtagtcctggcagctcaggggctaaagtgggcagattgcttgagcctgggagttcaaggttaccgtgtactgtgattgtgctactgtactgcagcctgggcaacagaatgataccctgtctgtaaacaaacaaaaaaagttcacattgatatctccagttccagtttaaaactgtggagttattctaaccttctgccttctcatgtttgtggattttttttt

SEQ ID NO: 30136 - DNA, 1031 bp, Homo sapiens
cagtttaccagagatactaatttgtctaatggatacaaacttatttattttagtaagaaatagtatttttaagaaatattttggttttcagagcagatgttagtttgcttttagccaataacagttgataaatatttttctgtggtggtgggtatgactttttgttcatagtttttcactgcatatattttttaagcttctggtttacgtattaaaaaactttttttcatataaaatagctgctcaaagtaagcatgaataatttttgtatcattttaaaccagttgtaattacataaatgcatgtaatatttagctctggtaattattaattctgctctattttttagatattatgatcagatttgttctattgaacccaaattcccattttctgaaaatcaggtaagtcattaattctgtcttaaaattatatggtaatagcacccatttccttctgccaatatcttcactgtctttagagttttatgagatagtgttataaaaataggagcttttagatctgtctaatgcgaatatatgtgcttctgaagaaagaatctcctggaattctgttcatgtcattcttcagtcacttctggggctcatgtagagcaatggtttgtttttctttggacttcattttatgtcagtaggatctgttgactgattaatctgctgtgtcctttcctttgactttttcagaattaggaaggaaactgcacaattcaggaattattagtctcagtttatgtgctttaaaaattattcgcacaagttacatttgcatgtaaaagttgcaaatgctgttttgattaaatgttaattacatgaatgtcaactattttctccttaaaggctagatgttgaaaatgctgataatttcttatagttttattttggagattggataaagattttaaaattagtgatacttttaaattttaaaatagttataagaaaagtactttaaacattcttgtactaaagtttttacaggtgaaataattatatgttgagatttcctttaat

SEQ ID NO: 30137 - DNA, 1048 bp, Homo sapiens
tgtagggcatttctttttggcccttttagtttgaacacttatatctcccttaagctctgggaagttttcttatatttctttgataattttcttgtctcttttgtctctctttctttggaatactttattagatgttggttgttctgagttgttcactcgtaatttttatattttttcttgactttctgttctttctgagattgcctagatattaattttaaaacttgaaaaaaaattttttttccttcctccgcccttaaaacttttgaaaaaaatttaacaatcaagtttttaatttttaggagctttgtcttattaatttaaaaaatccttttcttttatggatgtactgtctttgaatctctttaaggaatgctaattgtgatatttggaatataatcttttatgactggaattgtctttatttattttgggcttagtttttcagttcgcattgctcttcctttattttgctgcaggcttttttcacaacctggttattttggattttccatatgtttaataaagtaggttagagtagctggtgtttatgtctgctttagtttagaatgaggagactagaactggtttggaagcaagttgaaaactggcctttattacctaggaggccaccaaagtactgtaacaaggagggctttactttatggtacaactctgtggcacaaacatacaaatgtagtgttgttctgattctcctagattggtttgttcagtgttttttgtaaggagccttattttgcctagtggtcaatgccttgcacattatgcaagatcttgaattccaaactgattgaattctgtgagtaatagggagctattgtagattcttttttaaaagttatttttcaattgtgatacaatatacacaatatgccttcttaaccattttaagtgtacacttcagtggtattaagtacatttacattattgtgcaaacatcatctcgagaactctttttcatcttacaaaacaaactctgcccagtaaatgataacttcacagactgggggcggtggcttatgcctgt

SEQ ID NO: 30138 - DNA, 1026 bp, Homo sapiens
tttttttaaggctagcatatttaaattgtaagtttagtttctttattttctggtttctgggactattagatttaagtaagcccatatttagtctctataaatcagtcagagaaagaactccttttgaaatttaatctcatttttaagtacccctgaaaaaggaaactatttcagattcacacaatgggagggaggtaaatacttttcctcagttatagacacatagattttgcagctttagttttacagctttagttataggttaaagttaagacagaagttgggtgtgatggcacctgcctgtagtccagctacttgggaggttgaggtgggaggatcgtttgaagctagtagtttgaggccagcctggacaatatagtgacaccccttctcaaaaaaaagttaacacagaacacactcactgatccatatttcagaggacagttattctttccggtaggcatgaaatattttttaattgatttgcactcccaagaagacaaacagaacagacaagaagttgaccaataaaccatattcgctgtagtttctcacttagtagagaataataccccatgattctgacggagatcttaggaggtcacactattaaaccaactttctagttatggctactagcaaagagaaataacttattggtcctgtgcaaaccagaaatgaaaataaaatcacaatcaggaaaatcaaaacaatagataaaatggcagcaaaggtaaaataactgcttggaatcaatcacttctggggccaagaaaaattgtacctgagcttaatacagctcatgagttgcacttcttgaacagtgcagtttatgtggccccagaagatggatcttcttggtcatcttggtggatcttcaaagatgatgaaatacagttttcaaaaagatacagaaacacacacacacacacacacagatataaaaacatgactcacatagaatgactacatgtcaaagatttatttgactcattaatgagggacctagcaagattgtaaatctga

SEQ ID NO: 30139 - DNA, 1036 bp, Homo sapiens
tagcctctagctgagattccaaggagaatattctgttactgggaaagggtgattatatgtttatttagcaaacacaaagtgtttaccatgtgccaggcactctttaagcactttacaaatattagctcatttgttttcagaagtgccctgagatgggtactgttattatccctatttgatgaggatactgatgcacagagtggttaagtaatttcctcaaggtcacatagctaggaagtgttggagccagaaatggaatcctgctgccgtgacccactcagtcaattttttttttttttttgagaccgagtcttgctctgttgcccaggctgtggtgcagtggtgcaatctcggctcactgcaacctccgcctcctgggttcagacgattctcctgcctcagcctccccagtagctgggactacaggctcctaccattacactggctaatttttgtatttttagtagagatggggttttgccaagttggccagactggtcttgaactcctgacctcaggtgagccacctgcctcggcctcccaaagtgctgggattacaggccttagccactgctcccggcccctcattcagtttaatcaacagatgaacagtgtcactgaagatccctcaaactcagtgatgaacacatctgaaaaagaaagaaaattaagttcaaagaagaaacttttcattgttgccgttgtccatgaatgtagtgatctaaaaattctctttatcattgtgctttaaatagtgatttagttttgatctttaaatgtcaatagacaataaatatttatagactatgtgaatattggaaagaaaatataaacagtcacttttacagttcgggtttttgtctaaaaattttgttgtaatttctcttcctaattttagatctgtttgagaagatggttcccgtgtcagtacagcagtctttggctgcctataatcagaggaaagccgatttggttaacagatcaattgctcagatgagagaagccaccactttggcaaatgggtaggtagagctta

SEQ ID NO: 30140 - DNA, 1093 bp, Homo sapiens
aggaagtatgttacgaggatttagatgaagtacttaaatttcagtaattttggagtagttctcttcagaggcttcttaagagattggcacattatgagaacagagtggataggcagaaaaagtaaacgtgtaggatcggagaagggctgagtagtggctgtgtctagagagttatccgaggtacagaggatctgcaaagacagcttttactcctgatttcttgtgacagaaggtttacagacatgttgagaatggctggaatctgtttgtttatttatttattcactaagtgtttgaaggcctactattccagaacagtgctgagcaccttggtccctaacataaagagacaaaaaactgctctgggttacctttagtgtagagtaaatgcacaggtactgggcacctctcaaagggaagagaaggctacatagttgaatgtgcattgaacctggatctaacgggggaacccaatggaacaaggaatgtgagttattgttttgaggacataggggagaaaaggaggtggtcagaagattaacttgtgaagaacaacgaacctgaagaagaaactgcagacccttcgaacagcaataaattttggtaccttttttattttagaaaaagatttctggttagtactttctttgtattctttttggtgtcttgtacatgactcagaattatgtggctttcgtcctttgattcttctgctttcagtagaaaagcaaaaatggtttgtgctaagcaaaatctgcattagtatgcactgatatattgctattttattcagttatatcagttttattaatccttacttgtgttacacaggagaaaggaacttttatagtcaatacgaagtaattttatggaagctagattttcttgacggggtaaccacaaaaatttcagtactctctgtatattcgtttgtcatgtgccttaatcaaataaggcaagcatcaggtttatcaaagctatttcagactggttataatagttgatgacggattttagccagaatttttatgataaaaactcagttttttgattgctgattagagtgatgcaaatgtacatgttttattaaaaa

SEQ ID NO: 30141 - DNA, 1031 bp, Homo sapiens
tcaagtttctgcgttcgttgctgtagacatagttgcttatttgccttttctgaaaataaaatgacaaggttataaaagtaaaatagaagattttgttgagggcatttctttctttcttttttttttttgagacggagtcttgctctgtcacccaggctggagagcagtggcgcaatcttggctcactgcaacctctgcctcctgggttcaagcaattctcctgtctcagcctcccgagtagctgggactacaggcatgtgctactgtgcccagctaatttttgtatttttagtagagacggggtttcaccatgttggcctggatggtctcgatcgcttgaccttgtgatccacccaccttggcctcccaaagtgctgggattacaggcgtgagctaccgcgcccggcccattgagggcatttcttgtctcatattgtacttggtgctgttaaatgccacagaggattttaaatctaaaactggggtcaggaagctgtggcttgtgggccaaatccagcctgcctcttctctttgtatgttctgtgagctaagaatgagttttacatttttaaaatgtaaaactctactttctacttcattttttaaatggctgaaaaaaagtcaaaagaatgttttaatatgtgggcattatataaaattgagatttcagtgttaatacatttttgttgaaacatagctgcgctcattcatttacacattgtctttcacactacaaagcagagttaaaagagttgcaacagagactgtggcctactgaggcaaaaatatttcctgtttggtcctttaccaaaaaagtttttaagttcctgatctgaaagacaaagtattgacaacctaggtgatgccattcctgccattctgtttgacctcatctcctgttctgccttttgtttactatgcttcagccagagtggcgtttttttctttcctttgatcctgccaagcttgtgcctgccacaggacttttacatttgcgtttccttctgtgcagggctttcttcccatttccg

SEQ ID NO: 30142 - DNA, 1028 bp, Homo sapiens
gggtgggcagtcttttaggattacttgcccagtttgacacgtttcttactctagctgtaactgtgatctctgaaaatgtttactttttcccccagtcttcagaaatataaaaaagatacaacttcattttattaaacaataggaagaaagaggatttagattctagtcaagaataaaaatgtagtatattttgtttttttcagtttttgttatattgataaataattatacatattatggggtacatgtgatactttgatcatgaatacaatgtgtaataatcaaatcagggtaattaggatattcatcacatatttgtggggcacatgtgatattttgatacatgaatacaatgcataataatcaaatcaaggcaattaggatattcatctcaaacgtttatcatttctttgtgttgggaacattccaaatcttctagctattttgaaatatacaataaattatcattaactatcatcaccctatgctgctattaaacactagaacttatttattctctctgactgtatttttgtacctattatccaccctctcttcatccccaccccctactctttcttgactctagtaaccatcattctactctgtctccttgtttttagctcacacatatggaggagaacatgcaatatttgtctttctgtgcctggcttatttcacttatcatgatggcctccagttccatccatgttgctgcaaatgacagaatttcattatattttttatggctgaataatattccatggtgtatatatactacactatatccatttatctgctgatggacacttaggttgcattcatattttggctgttggaagtgctgcaataaacatgggaatacagatatctcttcagtatatggatatcctttctttaggatatatacccagcagtgggattgttggatcatattgtagatctagttttagttttttgagggacctccatactgttttccatagtcactgtactaatttgaaatgtagtatattttaaaataccat

SEQ ID NO: 30143 - DNA, 1074 bp, Homo sapiens
aaggaaggaaggaaggaaggaaggaaggaaggaaggaaggaaggagggaaggaagaaaggaaggagggaaggaagagaaaaagaaagagagagaaagaaagaaagagaggtaaagagaaagagagagggaaggaaggaaggaaggaaggaaggaaggaaggaaggaagaaaggaaggagggaaggaagagaaaaagagagagaaagaaagaaagaaagagaaagaaaggaaggaaggaaggaaagaaagaaagaaagaaaagaaagaaagaaagaaagagagaaagaaagaaaagagagaaggaagggagggagggaagaaaacagtcacccatcagatcatatcatctgacttgaaggagcctccttctgacatacaggttgctgttgctgtggaaggtattgagttcagattttctatcatcccttattcctcacctctagttgaggtctctaaaaagcagagcctgaggttcagaagcatataattcatggaaggtgtgctgtcaggagaaaaccctaggtaggatacagcaggagagagggctgaacaagaatgtggtctcacgtgaagtcttaccttggcctgacccacatggggtacagagtgcaccagagttgcccctcccttaaggaaatatggcaggactttttttttaactttgtgtcagctagtctttggctctagaaatggaagagggaggggagtacaatctcccaaaggggacagttcccattagttgagggtgattctctaaaggaagagagatctgcctgccaaagccactgggagacagggcaagggccccaacagggagggtctggattgggcacccacagcaccctctacagtgggttcctgtctgtgcctctttagccagagcagtcgtttcccttttccatgctccaatattcggaattttattacaatttttgcttcaaaagaagagtgctgcatttgacaatgggttgatagacacctgacataagtctataagggcttttggccctaggaactgggtggttacccctagcacgacactgagtaacatagcagaaagtgtgaactatagat

SEQ ID NO: 30144 - DNA, 1033 bp, Homo sapiens
aattttttaatagaaaaaaattttaaaaattcagtagaaaaaaagttatatgttcaaattgaaaggactcaataaggaatgagcaatgaaagtaaaatagaagtgccacacagtaaaagcaaaaaatgtaaaaatgatatgtgaaaaaatgaaaaataaaatggaaagaattctgcatacacaattagtaaaatcatgtgacatttataaactacaaaaatagataaaatccttaatatttccagaaattaagaaacaggtgaccttatcatgatgaaactcagaggggcatcaaactgagagtaaaagtcaagggtgccatggtttcagattctgagcagaaagtctattcattctggaatctggaatccaatactgagtcatttgaatgactctgaaaaaaacaagtcatcaacatgtctcccaaaagagcatagatagaaattaaatcctggataaagcactaacaaagcaattttgcacagtgactctgacttgaaaggtattttatattttatcttgtaacacaactctgtatgctacaagctcaaaatacaaaacacaaattccattaaattcctttacaccaacaatacctatgacacacctatgaatatctctaacaagaaatatgtaggtcctatgtgaaaaaacatgcaagcattatggaaaaacaaataaggagatctaaacaaatggaaaaacatgacatttagatgagaagactcaatattgtaaagatgtcaatcaccctaaataaatatgtaagctcaagttgattccaatcatataccaacaagtcttttttaaaatgcaaattgacaaattcagtctaccattcttctgaggaaattaatggcagattacttaaactttctaaggcacattctcttcccgtgtagtattgggatcataatgaaacctatttcaaagggtaattgtgagaattaaatgagataatacatgcaaagcacttagcacaattaccagctgataatagcacccacaaatcttagtttacatcatattatgc

SEQ ID NO: 30145 - DNA, 1028 bp, Homo sapiens
aacatgcttatttcctaaataatcatctatgattatttaaggtgaggagagtctcttttgaagaattacaatagttgtagtcatactatgagaattcaataatttttggtactgtaaacttctgacaggatactttaacatgctggtaggaaaagagatgtctcttttcaccacacgacctgacacatgatgattcccccaccgacagatttgggtcttctttcttcatttaacccagaagctctctcttatcttgtttttgaacagtgcttatgccatagtcattctgaagtcttcttcgggatccaattattcatttatatcttcctgaatttctttaatgattttcaacttattgtacctttactgtgcattccatgaaagcttcccaaacatacccacacataaccagattacctttctgcagacagtctcactttcacctttcctactgtttcaaattttactatgccattatattactggttgctacaaattctttcctgaactcttcaagacccctacttttctaatctagtttggtcatctcagctttcataccttattttgaagattatgtttattcatatttattgagagaaaaaaagtagagagtatataaaatttactttttattccaatagtaagcattttcatagttatgttcctctttactacctgagtgttatgatcctgacttcattttatgtttcagaagttttcactggcactagagcattgattgctttttatgttaatttatttctaaatgaaaaaagagtttcccaagatctacactttgtgcctaaatatagtgagaaaagtctcctatgatgactttagtattcatatggatgttttaagagtcatgttattcttgatcttactttccaggtctaggaaaaaaattttttaatcaaaattaaaaaataaatttcaaaggagtcatattattttttaagctataagagatgtcagtgtaagtacatatcaccagttgggtgatgaaacaacctcagagatcaaaa

SEQ ID NO: 30146 - DNA, 1050 bp, Homo sapiens
aagtgctgacagcttcttccagtttcctttgctgtgtagaagctttttagtttgatatctgagcatcttttttctgcagctctgggccatacatgtttattccaggcaaaagaaagaactcccatggatattcaattacaaaaagaaaccaccttaaaggtgaagtgacttgttgctgggtgaaaagaaaaactatgtactaaggactagggatgagaaagcagagtaaacaggagagacttttaaaaggccactgtggggatggacagagcaaggtgcaccatggtgcaagctgtcatcagagtccagaatcttccagttcctggagccagaatagaggggtagattaaactcaaacccagtcctgccagaatcttgtgcttttccaaacctgttttggtgcttttttataagtcccagaggcaaaggagaaatggtctagtttgtcatggccaaaacaagagggagggcagcaggaagagcagataaagtcaaaaggataatacaatatgtcctatgtcctacacacacacacacacacacacacacacacacacacacacacacacacacacacacacacacagaggttacttatccatatgcttcagacccaagcagacttgagagttcctggtttgtgtcctgtggatagtttagcgagatggattttgagccagacaatagactcttctgctttgctgtgtgcagagacaagtggctgttaagtgatcataagagagaaaggccagctttacacatgtagcctttgagcccatgagtttgtatacttaatatttccaatgattcaaattcaaaaggcaaattatatcaaaatccaatgtggtgggacacttttacagcacactggtaggactttaaggaggcaggggaggaggagcaggggcagaatcaaaggcaaaataggacctctttctgctcatctggcttagtggcaggggcgggggaaattccctctttactaggcactgccatcaccccacccacacagggacatttatgagcctcctcaagacggagggtgtcagt

SEQ ID NO: 30147 - DNA, 1030 bp, Homo sapiens
ggtcatatcagtgacatccaatatggcctggaagtcagggttctgcagttctccttaccctttgccaaggctcagttaaggggtaggatattcaaaatggtgggcaatattaacccttcttacaatcacacacaaggcttgttcttgttttcagaaaacctttatgtactcatgttctcatggtctagtccctatgactcattttcttcttttaaatggccacatttaggaacagtgcttgtatcggtcaaagatttccaccagaaagttgcctaaaagccaccctaaaaagtagttttaaagtgctgaaaagtttagaagttctttaaaaatggccatgttttactctcactcaggcatcttcagatcagctgagatttggctgatccagactcagctttgttattgcatcttctctctactccttatctcctgctctctccttgaaccagtgggctagtcacatcatgcacttctcatggcgaggacaactgggagcatgcaaagcctcttaaggccttgggccggaggtggcacactgtgacttagtctactggcatttcgttagccgaattaagttatgtggccaaatccatagtcaagacaggggcaaccccctagcccccacctgccgtctctagtagcaaggactgcaagccacctgacaaagggcttggatacagggaggggtggaaaatgggctcaatatgtaatctaccatttaggatgctctctggattactgatctttttttgtttggtagagtctgctaagtcttggcgctcccacccttctacttcacatctccatacggacttaatgcctagcatctgactgtcagcttggggttgctgggccgggggcgatggagggtctcatcacgtctcatgctcaacaatacttcagacacttcagcctctaacttagtttctgtgcctgcctggcttctgaatctgtgtcactttcaatttccacacacatttccaccaggccttttcaaggcagtgttattcataaataacccttaaat

SEQ ID NO: 30148 - DNA, 1022 bp, Homo sapiens
tataaagaaagaaaaaaaagaatcaacgagtctcactgctcttttcaaggacagaaacaaaataaaccaaatattaggctcctttcaggaaagaacaaaggggtttagaaaggggatatggagcagaagggaaggggagagaaagaaaaggcgggaggaaggaggtgagaagaggaaaagaaatggagatgaagtaggggctggtgtatgctctaacttcctaaaacaataaatagggtattttaattatctgataatggagcacaattgatctgcctctctcgctttcttgacccttcagacatagcattctgtctccatatagattacctaaagatttctttccttcaagccacacgttatcctcatattctagattttagggaaagactacctgctattatccccttagaatgacatcccagaaaagatattaaagctgtttgttttttcctttctactgggaaccaaaggctgtataatgatagccaagaagaatcaaacctcatctgtgcactttccagctgacagatacttctttaaaaataaaatgaacctgacaccctccgtgtacactcacagttcagtttacaaggactcacatttgcgccttcccaacacctgtgccttgaagatggaaaggccacacccttgccataagatccctgatcaataaaagtagaccaggaccccagtctcatccagtgcccatccatttctaattttcttagcttcttattgccagctaggcccttgcccttggacttgatgcctgaaactgctacttaccaggctctcagacctgttgtgttaagcaggcaccgtggcatgccctccagctaacctaaccttgccttcaacacactgctaccctttatgatcatctcttaagctatcccttcccagaaactttggtcacctaagcaagccaaagatgctcaacccagctcttcatggagacatgagagaaataggcagttaggtgtgtctgtcagcttcaatgctgaatgcccctgcctttg

SEQ ID NO: 30149 - DNA, 1045 bp, Homo sapiens
aattccagacacacatatatgctaatcttagaaagacatggatactatctcccctctccactccatccttaaacatctcatgactattaagaatgagaaagggaccaagtggcaagagaacatcttcatatgcatacaactttccagaaaataaaaatttgccaagttgtcagacactgcttgtatcttatcagtgtaagaaaaaaaaatacagaacttccttcctgtaaactgtttattttactattaatagtaattgactgaagtcttatatgatcaaattcagggaggggggaatattttttaagtcagccaaaggaaagaggctgtctctctcaaattacagctcatgatgtttgcaagtgctttggtgatttcttgaaccactgtgtagagatgatctttcaggaaagtaatgtttttcctgcccctaaaaagagacttgtattgtaggagccttttcagatcataccttagcagaaagaagtgacccacagaaacatattttcagtgactaaataatagaccagaaaggggagagtgtctgatcatttaaggtggtcttttgttatatttttagtcattccctagagttcaccaaattgacactatttagtaatatcacagcacatatattctgaatacatattttcacgttcttctgagacaagttgtgtttcatatattttatccctgttccatccaggaagaaatagaaatattgcccaggtcagaaggacaggaggagaaattatctgaggtggagttttggtgaagtttgaggtggacagaaagtagacacagcaatgaatcctggatgcacttaagagttttctttacttgaagctgcaaagccttttcctgcctgtgatattgctgattcctgccttcctgcctaaggttcagaccaagccatgacagacaaagttgagaggctgcctgccttttgactcattcttacttctgtgtgtaaaggctaggaatccacaggaataggacatctgcagctataaacacaaagaagatggagaccagttggaaaatg

SEQ ID NO: 30150 - DNA, 2029 bp, Homo sapiens
gtgactcttctttctgtacaaggtggactttgttttgctaacattggatttaaaatttttacacttataagtaagattgatctgtagtttctcttctttgcttcgagaaattttggtttcatttttagtgcaacttataaaattaattaagaagcttttttgttatattgtgcaacttcatagaagggaattctctcaatgatttgataaaaagctattcttacaattgtgtagacaaggtaccttttggcaggggttcctgaaataatttttcttttaatttcatcctcagtcattaggctagtaaagtcttctctctgtcctccttgcacctttgatggaatatattggagccgggctttgaatccaggaatgtgtggctctaaaatccatccaaaatcctgaaacacaagaagcatacgtctgtgtctataacaaaatctctcattttaattttttttaattttttttggtagtttttctttttttttttaattatactttaagttttcgggtacatgtatgtgcacatcgtgcaggttagttacatatatatacatgtgccatgttggtgtgctgaacccattaactcgtcattcaacattaggtatatctccaaatgctatccctcccccctccccccaccccacaacaggccccagtgtgcgatgttccccttcctgtgtccatgtgatctcattgttcaattcccacctatgagtgagaacatgcggtgtttggttttttgtccttgcgatagtttactgagaatgatggtttccagcttcatccatgtccctccctacaaaggacatgaactcatccttttttatggctgcatagtattccatgatgtatatgtgccacattctcttaatccagtctatcattgttggacatttgggttggttccaagtctttgctattgtgaatagtgccacagtaaacatacgtgtgcatgtgtctttatagcagcatgatttataatcctttgggtatatacccagtaatgggattgctgggtcaaatggtatttctagttctagatccctgaggaatcgccacactgacttgcacaatggttgaactagtttacagtcccaccaacagtgtaaaagtgttcctatttatgcacatcctctccagcacctgttgtttcctgactctttaatgatcgccattctaactggtgtgagatggtatctcattgtggttttgatttgcatttctctgatggccagtgatgatgagcattttttcatgtgtcttttggctgcataaatgtcttcttttgagaagtgtctgttcatattatttgcccactttttgatggggttgtttgtttttttcttgtaaacttgttggagttcattgtagattctggacattagcactttgtcagattatttttaatttatttttttatttcaatagattttcagggaacaggtggctttggttacataataagttctttagtggtgatttctgagattttggtgtacctattacttgagcagtgtacactgtaccaatgtgccgtcctttatccctcacccctgcaaactctttcccccaagtccccgaagtccaatgtatctttcttatgcctttgccttttcaaagcttagctcccacatattagtgagatcatatgatgtttggttttccattcctgagttatttccattcctgagttattggaacaatagtctccgattccatccaggttgctatgaatgacattattttgttcctttttatggttgagtagtattccatggtgtgtgtgtgtgtgtgtatttttttttttacacattttctttatccactagttgattgatgggcatttgggctggtcccacatttttgcagttgtgacttgtgcttctgtaaacatgcatgtgcacgtgtctttttcgtatcatgacttttcctcagggtaaatagccagtactgggattgctgaatcaagcagtacatctacttttagttctttacagagtctccacagttttccatagtgttt

SEQ ID NO: 30151 - DNA, 1062 bp, Homo sapiens
ccctgccttttccagcctggatgcagaaattcctcattcgataccacatagcagttttgtcaacagctgtctgatgaggtatcacttttacttccttcactctgggaattcatttatggctcttctttagttaggactatgcctgtgtgattcccacaaggcaccatgtgctcagctgccccaggattttccttcctaaataagtgccagtgttcaccatgcccccccttgccagacccacacacatctactaaagctcaccactggggtaaggattctttggcatcacatgagggaaactgtacttttagataatgcaaacaaccactgagcacttagcagtgccattagagagacaaattagagggtattggcttcgaggggaacttcatagcaggtcagcagcacagcagggccatcccagcccaactgtctggcactgcaagaccagcaactgaatttaaacagcaaccctaaagtttctcaatatctgactcaccagagacttgcatgataatgctttaagtgtgatcagctgctcagtcctgagtctgacctctgctttcccctttcccctgacactcttctcatcaacatcactgctggccttctcctcactaactgcgctggaaacatttggtccttggcccattgttgctctggaagcagagtgctagacttcacttaatgctcatgtgatcccaaagcagtgacctagcctctctctgcttcaatcacctcatctctaaaatgaagataataacaccaaatccatagggttcttatgatctttggatgacataatgaatgtaaatactatccatacattgatgattcaaacttcatcttcagtattaggcttccttgctgcctccagatgcctatcacctattggacattgccatctgaatgcagaatagtcatctttaagttaacctacccaaactttactcttgatcccctcacccagccacacattcagactggctcttcccacagttgtctctgctcagtaaataggaacttcattcaaccagttgattaggccaaagtctttgacat

SEQ ID NO: 30152 - DNA, 1103 bp, Homo sapiens
aaggatgtggggcaagtggaaatttcatacattgtttgtttgtttgttttgggacagtctcttgctctgttgcccaggctggaatgcagtggcatgatcttggctaactgcaacctctgtctcccaggatctagcaattctcctgcctcagcctcccaaatagctgggattacaggcatgcaccaccacgcctggctaatttttgtatttttttagtagagatggggtttcatcacgttgaccaggctggtcttgaactcctgacttcaggtgatctgcccgcctcagcctcctacagtgctgggattacaggcatgagccactgtgcccagcctactttcatacattgttaaaagcagtatcaaatgatacaaccatgttggagaactcttcagcaatatacactaaagctgaacacattcatgccccagaatccataaattccacttctacttatgtacccaggcacctaaaatactcttccttaatgggtttaggcctggggccacaaactcaaatgcacacagaaagattctatcatatgatcaattgtggtagacagtagggagtgtcaaggactgtggttaaactggagagctccctattaagattatgttaaaaaaaaaaaaaaaaaaaagacagcctggccaacatggtgaaaccccatctctaccaaaaatacaaaaattagctgggcttcctggcaggcacctgtaatcccagctactcgggggccaaggtaggagaattcgttgaacacaggaggcagaggttgtagtgagctgagattgccccactgcattccagcctgggcaacaaagcaagaccctgtctcaaaaagaaaaaaaagagaggagttcttatctatacctgtagccattctttccaagggctcattgcactttgtgcaggtcttcagatgcaagaagacagccacagctgtggcacactgcaaacgcagcaatcaaggtgaacaggcggcccctggagatgatcgagctatacataccaatatatgagctgctggaaccagttctgcttccagacaaggagtgatttgctggcatggacgtgtccatgtgaagggtggtgatcacatggcc

SEQ ID NO: 30153 - DNA, 1085 bp, Homo sapiens
cagttactgattagaccatatgaggccaaggtgtaagacgtaatgccaatttttcagatttgcagtgaggtatactttttaagcagttggaaggtcactgtctaaggtagccctttcctggcatctggatatttggaaagctgaattaataacccagagatttcttagacatgatagaatcacaacagagagagttgattagtcaagaggtatttcctgtggtctagtagtacttttctaactttttaccacccagtgaccattttattaaaggagttcttagatataatcatttataaatacatagatacaaaaggctgcccccatagtggcagcctttgaggcacctacagcctttgaagctggcactggcatggtttgcaaattatggctctaggtgtgggaagggtttattgaatttatctcaactttaatgaaagctatttctgatgttctttgaacatttgtaatttgaacgtggtgttcaaggtaggctcaaacttattccaagactgagactaatactacacagtgactgtgctttcccttgccattttctaagtacaatgttgacttttagtcacatattttctagacatttaaaccattgctaaggcttcaactttatttcacattgattgattttcttgtttatatgcttttttttttgagacggagtcttgctctgtcacccaggctggagtgtagtggtgcaatcttggctcactgcaacctctgcagttgaagcaattctcctgcctcagcctcctgagtacctgggattacaggcgcacaacactactcttgttcatgtttttaagtccttattcttcctgttttgtctttggtgggagaggatatgtcatcccttaaggtgacttctgcacatagctaatttcatctgttgtattgatttttctggttcatcttttagaaggtgttggagttcttggttgtaagcaacaaaaagtcaatctaggtaagcagaaaaataatttattgaagactctttaccctacagaatttccctgaggtcccaaaagtctgagctgattgctacgtccagttatactggggagactact

SEQ ID NO: 30154 - DNA, 1049 bp, Homo sapiens
caacattattgtacttttttttggtgtacatgtacctgcatttctgttggtatgtactttggagtagaatcactgctccattttaacacataagaagataatgctgatggttttccagagtggttgtagaaatttaaattctcaccaggagcttatgaaagttgcttttgccctatatttttgagagtctttatttttctactctgtgtaaatatgctggaaaacagtctttttcatttcagctgttctggtggtggtctttcattttggttttaatttacattctctgataactaacgagattgagcatttacatctgtttattgcccatttgatgtcttttgtgagtgcttaagtcccttgcccattttctattggattatctttttttaaaactgatttgtaggagttttttaaaaaatatagaatactaaggagttttttgttgaatatatatcttgcagctatcttccactcagtggcttgccattcattttaatgatgtcctttgatgaacagaagttcttagttttaggccaagtatggtggctcatgcctgtaatcccagcgctttggaaggccaaggcaggaggattgcttgagtccaggagtttgagaccagcctgggcaacagagtgagaccctgtttctgcaaaaataaaataaaataaaattagctaggtatggtggcatgcacctgtgtggtcccagctactcaggaggctaaggcaggggcattacttgagcctcggaggtcgaagctgcagtgaaccatgattgcaccagcctaggtgacacagtaagaccctgtctttcaaaaaaaaaaaaaagcctggttcccatccatttcccatccctgacagtaccttctatcttagaagtttaacaaaatgagaaaccgcatagggtacagggaaatgatgaaaaaattaatttaatgtccttttaaccaaaaacttaattatataattgaaaaatcctttatttattataaaataagttgaagtaaggtttagattgcactctgtggtcaaagtacctgttaaagt

SEQ ID NO: 30155 - DNA, 1104 bp, Homo sapiens
acatgagagatgataatcaagcctttgttgcctatgagtgaaaaggaatctaaaaatcactgaaataaataataatagtttttcaaggaatttcaaagaagttttttcacatgggaaaggactgctaggctggatgtggtggctcacacctgtaatcccggcaatttgggaggctgcagcaggaggaatgcttgaacccaggagttggagaccagtgtgggcaacatagtgagaccctgtctctaccaaaaaaaaaaaaaaaattagccaggtgtggtggtgtgcacctgtggtcccaagctacttaagaggcttaagtaggaagattttttgatcccaggaggtcgaggttgcagtgagccatgactgcgccaccgcactccacccttggtgacagagcaagaccctatctcaaaaaaaaaagaaaaaagtctgctggttgttgttggaaataatcagtcacagtggcatgctgcctaacatgctaaatcctcacctggaagactttaggactttcggtcaaatcatgctgtgatttgacccttgaggcacccttgctgtttcagtcatggaagtagtagataaaacttaaaaaacattgagacatgtatctgagttcacaaacaaggtaaacatctccttgggctgagagggaatgaatccttggtcctagagggtttggggttgggacaaaggcagccattttcaactagggttttgtgagagaattaagccctatggaaaatgatttgagtaactgcagtttttaattcttccaagtatggtatgaaactagtaccatgctatatatacacagtagatacattaattcattgtatacaggcatttggatttaattttctctttgaactctggttgagaaggactggaaatgttctatacagaggagattttgtgttacaagctgagagctaatgtggggctcctagcactggtgaaaggaagttgaaaaaagctgtcactaactgctgcctagagctctcagtggtccattatgggaaactgctgtccttagggaggcctcatgaccaagaatcgaatccagcctcacattatcttagtgattgagtttgtgataacccc

SEQ ID NO: 30156 - DNA, 1033 bp, Homo sapiens
agtaggtactgacttttgcttagttaagttttttgaaaaatgcagctgtttaccccaaattctaaaattaccgtaaccttggtgctcagcagtcaatgcaatggttgttgaaagattgaaacaatatgtaattgaagacaagtctgtcagggaacctgtgtgtgcttttaagttgaatatactttaaaagagtttttatctaattttcccctgtagaaagtattggtgagttttgagtattgacatgtattgagctagttctacaggcacctcgctaggggaaagccttcagaggaagcaactgcataaggatttaataagcatttattgagcccttactactagtcaggcaaaatattaggtcatggggactaagatgaaaatggtagcattctcaccatgggacacgtttacctatgtaacagacttgcacatcctgaacatgtacccctgaacttaaaagttgaagggagaaaaaaagagaagaaaatgtagggctctgtcctcttgagagtttatagtttactttggagacaaacatgtcaacatacacttaaagtacaaaggaattaaggcttcacagaaaaaaaaaataggcataaggaatgtgttagccttccaggaaccgtataaaacttcacatacagagcttcacaaaatttgaaagctgaaagatgtacaaaagtttggcacaaatggagaaggcattacaaatagtgacagatctctaattttacttctaaatattcgtaatgtaaattcacagggcaacttaggccagtacttttcataagctatcctgcatttatttagatatgtggtttagtacataaattgaaatatatatatgaggagaagtttttaaatgttgttctctgtgtgcttaatggggtgatatttcaaacaattgtagggtagcttttttttttttttttttttttttttgaggcagagtctcgctctgtcacccaggctgaagtgcagtgttgtgatctcagctcactgcaatctctgcctcccaggtaccagtgat

SEQ ID NO: 30157 - DNA, 1024 bp, Homo sapiens
atggggtaatggaagtctaaatgtatgtattttaatccacacattctgttgggttttggttgcagtcaggtgacacacagtcttttgcacagaagctccagctccgggtgccctccgtggagtctttgtttcgaagtccgataaaggaatctctattccggtcttcttctaaagagtctttggtacgaacatcttccagagaatccctgaatcgacttgacctggacagttctactgccagttttgatccaccctctgatatggatagcgaggctgaagacttggtagggaattcagacagtctcaacaaagaacagttgattcagcggttgcgaagaatggaacgaagcttaagtagctacaggggaaaatattctgaggtaggagcatgacctttttgcctgtacaaaaatttcttccccttgttctctcattcatattactgtattgctttactcctgtgattggctaaactgttaattctctggatatatcctggttactaatggtatgtagtctgtggcattatctagttaaagactctcaatatctagttaagtaaagacagaggccctttggcaagactcagtaaaattttggagaagattgttgtctgtagccttctggttcttatattctgttcccctctcctttcgtagtccctctgttcaaggtcacttggacacccagtgtggagttcatcttctggctcatatcctctcctttattcctctctaactgatgcggctccaaaatgacctcatctgccagtgagagtcccattattactgattctaaaattgttttaggtagcctgattatttgacagatttggttcattctcattgtacctacatttaaacctttgccttggatgaatcttttcattgctaaacccttgagaatgacactccctgtttggtctaagggaggaaggaagtcaatgctagtccatttcacttttcaatcctttaggaatgtagcaccttcctttcaggctaaattttatttgttgccctccctc

SEQ ID NO: 30158 - DNA, 1037 bp, Homo sapiens
gttagctgtttaaccagcttttttttctctctcaattaaagggtatattaagtcagagtcaggataaatcacttcggagaatagcagaattaagagaggtaagtttcagtgatgagtactttgaaaatagtaattaaatctcatatttatcagaactgttgtatgtgctagggtagtttcatatgcatctcattagttatactaataactaaccagtccagcctacaagaccaggggtcagttcttgaagtttttatttgtatggtttttctaagatacattgttggaattaatgaaatgaggtgttagcaacagaatatcaattgtctgcatgaacagtcagcgtcaacttccaagggttaactgggttcttctgttatgtatttcaggcttctttttgtttttcctaaccctaagtcttttttataaaataaattatgtttactgtaattttgaggggggtgggtaatttttcatagcacttagactgtttgaattcctttatgtcttcctgagggccatgtgtacccacttgccatcggagtaggcaagaccactcctggtttgacctgctgtctcaaattattttgtaatgagtacctgttgacttttggggttctcctgctgtcaggtccatctgataccttgtcgcttccctctgctttctcctatacagatcccaacaattgcatattttactgctattggtgttttctctccactcatttgtattgtttgttgaagaatatcttgttacctatttttgttatgagtgttcttcatgggtttttgttactttctgttaatttattaacaaaactagtgttattttgagaagtttgaaataggtagctttaggacaaatcaaagtaagtttaatgttttaggtattctaactgtgtaatttatcagtccaagatacagatttaaaaagtatagatagccttaaaagggtcaggtaaattaataaatctataaatagtaattgagaaaaactagtataattgtgggaggaggcaaagaagaaaaacaaggga

SEQ ID NO: 30159 - DNA, 1027 bp, Homo sapiens
tagatttgcaactctacctaaattttttaggagctggtgaaatgttgggggcaaagaccagaggtaagggaatatggaactaaagggcctaatttaactttcctgcctaaatccataattttatgcattaactttatcttcctctattaggaaatattaatacttatcagagtcacagattgatgaatttgttggtttttttttttaatccacctacatgtattagttttctcttgctgctgcaacaaattaccaccaacttaatggcttaacacaacacgaataattatcttagaagtttgacacaagcctcactgggctaacatgctggcagaatagtgtataggtagccgggagagggagaagggtacatgattaaaagatgctcccttgtaaccaaggactttttgtctagatgaggaaatgaaaacttgcaaaatctgaaaactatagtataaatcgaggagtgttttttggtttgttttttttgttttggtgggctgttaggactgctatgtaacagagtccagcatggaaggttgtaggttgtaggaaattatttggaagaaatgaagtttaccttccagttccttccagaagtgggggagaagggagttgtcatagggccactaactgttgtatttcggaataaagacatcaggaataagtacccagattcttttattgccattatttcattaaagtagttgtggccgggcacagtggctcatgcctacgcctgtaatcccagcactttgggaggctgaggcaggcagatcacgaggtcaagagatcgagaccatcctggccaacatggtgaaaccccgtctctagtaaaaatacaaaaattagctgggtgtggtggcacgcacctgtagtcccagctactcggtaggctgaggcaggagaatcacttgaacccgggaggtggagtttggcagtgagcctagatcgcaccactgcacttcagcctggtgacagcgagactccgtctcaaaaaaaaaaaaggttttagtaccaaaacaat

SEQ ID NO: 30160 - DNA, 1050 bp, Homo sapiens
cgtcctctctctgttttaaataaagtacaataagccatccacattgatgtgtttttgtatgtgtggattcaaccaactggatcagaaatatttagggggtgaaaaccatgtgtagtgaacatgtagactttttttcttctcattattttctaaaatatatgtagtacaacaactacttgcatagcattttcattatttaggtagtttatgtaatctagggatgatttaaattatactggaggatgtgtgtaggctatatgcaaatactacaccattttatataatggacttgagctcctgcggattttggtattaacagggaatcctggaaccaatcccccacagataccaagggacaattgtactactcccatagttttttttgacttttttctaatgaagcacatttatattaggtttctctactgaaacaacgattacgaaatggcccgatgaatgttgatgtactgaaaccacttcctcagctggaaccacaggctgaagtcttcactaaagaagagaatccagaaagtgatggagagccagtaggtaagcttcattttgtcaaaaggttaatttaaaaactagaggagagccaggctccttggcttacacctttaatcccaacactttgggaggccagtgtgggaggatcgcttgagttcaggagtttgagaccagcctgggcaacatagagaaaacccttctccacaagaaaaacaaaaacaaaaatgaaaccccaagaaaacctagaggaggattttgagagattccaggatgtgagctgatagatatgggctgaggtagaagtgtccgtggtcctaatagtttcagaaagatgcaagggtttgttttgtttttttggttctttgttgttatttaggagaaaataagtgttttttgtttgcttgttagtttgagatggtgtctcactctattgcctaggctggagtgcagtagcatgatctcggctcactgcaacctccatctcctgggttcaagcgattctcctgcctcagcctcccgagtagctgggattacaggcacaca

SEQ ID NO: 30161 - DNA, 1050 bp, Homo sapiens
cttcttgtgctgagtcacttcctgggtgggagccacaagatcagatgagccaatttatcgatctgggtgttgccagctgatccatcaagtgcagggtctgcaaaatatctcaagcagtgatattaggagcagtttagtggtggtcagaatcttgtagccttcagctgcatgactcctaaatgataatttctaatcttttggctaatttgttagtcctacaaaggcaatctagtctccaggcaagaagggggtttgtttgggaaatggcttttattgtctttgttttagactataaactataaactaagttctcccaaagttagttcagcctacacccaggaacgaacaatgacagcttaaaggttagaaccaagatggagtcggttagattagatctctttgactgtctcagtcataattttccaaaggcagtttcatattccttactgatgggcccttcttatgttgctttattgttagtggaagatggaacttctgtaaaaacactggaaacactccagcaaagagtgaagcgtcaagagaacctacttaagcgttgtaaggaaacaattcagtcacataaggaacaatgtacactattaactagtgaaaaagaagctctgcaagaacaactggatgaaagacttcaagaactagaaaagataaaggtaaaagagcagatgagttttgttctaatttaatctataaagttagatccacaggctccacagcatggcttgtacctccgggagaggagagtggatggaaagggcatttttgtttgccctggcctacataacaccaaaccttgagacttactgtgtacttttttccttctgcactgtaacatgtatataaattagataaatgtttagagttctcaaatgagaagaagctttattagagatggaaatgaatttaaaaattttttttaggaccttcatatggccgagaagactaaacttatcactcagttgcgtgatgcaaagaacttaattgaacagcttgaacaagataaggtaaaacaacaaaacctatgatactaaaatt

SEQ ID NO: 30162 - DNA, 1035 bp, Homo sapiens
agatgtgagttttgaattggacctcaaataatcaatagaatgggcctaacaagagaggtgtgggcagcacacatttcagatgctacaatgccgtaaacaggcacagtgatcatagtgggtgtgtgaatcagctgaaaaccattcttgctgaagtgggaaatgcagttggattgtaaaggaactgactattgaaatcttaaaaggtaggtagctgagtttagactttgatatacagagtaacaggaaaccagtaataggaaggcataatgtgatgggagctagggttttatgtagaaaagaaatgaaataggaagtcaaacttagaagcaaagacagaaatccagtttgagggactgtgagctttagccgccttgctaggatggtggttctgggaaggagaagaaaggtagaatctgtagaatttggtatctgatcaactcagggaggcagaagaaaagtaaggactctaaattgactccaaagttttaagcttaggacacttaatgaatagtagtgtggaattagaataggaaatctaaatggggaagttgagaattggagtgaaatgatgggttttttagatacactgaatttgacccagtcatgagcttttcaaatggaattgagttgcaggaatttggaaataagaaattggaacatctttcaggagtcatcagcctaggatcgaagcctgtggttaaatctgtaggagaggcggatttctacaaaagattaagttttacagtagtagtaatagtcatagtggtaacagcagcagctgcttctgctgacgcttatttagcacttgttgctgctactactactgctgctactattgttaatactactgctagccattacttactttagtaatgctctgctctaagggctttgcttgtatttacttgtattgcatcctcacaagtgtatgaaataatactattatcttcattttacaaataagcaaacctaagaacatagaagttaagtaatttacctacatttatgcacagagaataagtatatactcaagat

SEQ ID NO: 30163 - DNA, 1130 bp, Homo sapiens
cgccctgccagatttaaattattaatggatacatttattttggaaagtctttagataacaaagttgtaagtgcttttatagatttcttaaaaattatatttgtagtcataataattgagggctatgatgcaaagttgtaacaaactgtctctacattgaagataatgccttttacatctataatgaaagctagttttgcacacaaactgtatttcatttaatagtcttagttgagtctaaacagaactgttcaagtaggaagtgattcttagttcaaatgtaaaggtatatgccaattgaaagaaaacttccaattaagtactaaacataagaaaaggtcaatgtaaaggaagtaggatttctataaatagtctggctattggaaaattcaattgctctattaaatatttgttttattctttgttagatttaaaattcaaaggctaaatataagaactggccatgtgaaggaaacattaatatcattacagcttgctattaggattttagaagtagatatgtctacataaaactcttatctagaaaataaactctccaaatgcattttcaactgtgaagaaatttaattctgatattgctggtaattcttgatgtgaatattagtagacaaatcactaattcctttggctcacttattctggatgtcaaaatcagctcaagaacgttccccactacttttcttgggaaacagtctcttaagctgctcctcatatttttttctagatgaattgtggtgcctttcatatgttggaggacagaggaaatctgaatgtctttgattttaaacagaatgattgtttattttctttgttttatttttctgtttttgcatgctggcataaaaagaataattctgttataaaatactgagactgtgaatacagtggtgtaccgatttcaggatggtgtatcaacctgcagttcttaaatagtctcctctctagtagaaatgttaggcatagtttttgacgtatgagagcatagcattcttgttttgttaaaaatatgtattttagtggataaagaaaacaaaaaataagtttattggttataagcgcttctgtaattgttgatagtgtttctttctagttgttacttaagaacagatg

SEQ ID NO: 30164 - DNA, 1098 bp, Homo sapiens
atgagccaatgtgctgggtcacatgtatgtatttttggtgccaagttacacacctgttgcacccgtcctatctgattttgtttgataatgttgagctgtttggcttccttaaagacctggccagatgcagtgtctcatgcctgtaattccagaactttgggaggacaaggtgggtggatcacttgaggtcaggagtttgagaccagcctgaacaatatggtgaaacccaatctctactaaaaatacaaaaattagccaggcatggtggtgcatgcctgtggtcccagctacttgggaggctgaggcaggagtattgcttgaacccgcgaggcagaggttgcagtgagctgagatcgcaccactgcactccatcctgggtgacggagcaagactccgtctcaaacacacacacacacacacacacacacacacacacacacacgaaaaaaaccttactactctagccaagatgattatttttgcagagcctgaattcttccttatcttacccaaaaactccctgctgtggtagtgcctttctgtaatactgttgaatcaggtaaagatttctttctggtcacctggaaacaactctggtttgaaacttatacaaatagtaagtttcatttcaaaatattcagccagtaaatgtttaaaaaagaaacaaaaatctctgctcttttattatatagttaagaagtttttaaaaataaaatatgcctaagaatagtttttccattcttaaaagtgtcatagtgagtatataatagtgttacataattattgatgataagaactttagagcaaacgaaaaacaattgaaattatacagtacagaaatagggacatatcttcatttctttaaatgtactatccataaggaaactggtagagaatggagagccttcagtaatttattttttccaaacttctaagcttaggctcatataaacaagtcttaatatcctaatccagaactcagtgacaagttggttttggtgaccgaacgtttcttgtggctttgttcaacaactccagtatctcttggcttagaacagtgatgagttttttaacctatcctgctactgctgctcttag

SEQ ID NO: 30165 - DNA, 1036 bp, Homo sapiens
aactgtataaacttaaaatctagtttctagacttagagtagaaatatcaaactctggagtgtagagatgaggtagtagcaattgtatgacctttcacattcagcagtgtttcgtaaaacaagtagtggaaaaatagcagacatagtggggttattggaacaaaatttttcatatcagtagtaattgtggcaattaccccactggaaaagccatagtgccttgtttctgcagactagagcatgggaggagagagatgatgacgttacctatccaacagggctgggtgcagatcaaaagaaatgaatgattcctggggaagtactttgcgaatgctgaagatttatgtgcgtttaaggtggtattaattatttttggcacaggaaaagagtcaatcagaatatttgaagatcagccaagaaaaagaacagcaagaatctttggccctagaagagttagagttgcagaaaaaagcaatcctcacagaaagtgaaaataaacttcgggaccttcagcaagaagcagagacttacagaactgtaagttttaataatattcagattctggagttgtgaaattatttgcatatgaaaatttgttgtctctagtcagtataaagtttcgaagattactggattagatttatgtatacatgcccttcatttttaggtagtgtgagctatgcatgggagtggatttggctttaggctctgtgtttattacatggtgctcctggttctgcctttagctggctgtatttctgtcagccactcagtctgctgcttttcactgaccctgcagcatctccattgcatactcacccttgatgtctaggaagtgggctcattttgtaggcaatacttgccctggcacctttctgcttgtccaggtttatcttatgccatgtcctgaacgtaatccagcctctgcttatatcacagtttaattacactagtgtgtggcttttgcatttggtttccccagtttttccatactaaacatagtcccgtaatgaacatatttgtgtgtatgtcccaga

SEQ ID NO: 30166 - DNA, 1023 bp, Homo sapiens
aaacatgtaatcttttctttccttttgtctttttttttttttttttttttttccaagacagaggagtctcgctttgttgcccaggctggagtgtagtggcatgatctcggctcactgcagcctctgcctcctgggttcaagggattccccaacctcagcctcccgagtagctgggactacagccgcatgctaccatgcccggctaatttttgtatgttttggtagagacagggctttgccatgttggtcaggctgggtctcaaactcccggcttcaagtgatctgctcacctcggcctcccaaactgttggactgtgccttgccataatcttttctttgttatatgattcctttagtaattgagcatagattctttgtcttttctagtgtttggtatgataattttgatcttcaggtaggtggtagacatcatgtctgtgtatcattgttagtagacaagtacgtactttaataaaaatgcatctgtttttaattaacagagaattcttgaattggaaagttctttggaaaaaagcttacaagaaaacaaaaatcagtcaaaagatttggctgttcatctggaagctgaaaaaaataagcacaataaggagattacagtcatggttgaaaaacacaagacagaattggaaagccttaagcatcagcaggatgccctttggactgaaaaactccaagtcttaaagcaacaatatcagactgaaatggaaaaacttagggaaaagtgtgaacaagaaaaagaaacattgttgaaagacaaagagattatcttccaggcccacatagaagaaatgaatgaaaagactttagaaaagcttgatgtgaagcaaacagaactagaatcattatcttctgaactgtcagaagtattaaaagcccgtcacaaactagaagaggaactttctgttctgaaagatcaaacagataaaatgaagcaggaattagaggccaagatggatgaacagaaaaatcatcaccagcagcaagttgacagtatcattaaag

SEQ ID NO: 30167 - DNA, 1050 bp, Homo sapiens
aggaagcttatgaaaaggatgagcagataaatttattgaaggaagagcttgatcagcaaaataaaagatttgattgtttaaagggtgaaatggaagacgacaagagcaagatggagaaaaaggagtctaatttagaaacagagttaaagtctcaaacagcaagaattatggaattagaggaccatattacccagaaaactattgaaatagagtccttaaatgaagttcttaaaaattacaatcaacaaaaggatattgaacacaaagaattggttcagaaacttcaacattttcaagagttaggagaagaaaaggacaacagggttaaagaagctgaagaaaaaatcttaacacttgaaaaccaagtttattccatgaaagctgaacttgaaactaagaagaaagaattagaacatgtgaatttaagtgtgaaaagcaaagaggaggagttaaaggcattggaagataggcttgagtcagaaagtgctgcaaaattagcagagttgaagagaaaagctgaacaaaaaattgctgccattaagaagcagttgttatctcaaatggaagagaaagaagaacagtataaaaaaggtacagaaagccatttgagtgagctaaatacaaaattgcaggaaagagaaagggaagttcacatcttggaagaaaaacttaagtcagtggaaagttcacagtcagaaacattaattgtacccagatcagcaaaaaatgtggcagcatatactgaacaagaagaagcagattcccaaggctgtgtgcagaagacatatgaagaaaaaatcagtgttttacaaagaaacttaactgaaaaagaaaagctattgcagagggtagggcaggaaaaagaagagacagtttcttctcattttgaaatgcgatgccaataccaggagcgcttaataaagctagaacatgctgaggcaaagcaacatgaagatcaaagtatgataggtcatcttcaagaggagcttgaagaaaaaaacaagaaatattccttgatagtagcccagcatgtggaaaaagaaggaggta

SEQ ID NO: 30168 - DNA, 1030 bp, Homo sapiens
ccatcaagaagagacaaatcagttacttaaaaaaattgctgagaaagatgatgatctaaaacgaacagccaaaagatatgaagaaatccttgatgtttgtaccttatttcttctctctcacttttgaaatttagctgtaatagatttcatggtagtgccaaagatttccttttcaaatgtgttttttgaacgaaaagggtttttttttttgactcaatattattcaaattagtactgttatatgcagatttataaagttgagttgatttctgccaggattgtagtttcctgatgagattctgctaactaggcagcacagtccccttgctagtattgaagcaacagtagatactaaaaggaagaatagattctttcccatctgcctcacagattctgactgaactgtgaggggaaccagactaagaatcaagaccctgtgcttcggtgaagtctaagtaatgggatagtgagtgtgtatttaaatgtggctgcttaacttagctggaatctttctgggagggacaatcaactttactcttatctctacccagtgtgtggaggttgattggtctcaagagaagaaagctgggaaaaaatggaatgcataagccaaatcttttatatttagtggaaggttatttcaaaatacttactctactaatgccatgttgcaattcacagaatatgccactaatgcattgccattagcaaaataagataagccatgaagatacaccatgaagataaatcataaatgctagttagtactttggactaacatttgaaaatgttttcaaatgtaatacaatataaattgttcttggttgggttacagattctgtagttgctctaagccttatttcactatatgctaagaatcttttggtgattaagaattcataaatcaaagaatcatacctcagctgactatgtcagcagaagtctgagtcgggaacagattctaataattattttaaatgtaattgaaatggctagaattccaagatataacacatgcctataaatgcca

SEQ ID NO: 30169 - DNA, 1052 bp, Homo sapiens
gcctatattctgtcttcagcattaaaaaaccttgtggtgacagcaatctttctttttcttacatacagtttccctgtgaatcttatatggtctgattatttgttatttttagattcacaatttagaagaccgtttgaagaaatatgaaaagaatgtatatgcaacaactgtggggacaccttacaaaggtaaggatgatctcgtgtcatgttattaactgttatcttttattggtggatttgtgcatgatttttatttttgtttttgctaatttatatttttttctcattttaaaatttttaatgattttattttttcttaattgacaaatgcatatatgtatagtgtgcaacatgctattttgagttatagattcattgtggaatggttaaactaagtgcattacctgacatactaccttttttgtgtgtgtgtgatgagaacactttaaaatctactcttttcacagttttcaagaatacaataaattgggtggggaataatacaatacattaactgtagtcaaccgtattttacaatagatctcttgaacttattcttccttattgaactgaaattttgtatcctttggacagcatctcccaccccccacagtcccttataaccaccagtttacccggcttgagttcagctttttagattccacatgtaagtgagattatgtggtatttgcctttcttcacctagcttattccacttaatataatgtcctccaggttcatccatgttgttccaatggcagagttttcttctgtttggaggctgaatagtattccatgtggttaatctgttttttacaatgaatatattttaccttttaacagctgactttaaggaaagaaagatagtaacctggcgggcgtggtggctcacgcctgtaatcccagcactttggggggctgaggcaggtggatcatgaggtcaggagatcaagaccatcctggccaacatggtgaaaccccatctctactaaaaataaaaaacattatctgggcatggtggcatgcgcctgtagtcccagctacatggga

SEQ ID NO: 30170 - DNA, 1093 bp, Homo sapiens
ttctcaccactctagcacctcatcagtgctggatatataattttttttcttttttgagatgaagtctcgctctgttgcccaggctgaagtgcagtggcatgatctcagctctctgcaacctccacttcctgggttcaagcgattcttctgcctcagtttcccaactagctgggagtacagggttccacacccagctaatttttgtatttttgggagagatggggtttcaccatgttggccaggctgggttttttgtttgtttgtttgtttgttttcaagacagagttttgttcttgttgcccatgctggagcgcaatggcgcgatctcagctcaccgcaacctccacctcccgggttcaagcaattctcctgcctcagcctcccgagtagctgggattataggcatgcgcctccacgcctggctaattttgtatttctagtagagatggggtttctccatgttggtcaggctggtctcaaactcctgacctcgggtgatccgcctgcctcggcctcccaaagtgctgggattacagacgtgagccaccgtgcccagcctggccaggctggttttgaactcctgaactcaggtatctgcccacctcggcctcccaaagtgctgggattacagacgttagctgctgcgcgcggcctggccaggctggttttgaactcctgagccaaacagtgcccatacattgcatttgattgataaattacttaagtctcttttgaactccaggtccttctccacctttgcttttatcatttatttgatgagaaaaccaacttacttgtcatatagagtggaccacattcttaattttctggattctgtctccctggagtcctctgttccctggtaggtagaactagaggcttgagcagagttaggtttgattagatttagctttgcatggacaatagtacttcataaaggaagttgtgtaattcttgtcttacatcaaacgttcatgacatatttacgattttaagatctgtcacccagttccaggtgtgatccatcacttttcgccagattttagcatccattggtaaattccctgatctgttacttcagtagtgattgcat

SEQ ID NO: 30171 - DNA, 1050 bp, Homo sapiens
gaaatgtatattgtgcagcatttctattaattgattaattgattgtctcctcaacttttagtttgaaacatttcagacataagatttgcaaaaatagtacaatgaacacccatatacccttcacctagtaatgtttggccagattttctgacttgctgtcactcttgttctctctccatttatattattccccatttgtaacatttggcaattacttgccgacatgcttgcaagcatttgacaattgtaaacataaactaagtactttagcatgtatctttaagaacaaggacatttttctacatacagtacagttattacactcaggaagtttaatattagctaatactaatatatagtacataatactcagttttttacagttttccaaataatgtctcccataattttttagaatccaggatccacttgagatttcacattgcatttagtggtcatattttcctagtcttttttaaactagaaaacgtctagcttttttgtttttaatgatgcagcattgttgaactgatcttgaattttgtttcccacaacagatcaagctacggtttcaaaataaaaactgacaaggaatttacgtataacagaagatcttgttggtgtcttctttaggttcctaggaccaacatgattattgaactagttttataaataatatactattagtagtacattatgagtagtgaaatatttgttcatttacaaattcagaagactaaaactccccctatccacttaatatatatggaaagtttgcctctattaatcttacttggtaatttatttttatgggattttaaactcatatcttgatgtgactactggttttagcattttcttttccttttcttttttttatatttgagacggagtttcactcttgttgcccaggctagagtgcagtggcgcaatctcggctcactgcaacctccacctcccaggctcaagtgattctcctgcctcagcctcctgagtagctggggttacaggtgcccgccaccacacccagcttattttttgtatttttag

SEQ ID NO: 30172 - DNA, 1053 bp, Homo sapiens
ctccttgcagtaccttgaggcacgttcttacctcagggcctttgcatttgctgttccctccagctgaaatgctcttgcactggatattatgtgttgtgtttccatcatctttgtcagatatctgctcaaatatgacattttcagccaggcgtggtgggtcatgcctgtaatccgagcactttgggaggccgaggcgggtggatcacctgaggtcaggagtttgagaccagcctggacgtggcaaaaccccgtctctactaaaaatacaaaaattagccaggcatggtggcaggcacctgcgatcccagctactcgggaggctaaggcagaagaatcgtttgaatccgggaggcagaagttgcagtgagctgagatcatgccactgtacaccagcctgggcaacagagcgagactccatctcaaaaaaaaaaaaaaaatgacattttcagagaggtgctctttgactatcttacaaaaaatagtgctcccactcttgctgtgcaaactcaatttcctgtatcctactctacgtattttcgaagcagtcatcgccatatggtatactctctctagattattttcttgggcatttgcctattgtcaccttttcttctcactagcatgtggctccatgagggcaaatacttaatctgttatgttcactggggcatctccagaacttgcctgaaacccagtaggtgttcaataagttctggagggatgaatgaatgactcctctcactgtaaggaagtttgggatatgtagtctatctgggcacatttctatctgttctctttgcaggggagaaagggatgaggatgttggataagcagctcagcatgttccccaacatgtaagggaatcaggtcgagttctacactctccttcttggtacacatcctcagaatgcaggaagtgcctgtgcttgctgtgagtctttgtggacagaggcaggatcatgctggctagaatctagtggacaaggtaaggaaacataagcattgaagaggggtaaacatttgttgtatgaggttatgggaggtcctgtctca

SEQ ID NO: 30173 - DNA, 1034 bp, Homo sapiens
tattttatatataatgtccaggattttcagttgtacttagtggcaaacaggaagacgtatgtctactccatcttcttggaggcagaagtcccctgatttttagacctacccaaattaagtattttaaggaagactagaattagaaagttgtcattttaaaggtttatttcaatattatgctaatgactgatgtaaaagtcaaattcagttagtgctttgaaaatcttaattgtccattgaaaagagaaaagataattcactgtgaaatcaagtctagatcagtagggcatcagtgacaactgtgatttaagcaaccttaatgagatgcattcataaactttggtcttaatatcaaaattttagcttcaagttcatgagtgtcctaacttaaatgtattttaaatctaatattctgtttgattagcaagcatgtttaacctgatagctttcactttgtttctcagttaaggaagcatccatttaagtaaacagaaatgtcttcttggggcaaacacaaaggaccttatatctggatttagcactcatggtgcgtagacagggcttgctggccagtgactagaagagtttgcttccagtctgggctaccctgaaagtaggtctttgggctctagaaacttgccccaagctgtacttaactgtagcatcccaggttggggaagaaccccgtttggcatggcagcactgggtgttcagaagggaccacaccacttcaagtttaattctgaagtaaatggctttttcccttttggtgatgttgagggtgtggattgagggggtacataaaagtgccagtgggttcaccaggctgttcagctaggagttggccatggtcaggaaatgctctggccataaatgagtctagatttaaatacagacacaaggccgggcgcggtggctcaatgcctgtaatcccagccctttgggaggccaaggcaggcagatcacgaggtcaagagattgagaccatcctggccaacatggtgaaaccccgtctctactaaaaatacaaaaat

SEQ ID NO: 30174 - DNA, 1043 bp, Homo sapiens
atttgctagtgacatattatcattttcatatacttttctggatttagttccctcatattttattcgaggctttgctcctaagaaggattttttactataatttcactttttgataatgtccttgtcagatttttgtgtcatggtttggttagacttgcaaaatgagttgggaagtgttttttgttgttgttgttttctggaagagtttatataagatatatatgttctttttttttttttttttttttttttagagaaagggtctcactctgttgcttaggctggattgcagtggtgtgatcaaggctcactgcagcctcaacctcctcctgccctccagcagtcctcctgccttggccttccaaagtgctgtgattacaggcatgagctgccatgcccagccagtgttattttctttcccaagagtttgtttaacattgttatttgttctttaaaagttttgacattttctcatggtattttgatgatattctagtgtcttctggcttttagtatattcattaaatgaattgttggtctaattgatactccattgatctgtttttcctcccctctggctgcttttaagattttctctttgtctttggtgctgagcagtttactatgatttgcttaggtatagttttatttttatttatctatttggggtttatccatttaagatcttgaatctgtgtttgatgtcttcagttttaaaaaattcttggctgtgtcttctactcaattctctcctctcctgtgactctaattatatatctattagtcctgctcactactcctttatcttttaccctctcatctttattttctgtccttgtgtctttctgagtttcaaactagatatttgcttttgacctatcatttagttcattaatttttcttcaagctataaagtgctattaaacccccatattgaattcttaattttagttattttgtttttaaaatctagaattactgggttttgttttgtttctagttctctgagaaacttcaattttatcttttacctctttggactc

SEQ ID NO: 30175 - DNA, 1030 bp, Homo sapiens
tgtttgcctttaattgtaatagaatttgtggcaatgggattatttatcatgaaaaaaattatatgtaatataataaataagttctgtgtaatagtggttgttaaatgactctgaaaatctctcgttggctgaatggattccatgcagttcttcctgacccctagtcgctaccagggccttccccctaccccccaccaagcagctcttttcagtttgtgttttatattaactgtccttataagaattactgtttaaaaaggctatccattgatattttaaagtttggaaactatactatagaagatgcttcatcatagactcctggactctcttgagaagctgcattttgggatcttgtgagcagaggattttccttctcaagaagctgctctgagatgggacccctctccttggaatatttagaacagtttccagcatagaatttacagctttcccttctcagaaaaacagtattggaattttgcctcaagttgattattaacacaacatgacagaaagacaggttctctgaatatattttcacctccaactttttttaaaaagtgaagtgtaaggtagaaaccagaataggaaataggtgaggcaggtgttgagggccatttccagaaaggattacttaatagtagtaggagttttctaatccaaaaccaggtcctggagaagttgaggaattggtggaaggctgcagtttcaagagctggagaactggttagcgggaagaagcctacagcggaggaaggatcagcagagatggaatgggaaagggggccagggtttcccttcctcaggatagtggagtctccatcagcatctgttcctggggcctctcctggattccaggagttgtgcttcgctgggccctgggggaaacagagaagaaagttgagtttgcctgagtaagccaagtgaaaagcccacaggatagctggagaagggaaatggctagaaggtcaggagcccagagagctaattttaaaggatagggaattatggaagccctggggatgtt

SEQ ID NO: 30176 - DNA, 1050 bp, Homo sapiens
ggccaggatctcctattgctccactccatggggagattctcccttctcagctcagagtgtctttttattaaagcagctagcaggcttccttacattagatgccagataagtctttactaaacagaccaccattctttttccttgcaaatgtggctctgttgaggtatggattaaatcagcccttatgggctagcatgggcactttgtcactccttattacatgatatttgtgggaaatagcattccaggttccaaacaagggattggcaagggaagcttgggaacacagctgagtcaccaacaagggccttgccactcctggtctgaagcactaagtgtgtttctgtgtgagggctaccttcaaggctgcagtccagcacaggctcagagcccacaggcttggcattctggcctgtggatgtttgacaagcagggcagtgtttccactggggacagtaaggggtgagttcaccaagcttccttcactaccctgtgttaccttatcttgtgtaacatgacaagaacccagtctgagccatgtagagctaccgaggggctgtaagcaggaagggggcctaaccacatctgcatttcagaaaagatcgttctaggggaggagaaacctgtaatcagactgttgcaaaggttctgtggagggagggacagtggcgtgggacaggatgactgctgagcatatggggagaagagcctgggcctggcagctggctggctgtaggagatgcaggaggaaaagctgagggtggtatccacatttctggtgttcttggagtgacattgaagtagtcagctggagagaggagccttgagctcttcttttgggaaaccctgaaaatgctgtgaagacttccacagaactgccatcccaactgatagttcaaatgcgttcttaaaatatctgatcttggcagagtggaactctgtgtaggaagaatcacatggtacttcttattccatgttcagtccccagcgtgtggtgtctattttgaaatatgtggtttatgcaattttatcaagagaggtttcttaggg

SEQ ID NO: 30177 - DNA, 1075 bp, Homo sapiens
ggtccctatctgtgcctgtcacctcacccctcttttttcattcgcatgttgctctgtttgtatgtgtaggtttggtcttttaattttttactaaacagtaattcaagctcatggttaatttttaaatattgacggatttgggattaacacctgtgggaatacatacatacacacgtacgtgaagttgaaagattaaagcaaagagaaaatatctctcaatgtaatcctactgccttctaggcagtaccactttttaatatatgtcatttatccttccagaagttttccagacaaacacaaacatatttatataaatgaaattgtgttgtattcaccattctgcaaattgcttgttactttctaacaagatgccttgaacatctttccaaatattagtaggtatatatctgcctcattgttttatatttcattgatggcatttactttgtttccacttctgtgctattacaaatatttctcttaaaaatatcctcttttctgtgtgcttatggacttgtgtgatagttctttgtgatcagtttctatttgtggaaatgctaggtcaaaggatatattttacagtattggtacattaaaaccaaattatcctccaaaagcttatgctaatttacattctcatgaattatctatgagagtgcctcatacccttactgaaaatgataatcaaatgtttcaatctttgctaatctgaaaataaagaatagtatcaggccaggcgcagtggctcacacctataacccaagcacttggagaggccgaggagggcagatggcttcagctcagaagttcgcgaccagcctgggcaacatggtgaaaccccatctctataaaatatacacaaaattaactgggcatggtggccgggtgcggtggctcacacctgtaatcccactgaggccgaggtgggcggatcacctgagatcaggagttccagaccagcctgaccaacatggagaaaccccatctctactgaaaatacaaaattaggctgggcgtggtagctcacgcctggaatcccagcattttgggaggctgaggtgggcagatcacctga

SEQ ID NO: 30178 - DNA, 1094 bp, Homo sapiens
atgtggccatgcctacctgttttgtttttttaagaacagaaacaactattttaaaagaactcttttaagaaatttcataaagggacatgcattttactgggtttgcttttcttaaaacataccaaaaaagaaaaaaatagaaaaaaaaaaaaaaaaagcttgatctctatcagacttcctttcaactgtcctcccctccaagcagaccacctgtccccttctatcccagctcagagcagctgacccaactcagaatctctttcctacaggatgaagtgccttttgaatgttattttaagccgagagttaatttttctacacaacatatttccagacatcttttagtcttttattgtcttagatactataagaagatgaacatgacaattttctagaacctggtagcgtgtgtgtgtgtggcggggggtgctgagggaggggagtgagtcacaggagcctgtcccccaacaggtgtgactgctctgacaacctgtggcatgctgcagggtcaggctcctgataggaggatttcatgactatgtcattgtctccactcatttttgacccagtttggaatgtatctgcaattgtgtggctcaacactttaggaaacaatagattattttatattattatttctgatggtgacaagtttgtcttgaggtcacattttctccttgaaaagtgacatcctgtcacttctgctctcacactactgccatacatttgtgttttttgttgttattgtttgggtagagcagttacaagaaaccctaaaacccttggatataaaagaaatctgtttattgatttttaaatctttcctttccaaaagctggatacacatggagctgtttgggaattttccttgctgctaccgcgctgccaccaaatggaattgaccagcggctgttacactgttctttgccactgtgcctatgctcagaatatgctcactgctaagctacaaactcggacagggtcagaaacagaggtgtcccatcccattgcagcctccaccacctgtaaccccttcctggcattggccactgaagggtacaaaggcaaaaggaccacagcaccacttaggtgta

SEQ ID NO: 30179 - DNA, 1050 bp, Homo sapiens
cttagtcttagattagaatttctgagcatgtgttatactgtatttggcatgtgttgaagcagctgtaaaaatttgggctttggggttagactgacccagattcaaatcctgacattgcctcttactagttatgtgatcttagacaaattatatgattagtttccgtgtcagctttttgtctgtatagtggggagaatagtacctatgtcactggggccgttatatagattgagtgtaattatttgtgggaagtgtttagcttgtataaaatgatagttgttattatctctgacttttttttacccttccccttgtcctcatatttcccaatttttggtattgccatgaaatatgaaatactatgtgatgtgaaagcttgtgacacttaaaatagtttgaatctgtttttaatgcttagtggaacattattgcatttattttattttcgcatctttttttttcttagtccaggcctcattcaggtttagatggatttagggatttatgttggacatcgtagtataactgtaaggaccatcaccatgatattgctaataatacaatatgatggcagagagggctgtgccagttaggttttattgccctgcatcttgaaaagtctcaataagtatttactatttacctcagactagaaaattgaaaacttaatactaggtttaaggtgtgattcacctagctttgacactttgaaggcagtgcaatatatttctattcttgactttcccttctttttattttcattgattgtttactagccacacattttgagtttaaagttgtggttttcaaatacagattccagggccttacctttagcgcctccataaatgtgaaggacttcgtgctttcaatagagtggtgcttaatagtgtatttttccattgattgggagactcagctaaggtgacattttctatgaggccagcattgggccaacaacctcatagtgttgtatcaaataaggcttacatttctctgcatgtggggaaaatggaaataatagtggcttaataaaatcctttttccccc

SEQ ID NO: 30180 - DNA, 1026 bp, Homo sapiens
gaaggggtggaattcactttatttatttattttattaatttattttttaaatagaggcggagtctcactctgttgcccaggctggtctcaaactcctgggcttaagggatcctcctacctcggcctcccaaagtgctgggattataggtgtgagccactgtacctggcctataaaggaattcactttataggtggttgaggaagctgctgggtaatttaagtcagtattcatataccactcttgtgaatcatttatatatttatttttctttttgaaaggaggaaaggataactctactggtagttaaggtacaagaagattcccccttccccctttaaaggaatagaaggcaagaaaaagaatatttaagccccttttcatctttggattttgtgtttttttgatagtcttttgctagaaaaccctttgtagtactccccttttcagattaaagctcaaaacccttagcttaacatttaagaccttccacaatttgaccctaactctttacattgtcactctctcatgtgatttttctttccttcaccttccctatcagttagtcaccaaatcctattgtttgtacctctctattattatctcgactcttcccttttcattcatactgtcactaacttttttaaccttttcttttgaaatagcttaaaacttacagaagaattgcaaaagtagtacagagtttccttatgctatccacccaacttgcgctaatattaatataactgtagtacagtaatcagaactgataaattagctgtttatcatttctccatcatctctcactcacatggtggcaacagcttaaacagaagctttgtctccagtcttgtcttcttcattgattttctatgtggtatccaagggtaatttatgaaaatgtataatatagttaaacctttgatatctttccgttgctgttaggatgaagcctgatttttaaatatactttcaaagtcctttatgatctagtcccaggtaattaaacaatcaacaatcttaaaaac

SEQ ID NO: 30181 - DNA, 1050 bp, Homo sapiens
acgtccggcctcttctttggtttcaattgagcatttcatatgattccatttcgtttcctctcttaggatatcaattatactttttttttttttttttttgagacggagtctcgctctgtcgcccaggctggagtgcagtggcgcaatctcggctcactgtaagttctgcctcctgggttcatgcgtcagcctcccgagtagctgggactacaggcgcctgccactacgcctggctaattttttgtatttttggtagagacggggtttcacccgttagccaggatggtctcaatctcctgacctcgtgatccacccgcctcagcctcccaaagtgctgggattacaggcgtgagccaccgtgccccggccaagaagttcttttaacatttcttgcaaggcaggtctgctcactgcaaagtccctcagtttttatttgtctgagagaagtacttctttacttttgaaggataattttgctggatacaggattctaggttggttttttttttttcctcttgacactttaaacagttcactccactctgcttgattgcatggtttctgagatgtgggatgttaattcatacctttgttcctctataggtaaggtgttctttttcctctgacatctatcaatatttttgtctcccttacccagctcagtctttttagtgagcctgtgctcctgggctatcaactgcacaagtgcttctcagttcccccccaaggtgagacaggaaggcttgatgggactgagactgggtatttcccttcccgtagatgggttaggttctggtaaaaccaaggtggttaagctctgataaaatagtttcccttgagggtaggtttttgtttaggagaatagaatgcttagggcatatttcaaattggttacttttttcttcctcctgtgggaaattaggggaattttctcctgtctataccccgagaatctcatggggctgtaggaggtaaagctcatccagctcatccaagtgtatgagtctcccttagactgggtctgcttggggtttttaactctcaagctgt

SEQ ID NO: 30182 - DNA, 1068 bp, Homo sapiens
tggattcctgaacataatgccccactgtaataaggtcacaatccaaaattaagaaacacacagtgaaacaatgcattatgaactagttagcagacacaagcagaaggattagtgctccagaagatttaggtaatgcagtgaaaatctgaaaagatacaaaattaagtatattgaaaataattaaaattagaagaaatcagacccacaagagaagactgtgactatgacagaagaaccaaatagcaatgccagaaatgaaaaatacagtgattaatgtttaaaactttccatgagtgtgagctggacttgttgactcacttctgatgagtagagtatgaaaaaggaaaaatagcaactttacaatgcacctcctctacccaatgaccaaggttaacatcactattaataatacattgataagactgatatgtgcctcttgatatggtgcaatgagaagggcatatatataacctgtgaggtattcttcctccaaatccgtaacttcggtctataatgagaaaacatcagacaaacccaaatcgaggaatatgcagcaagatacctgaccagcactcttcaaaactgtcaaggaagagagactaagaaactgtcacagattggaggaaattaagaagacgtgaagacggaaagcaagagtatcctatactagatcctgggacagaaaaaggacattagtggaaaaactggagaaatggaatgaagtctgtagtttagttaatagtattgtaccagtgttgatattttagttgatttctttattattatactgtggttatgtaaaaggttcacaatagcagaaggtggtgaatggcatgtaggaactctgtactagctttgcagctcttctgtaagtctaaaattattataaaactttaagaaaactggaagctatagaaaatctattccagtttgtaaaccaaaattaaactttgtttagaacattgctaagttaaaataacacgcacaatggactggttaaacagaacaaccaataaaacaaaaaagagattatttactcatcaagtaccaggcactgtggtaaacact

SEQ ID NO: 30183 - DNA, 1033 bp, Homo sapiens
tatatctttttcagtggctataatgcatcgttacatatcagaatcacttggggacttaaaaaaaaaaagaaagaaacatggacaatgtcatcccaaaccaattaaagtcatgactctagtggatgagacctggacaattattctcatggatagctactaggttaaaaactcacttggctcattccttcactttatgtcaagtctactcaattggcctttcctcagaataatattctctgattactaaaacagtaccctcccatgactctctatccctttaccctacttatcaccatctgacattttacagtgtttctttaccattagaataacagcttaatgagaacagggactttttttcattgctgtatcttcagtgtgcctagaatagttcctgacacacaggatattcttaaataatatgtatatatttttatgcttattaataatatgtataaaatttctatgcttattattgtttataataaatcccatctgagatacgtgttgatttatatctgaaatctgattaatttaagaagagtaagttgggtgcagtggctcatgcctgtaatcccagcactttgggaagccaaggcaggtggatcacttgaggccaggagttcaagaccagcctggccaacatggtgaaacctcgtctctactaaaaatacaaaacttagcctggtgtggtagtacatgtctgtaattccagctactcggaaggctgaggcatgagaatcatttgaatgcagaagagggaggttgcagtgagctgagattgtgccactgtactccagcctgggcgacagagcaagactctgtctcaaaaaaaacaaaagaagagcgagcctcagaccggggatatggtgactcacgcttgtaatcccagcacctgtgggaggctgaggtgggaggatagcttgatcgcaggagttcaaggctagcctgagcaacatagtgagaccccatatctataaaaagaatttaaaaattaatgagctatggtggcatacacctctggtcccggcta

SEQ ID NO: 30184 - DNA, 1030 bp, Homo sapiens
accactgtacttcagcctgggtgaatacctgcatatatttccaccctcctgccaaaaattacctactaaaagaactgttaagagaataaaaagagatcaagcacggtggctcacgcctgtaatcccagcactttgggaggctgaggcggatggattgcttgagctcaggagttcaaaaccagcctgggcaacatggcagaccctatctctactaaaaatacaaaaattaaaattagccaggcatggtggtgcgtgcctgtggtcccagctactcaggaggctgaggtgggaggattgtttgagcctgcagggcagaggttgtagtgagccaagatcatgccactgcactccagcccgggtgacagagtgagactgtgtctcaaaacgaaaagaaaaaagagaataaaaagaaaaggcataaacctctagtggacaaaaaatgagagaagtgaaagctgcaaccaaattttcaaaactttgatgcccataaattagtggtaaaggacttggcaaatcagcagactataattgctaagccagtattaagaaaagcttgaaagctaccatatacaacagaaccctgaaaggtaagggaattaatagtgccaggtacctccagaaatgagagtgaaagtagggctaaaaacaggaagattggttgacaatcttaagatagagttagactctggtccctcccccactccatgctgcactccaggagatgtctggaggtttattctgcagaagggtaaaagaaatggtctctgaactgaaggacaccaggcacagttaaacatgggaataacttactgaaaagggcatttaagtaattgtttacacattgaatgttaagaatctatccatatcacttcattcaactcctggaacataaacattaaggcttattaccccatagacaagacgttgaaaaatccttatttgatcaatctgactagcctaagaggaaaaacagaagtattgacattggaggtgggaaatgctcacccacatcactctgcagtgaagcaaa

SEQ ID NO: 30185 - DNA, 1050 bp, Homo sapiens
tacaaaagtttttttttcttgtagtctggatgaattcattatttacaaagttgtttgtttttttttttaaaaaaaaggttttgggttggtcacttacttggtatgctacattagctattacctgaactttgattactccttaatgaaatggtgataaaagtgttaaaaaaaaaaaaccatcaattgatctttgacatattctgactaagtccatcattgtcagaatttaccataaattgttattcgtttagaggtaagttttttggtaaactacagtgcctgtatccagaattactgctaacttttattatttaccaaataaacagcttaaattttcatatggcagattgtaattggtcatttcctaataaatgtggtttacaccagatatttgagacctcacctcaagtatcagtttatttccactacctttatttttgctagtggtccatgctttatttttggaccacccgtgtttctttagataccagattcccaaatatccaacaccaagaataagggtagtagactctttacatgcagctttcagatcatttttggctcaagagttttctccattaaagcttgtaaacagaattactctgctttgagaatgtgttggataattagcttaaaagtttaggtttggtctgggatcttatatacataatatgttcacgattagtagaaagaattttactttggagaatgtgacagtcccattatgtatgcttataaagctcacaattttaaaatacggaattttaaaattgataagtacattgatgtatttgttacaggctacctggacaaaaaatacaatactatcatgacagttattttttccagaaaactttcagtagacttgctggtgagttaatatatggatcagaattaaatggagttgatttgcatttaacatcacttgcagtttgggactgactacaagtaacctgagttgtgagttaacaatcatcctttttgtatttcgtttagtctccccgagtgaaagaatcaatatcaaattctgaggtaagtaattgtgattat

SEQ ID NO: 30186 - DNA, 1033 bp, Homo sapiens
agagatcagagtgagtgaagttagccaagcgatggaagggaagttggccaggtgatggaagagcattccaggcagaaggaacaacatgtgcgagggccctgtggcaagaaagagcatggttcattccttcatgcaattgaagaaagccaatgatgctggggagcagagagaggcggaggctggtcagagctccataggccatggtatagagtttgtctttattctaaaagctatggtcagccactaagggccataaggggtaggggtatgggtgaggtatgaatgacaggttgtatttttgttttgaaaatatctctctgggggcattgggagaacagattcggagcattgctggaatggacgtggggaactattaaagaggtttttgctggtcattcaggtatgaaatgatggataggagagagctgagtagtaaaatggacaggtcctgttacaaaattgaatgtgagatgtaagggtgggatttctggctgtccttcagagtggatgttggactgtgggaaagaatgagttttggagagaaagatcatgagttcagcttgggctgccataacaaggtaccatagactgggtgggttaaagagcggaaatttatattctcacacatctggccgttaggagtctaaaatcaaagtgctgggaagattggtctcctctgggacctctctccttggcttgcaggtgaccactctcttgctgtgtcttcacatggtggtcactcggtgcaggagtgcttggtgtctctgtcatctgtatcctaatcttcttataaggacatgagtcatactggattaaggcccattctaatgacttcattttaacttaattgcctttttaaaggccctgtctccaaataatcacaatccaaggccctcggggttaggatttcagcatatgagttttaggggcagagggggcacaattcagtccgtaacactgtggacttgctggttttgaggcaccctcgtgagggcctggtaaaagtgtccttccctgtctgttttagacacac

SEQ ID NO: 30187 - DNA, 1024 bp, Homo sapiens
ttatctttataaattaacttggcagaattgacaactttatgagattaagtcttcctgtctaagcacacgttatgactttccatttgttcaagtcttcttttgaatacttcacatgtgttttaatatgtttaacatacagcttttgctcactttggtagattgcacaaatgaccacaatactccacccatccctgtacccacaccctttgcaatgtgactgtaattcctcccatcaaggagtcgtttccctacctgttgatttgctttatccagtagaacaggggaagtggcattgtgccagttctaagcctaagcctcaagcagccttatgtgcttctgctgtcattcttggaactctgcctagccaccaaatgaacaagctcaggctatactgctggagagttggacatatgtggcctagttgccccaacttcttcccctaagagccagccagcccctagctactgttagctacctatgaagcagagccttctagctaccgttaactgactgcagatgtatgagtgagcccagctgagccccatccaatgatagcaagtagaattgtgagcttaatggttttgagccactaagttttgaagtggtttgtgacaatgcagaaattacccaatgtagataattatttttaagtttatttctaacttttttatccttttactactgtaagtggggaagggaggtttctagcagaaacttatcagctgtcttccaaactcatttccctttcttcctaggcactctcctgccttccttgtagttatgttcagccatgtgactgagttctagccagtggaatataagaaaatgtgatcaggcctctaaaagacctagtccatcaaaacctccttctctgacttttctcccatttttggctgatgtgggtgtccagagcaaccttggaagcacatgtggaacatgacagagccaccatcaacctggttcctgaatgactgcatggagcagaactccccactccccactcatgttcctaaccacctactga

SEQ ID NO: 30188 - DNA, 1877 bp, Homo sapiens
ttgcatagctaaagaaaaagtgcacagagtgctgaaattctagggactactgatgaagcttgaaggaggcagccttggggaaaatagaaataccagcggggctggcacagcacaggccctggcactggacagcatgggactgaattctggttctatcagctttgtgactttgtgtctcggtttcctcatctggaacaaggggaatgatgctattcatcttacagggctgttgtgcaaattagatgagttaatacttttaaagcacttaaaaaatagtgcctggtcccacaggtaatgggaaaaacatttacccatcacagcggccccacccatttgcagtggacactggctgtgaatgccctggggtgttctacttggccagccctgttctccattgtcctgtggggacagtggagtagagagagagagaaaaagatctgggtgctgcccctggggccctttggtgggaaatgcttaccacagagccagaacaaccagaaggaactctgggtgggacagagtgctggtgtgaagaagggacaagggcaccctgaggcctggagggagtcgtgtaactgggaatcttgggccatgtggaggaggggctgctgtgaggacttcgcgttgggagtctcagccacagaagcacttttgttttcttttcagagacagagtctcaccttgtcacccaagttggagtgcagtggcatgatcatagctacggcagccaccaactcctgggctcaagtgatcctcctgcctcagcttcctgagtagctgggaccataggcttgctccaccatgcacagctaatttttttttttttttgagacagagtctcgcttttgtcacccaggctggagtgcagtggcgcagtctcggctcactgcaagctccgcctcctgggttcacgccattctcctgcctcagcctcccgagtagctgggactataggtgcccgccaccacgcctggctaatttttttatatttttagtagagacggggtttcaccgtgttagccaggatggtctcgatctcctgacctcgtgatctgcccgcctcggccttccaaagtgctgggattacaggcgtgagccaccgcacccggcctaatttttttttattttggtagtgacagggtctcactatgttgcttagattgggcaattctgcctcagtctcccaaagtgctggaattacaggtgtgaaccaccgtgctcggccgtttttcttgtatgattcacactgacatgctgaaaacagcctctgccaccatgaggcagaatgtcaaagccaaaccatcagcatccaaagtatgccatgaggccagtgcatggagctgaaggaacagccatgtggccctgtggaagctgacagcacagctttctgacccgctttctgacgcaggtcagaaaggcagagaaagggcagacagaaaacagccaagccaccgggactggtaatccacacacggcttttagttggatgtgaaattcagagcaggctttgtttgccttgtgcgagaacacatgcctccaagaaggagcctgtgcagacaagcagcttgaggatcgggaaagaactgactctgaaaaggcattttcatttgtcacgtaggtgtcacatgtgggggaaccactcaagacccatgtttttcgtcatccctctttttgcaggtagtgctcagatagccctccctgcactctgtcttttttggattactttccttagaacattgctctctgcacgttcacgtccaattattgttaatccagtcactggggtgatagagtgagtgtgtgaggcattatctgctcccatgagtttgcttactggtgtcctgttacctttttttttttaatgctatatccagaat

SEQ ID NO: 30189 - DNA, 1219 bp, Homo sapiens
acgtttattgagcccatttggtgccaggcattgtgctcatggttttctataccttcctcatttacttttctttttttttttttttaattttttgagatggagtctcactctgttgcccaggcttgagtgcagcgggacgatctcggctcactgcaacccccacctcgtgggttcaaacgatcctcctgcctcagcctcctgagtagctgggattatagatgcaagccaccacacctggctaatttttgtatttttagtagataggggtttctccatgttggccaggctggtctcgaactcctaacctcaagtgatacgccccctcccaaaatgctgggattacaggtttgagccaccatgcccggctatcatttacttttcaaagcaataggcactattgttcctctttctagatggagaggttgagactcagaggctcaggctaaataatctgcccagagtcacaaggtcatagatggtggagggggctcaaacccattcctctctggctctgaagctgctgttttctttctcctccacaatgtgacctttctcgggaaggatttagttggttcttgctcctcaaaattgacattgctgctggagagtcactggagagtcatcaccacattttgggttgtacctgagagatgtttctgaccccagtaaatggggggtttatgtaagacactctgtctggaaactgtaactgtcagagttggcgttggattcagtggcagatgatggcactacatgttggattatgaatggaaagctttgtataaagtaggaagttcatctcaatcttctgatggaggatcagtttggtttcttttgttagagtgagaagctatgcctgttctctttcatgcatatcaatcctagatttgtcaaggagaaagtagtgttcttcattcattcattcaaccagcagatatgtatgattggtgccaggcaccggggacacaaaggagaacaaaacattggtggcccttgctccccagagcctgctgtctaggagggagagggacagtagacgactgaatgagcatgtacatgaatgcagcaggtgctaaggctaggttgcagaagaacagagtgccgcaaaggaaagcagctggtgggcgggttggagacttaccctgggtggggtgatcaagcctgggcgtctctgagaaggtggcctttaggttgagacctgaaagtactcaggatctca

SEQ ID NO: 30190 - DNA, 1031 bp, Homo sapiens
aaacttgctggtttttgtggcttgtggggcatcacggatcctaccaacgtgggatgtctcccccagacacccagctttaaaatttctctcttttgtactctgtccctttgtttctcaagccagccgatgcttaggaaaaatggaaaagaacctacgtgattatcggggcaggttccccgataatggtgaaaccccttctctacaaaaaatacgaaaattagccaggcgtggtggcacatgcctgtagtcccagctactcaggagactgaggtgggaggatcgcttaagcctaggaggttgaggctgcagtgagccatgagaccctgtctcaaaaaaaataaaaaaagcagatgaaactatttactattgttggaagtcgggataattagtagttacctttcagaaggggcctgtggggtgctgtcaatgttctgtttcatgttccatgggtgtgtttagtttttaaaaatttatgaacattataggcttatgatgtgtgcatttttcaggatgtgtgttctaggtcaatacaagattttaacatgtgtaaaatgaccaccatgagcattctgattgccctcatcccaccaccctaagtgtaaaaagacgtttcctaaaggtctgcaaagacttccaagttccctgaaaatgagactgggtgagcagggcagggttggtgctggagttggtggagtgcctggcaggggtcctccggctgtcagaagagaaccccagggaacggaacagcccagcatacagggagaagcagttagggcaaaaggcccccatgggctcaggaggagctgatgggattgtggcattattcccagcctctaaggcatttcttgtgcaaaacagcatagagttacttatcctcttagcaagcttaaatgcagaatcagacctgtcttgccgctctgctgagtgatcacttaaatagacatacttggaaccaacagaggttgcacgcacgtgaggactcattctccaggctgctgtgtggactggccagctctttcgttcttgcccag

SEQ ID NO: 30191 - DNA, 1034 bp, Homo sapiens
ccaacacttaacagcaacaacctttaaatctgttgccagtctgatgggtgcaaactggtatctcagtgttagtttaatttgtgttttcttaattaacgatgattttgttttgttttgttttgagatggagtttcgctctttttgcccaggctggagtgcaatggcgcgatctcggctcactgcaacctccacctcccggttcaagtgattctcctgcctcagcctcctgaataactgggattacaggcgcacaccaccatgcccagctaattttgtatttttagtagagatgggatttcaccatgttggccaggctgatctcaaactcctgacctcaggtgatacacccgtctcggtctcccaaagtgctgggattacaggcgtgagccaccgtgcctggccaattaataatgattttgaacagctctttgtaactctggtttctttctctgaattggctatgtacattctttcccatttttctatttgatttcctatctttctcttattgatttgtaggattttattgtatactttgaatattaggtttttgacagttttttgtgttgcagatatctctcatttatctgttgcttatttatagtgtcagcaatttaacagaattttgatgaaattcatcaatttttcatcttccattttatgcttttgagatattgtttaagagatttccccccactccagtatcacagaagtactgttttatgtttctcctgttgatgttacaattttaccttccacatttaggactttgatccatctgaagtctttgcgaatgatgtaacttgggatccaatttgattttttccacatgttgatccagttttccaaacactatttactaagtggtctgttttaccccattacttgtagtgccccctttatcatttatccagtccctatatatacatgggtctttctctgtactccctttcattttttttttcctttttttggagacagggtctcactttgccgcacaggctggagtgcagcggcgcgatctcagctcactg

SEQ ID NO: 30192 - DNA, 1055 bp, Homo sapiens
catctgaactgagaaaaccataactacctggtgagaagtcttcctcagggcctccttgagtgcagtgactcctcctggtcctgcctcctacctactaagttgttacaggagatacttttgtagggcatatgaggttttgaagccagggtcattcttttgtctgtatgatgtggatctcaactctttttttttttttttcttttttttgagacagagtcttgctctgtcacccaggctggagtgcagtggtgcaatcttggctcactgcaacccccggctcccaggttcaagtgattctcctacctcagcctctcgagtagttgggattacaggcacctgccaccacacccagctaatttttgtatttttagtagagacggggtttcaccaggttggtcaggctggtctcaaactcctggcctcaggtgatccacccgccttggcctcccaaagtgctgggattgcaggcatgagctaccatgcccggccagatctcaactgtttgtgcctgggctgtaacctggttgggaggcaaagagaccctctcctggacagctgtgtgaactgctgtatggactgctacatggtcttccattgagaggagcacctcctgccactgtgtttctccaggctgtcttcccttggctcatggtggtcttataagtctgaatgtttagtggtatcaaagaagacccttggtggacttggcatcctacatttaggattatttccttaggagagcttcaccaaagtagaataactgggtcccatactatgggctccttaatacagatataaagtcaagtctatttcccaaagagttgtatcaccagctttcaccagctgtgcaatgaggcagccatttctaggtactctcaccagaatttttttgaaattttgtagatttgatcataaaaattggtttcttgtcataatttacagttttaaaaaatcttaaactgtaggtttgagaactgctagcatttcctcttttgtgaattgatgctttctttcgcccagaaaaaaagttaaattgcaagtaaacgggatttaaa

SEQ ID NO: 30193 - DNA, 1978 bp, Homo sapiens
tcttacttgccccatgctcaccctttccatgctgtccccattctctcctttcaccatctctcctctccccctccttcatctctcctccctccccaaactcacttggcataattcacaacctcccacccaaacaatgggcctggtggacgtgcttcctgtgccctccctttagctatgcccacagatcactgagagggaccatctcccaagtggtgcagtttagaacttctctccctttttctccctcattccctctctcttcttgcagtccacttgctgaagaagttgtgtcatttctctggaagaatttccaaaattctggatttcttttttattttggagtatttcatcagctgaaaagtgattctcactttgagttttcttcctatatttgtatagtgagttcctttttccttcctctttatccctcctgttttactttatacctctctattccttgctcaaattattgcaaaagcctctatagaaagtcctctgtgatctgactcctgcagactcttccagatttttctgcccaaggcctttactgagctcaggactccagctaaatcaaaatacgcatgttctcacccagagtgacaaaatcctgcagataggtttaagacctagtggctcagagcagtagctactgggaagttaaaaggaaggggcttagaaaatgaatgggaccaaaggcatcacttctgatggagatgaagccatcttgaaagtgagtggtgtcctttggaggcatggtggatgaaaggcgcaaaggaagcaagaggttaaagataatggcccattagatacaacagcaagcccaagattccgaagaagacagacaactccccctagtaccacctagacattactttttaaagacattttacattattgtccagcagaaaaaggctgtcttggaccatgaaacagtaaactgtaactaaacacttcaacatgaatttgaaaataaataattgtggatataaaagaacaccagagatcagaaattcaaaaactcagaataaaaatgaaaaagctacaagcatatatgagaagagaactgactgaacttgggaaataatttgaacaaaaagataaatcttcacagatatgaatactaaattatatcttaatgaaaatagatatggtcacaagtacattaaggcacgtagaaggtaggagtaagaaaagctaagagaagcaaaacaaacaaagcaatattaaaggaagagccaaaaagacccagaaataaaatgacagataaagaagattgtcaaagaaaagatgatacaggtaagattggaactcatgaagacaaaagataagacagtggcatagagttaatatttaaaattcaaatattaaaactcaaataaaccccaaagaacttttggaaaacaaaagaaaaccttaaactttatcttgaaagggtctatcttgttacttagaatattgaaccagaatgattagctctgagacatagcctaccaactatactttgaagccaaagaaaaagaactatgtaagcctctaggccaaaagacctagtctcttacaaaggaaagacctggttggcctcaaacttctcaacaaagcaagatagcaatggggcaaccttttcaagaaactcaaagtatgaactgaggatttcatatttcaccaagctgtcctttaagtatcaaggatataggaagaagttttaattacacaagagcccagggactattatactcacaacttcttccttagaattctactaaaagacaagcttcatccaactagatgattggggaaacttgagcaaaaggactggacatgaccattgaatatctttgtagatctgaggccaaatggaagtggggataagggtggaagaaccgtattagtcccttctcacactggtataaagatagtacccagctgggaatggtggctcatgtctgtaatcccagcactttgggaggctgaggcagga

SEQ ID NO: 30194 - DNA, 1051 bp, Homo sapiens
ttattgtctgttatttataagagacacatctaaagtaagtgattcaggagaggctaaaaaaaaagagatgggcaaaaatagaccagacaagtaggaccacaaaaggcaaagattacagtatccatatctgaaaaggtagaattcaggaaaaaatagacaagacaatgaaggatacattaaaatgctaaaagccacaattcacaaggaggatatactatttatgagtgttagagcttcagttatctggtttgtcaactttaagtgatattctttggctcctgcctatcccctgtacaacaaagagctctttctactttcctctttctctctccctcctttttcattgtttccgttgtgttacttctgccttgtcaaagcacataacatttgcataacaaattatgcaaggaaaaatgaatagaaacctagaaataacagagaaatttaaaacacctctctctcatccaagactgaagttaaggagacaaaaaatacatataacgatataagtgatctgagtaacagtatctataaagtagatctaatgaatatatgttgaactttctaccttgataatagagaatattactctagggcaagcgtgatggcccacacctgtaatcccagcactttgggaggctgaggcaggtggatcgcttgagctcagaagttcgagaccagcttgggcaacatggtgaaaccccatctctacaaaaattagccaggcatggtggcaggagcctgtagtccctagaaatttatgactcttctaggaatcaagattgttgtcccacagcagcctcacacacctggcatagcagtgattaaactcattgggagctatctcaaaaataattgtgagtgaggcttttggtacatagagtagactccaatcagacacataaaacccacagtacattttaggaagctatactaatggcattaacctggattaaaagggactaaatgttaaaagaccctggacccccaactttctatgggcaacaagcaggcatagttgctcaaaagacagtttctagcccaggcatag

SEQ ID NO: 30195 - DNA, 1055 bp, Homo sapiens
taatttttgtatttttagtagagacgggatttcaccatgttggccaggatggtctcaatcccccaaccttgtgatccacccgcctcagcctcccaaagtgctggaattaacaggcgtgagccaccacgcccagccataagaatcaatttttgtttgattttgtgtcttgcaactttattaaattcacttactagttatggtagtattttgtattagtaggatatgtagggtttctatccatcatgtcatgtcatctataaaaacaaagacagttttcttctcttcaatctgtaagcattttatttcattttcttgcctttctgcaatggctagaatgtctagtatagtgttgaatagaagcagggagagcaataatccttgccttgttcctgatcttagcggacagcattttatcactaagagtgtgtgtgtgaatacgccctccatcgggctaagaaatttccctttcatttcttgctggaggtggggaggaatatttaaaaagaatgtgtaggtttgtcttgaattttgttaaatgttttgcatgtatgtgttatggttttggtattatgtgttccttaaatatttgattgaattcaccagtgaaaccatcttagttagatgttttctttgtggaacttttaagtgaaaactcaatttacataaaaatatatggcccttcagattttgtacttctttttgtgtcagtgttaataatacgtatctttcaaagaatatccccctttttttttggtagagatagggttttgccatgttgttggtagcaagccctaaccctgtcataaacaggccttaaataaactggccataaacaggatttctgcagcaatgggacatgctcatgatggctgtcatgcacactgctaaaagttgttggtttactagagcagggcaaggaacacctggccccgcccggagcaaaaaactgctcaaaccacaaacgatagcaggaaaggcctgtgccttggcagcatgtttttgctgcagataatcagccagagcctgtttctctgctcctcgctgagattgctttg

SEQ ID NO: 30196 - DNA, 1034 bp, Homo sapiens
aaccctgtcataaacagaccttaaagaaactggccataaacaggatttctgcagcaatgggacatgctcatgatggctgtcatgcacactgctaaaagttgttggtttactagagcagggcaaggaacacctggccccgcccggagcaaaaaactgctcaaaccacaaacgatagcaggaaaggcctgtggcttgacagcatgtttttgctacagataatcagccagagcctgtttctctgctcctcactgagattgctttgtttcccataaagaatgcttttagctaatctacaatctatagaagcaatgcttatcactggctttctgtcaataaatgtgtgggtcaagctctgtttgtggctctcagctctgaaggctgtcagccccctaatccccactttatactgtattcctgtgtctttgtcttaattcctctagtgccgcttcgttaggtctccatgactgagctggtcttggcaccatgttgctcagactagtcttgaactcctgcaatcctcccacaaagtgctgggattacaggcgtgagccactgcacctggccacaatcttccattttaacttgtcaaatttattagcataaacttgtttaaatattcctttattatccttgcatgtctgtagtacttgtagtgaaagaattccctttcatttctgaaactggtcatttgtgttttttctgaatcagactagctagaagtttatcaattttattgatcacacttttttcctattttattgatttccattctttattatttacttcaggtttaatttgctctgcttttcctagcttttcttttcttttctttttttgagacagaatctcattctgtattccaggttggagtgcagtggcatggtcttggcttactgcaacctccgcctcccagttcaagcaattcttctgcctcagcctcctgagtagctgggactacaggcgcccaccaccacacctggctaatttttgtatttttagtagagacaggtttcatcatgttgggcaggctggtc

SEQ ID NO: 30197 - DNA, 1014 bp, Homo sapiens
ctgaacgacaattgagtcaatgaagaaattgagatggaaataaaaaaaaattctttaaggaaatgaaatataccaaaatctgtgggatacagcaaaagtagtgcaaaaagggaagttatagcagtaactgcctacatcaaaaaatagaaagatcacaagttaacaagctaacaatgtacctcaaaggactgaaaaagtaagaacaaaccaaactccaaattagcagaaaaaaggaataaagatcagagcagaactaaatgaaaaacagactaagaaaatacaaaggataaacaaaacaaaaagtttgctcttcaaacagataaacaacatggataaatcactagccagactaaccaagaaaaaaagagagaagacccaaataaaatcagaaatgaaaaaggagacattacaactggtaacacgaaaatataagagatcatcagggactactatgaacaattatacatagacaaactggaaaaaacagaagaaatggaaaaatttctggacacatacaacctaccaagtttgaaccaagaagaaatagaaaacgcaaacagaccaataacaagtaacaagattgaaacagtaataaaaatcttcttaacaaagaaaaaccctttactggatagagttacagctgaattctaccaaatgtaaaagaactaataccaaccctcctaaaaactattctgaaaaatcaaagaagagagaattctccctaactcattctatgaggccagcatcaccctgataccaaaaccagaaaaggccacagcaaaaaagaaaactacagggcagtatatctgatgaacattaatacaacattcctcaacaaaatactagcaaaccaaatccaacagcacatcaaaaagataacacacctgggctgggtgtggtggctcacacctgtaatcccagcactttgggaggccaaggcaggcagatcacctgaggtcaggagttcaagaccagcctggtcaacatggtgaaaacccatctctactaaaaata

SEQ ID NO: 30198 - DNA, 1021 bp, Homo sapiens
aaattagatgtacattggaagagtcattagagtttaaaatatttaagttccaatgagggatggtagagatgttgatttaggcttttagtataagtgtacccattaaagtttataggcctagcttacaacggaataggaatgagatgtataactttaaaagtggctaaaataggaaattttaaaagataatccaaatagaggtaacggtagaaaagaaacaaatttaaacatacccagtaatcatatatataaacatacccagaaatcataaatgtaatgagaccgaactctaattaaaagatggtgttagattgaattggggggagggaagagagaaagattttttgtttaagttagaaaaggtaattttctctaatactaacacacgaaatgtcatatagctatgttaacatcagataaaatggactttttggcaaagagcattcattacaaatgaagagggttactatatagtaagaaaaattttattaccaagaatatataaaataatttctgtaactcaaaggaaaagtaatccagtagaaaaatgagaaaagatacaaacaaacagttctcagaaggaaatgttagtaatcacaagaagatgatcagtctcacaagtaatcagggaaatgcagatccaaattgtgtaccatttcacactcaccaggtgaaccccaggtgggggctgtcatctgttgggaacttggattggcacatccactttggagaacagtttaacagtatttagtcagttgatctttagactctatgacctagccaagaaacgcccacacatgagtgcacacacacacgcacacacacaaatgtaaaaaagaagtcatgatggcattgctgagatcaacaaacataaataacctgagtccagtaggtgagtggatacttaaagttatgtgaggttataagcttctgaaataaatgcacttcagggctgcaggagaggcagcagtatataaagaacatgcactctagagacaggctgcctggggtttgaagcctg

SEQ ID NO: 30199 - DNA, 2579 bp, Homo sapiens
tgaggtgctgagctgtggatgcagaaccagcgccatgctgaagagcctcagccacctcctgtcctttgggattcgtttttcccgctttctctttgtttgtcgtctcagaatctgtgacacaaagaaacccatctcctgtcttaggaaacctaatgctgcaaactctacctagaggaacctttgaagactgttacataagaacataccttcctcagaagaggagtttcctctgccctctgcccttctcccctgcctccctccctcccctccttttattttgttttagtgagcttaagaaacagcagatgtgtctttcacggatctaacgggtgttgtcctgatcgagaaaaaaactgggatgagaatggtttggactggagttggaaggggaggacggtactgggggtagggtttggaacagagctacactggactcgggcacattcggagcagcatcctttagtatggaggctacttctcaggtaaccaggaattgaggggaaggaccttgtggaggccgagcattaacagcaagagcggggtttggagaaagtctgagattgggtgcagccctgacttacctgctggccctgaccagtttcttttcactaacttggccttgggcataggatgaaacattttttctgccctaattttaaaactaggtgagggtagaatcatcacaggttaggaatacattcttcataagacacgatgctgtaaatacccttaatggacgaaaagttgaaatacttttgtttcctcttggagcagttcagggaaatgcccacaggggattgtcctgcacagatagggcaagaggatttcctgggtggagtctgccaaggcctgcctcgctggggaccccagagtcctgcacctctggttccgccccaggtggtgacattactgtccccgttctgtggctcgtggacaagactttctccagaccccttaaagtggtacatattctaaaaaactgtttttctattatgccataaccttgctctagtcagtgaatgttcctaatgctgctgtttcaacatttgaattctttttaatttatgaaacatgctaaattttttttttcaaacaaaacacacacatccacatatacacatgcttcgctatgtggcttccaaggtttaaattttgaaaagtaaaagaattaaaacttcacgaccacagatcacctcaaaccagaaatacctcagaattttctacttatgtaaggtttattatatattttgttagttgtgttgtcttgtagtaagtatattttaatgtaagttggcttttgtgacaaggaagtttaaaagaaatagagaaaaagaaaaaagtttgcatcttctagggagtgctaccatttttgtttgataacgcccccttgtaaataattgtcatcaactgtaggttggctgtctgggccaagtctgggcatttatcagtcttgtttgtgaaggcttttccttctggtttctttagatcattttatttaaaaacagtgcatctcttcatcgtgagggtaggcaaggcgggggccgtggggagaggttgacctgggtgagaactgaagaggccgcctcctcttgggttgtttggagcttcacatgtaattcacatgtaacatgtaacttgatcggtcagtgttcagaatgacaagtaaccccgcttaaacttggtagaaggatggcccttagacctgaatggggtgattttacttgggatttaacttcttcagcaaattaacagcaacgttggaagagatctgtggcgcctctgtgaagcacaccgtgactcaggccagtcttttagtgcagcgtgtctgggagtgaagggttttgcccttgctggtcttggagtccacagtgtgaggggcactgcacatgcctgggcatctacctagtgtgctatgttcagtgtctggggcttactgccccggggtcctttcctctgggtgttggggcacagggtgctatgggaggcccatttgcttccctctcggagctcagtttttgcttcatgggtcaaaatgtgggctggccaagtggttacaggaacagggtttcggtaagctatgttgtctttttttttttttttttttttttttttaatggtttgattttgtgctgtggtattttttttcccttagaataatttttaatggcaaaacaggccttacagcagttgcttttctttaccatttatttctttaagaagctttaaaatatttattgaaaagtgccatatctaatttctttagctttcgcctcaggcagtgcaggcatctttacttttcatcctcagaagaaacaaacgactaacaaatgtagcaaatttactgcaggaatagttaggtcatgatactacctgaacactaaaccccagcctctttgtttggttttagttcctctgggtggtttttcttttgtgtgctggcttgattcttgtgagaagttttgacctggccaagggagggttgagccatggttctggtgtgggactttgcggtcaagacacagtacagacaggtcaggcctgcgtgccttttctctgggtggcctccccgttaggcccac

SEQ ID NO: 30200 - DNA, 1028 bp, Homo sapiens
ttaatctagaatgatttccctgccaaaaagtgggaggagtgtctttcatgatattgacaattgttgcgtaaactattggtgattatgtcattaagatagtaattctcaaccttggacactcattataatcacctggagaagtttttgcagtcctgatgcccagacctgaacctcatacttacaaaactggaaactctcagggatgagacccaggcatcaatatcaatatttttaaagctccctagattattccaatgtgcacccaagattgagagcgactgcttgaagagaaggtacttgtagcattggcagttagtatagatcagtgaggaaattacagtgaggtagagccttgtatatttgggtgaaaaatgtgaagtgaatgaacacatagtggccagatattcagaagaacaaggacgttttctctgccacttttgaactagtatgtttgtactgtactaaaataacttttgtgaaaattgatctctattgagaaactctttgccagaggcttaaaaccagaatttgcccttaagctttgtgttggaaatatttagttcttagaattcacgttataggtttggattttataattgataagcctacctgactacttactttatagtcctcattttgaataattattataagagctttctgtcctggaataattatggctttcatttattgaaacaagtagtcaataattgcctagcactaatgtttaaataagaaagtgtttttctgtgtctttttaataaaatatcttttaaaggggaaagcatttcagtgcaagttactatgtttctttctttacagaaagccatggctgaaaccttttacctttctaacattgtgcctcaggattttgataataattctggatattggaacaggtgagggatgagagttttaaaaacatgattctatggaagataaatgaagtgacaggagaatgtactgatgtgcctattagctgtttctgtctttgtttttcaaaagctaagcctctgaaggtaagtatg

SEQ ID NO: 30201 - DNA, 1089 bp, Homo sapiens
ttacattaaagtgtgacatgctgtaatagaggtaaacacacacagtgtggtcttgtgaaaggactgatgggctctactcatatgagtcaggaacgcttaaaagaggaagtgatattgagctataccttgacagataagagtcaggagtggaccctgaggattccagaggatggagcaggatgagcacaggacatttgtggtcaacatcagggttttgagatttatatatcattcataaaaattggagcttatggtacaaaacagtgtgggtggctcaaggggtatgaagagttccataacaacaggtggacgggtgagataatatgcgactttctattctatgatgaagacttgggttttaatttttaggcactaagaagtcatagatttgttttaagcgtgggagaaatatgatatttgggttttataaagagtattttggcagcagcgtgtaaagagataggtgggaaaagggagcatttgaagaagagattagaggcaaggagatgagttaggacatacaagcagttggagtgaggaataatagaggaacacaggaaagagtaaccatgaataaataacttgtttgagtgaggaagagggagaagttccaggataacaactagattgcagaccaggctcagtggctcatgcctgtaatcccagcactttgggaggccgaggcaggcgatcacgaggtcaggagttcgagaccagcctggccaatatggtgaaaccccgtctctgctaaaaatacaaaaattatctgggtgtggtggcgtgtgcctgtagtcccagctacttgggagtctgaggcagaagaatcgcttgaacccaggaggcggaggttgcactgagccgagatcgcaccactgcactccagcctgggcgacagagcaagactccacctcgaaaaaaataaaaataaaaataaaataaaaacaaccagattacagtgttacagtgagttgaataaatgggaagaaaagcttttcttctagaagcttcttttttttaatatgcaagatatgtgagcacttttatagactgaaagagagattaaagataggagagtgtaattagtggtgt

SEQ ID NO: 30202 - DNA, 1426 bp, Homo sapiens
tctgggttcaagcgattctcctgcctcagcctcccaagtagctgggattacaggcatgcaccaccacaaccagctaatttttatatttttagtagagatggggtttcaccatgttggccaggctggtctcgaacccctggcctcagatgattcacccacctctgcctcccaaagtacaggcgtgaactaccaagcctggcctatttctatttctttttcctgttccagggccactcattgtattcagtttccatgtctctttcacctcctttaatctgggagagttcctcagcctttctttgtgtttcttgaatttgacaattttgaagcgtgcaggccagttatttgaagaatgatgttgctcaaatcctgttggatgcgtcctcattatgactttcaggtgatgtgttttggggatgattgctgaaggtgatgtgtctttctcagagtcttacatcaggaggcacattatgtcaacttttccacttgttagtgatattatctttgatcacttagtttaagtggtgtctgttccccctcctgtagaattactattttctctttctaagtaataagtaattgtggggagatagtttgagactatattcctcatcaaacttatacccactagtttttgcccactaataattttttacaccatcattacttctaaacttactagttggcccattcatactggctcctgtgtcttttgacatttatcttcatccgtctttaagcacttttttgctttctggcacaataagatgttccaggttttctggtgttttcctggctctagccctgaatcagccatttcatcaaggagccctggttccttttaatggagaatgatatttagaaaccaagatttgggtgctgtaggtgctcattcatatggtgtgttattgcttccagttggtcctttttattatccattcatttggatacaatggtgagggcgccactgaagaaagtgtggcttagggatggaaagggggaaaggagccagatgacctaggtagagactcccctctccccctctagctctccaggtcttccccactttctctttcctccctttccctcttcatcatgacctcatttcccttttcttgatcaaaattcctctggagattccagctgtgggaacctctgaaaccacttctgcagctacacgtgtgataccagaggcagacaactatgtgacctttgtgtgtgaaaagccaaaggcaaagacaatttatgagaaagtttttgctgagaacaatctggtgacagggtgattggggaagacacatttggaagatttccacctggacgtgttccttttccctgcctgaaaagcactcagagcagagcctgtgtggaggctgggatagggtgctgtgggaggtctgttctccagataagcctcttcaaggct

SEQ ID NO: 30203 - DNA, 1680 bp, Homo sapiens
gagaaagggtggcaggtagggctggcagaaggcagatgtgtggctttatagtgatcctatgcttggggctgggtgggtttcagctggggtgtgggagcagagaaattggctttgggaggctctgtgatgggggccttgcagcaggtgggtggtgagggcagcatggaggtggtggctggcctggaagggaggaggacactgggtggctggggtgccaagagagtcctggtgggggctggtagctgggaaggctgggcagggctgcccgcaatcaagagggtgacaatgagtatgaagagtatgcttagtggaagtgaaggcctgggaggctgggaggaccagaggttcgtctcccccagccgcgcccttgctccttgctctcatcttcctcacccttcctgcaccctggccgcttgggacctcctcttctccctgatctggtctttcagaaatctctggcctctaacctctataaccccttcctctcccagcctcccagccctgtccactccccgagtcacatccccaccagccctcctgccctgcctgcagcctgggccctgctgagctgccgtgcccttctctcatcacctcctcctcgctccctgtggcaccttggcaccagccccagatctgtgtgcactgatttcccaacattcctgtcctccttcccaccccactgccccaaagggaggggctcaaggacttgagacgcttcccttggggggcccagctttcccccagagtcagggagggatgaaggcagggctgctggagggctgggcccgcagacctgtggagctgcctagtgggaggtagagggctggagtgggagagcatgcggagccaccgtgggggcaggagatgcagccctgcaaggccacactgctctccccagcttcccactgtctattggtcttgcctggtgtcacctgcccttcccagctctgcctctgacttctgcatctcccctgatcctttcagtttctcatggtccttcttatgggtgattaaggagttgggccctaggccatttctggaaggcaggagttggaggtgagcttcctgttgccttgtgtgtgtaactctagagtcccgtaggtgggtggctgctggacgtgccctgggaggggaaagggacctgtaagggtgtgtccataaacagagcgattctagaactcagggatgctactgtggacaggacttagagattgttcagcccccaccctcttccacaaccatttatagatgaaaacattgggctttaagagggaaataggattgacatgaacgagtcacgtaggggttagtaatcatcatcactgtcatcatactagacatttattaagtgcttactatatttgagggatcattgtaaattctttacaaatcttaattttcatagtcctcacactaccctgggaagcagctgttgttattttccccattttacagacaagggaacagagactggaacagtgaggtcagtttccccagatcacacagaaagcctgtgtcagagcagtggaagtttatcacacacagggaggcttgctccttccaatgatgatgtaagcgtataagcattgttgagagctctttaaaacagtggcagacatttcaccaaagaagatagaggaatagccaataagcacatggaaagatgctcacattatgggc

SEQ ID NO: 30204 - DNA, 1064 bp, Homo sapiens
cttagcacattttcaaggttcatccacgttatagcatgtgtcagtacagtgtgtgtgtgtgcatatatatatatatatatgcacacacacacatcacattttatttgttttgtccattgatggatatttgggttgtttccacttttgtaacattattgtgaatgccacaatgctgtgaacattcttgtacatagaaaaggttttgacttgtatttggccagatcaccattgctcttttccttcgtaaagattaccatctttcttggcatgttggaagagttttctctggcaagggactatgtaaatattcacctgtcttttaaaaattatttttatgctggccaggtgcagtggctcacgcctgtaatcccagcactttgggaggctgaggcgggtggaccacttgaaacccagcctggccaacatggtgaaaccaccatctctactaaaaatgcaaaaatcagctgggcacagtggcatatgcctgtaatcccagctactcaggaggctgaggcacgagaattgcttgaacctgggaggtagaggatgtagtaagccaagatcgggccactgctttccagcctgggtgacagagcaagattctctcaaaaaataaaaacaaaaattatttttatggttattaaatttcagtctttaattcatagaaaaattcgtttttggtttaagatgtggagaaagggtataattgttcctaatagaatcactataggtacttgagataattttttttaattattatacttcaagttctagggtacatgtgcacaacgtgcaggtttgttacataagtatacatgtgccatgttggtttgttgcacccatcaacttgttatttacattaggtatttctcctaatgctatccctcccccagccccctaccccccaacatgccccagtgtgtgatgttccctgccctgtgtccatgtgttctcattgttcagctcccacttacgagtgagaacatgtggtgtttggttttctgtccttgtgatagtttgctgagaatgatggtttctggcttcatccatgtccctgcaaagga

SEQ ID NO: 30205 - DNA, 1065 bp, Homo sapiens
acatgttttgaatatatgcatttggctcagtttgatcaaaggaaggggaaacaagaacttagaatttcacatcctcatgtgtaacctacagctggttgaggaatcattgagtcccatcgactgaggcttactctgctgaagattctctgctggccaccaggagtgagcaacaatggcgagtacctcctgccagggactttgttctggctgtcagattcacccataatgatatgtggaatttaaatctctcacatgaggatgacatgcttccttgaaaaccagtcttctgatgttcctgtcagagagagggtgctgttgccccacccatggtggcttttcttttacatcacctgacacactttgatccctgtcagaattgtacagtggactttgagctaaagaaactgatggaaaaatctttccacagagggtcaagaaagctaggttctggggtgggctctgctgcttaacagctatgttgctgtgggcaaatcatttccagttagatgggatactctcagccacccaaataagcaataaggattaagttatcaaaacagtggtatagtcatgcaccctttggatctaggctttgggtgaggagtataaggaagacatcaccagaaatcacgtcatccttaacatcagactgcatgggaaaggtagggcagggcatggctacttcctcatccagagctcagaccacagcacctgcagcatactcagtggacactctggagttgttcagatggtgcttggtgagcagctctactattcaggggcccttaccaagtttcaggtgggggtactaaagacacatgggtatggtccctgtccttcaggagctgatgttctggtatggcagagagttacttatggaaagcattctgagatagaagggtgctaggagagaggttccacaaatgctataggatttcagggggtcagatgcttccagtttgatgaggaaagtgtcatgaatgaattggcacttgagttggtatcacccacctgtgctgggtcaaaagtttatgaagaaagcagaatggagctaggcgtgatggc

SEQ ID NO: 30206 - DNA, 1035 bp, Homo sapiens
tgaaatctgttgccctgcttggtttctgccaagggctgctgcttcttactattctgcagtaagatgaagtcctacctggaaaaccaggcagaaattgtgttgcctttgccttcagtaatccccttaaggagaaaatatatggacctgatttcagccttcagaatctccaaaagaggagtcatcaattcatagagcacactagggtgttaggagagagctttgcatactctgagaggctacttggaaaggcattttcccaggagagctctgtcaggtggctgcgcttcagccccacccctacaccacagggtctccttgggtatgttcttgggcaagcaatcacaaagccagagaagctgtaagctgcctgccgggcctgaggagctccaaccagggaagactggatgtgaggagaggagtcactgtcaccaggtcacagactgactgaggtgatggtaggatgaggaggaacagatgcccttctttaattggttctcagttaacttctcagaggctctggagaacgggacagtggctttctagcctctgaatgttccaaataaaattttttggtcttggcccctgtactgttttacctctaaattctggcatttttttttccctgcaattaaagtgctgtactttatttattgaactttatcattgaaagctgtttggaaaacctaaaagatgttgtcacacttctgttttctttacctgtgccttataaaaatggaccaaacccttttctaaaataaaatagttctagggtggctggttattgacctatgtaggtccctaaaacctaatttctgttcaaaaaagcagctttactgaatgatgcaaccatcactataaatcagtttaagaacatttttattccccaaacagatctctcatgccttttgtaattaatcctcattctcagccccaggccaccactgataggctttctgtcttcataaatttgccttttctggatacttcatataaatgcagtctgtaggccgggtgcggtggctcaagcctgtaacc

SEQ ID NO: 30207 - DNA, 1050 bp, Homo sapiens
ttacaggtgtgtgtcatcacgcctggccttctaacttattgttgatattaaatgtaacaaccaggctgggcacggtggcttatgcctataatcccagcccttcgggaggctgaggcgggcagatcacaaggtcaggagttcgagactagcctgaccaacatggtgaaaacctatctctactaaaaatacaaaaattagctgggcatggtggcacgcgcctgtaatcccagttacttgggaggccaaggcaggagaatcgtttgaacctgggaggcagaggttgcagtgagctgagatcatgccattgcacaccagagggagactctgtctcaaaaaataaataaatacatttaacaagcagcagggcacagtgggtcacacctataatcccagcactttgggaggccaaggccagtgagatcacttgaggtcaggagttcaagaccatcctggccaacatggcaaagccctgtctctactaaaattacaaaaaatcagccagatgtagtggtgtgcacctgtagtcccagctattcgggtagctgaggcacaagaattgcttgaatctgggaggcagaggttgcagtgagttgcaattgcaccactgcactccagcctgggagacagcaactctgtctcaaaaaaaaaaacaaaaaaaagaagaagaagaaaaaaaaatttaacaatccactgtgtcttaaatttcagcttttgtcaccactccctccaaaaaaaggtgcctcaatgcaacagcctctaggtagaactagcttctaagttcttctctgctcctgggagccattagcttaggtagtcaggaaataccctaggccgggtgcagtggctcatgcctgtaatcctagcacttcgggaggccgaggcgggctgatcacttgaggtaaggagttcaagaccagcctggccgacaaagcaaaaccctgtctctaccaaaaatacaaaaactggccagatgtggtggtgcgggcctgtagtcccagctactcgggaggctgaagctggagaattgcttgagcctgggagcagaggttg

SEQ ID NO: 30208 - DNA, 1582 bp, Homo sapiens
ttccgtaatacacgacatgtatgggttaactttctgtttacccttcactacactgtaagctcaatgcctgacactatagcagatggagtttttggttgcttttaagggtgtgccctacttaactcaatggaatgaaaagaaataggttgctctcttatttcagattcccgtcgtaacttaaagggaaattttcacaatgtccggagcccttgatgtcctgcaaatgaaggaggaggatgtccttaagttccttgcagcaggaacccacttaggtggcaccaatcttgacttccagatggaacagtacatctataaaaggaaaagtgatggttagtcattgctttaattttttgttactccagctgtaagtacaaattttgagcttgctattctcgtggttagttctgggtaatttctttctatcttccttaaatgaagccagacccctacgttgaaaacatactttaaataaatgttcttgttattgagagaaaagatttctgctccaggggaggaatatgtcagttgtctgagttacgggacttgggttgggtcatgaacatgagaaagttcattggctgagtttctaatagctcgcatagtgccttcaacttcataggtacttacacaggctattgaactgaattttgagtggaaagtggggtaagaggtgggaatgaacaatatggtttggaagaaccagaggatggaaggcattaagttggctaaggcacttacttattttagagataaagctaccaaggacttgggagtgacatgctgtaaaggagttttaggatgaatcttgcatcagtgcagattataaaagggaaagagtggcagaaagccaggaagtggattattaagaaccaatgatggaataagtacagggaaagagaaaggaaagatggatttagccaactgaatctaggctgcacactattaaagctcagggtggaggccagtcttggctcatgaacttctgagtgtcggaagtgtgctatatcaatggcaggattttcgctaacaccagtagagcttgcctctatgactggagtttggtagtactcgctgccacatagagtaaacttgagaagaatgtttgcacagccaggtcaagtgttacaaatccttctgccctcacttaggcatctatatcataaatctcaagaggacctgggagaagcttctgctggcagctcgtgcaattgttgccattgaaaaccctgctgatgtcagtgttatatcctccaggaatactggccaggtttgtggaacagtggttagtttttatattatagaaataaagcttacagacattgtgagacatagaaagacataagaaaacagaaataactcaggccgggcgcggtggctacgcctgtaatcccagcactttgggaggtggagtccggcgtattacgaggtcaggagatccacaccacggtgaagccccatctctactaaaaatacaaaaaattagttgggcgtgggggcgggtgcctgtagtcccagctactcaggaggccaaagtggagaatggcgtgaacccggtgggcggagcttgcagtgagctgagatg

SEQ ID NO: 30209 - DNA, 2615 bp, Homo sapiens
taatttgtatttttaagaaatgactagttagtaaaacttgaatcttttttgccacagctctattttaataatttttctgttgagaaaactagtagatttcttgaattctaagagttctaacagggattttattcatcttaactattttgacagatttaaaaattatgtagtaagactttatttcaatgttgacaggacgggttcccatgtgtgtttttgcagagggttattcctgaaactgacttgttactaggaccacatagtttggtacacagtagaaaaaaggcagttagttattgctgtagaatgaactgagtgacagttcttgcttgcttgagaaaaatatactgagcatctagattgggccaggtagtgttgctaggtgctcgggatatatagtagaaaaacaagcctgtcttttttaatgtatgcaggaaatctctggagaagtaagagaggttaaggaaagctgggtatgtgcctgctttacatggagtagtagtgattaagttggccagtgcccagaagtgcttactgggtgccaggattgttgctgtggaatatcgagtaccactaacttttaaattcttcaaagagggctgtgctgaagtttgctgctgccactggagccactccaattgctggccgcttcactcctggaaccttcactaaccagatccaggcagccttccgggagccacggcttcttgtggttactgaccccagggctgaccaccagcctctcacggaggcatcttatgttaacctacctaccattgcgctgtgtaacacagattctcctctgcgctatgtggacattgccatcccatgcaacaacaaggtaatgattttaggatctagagtttgtgaatgcgtgctctagaaaaaacattcctgtgcacattgttagagcttggagttgaggctactgactggccgatgaactcgcaagtgtaggtagtgtgctacatgaggggcaagttttcgctaacaccacaagggtctctggcccaatgagtggagtttgatagtaattcttgctacaagtataacattactgcatgacagctttgtggagaaatgaaaacatttggaaaatagtgtgttcttctgcctttgtccatgtttcttgctcaggcctcaggcacttggcctttgttttcacaccaacttgatgggttctactataagatgctaaaaaggtgggttgtgtgtggttcagattggttgatttgtaaccctagttgtgcataagaattgcccagatattttttttaaatgccagtgtccaggcatttttttttcaatccctatgattccagtgtgcagacaaggttgaaaatccctatttataatgctccctgttacaattgcttttcaactaagagatgtctgtacttttggtacctagatgatgtaagagccaggaaggtgcttgctgtttgggtttgaccaagtgtcactttttaataatctgccactcttggcagggagctcactcagtgggtttgatgtggtggatgctggctcgggaagttctgcgcatgcgtggcaccatttcccgtgaacacccatgggaggtcatgcctgatctgtacttctacagagatcctgaagaggtaagcttctccaaaggcttgtggttacataagcaaattggacgacttggactgtgcttctaggaagcaaaacttgtcagtccctgtaagtctttcctcttttttttttgtaacccagattgaaaaagaagagcaggctgctgctgagaaggcagtgaccaaggaggaatttcagggtgaatggactgctcccgctcctgagttcactgctactcagcctgaggttgcagactggtctgaaggtgtacaggtgccctctgtgcctattcagcaattccctactggtatgtatcaggatagaggtgaatcaagctgatattttgcaacttctcagttttattctaactttaatgatctctgtgacttttatactagctttaagaggttttcattccagtgtgctacagcatctgatagactgctgttgggagtggggtaaggaaaaatactacattgaggacagagctgatggctttttttggtattctcttaacagaagactggagcgctcagcctgccacggaagactggtctgcagctcccactgctcaggccactgaatgggtaggagcaaccactgactggtcttaagctgttcttgcataggctcttaagcagcatggaaaaatggttgatggaaaataaacatcagtttctaaaagttgtcttcatttagtttgctttttactccagatcagaatacctgggattgcatatcaaagcataataataaatacatgtctcgacatgagttgtacttctaaagcccactgtagatagtgtatattgcttttcacttcagaatttccctgagcttccttcctgtgtggagaacatgtgtgctgtgaaaatagatgtaagtggttacacatacttagttggtaacctcaggaatacttttccgaggccctgatgatcttgcttttattaccatttgcgtaggtaagttctatagagcttaggtttttatttttgagagtcttcctgtcacttagg

SEQ ID NO: 30210 - DNA, 1030 bp, Homo sapiens
ttaaatacgtgaagcccttgaacagtgcctggtttgtatctcattccacgtgtttgctattgtaatttttttctagggtatttgttctaatttcttcttgtctttttttagggtagtccatccatttcccgactctattaaataaaataaaataaataaaaatgctccctgtgttgtgatccatgctactatacatatgtatagtatatatgtagtgtatagtatggaagttcatactatacttccagcttaccctccgaagtggctcttcaccaactatgtgtgagagttcctgtttgtctacggactctcttaagttaatgtcaggctatttaacttttacccatctgattcttgtagaatggtatcaattgttataacctgtgtctttttgataattggtgagtttgaatgtatttttatatgcttatgggtcatccatgacttcctcctctgtaaactgcattttcatatgatttgcccaattttctttcgggttgttttttcctaatgatttgtacgagttctttaaatattctgaataggaattatttgtatattatatgtgttgcattctcccagtgttccttaacttttgactatgtttattgtgtcttttgatgtacagtagcttttttttttttttttaacttctgtttttagagacagggtctggctttgctgcccaggctagagtgcagtggtgtgatcatagctcactgcaacctccaactcccaggctcaagagatcctttcatctcagccttctgagtagctgggactataggcatgtgacatcatgcccagctaattaaaaaaaaaaaaatgtagggatagtcttgctgtgttgcccaggctggtctcgaactccatcttggacctcaaatgattctgcctcagcctcccaaaatactgggattacaggcatgagctaccatgcccagcctgtagtttttaattttgatgtaatcacttttccttgcaagttaattttatcaacattatttgttgaagaatctatctgccccct

SEQ ID NO: 30211 - DNA, 1026 bp, Homo sapiens
agtgacctaaagaacattaaatttgacatgaaactttttaagtatagaactccaaaatccaagcaagcaagcaaaaaactaaacagaaggaggaacatatcctcccaaagatgaggtatatgggccaatgcacctatacttcctgctacatttcagtcatcatttgtaaacctacatatatgacttaactcactggagtcctgataaaatagttgagaaaaatggtatttctaaaacatttctccagccatagatcataagatatataatgactatcacatttgcccaaaatgtaataaaaaaatttatacagttcccaaagacattttccccttcctataaaggcccctttgcagcatgacacttagattttattcagctaccaccatcacaagaatgcaaatgtgttctaatggtgatttacatattttgtcattggatcataacatttctacatggaagaacaaaggccttaacagtaagtaaaattatctttaaaaaattattctaactcgaggaactcccctggaacttcttagcaacagagtcacttgctttactagacagacaattcaatcagtacaatcagtatataaaatctggctcgtcctccaacatatccattatacttattatccccagtcatctggttagtaaaaaacacaaactaaataataaaactcaattgacaaaattaactgaggctttaaaaattccttggccaaaagctcttccattgattttgtataacctaagatcaaccccttttaatagacatcagttgtctccatttaaaattataacagataaacctataaaattcactcaaaaaattatacatctctgatattaaatggagacatattcaactattacaatggcagctaactaaaaattatatactaataaaaaattattttcatggtgagcttctgggagacaaaaatttaaagaccatgaatttcaaccaagagattttatttactaaaagcagtatcttttaaaagactctctccaaccaaagta

SEQ ID NO: 30212 - DNA, 1035 bp, Homo sapiens
agggaaaaacagaagttttgttaacatgtatatttcatacatacgtgggagatacctagagaaggagtaactatcaaagaggtgactctgaattgcactttatataacatcttcaaaaagaacagtaaatttttagagaagtgacaaaacaaagtactttgagtctccagcggcagcaacttgtgggaaggcaaataaaggctagttagtaaagcttgttaatgtagattcctctggtgccatctccaggtccataagggtctaaagttgttttcattggttaccctttgttcttcttggtagaaaagggagatgagatatattatgtttttgtaaatttatgtcctgattttaggcaaatagagggagggcagagagctctcaggtatctgcttctttcttgccttcagctcaacaatgctcctgtcaaaaaggtgtattgggggtggcatattatgacctctcacagttacaatagtatagataatagatagtgtatatattgatagtctagattactgtgctttacttataagtacaatttagatcataaatcaaatagaaaaccagatggaagcattttaaaaattcatcttggagaaggttcaaaaggtatctgttgtccttgcacaaaagaaatctgtaccttcaaggtcctgggaacactagcaatagcacactgatttggcataagctgaccatgtgctaattgggaacaggactccttagagatcaccaagaaatcacctcattattcagccttggtcacataattaaatttgagtctaatgctctaatctttagatgattttgaattaaattcttatttattccttatgacaagcactccgttctgtcttcgtggatgagactcccagctgggaataaaaccaggttggaggttttgttacagtttatcatattatacctatgaatgattcatgtgccatctgttgaccataaatccagttaaggaattctaatatatgtactatttctacttcctagaataaagcaaaattggcatttacaaca

SEQ ID NO: 30213 - DNA, 1033 bp, Homo sapiens
actcttcctgcctctgtttcaagtctctgactttgcttatctggtttcccaattctgtcttaagtctccacctttgtccccacctagttcctgccgaagtttgtaggattctgccttactctctgttgatgcgcatgctgcggggctcagtgatcaatacgaatcctacctaatgacggtgttgctcattaccaccatccctggaaggttctttagcagtcaaatctgtatttattgcctctgcgtatctcttagaaatttcccttttgcccttcttattagcatgtagctatattctgacaagttaattacagagtaagtgattactgggcatcttaagggacgtttcagaacattcctttctgcataggtagtttcccacctctctgctcatatctagcagcatgttttggttggtctctgaggcgtgaggttttccagagctttcgcccccaggggctccccctactgcttatgtctagctatctgcctactctaacactaaggacctttcaattctactctctacctgtatagatctgaggtccaaagaagagcatgacaatcactgtagttgatagaaatctggaattagaacccaatactctttccattcttgtactcctttagcaactagtagtttagtctgtagcacattttaagactgaaatatttctgcttgaatatttagaaactttttttttttttttgagatggagtcttgctctgtcacccaggttggagtgcagtggcgcgatctcggctcactgcaagctccacctcccgggttcacaccattctcctgcctcagcctcccaagtaggtgggactacaggtgcccacaaccacacctggctaattttttgtgtttttagtagagacagggtttcaccgtgttagccaagatggtttcgatctcctgacctcaagatctgcccaccttggcctcccaaagtgctgggattacaggcatgacagaaactcctacctatgcattcttatgtcaaagaaaaactcacaaaggaatttgcaa

SEQ ID NO: 30214 - DNA, 1050 bp, Homo sapiens
catgatgtccctatggaattgttacctttcttcagatgtagttgtagggaaacagactacttaatgccctttctaaaaccagcataaattggattttattgtatgtatacacaataagtgctttcttacattgataattttcagaggaacagaataatcaagaatgaagttaagaagcttcaaaaggcagctctcctgaaagcttctcccaaaaaagcacctggtactaagggtactgctgctgctgctgctgctgctgctgctgctaaagttccagcaaaaaagatcaccgccgcgagtaaaaaggctccagcccagaaggttcctgcccagaaagccacaggccagaaagcagcgcctgctccaaaagctcagaagggtcaaaaagctccagcccagaaagcacctgctccaaaggcatctggcaagaaagcataagtggcaatcataaaaagtaataaaggttctttttgacctgttgacaaatgtatttaagcctttggatttaaagcctgttgaggctggagttaggaggcagattgatagtaggattataataaacattaaataatcagttcctttttttttttttttttttttgagatggagtctcgttctgttgctcaggccggactgcagtggcgctatctcggctcactgtaagttccacctcccgggttcatgccattctcctgcctcagcctcctgagcagctgggactacaggtgcccgccaccgcgcctggctaattttttgtatttttagtagagacggggtttcaccgtgttagccaggatggtctcgctctcctgacctcgtgatccgcccgcctcggcctcccaaagtgctaggattgcaggcatgagccgccgcgcctggcctaaataatcagttctttaatctcactctctgcccatacttggataggtagtgcaaaatcattgcagtcataattgatcatgtcatgagaaatcatgataacttagaacaccaagtgacacaagtgacatttttttcttatggtcaccttggcttcagaacatctttttt

SEQ ID NO: 30215 - DNA, 1049 bp, Homo sapiens
caaggaagtgacagtggtaatgccatttaggtggtcttgatcatgcattggactgcagaaataagggagaaaacaatgtgtcagggtttctggtttgtacctctggttcattggttgtgagggaacatgaggcagggtaaagtttatctaggtaaaatgagttagttttcatgtagactatctgggtgtatatgcaaagactgcagacaatctatactaaaatcctggctctgcctcttgaaagctatgtagtttaggcacatagtcaaaatccagtttcctcatctatgtggtacgcttcagagtagttaatcatgatatgtagtccagtgactggttcccttggtaagagctgtgataatgacacaaggaggagaggtttcaggacagacttgggattcatgaatatgtaagtggtcactgattccccaggggtaggatgacaacaatcaagagacgaatagaggttggaaaggagtcatgaggggtgggaaactagcaggggcacatggaagctagggaaagaattttgcttgagatcgtcaaagtgaggggaagagggtagtaagcaaaggagaaatgttatatggggttcggaggttttgtgtttgtaaatctggagtgatgggcatgttcaaatgcttctgggaaaggagctaataggagagaaacttagcccttcgaaaaacaggaagggatggatcctaggggagaggaggaaggattggctttagaggaaagatgtcctttacgtgaggaaaaggaagaaaaggtgggtttagatactaaatctgtaggtttgctgttaggaaattaaggacttttcacctttatctctgaaatttctctggagttagcaaggcaaggtcatacactgagaaggagggatgaggcagtgtagatttgcagacatacaggttgtaattccttatggaggaaaggggagagcacttttgtcagactgcctgtggctttgagagccctttggctacagtccatgaggtgctcagaggatgagaaagcttcagggtagaagcagtattcaagct

SEQ ID NO: 30216 - DNA, 1035 bp, Homo sapiens
gaatgtaaagagtgtggaaaacgattaagctccaacacagccttgactcagcatcagcgaattcacactggggagaagccctttgaatgtaaggagtgtgggaaggcattcaatcagaaaataaccctgattcagcaccagcgagttcacactggcgagaaaccttatgagtgtaaagtgtgtggtaaaaccttcagctggtgtggaagattcattctgcatcagaaactacacactcagaagacacctgtccaagcatagggctatccatagttaggcccactgtgcctctccttttttctctttattttcatgctttttatcagtgtcctcgctgtccttcctggttagacacttggctttcatcatgaactcttctttaagttttttgaacctgtttccccaacatgaagtctctttatggttagagaagaccaaaaaacaaacaaacaaacttagaaacataaaaggaaatgtaagtttccagatttaaaggacatgctgggtgcccagcaggatggattcaagggaaacctacattaaggaaaattgctgtgaattatgaaaacaccaagtttgaataagaggatcatggagaaaaaatgagaccctaaaaagtttctagagagagaaaacaaaagatcagaaatgaaagcggggccaggcgcggtggctcgtgcctgtaatcccagcactttgggaggctgaggcgggtggatcatgaggtcaggagttcgagaccagcccgcccaatatggtgaaaccccgtctctcctgaaaaaaaaaaacacaaaaattagccaggcatggtggcgcatgcctgtaatcccagctactagagaggctgaggcaggagaatcacttgaatccctgaggcagaggttgcagtgagctgagatcgcaccactgcactccagcctgggcgacagagtgagactttgtctcaaaaacagtaaaaaatgaaaatggcattagatttttcaagagcaaccttcaaagtcagatgacaatgtgtatgccttcagacttctcatg

SEQ ID NO: 30217 - DNA, 1044 bp, Homo sapiens
ccaggttcaagtgatcctcccacctcatcctcccgagtagctgggattacaggtgcacatcatgacagtgtcttttaaagagcagaagacattaatatgcatgaaatccaatttatcagttttttatttttaaatagagatgaggtctcactatgttgcacaggctggtcttgaactcctgggctcaagcgagcctcttgccttgacctcccaaagtgctggaattataggcatgagccactgtgtctagcctttttttttaatggatcatggtttcagtgtcaaatctaagacatctttgctgtacccacatttgcaaagatttttttcctaaagttttccctttagaagttttatagtttttgtgttttttttttttttttttttttgacagagtctcactctgttgcccaggcttgagtgcagtggcaggatctcaatgattgcagcttcggaggttgctcactgcaacctccacctcctaagttcaagcgatactccagcctcagcctcctgagtagctgggattacaggcaggtgccaccatgcccagctaatttttgtatttttagtagagatggggttttgccatgttggccaggctggtctcgaaatcctgaccttaagtgatctgcccacctcggcctcccaaagtgctgggattacaggtgtgagccatcgcacctggccagaagttttatagttttaggttttacatttaattctatcatctattgagttaatttttgtctgaggcatggatccaagtttttttctttttcttcatataagtatcctattgtagcaccatttttttcttttttaagagatgggtctcactatgttgcacaagctgaagtgcagtgctattcacaggcatcattacagtgtactgtacccttgaattcctggtctcaagtgatcctcctgcctcagcctcctgagtagctgggactacaagtctgtgccactattgcctggcctgtaacaccattttttgaaaaaagttcccccactgaattgcctttgtaccattgttgtgaa

SEQ ID NO: 30218 - DNA, 1044 bp, Homo sapiens
ccagccggtcgccgcaacctcgcctcttccgcagggcggggccagccatgaaaggcggggcgggtctggccacggggcgaccgagatggcggcctccgggggcctagagggaccctgggcgtgcactcgcccttccggctcggcctttagttagtgaccagctcctcggcgttctgcagagcgtgggtttcagcgagttctacgtgccaggtccgcccggtgccggcttcctcgctgcccctggcggctcgtcagcccccactacccctgaacttggtcccaatggcggcccgcccctccttcacccggaccgtgggcatctgggcctcgccgaagccgtcaaggtggctgctcgggcttctagagcccgtgtccagccctttgccaccgaggcctgatcctcttttctgccctaaagaacttgccctgacagcctctggctcccggtactgacgtttctgatgtttggggttgcctgttttcttgggtggagtgttaagatcacggttgggtggggtctccggtcagcatcacccactgggacgctgagtattttacccttaatccgcattcagccaccccagtccctcttctcctgaggttctttcttttgggtccacgtcatcgtccctgtaagcattctgtaaagactctttacgtttgtagagacccaacacaatagggacagggctcttgggtccctcagtttacccgtacgaatgggctcaaaaaaagctcttcggactgagcaggcaggtggaagattgtcctgaagactaggcagaacaattcataagaagtttggggctatcagcgtgagaacaattagagggagtcctagtagaatctccgtgcatccagtgctggaaatgtggaaactgggagggccataggttgctgtaggtggtggacgacagggtccttagcactcatggctctttttctcttagctcttgaggatcttgcttgtccaaacccagaagacagtgcatgaagccaggggacatccgccatgctccaaacaacttggcctcaggtgagctg

SEQ ID NO: 30219 - DNA, 1061 bp, Homo sapiens
tagtaaaaatacccctacaatcattttggtagggtcttctgtcttcagccagggtgtacctgctcggtgggagttggttatatatgtatgtccaagttgcaggggcttctgggaaatacaggttttggattctgcctgggaagagagtcatagtatgaagaagtctgaaaatggggaagggattttcagaatatgttgagcagctgtaaaatatcagatacccattataggcattgaaggttacctaaatgacagaaggatgcactatattcatgggtaggaaagattagtttcatcaagatttcaatttttatcaattcataaattaaaaacaatataaaaattccagaggggtgtgtgtatagagaggcaaaggacacagagtagctaacctagttttgaagaacaagatggggggttttatgctaccagatattatatacaatgatcatcaaacacagaacaaagcaaaaaacaaactccccaaacccaagttgaaacaaaaaaaacccccagactgtaatagtattattattattttttaagatggaatcttgctctgttgctcaggctggagtgcagtggtgcaatcttggctcactgcaacctacacctcccgggttcaagtgattctcttgcctcagcctcctgagtagtgtgtgccaccacgcccagctaattttttaatttttagtagagacagggtttcaccatgttggccaggctggtcttgaactcctggcagcctcaagtgatccacccacctcggtctcccaaagtgttgggattacaggcgtgagccactgcacctggcctgtaacatgatttgctgaaatttttaaaaatcttaaataatgtactgtttagaaatatacatattttatacaaaattataaagaaagcatagagaggtaagcattagtggcacagctgagaaaatataaaaggtagttctgtctctatcctgtctcctttattctgctactgctctcattctgtctcatcccaggaatccagtcccaagtgctgcctgccaatcgtccagcaccctccacctttgc

SEQ ID NO: 30220 - DNA, 1050 bp, Homo sapiens
ggttcaagacttcagtggacgaagtaactgcagatgtggtggaaatagcaagataactagacttagaagtggaacctgcatatgtgactgaattgctgcaatctcatgataaaacgtgaacaaatgaggagttgcttctaatataagagccacaaaagtggtttcttgagatggaaactactcctggtgaagatcctgtgaccattgttgaaatgacaacaaaggacttagaatattacataaacttagttgataaaacagcagcagagtttgagaggattgacttcaattttgaagaatgttccactgtgggtaaaaggctatccaacagcaacacatgctacagataaatctttcggaaaggaagagtcagttgatgttgcagccttccttgttgtctcatttaaagaaatctctagagccacactaaccttcagcaaccaccacaccgatcattcagcagccatcaacagtgaggcaagactgtcttccagcaacaaagactcactgaagacttagattatcgttaacatcttttagcaataaaatatttttaaattaaagtatgtacattgtcagatataatgctattgcaaacttaatagactataatatagattaaacataacttttataggtactggaaaataaaaataattgtgtgactccctttattgtgttaaacattttattacagttgtctggaagcaaacctgcaatatctccaagatatgcctgtatttttcaaaatgtggtcttttaacattgctatgaagtttatcagtaataatatcttatttcatggttgtccagaagttacataacttgtcttaatctaaaaatcatatcatttaaaaagcctgatgatttaatatttttcataaagaaaacttttgacaatttgtttttaagagacaaagttttctatgttgcccaaacgatttgaactctggggtcaagcgatccttctccctcagcctcccaagtaactgggactacagggcatttgacagttgtattacatgaaacccaattgtaaggctagctcat

SEQ ID NO: 30221 - DNA, 1025 bp, Homo sapiens
ggccgagtttgggggagggacccggtgcctcgggatgcgccgggccctgggtggggggcggggtggggacggggggctccgccttctcagctcttgcggcgagttggggttcgggcgctgaggcagagacgccaccctaagtcccatcagtcctggggatcggaccagtggactttctcttaagatttcctctttcattcttaagaatagaagtgttattattttttttaatgccctggctatgtgagtttgaatcgaagcaactttaaaccttagagcaactaaactctaagtgcagcgggtgcgatgcgtcagtagggtgagcacataaaaaatccatgtcttgcacctgtattttagcgtactatgcaggtgagtgaaagcagtggataatgtactgggagtcttatggatttatggtagtgggtatgagaccctggtgaaataagggggtggaggaaggcgaaggtgatggcttactgtttcttaccaagtgaactgcaggattcagcctctgactcagaccgcttcgagaattttgttcgtagaaataatttaaatttattcaaatagtttgatggcagctaaaattgaattatagagcacgttttcttttcagcggagtgaatttttccttcgctccaaagctggccaaatggaattcaagcattgcaacttctttcagtgttttgtctggagagaggactttgaaccgagacttttcgaagttaagttcctatagcctgcttctgaatctgccaagcttgaaagctttggcagttgggtgtatgtagttgttgccttcgttctcttcccttttggagggagcgttgtctcctactttgtatcttccagacatctgtggtcttccccccacccctcgagtttgtgagtggtgaatgaagaaagactaggctgctggtatgcagaggtcggcaaaaggaaatcgaggagtggttttagtgaaatgagagctttgtatcatgaataatggtggcttaggctagacatcaacttgaagagac

SEQ ID NO: 30222 - DNA, 1061 bp, Homo sapiens
gcagagttgagtagttgtgacaaagagtttatggcccacaaaacctaaaatatttactttctgatgctttacagaaaaagtttcctgaaccttattctagctatatgttgttcataaatgaatctttcgtggttctgaaggcatttaagaatctcttaggttataaattggctgggcgcagtggctcacgcctgtaatcccagcactttgggaggccgaggctggtggatcacgagggcaggagttcaagatcagcctagccaagatggtgaaaccctgtctccattaaaaaaaaaaaaaaaaaaaaaaaaatagctggggttggtggtgggcagtaatcccagctactcgggaggctgaggcagagaattgcttaaacccaggaggcggaggatgcagtgagccaagatcgcgccactgcactccagcctgggcaacagagtgaaacaccatctcaaaaaaaaaaaaaaaaaaaaaacactcttaggttataaataattgttgttagctctccaagcctccatattacattttgtgtgttctcctgttcacattttgagcattttattttttattagcacattcagttcatcaggtatttaagagcttaatatatgccaaagcatatattaagcgagaagctgtttctaaatgtactgtctcagccctcacagagttcacttcattaggctctttaaaatttctttctttaaaaggtcagcgtgctggtatagtggggaagggaaactcttacaacacgtcgagtagaggaaggttatcattatgggatataatttggaagtcattgagtacctgccattaattctgcctgtagtctgaatgtagagattaacatgtagaaacttttttgaaataaaatcttcaatttctttggcatatctagtactgtctagctaggcatatagtcaaagtatggtgtatatttcaagtattaaaagtttttttgggctgtagtcactgttgaaaggatatagttctttactattacatgtgatacctttatataaaattggctaacccctgtctttcatttatctgca

SEQ ID NO: 30223 - DNA, 1040 bp, Homo sapiens
tgaaaaataatttttgatggcactatatcagaaaacaacttgttaaagaaaatgtggagtttttaaaatcccactgtacctctgttatccaaaggggatctgtgaatttttctgtgaaaggttaaaaaaggagagacctttaggaattcagagagcagctgatttttgaatagtgttttcccctccctggcttttattattacaactctgtgctttttcatcaccatcctgaatatctataattaatatttatactattaataaaaagacatttttggtaaggaggagttttcactgaagttcagcagtgatggagctgtggttgaggtgtctggaggagaccatgaggtctgcgtttcactaacctggtaaaagaggatatgggttttttttgtgggtgtaatagtgacatttaacaggtatcccagtgacttaggagtattaatcaagctaaatttaaatcctaatgacttttgattaactttttttagggtatttgaagtataccatacaactgttttgaaaatccagcgtggacaatggctactcaaggtttgtgtcattaaatctttagttactgaattggggctctgcttcgttgccattaagccagtctggctgagatccccctgctttcctctctccctgcttacttgtcaggctaccttttgctccattttctgctcactcctcctaatggcttggtgaaatagcaaacaagccaccagcaggaatctagtctggatgactgcttctggagcctggatgcagtaccattcttccactgattcagtgagtaactgttaggtggttccctaagggattaggtatttcatcactgagctaaccctggctatcattctgcttttcttggctgtctttcagatttgactttatttctaaaaatatttcaatgggtcatatcacagattctttttttttaaattaaagtaacatttccaatctactaatgctaatactgtttcgtatttatagctgatttgatggagttggacatggccatggaaccagacagaaaa

SEQ ID NO: 30224 - DNA, 1086 bp, Homo sapiens
attttatggtatctgtttttaaggtggatataattaggaaaattaaagggccaaatgatgaggagttaagtgccagttctggttcaaattttcagtgaatcagttttgatataactttcatcttagggcattactcttgcctaccaacatagtttctaaatttttttcttttggtgtgatcactgtgggaagaaggaaattgggcccaaactgatacattgtttggaggactgggatgtctgaatttgagtggaatgctttaaaaggacaagttggatagggccccagtatgggggtctgagtgatggggtccaggaatacatttaggtccaatggcaagctggctgaaattcttgtataataaaataggttggtaatatggctcttctcagacatgtgatcaagattccttgactaacaagatatatatatatatctttctagctcatcatactggctagtggtggaccccaagctttagtaaatataatgaggacctatacttacgaaaaactactgtggaccacaagcagagtgctgaaggtgctatctgtctgctctagtaataagccggctattgtagaagctggtaagtatatgtatctattctgagtcttgtgtatagcatctgcagttctaattagattacttttcttaggaaaaggtggtagaactttaactactgaaaataaatggtcctattcagtttgcagccaagatttacattcagagtacctgtcatctggattgtagctaaatatttaaggctagtttaggtagagttcttattatccatcaaaaatgatggcatatgttttgcttaataaaatttgtttgtaatttcagttttgagtaaacctaagatttgctaacagagctgtgaatttataggagaaaagacaaattctaatatagtacagttttatgtaaagtgattgctttattagtagatgctcatgagcagtttttgttttgttttaacttttaggttccgggtaatgtgcaggcttgttatataggtaaattgcatgtcacaggggtttcgtgtgcagattattttgtcacccaggcagtaagtattgtacc

SEQ ID NO: 30225 - DNA, 1040 bp, Homo sapiens
tttaacaatattgattcttcctgccatgaaatagaatgttttttcatttgttggtgtcatctctgatttctttgagcagtgttttttgtaattctcattgtagagatctttcacctccctggttagttgtattcctaggtattttattctttttgtggctttggtaaatgggattgcattcttgatttggcttgcagcttggatgttgttggtgtctagaaatgcttctgacttttgtacattgatttttatatcctgaaactttgctgaagtttattggatcaaggagcttttgggcagagattatggggttttctaggtatagaatcatattgtttgcaaacagacttcctatttggatgcattttctttctcttgcctgattatgagcagtgttttgccctgatattctgtattctcagtgaatagatgtcgtctaagtatgagaaacaatttttttctattctgagtatttttaagaaggcaacttatatgtggtactttgtatattgtgtatgttggcaattggggaaaagaatagatggtttgtactagggcctcttgggttctgtgtgtgtgtgtgtgtgtgtgtgtgtgtgtcatgaaaacagttactttttagctaccaagcattttttctcctttcagtaacccacctaacaacatttactcagaatttcaaagcaagcttcaaatcagtattgaaagaaggaaaaatataaaggcatttaatggaagaaaatgttgggaataaagtatagggctggcaacacttacttttctcacttattgagagtaattttacttgggaatttatgagagagaaagacattatgattgctccaggtaactactggcagaggaaccatagtcttggggatagacaaatgtggctgagttcatatagaatgaggggatgggatgtaaattctgtcagctgttccagcagtaacctgtaatgtaggctaaaaatacagattttgagatttatttaatcagaatccctggagtgttaatttttatatcaagatctcatagtg

SEQ ID NO: 30226 - DNA, 1055 bp, Homo sapiens
tccctgacagtaagtgttttcatgccgtctttctggattgttcttaccccaggaatttacctagcttctttaggtctttagtcagatgtcaccttcacagtgaggtgacctaattatctatttaaaatcgcagccccactccattatttttctccatagccctttaatatcatctgacatactgtatggttttagtttattgtatatttttctgcctcttccaactagatcataaattctgagggtaggaacttctgaatatttttgttcactggtctatctgcagctcagaacaggacctggtactgaataaatatttttgaaatgattgaatggatgaaaagaaatgagtaataagaatattacctaagggggacagtggagataacaaaggctttttcggcttaggaaaggaacagtagctatttgagagtttgtcactagtgaggtgaactggcaaagtgaaggaaactgagcaacattctagaaaatgagaggaaatcaaatacttaggtgaaaggaagtaaactctggaaatacagaaggacacctcctaaggctagaacagatatttaggattgataggcacttctagctaatgactagggccttatatcctttttaattttctaggtggaatgcaagctttaggacttcacctgacagatccaagtcaacgtcttgttcagaactgtctttggactctcaggaatctttcagatgctgcaactaaacaggtaaattctgagtaaactggtgccatgggaatagagtcaagatgagtatgtgcttgtactgaccatctgtttttatctccataggaagggatggaaggtctccttgggactcttgttcagcttctgggttcagatgatataaatgtggtcacctgtgcagctggaattctttctaacctcacttgcaataattataagaacaagatgatggtctgccaagtgggtggtatagaggctcttgtgcgtactgtccttcgggctggtgacagggaagacatcactgagcctgccatctgtgctcttcgtcatctgaccagc

SEQ ID NO: 30227 - DNA, 1019 bp, Homo sapiens
cagtgctccagagcattaaacaccccaagacataaaattcagagaatattatttactacagtgtgaatgcctcttgcactctgaattgggaatgtttgcaccacagtggggggcttgccatgttttagctttagatttaattaggttttgtttgtgttttctccttagctgctttattctcccattgaaaacatccaaagagtagctgcaggggtcctctgtgaacttgctcaggacaaggaagctgcagaagctattgaagctgagggagccacagctcctctgacagagttacttcactctaggaatgaaggtgtgggtaagtaaaaaggaaccaaagcctttagcagatgtgtacattgaagtctcagtttttcctcaagggcctttttctccttgtctcttagcgacatatgcagctgctgttttgttccgaatgtctgaggacaagccacaagattacaagaaacggctttcagttgagctgaccagctctctcttcagaacagagccaatggcttggaatgaggtagggaaatgtgagcagttatttatctggtagtttcctagagcaggtatggcagcttgttctttcctctcaaaacacttagtacacattcatttgcattgatgtttccctggcttgagtatttcttctttatgctgtctagcaactgctctgaggaagaactataatacaagctttaaagagtctgttcagaatcattacaaataagttgtgttatttaaaattataattcataagggagaaagatgaaaaatgttaccagattaaagaagatttttcaaaaggatgtaaggaaagaggcagtgttaaacactgttaagaggacagtttatcagtattttttactaaactttaataaaacttttctatttgaatttctgctatgaatttttcttcagcatttgtcctcagtacaggtggttccttgaaacattgtttctaataaaactagaacatcctgatattttatccattctatagagatcattga

SEQ ID NO: 30228 - DNA, 1012 bp, Homo sapiens
gttccaacttgagcccttaactttctccacctacccccttccacaaacctgttttcactgtcttctctgtcttagttaatgtcagctttgtctgtccagctgctcaggctaaaacttttctttcatataacacatcctatcagcagctcctgtttgtgggtaggcattttgcctttttttttttttttttttttaaactgctatatctctagcatgtagaacagtgcctggcagcacataataggtgcttaatataatatttgttgaaagaacaagtcagtgagtatttttaatgtgaggtgcaaagagaaaaaaaaatgtatctttgaggtgtggagttttgaagaacttccattttctaagcatttgtgtaatgttggagttacttgttccttttgtaatctgaaagtatgctttaaaaaaaattagtgtacttttgagaattttcattttgctttctattcttccttgctttgtgcatgtttatctagactgctgatcttggacttgatattggtgcccagggagaaccccttggatatcgccaggatggtatgtgtctcatatttctcgattaactccagatcaagctaaagttctaaaacttttatcagaagagccggtttgctcatctgggaaaccagtgttggcagaaaagtagtggcttcaattaaaagcagttcttaaattccagtcagcaacagtatctttaatggagcacagggaattcagagccacacaatgagtagcagtaggattacaccaccaacaaatacatgctactgctaggcctctgcagtgcaggatgttacaatttacctggctttttattctctttttggccagaggactcataatacctttgtctacaagctacccaaggaagataggaaaactcctgtttctaggctcagatctcgggtgggtttttacatagttgcattatcatcagggttttcttgaaaagctaatttaaatctgggtaatgaacatggaggatggcatagaccac

SEQ ID NO: 30229 - DNA, 1048 bp, Homo sapiens
caagggcttatgtgggttcttaggttttattttattcttggacagagatacactgttgttagacagagatacactgttgaatgaatgggtcttctggcttctcacctccttttccccccttcttttcaaacaaatgttccctattctgacttgtcttcttagatgtatctaagtggaggccacttgcagtgttgaaaagtgcaaattttagtgaagagacagtaaataattgcatatgtgtaaaactggatgtctcctgagttacacagaataccaatgatgttgagctgcttaaaggctatgataggcattttatgaaaggctgtgtagtatgattcattatagtgagaaatttatttaattattattgttaatagtgcacctgaggtgaaacagggtggaatggggtgggaggggagctcttgaaatccttgtttggacttaatttttttgttttcaaaatttattatttttattttacagtgctgttccttgcagagcagggctaactcataggcagtgtgcctgtaggcagcctgtttggacttccttaaacactttttttttcttaaatagagacaggttcttgctatgtaacaggtgaagctgggaatagcccttcctagaatgctgaggtgggaggatcacttgagcccaggagttcgagaccagcctgggcaacatagtgagacctcattgttacaaaaaaaaaaaaaaaaaagacaaaagaaaaattagtcaggtgtggtgatgtgcacctgtagttccagctactagggaggctgaggtgggagaatctcttgagcccaagagattgaggctgcagtgagccattattgcaccattgtactctagcctaggtgacagagcgagaccccatctaaaaaaaaaaaaaaatattgctgtctgagtcaaaaagtgctcttaaggaaaatgtaccttgttttccctgaggttctggggaatccccagcataagcacatgtaccccagtttgggaatcgtggagctggattatttctagggtctcctctagttccaggacattc

SEQ ID NO: 30230 - DNA, 1030 bp, Homo sapiens
tcaatttgttttctctgtgaggtgctaacttgaatctttatcttctttaattgtacctcttcttttttttttttttctttcaaattccattagcaaataatccttggatgctttttcattcacttattgagaagtggaaaaggcttaggacggggatcattcctggtttatatccagatgcttttggtattctctgtgcaatcctgggcaagtgacttaagccactaagacccctttccttgtctccacaatgagggagccattaggtcgcaggggtctgaggagtaagtgagatataaagtattaaatgccaggtatacagtcagcactttctaaatggggcagccgaagatgcggtgactaaggaatggctgaccagtggctgtgaggcttacccgagacggctcctgggacctgtttttattcctgactttctagtggcagtgatggaggagtgtcaggtcatggtagggaggaggctgctttttcggctgcagtaaacctgggccgagggagggctgtaaccctcaggagtgttgggactcttggtgtgaaggaaagtggatttgatgtcagatagacttggattttaattgtgaaactcttcacagagctatggacagattactttgtctttccaagcatatgaaatacttttggtgtagttcactttgaaattgcttgaagctcgtaaaaatcacccctaaatgatgctgtttcctttgtgcttatttatacattgttttgtttctttcctattttcttaaaaagtgaattggatatgtgcagctttggacttaattcaagctgtgctcaataatgtgttgtcactgtttagaaatggtgcctcgctccctacctcaccccacctgtcactcctgctcattactgtgaactcagtgcctttgaatcagttatgttggaaaaagcttataaatggcatttctacctcatttccctaattgtagcttaggaatttgtaccccctttttaattgttcatttcctggcttatttcccttaaaaaaaaa

SEQ ID NO: 30231 - DNA, 1042 bp, Homo sapiens
aagattgtttgagcccaggagggtgagggaagctataattatgccactgtactccagcctgggcgacagagtgagatcctgtcttaaaaaaaataaaaaaaaaaggaatggtattttgaacaaggtacagcattttgaccacctgtttgttgcttcagtttcttttgtaatcagacttgctctccatccccgctcacctcccccttttataacctgatagatttgaatgttggggtaggaggtggtctagttcatactgatttcacaaatgaagaaactcgggtagattgtcgcagaagttattcttacagcttcttactctataatgaagatttatggtatacgcaagggcagtctggtgcgctctgttcctcacttgatttcagtgatctctgaaatgtcacccaagatggcggtggctggttcgtgagtgttttttttctttttgtgcgtgagtgaagttttgttagaggtattttaagcattaattgaaaagctgcatttctgaactgagttttcgaattttcctacgtgttgacgcaaacagatccccatttctttgtcttgtgttttattgtgtgatgcgcccgtgaaggtagaggttgacttctctctttccacacacagcactctcctctgtggttattaaggggattaaaaaaagaaaaagaatgaaatgtaaacagttttataatgtaactgtttttattatcactggctatagtaaaatagagataatgtcctctctgacataggagctgaggactagagacttggcaagaaagccaaagcaagcctggaacccaagtttttggagctttgtggtgctcttgtttatttaattttaattttgttttatttatttatttctttttttttgagatggagtcttgctgtgtcatccaggctggagtgcagtggcacgatctcagctcactgcaatgtctgcctcccaagttcaagcgattctcctgcctcaacctcctgagtagttaggattacaggtgtccatcaccatgcctggcttatttttgtgttttta

SEQ ID NO: 30232 - DNA, 1071 bp, Homo sapiens
tagtatactcatttcatttattcttctctgcttcttaaataacttgtattggtgtcctgctcttagcctgcaaggcaagggaaagtgagccagtagaatagtcacactacaacttcattaatagtgatactgataagcaataaaaggaagccatagctgtgctgttttggcctctgtccttggcaagtggcaccatgctcctgcctcctagtgcagagactaggcaccacacagacatgggtaatggctgtacagaccattgttcgtacggctctgggtcggtctctgcccccactactgttccggccacaaggctgcctgcaaaaacaaagtgacacaaagaacaaggagatggggagttgctaagacagatgcattaaaaggatggcatcaattaagtggcgtagtcctaggccagaagcaaacgggcagactgctactgctcctcccaagtaagaggcgctggcttatcatgccccctcaggcctgtctggcgttcagatgacttgtggccgggatagactcaccaggactcatgctcatcttgagggcatgcactgtgcacccgagctttgtttttacccctctctggggtgtcgattagaaatgagctcttctttgcaagtagaacagagttttgttttgctttttgagtgtcaactgtggcccaaaatgagaaagactcagctgccttcatgtgacctaaacagcccaggtgggaagggacatttgtaagcatttgttgggtttgttctgcctgccctgctgtaaccatttttgacacgaggacactgagataagaataaaaagaaattgttctttctttttattgtaattgctgagaaatgagcattgttttctattaccaagtactgtgggccctcaccccgttccagtggccacttcaaagtcttcatcaaaatagctacattttgttttgtttttaaaaccaagtaatgggccaggcacggtggctcacgcctgtaatcccagcactttgggaggccgaggcgggtggatcacgaggtcaggagatcgagaccatcctggctaacatgatgaaaccctgtc

SEQ ID NO: 30233 - DNA, 1811 bp, Homo sapiens
gagaatttacagaagcttctaggctggtgttgggaatcacaggaggctaactaggcaaaggggagaggaagtgtgtttcagatggagagattagcatgtatataagaactctgtggaaggcagcagagctcctttgagggatgaaaagaaacccagaaagggggaaatggaaagttagtgcttaataggtacagaatttcagctggagaagatgaaacagttctggaaatggatagtagtgatgatcacacaacaatgtgaatgtaccaaatgccacagatctgcacacttaaaaatggttatgtacattttaccacaaaaagaaaagaaactcagagtttagagaataaaggagtggagtgagatccactagagcgaatagaaggggcaggaccatgtaggattttatggaccatagtggaaagtttaggaccatagaacactggtcaaaattgcattttataaaactcactttggctgctaaagtgcagatcaaaatggagaagtctcaacagagctatggtgggactggcctgggagccagtgcagtcatctgggcaagagagaatggagctggagtgtggactagggtgagagtgaagaaaaagagatctaagaaggctgcagagaaatgtaggagcaaaatcaataggacttggtgatgagttggatgtgaaggggcgatgaagcagcttcaaggatgatgccactgttcagccttggataaatggatggatggtgcagggattcacagatatggagaacactggaagaggagataagattgatcttgagctccatcttagacaagttgaatttgaggcacctttgagacttggttaggattttgcgatgattagttttagatgtcaacctgactaggttaagggatactcaggtagctgggggaacattacttctgggtatgtctatgagggtgttcccagaagatattggcatttaagtcaatggactgagtaaggaagatctgtcctcatctaatatgcgcaggcaccacataatagaacaaaaaggcagaggaaaggcaaattctctactctggagttgggacacccctcttctgcccttggcatcagaattccccgttcccctaatctcctaactctaggagattaggtagtagagtccgtccatttattcatttagcaagtattgagcctttggactccaagacttgtaccagtggttccccaggttctcccggcttgggccttggactgggagatacaccattcagcttccctggttctgaggccaagtctaagacagggtagtcttgaactgaagcagtctaccagcctccctggttctccagcttgtagatggtctattgtgggacttctcagcctccataactatgtgagccagttcccctaataaatcccctcccatatatctatagatatagatctatattgtagatatatagatatcacattggttctctctctctggagaaccttgactaatacagatgtcaacacagcaggtgcatatacaggttgcaggtcaatgtagaggtctgggctgaacacagactttttttgaggctgagtctcactctgtggcctaggttggagtttagtggcacaatctcggcccactgcaacctgcgcctcccaggctcaagtgattcttctgcctcagcctcccaagtagctgggattacaagcatctgccaacacgcccagctaatttttgtatttttagtagagatgggggtttcaccatattggccagtttggtctcgaaatcctggcctcaagtgatctgcccgccttggcctccct

SEQ ID NO: 30234 - DNA, 1352 bp, Homo sapiens
gagaattgtgatacagtctaagatagcctccagggttcaccacctcctgggatttatacccttgtgtagtcccctcccacaatgagtctctgataatgagggtaggtcataacaggcacaaagaaggagaaaaaccaggagattcagggttggtaaaggcaattgaaaaccctgtagcataagtgctcttcaaatatggggaattggggccaggtgtggtggctcacacctataatcccagcactttgggaggccaaggtgggtggatcacgaggtcagggaccagcctgtccaacatggcaaaaccccgtctctattgaaaaattacaaaaattagccgggcgtgatggtggacatctgtgatcccagctacttgggaggctgaggcaggagaatcacttgaacctgggaggaggaggctgcagtaagccgagatcgcaccattgcactccagcctgacctacaagagcgaaactccatctcaaaaaacaaacaaaacaaaacaaaacaaacaaacaaatatggggaattgggctctcaaaacttgtggtgcgagtgctttagaacaggaccttacactctctgactggtgcaactggtgtggttcaggcaccatggtagattggacaacaggggtgagatgtagtacctaaagtcctagctctcatctccaatcattgttcactttggctccaggttcacagtcaactccagagtctttctcttccagtcctcttcagtcctccactcctagggtaacaccctggaccacagaagagctccacctctgaagttataaatgcagacacctgatctttcatctgtccttctgctattctctgaattcctttcatggtttctctagcctgcagaaacttccagttcatttgtccctctactttgttttatttataagctccatcgagtcttcatttccttccccatcagctgagagttcagggtttatcacctccatcacattcttcccaatatacttatattccttgcacagttatctttctggcataactagaaggatagtaacacccatctggcagcactacaatcctggaagaatccaaccttctgtcttctctgaatctgcttcttggctctaagtgctgctggacaaaatctcacaaccacacagatcagtgctacatacattgtcaacttcaactaggtcctcaacacctttcagcgctcctatttgccaaggcagctctctctccagctctcccccaaaatcaacttccaaatatcctgcatgctccccagatctcccactcttcaaccccccctcccccgcttgctctcccaggaacctccgttactgaagaaagagcaaccat

SEQ ID NO: 30235 - DNA, 1028 bp, Homo sapiens
aacaacaataacaacaacaacaacaaaaaccggggccaggcacggtggctcacgcctgtaatcccagcactttgggaggccgaggcagacagatcatgaggtcaggagttcaagaccagcctggccaacatagagaaaccccatctctactaaaaatacaaaaaaattagctgggcatggtggcttatgcctgtagtcccagactactcgggaggctgaggcaggagaattgcttgaacctgggaggtggaggttacagtgagctgagattgcaccaatgcactccagcttgggcaacagaataagactttgtatcaaaaaacaacaacaacaaaaaaaccccttcactttattcctcaaaacatgtatgtcccagttccctccatttcagagccataaacataaagcctacaggtaagatacttaatacccaggacagatctttgtgtgtatatatacataccatatgtagcattatgttatatagtattatataaattacatgaaattttgcataagattggtaagcaagtcacttaaactttatgaacaaaagtataggccgggcatggtggttcatgcccataatcccagggaagctttcacaggtgggaggattgttgtctggaccatctcatgttattgtcattcctcacttgtctaaacaggaatagggctgagtggaactacggaagacctgtatcctgctcctgatgtttccttttctgcccactctgtgtctctgaaagctttggggaattttcctgaggaggaagcctgatgtggagttaacagtgcaggcttggtaaccaggaagccctgagtccgccccagctcaggtgttacctcacttctctcaccgggtttacctctctgtgaaatgggatgaaagcaggccgggcacagtagctcacacctgtaatcccagcacttttggaggccgaagcgggcggatcacgaggtcaggagttcaagactagcctgaccaatatggtgaaaccccatgtctactaaagatacaaaaaaaa

SEQ ID NO: 30236 - DNA, 1024 bp, Homo sapiens
ctaacataaaggttaaataacagtacttacaacaatataaaagttttgcttttctgtcacacagcactcagaatcagcagatcagggctgtccatgtgagggatccaggctctttttgtgtcgatactgtgttacttttgacatggggtgggtgcgtgcggctcttaacagaaagattcaagtttaatagatacagaagaattgatggaatcagaagaatcatcattttgcaacccccatggtaataactggttcagaaagtagtcatcagtggccaaaccataggtgaaaagttgtgctgtgtgcaaagtatccaacagattatttatttaaaatggaggaaaattcctttacaactaagatgtggctaatatctcagttataaaggtactttaatgggtccgactgacatgctttctaatggggtgcaaaaaaaaaaagatggagactgttttagattaaaagaggccaacaaatgaaaaccaaatgggtatataatgcttgaatgagattcctggattttaaaaaatagatgtatatttgtcagtaaactagaaggaactcaaatgctaatcagttgaggattggttgagtaaaatttgatatagccaaacaacagaattccattcagccattaaaaagaatgaaaagggggaaaaaacatgtaaagggcattgtaggggtagttgggtaaatttgaatatggattattatgaggagttttttcccacagtaacagattcttcaaagccaactaagtgtccaacaattcaatttgattctggacactatctacctggagttagtgtcatattccacaagttaagagaaatcagttccacaagactgctcccactgcgggcatgccaatcgcaagtcctgagtcgctctttttttttttttttttttttttttttttttttttttttttttgagtttccttcttgtcacccaggctggagtgcaatggcgcgatctcagctcactgcaacctccgcctcccgggttcaagagattctcgtgc

SEQ ID NO: 30237 - DNA, 1035 bp, Homo sapiens
tttttactgtattttgttctactagttcttgtttgtcataatataaatatcaacaacttcagtatctgttggtatttcagttggttcttttgggctttctaggtgtatagctaatgtttcaaatggtgataaatatgctcttttttacttgtaaatctctcctattgtcctcttatctacttacattgactagaatttcctttttttttgagacagagtttcgctcttgttgcccaggctggagtgcaaaatggtgcaatctcggctcactgcaacctctgcctcctgcgttcaagcgattctcctgcctcagcctcccgagtagctgggattacaggagtgagccaccacacccgctaattttgtatttttagtagagacggggtttctccatgttggtcaggctggtctcgaactcccgacctcaggtgatccgcgccccccaccgcctcccaaagtgctgggattataggcgtgagctaccacgcctagcctacattgactagaatttctgaaagagcattaaacagtagtgatgctaacaactacttttgacttgtttcctgcttcactggaattaatgctacaggagtgtttcaccattaacgataatgctgattgttgatttgaaaaatatctgagaatatgtgtgtcatataaaggaatgaatgttgaatttcttttttttaatttatatttttcttttttaaaatttattttgttgtttctgtagtagatatgaatgttgaatttcaccgtgcacttttggtttctatcgtgggattttttttttctatcatgggatttttataggatttttccttcacttcaataaactatattagtagatttcctaatgttgaatagtgtctcttttaaaatgagattggcatatggggttttaaatttgttttatatcatctctcccaggctttggtttcgattttattttgtttcaaaaaaattaagcttttcatcttttgctgtgctctagaacagttgatatagtgttacactttaatgttacttgaagat

SEQ ID NO: 30238 - DNA, 1097 bp, Homo sapiens
tcacagggctttcttccttagataattttgtgatacaattgagtatacacatacttaatttagatatgttcctgtaacttaatataacataatttttttgtcttacagtctagcttcaattaagttgaataataaatttaccgtataaaaattaaacacctaaaaagattattgaacttcttccatgtatagcacattaggcaagctaattggaaatttggaggaagtaagctagagatttttctaaaattttattagttttccctgaaagttaataatttaaatatcatttagccaaagtatgttactactaaaagtgactgttctaaggctgtttgtgtgaagtattaaatatatgttcttttcctcaaggctttaattagtatcttttggcctttttatgcttttgttatttgattagcttaaatttttcttttctgagtgttcagtcaagttatctgtactgaccagaagaggaatttcatcttttgctttctatttattacttgaacattactttaaagtgacttataattggagactgacaaatttgtgttttcttcaaacagatgaaaactttattctcaaacatgacagagcgttccttttatcaatggcaaatcgagggaaacataccaatggttcccagtttttcatgtgagtaggcataattcagagatgagcttttcttaaacagagaagcgctgttcataagaaagatggtatagttaaaccaagtttaatgctaaaattctgtcagctttatttttattattaatttctaatatcatagtaacttataaggtctaacaactgcctcagcattcagcatatatcctgaattggaagaatgggacttaaaaaatttaaaacttatacattgttttcaaaatatgccgtcatcttcagaaaagatgacggcatatttaagcccctgtcaaattcgagtgctgactttaccaaaactagattggaacataaactattgatgaacatgtaaaaattgttcatagacgagtattcagttactgtaccccctcaacagggaaagcagtttgagtaaaccattgcatggttgttttttcctcttactgttg

SEQ ID NO: 30239 - DNA, 1621 bp, Homo sapiens
ttttgaagaaattcaaagatttgggactaaagttaccaagttaatttggtatttattttgtcctttgtattcttattttttaggttaaagaataggaagaaaccacaataaaagctggaattataaagtcatagagtggaaagggatttagagattatctagtccaaccttttcattctgtagattatgctaaattcttgaaaagtcatgtaaagtccaggttatagaaattttatttacaatctggaagaaactgatagctagaaaaagaatgctgcatacttattcatattattaatgcctttactataaatttaagcttatttaagctcaaaattttattaaccactctgctctgaatttattttagttaaggattagaagcatcaaacattttgctggaaaacaaaatgacatttggggaaacattctttccccttttgctgttactgatagcttattaattctggctgtaatttttttgtctttatatacattaatcaaaaagacaaagatgttgtataaaatagtcatgaaaaagattgagtaaatagtttatagctttgtagtaacttctgggataggacactaatatagctgtcaggaaaccttgattttagtttcctatgtaccttcagttcgtttttcttaaacattggtataaaaatatggatgtaaaaggaagaaggtattttgtagggtagttgtaagttcctgaatgtgtggaatgatttatgtgcaaacattgtcttgcctaatggaaatagtcataattgcctagttttcattagtctgaaaaatgtcttaaagaagtattgggctcatcttaaatcaagagcaacagaagtctcttcatcagctgctgttagaacatgagtctgcgcagccatagagtagggatctgcagaccctgcaagaacagttcctgtcactggccactgtcagtggtcattaataattataacaatgtaagaaaacaagataatatagaagagtcaaactttgaactttaaacaaaacatgtttgctacattttaacagtcataaatagggcaatgggggggcggggcataagttttagaatatgttttatgtcatttaagaatctgacttgcaagtacctgaatgggagagaagtgctgattattacaaagtagtggagcaaggagagttgaggagtagttggttttaaggggtttgtaaagctgtgttgatgttttgggtaataaaactagattcggggtagaaatgctttttctacccacgtattcataaatttatgtaagaagaaatgctagtaagtgttaataacctgagaagctctagctttttccttcctttttttggggtaataccttcatatgttaatttcagattttttcatgagcaaagatgttcgtgaaacttagccataaaccatattctctgaatatcaagtgtcatccctaacattcaggcttaataacttaatgtttatgtgacttacgtgctagcaatgtggaagaaattttttatctagtaatgtttggtgtgtattatcttaacattagtgctgaattttagaaagcacttctattttggtgacttttggaacacatgggtagagcattgtcaagtggct

SEQ ID NO: 30240 - DNA, 1041 bp, Homo sapiens
tactttacacctacagtcacttattttttttttttgcaacattcattgaaaactccacattatttcaaacattatgttcttttttgacttattcatgttgtcaatgcctttatgataattttaagcttatttttaaatatttcaagatttattacattcaaaactcttataaagcattttgttcatggtataatagtattttgatctgagtagtaatagatttatttgtttaaatatagataaaaattggtcagtgtgtgttctccaaaaaaaaatcttgataatggggaaaatcagagattagacaggaaaagaagatattgtggctaagatttgactgcacttacgctttcatctctcttgcctttttattctctgagaaggtccctaaaattgtagttaatgctgctttattattatgttcagtgacttaacttcaatgtgtatctaatatcactgaacagtaactagggtccgaacatttgctcattaactcctgaaagtagtctgttgtgatacgtcaccaaacaaaggtttcaaatgtagaagcatgaaaggttctttaattatttgatgtgaattagttaaaagttccttgaaattttattttggatgatcttaactcacttttttctaatgaaatttttgctttcaactggtagtaactggtcctgggcattcagatttttatatttatgtatgtatgcaagatacactattctcttttgagaaaatgttgtcttagctaatttctgggatttgtgaaaggaaatgtaatatgttaatagctattattggcactctatgttacaatattaaggatctaaatagattcccacttagccacgatgcttttcttaagcataattcatctctacgtaaatatcccatatgaaagaaaatttagagccctccatttaaaaaagctttcttgctctgcataaaacttgaaaataattaatttcaaagttatattgatattaaaacatagattcagtcttgtcttaaaagtgtattacaatttatttcttgccatttttg

SEQ ID NO: 30241 - DNA, 1697 bp, Homo sapiens
tttacagcctttctatcagccaagatggcaaattgaattgggctctttatgttttaagaaaaatttgcaggctttccccaatactgcaggatctgtgagtcatgggaggaacggatcaaagaaggagaaggaatgtatctaatcaggaaaccatacatcgtttttacttctaaatatttggggctgatcccttacactgtagaaaaatttacttttttaaaagcccttttggctgggtgtggtggctcatgcctataatcccagcactttgagaggctgaggcaggtggatcacctgaggtcaggagtttgagaccagcttggccaacatggtgaaaccccgtctctactaaaattacagaaattagatgggcctggtggcgcatgcctataatcccagctactcaggaggctgaggcaggagaatcacttgaatccgggaggcagaggttgcattgagccgagatcatgccatcgcactctagcctgggcaacagagtgagactccatctcaaaataaacaaacaaataaaaataaaagcactctttacatctttcatataatagagtcactagcttctgtaccaatttcttgtctttagtgtactttggtaaagttttataattaaagcacatttctatcttgaagttaccatccaaggtggtttctggatgctagtttaatgatttaaacactagtggctcactaattcactagatagtttttgttctgttttctttttgctgcctgtttttatttttataattacattggcatgaatttccacttttcaatcttctaaggaatatttgagatttttgcttttaaaacttaatatttcctttaaaattctggaacttcttaagttgacattttaatttttttaaattaaattctgtagtgctcttacagaaccgaatattcttaatgtaagtataagcattacaaatccttgtagaataaatatttttagcattgttacgaaggttaaaaactgggttttgttcacttacatgtcttaaaattgccttaaaatgaatacagaaatttatatggcagcttctagtacagttgactgctttaacatggcctgacatctagtgatatttttctctctttcaaatttctgttttctagctcttaaatatctgtttctcattcttataaatcaagatgcttgtagtatataattctgagactaattatctgcttttgaattttttccactgcaattcatataatgtgaagatctgtgaaaatgctatgggaaaactagcttgggttcaaaatatcttaaccaaatataccctgtaggcttcccaagagtgactgtctgacagttggtgactgtagaagaagctggttgggtgttttctgggccaaggaaatttaaaatgtctgcaatgttatccatcattactttttgctgtcagaagggatggcagattgaagcttttctccctatcgcattttcagagttgccgtgtcagagcttcaccttgggtgaaggaagatgggcaggaattctggaaacagaactcctgagacctacctctgcctgcctaaaaatgtggactgactcagtatgagaaataacaagaaaacatttaagtgtttggggcaaatgttaatcactttctttccatagggcaaataggaggtgcttttcttatttaattacgctgataaattttgag

SEQ ID NO: 30242 - DNA, 1051 bp, Homo sapiens
gagtcactgcaccgggcctatttcttgttacttgacccaacaagaatataggcttcataaagacaagggacttactaccttacaatcttgccagtaattttattataaacttgaaaaaaactgtctacatttcattttttgtttgctgtatgtaaagcatattttatgatattcagtaatcacattttttactctgaaaggtaggcactgaatttagtactaatgtttttattaatgtttcttaaaagtttttgagaaaaaaaggaagaaaccaactcattcagaaggctcggattcctcttccaattcctcctcttcttcagaatcatcttcagaaagtgaacttgaacatgagagaagcagaaggaggaaacataagaggaggccaaaagttaaacgttctaaaaagaggcgaaaggaagcaagcagttcagaagagccaaggaataaacatgcaatgaacccaaaagggtacgtgtaaaacaccaatgtactcttacctaaaaacaaacactctggaatgggaaaagtatgtataattctataaactcaattttattacctgttattgaaaaaggatagcactttttaaactttaaattgaaatctggcaaatctaggagtaggtagcataggcatttcatttcaaagatttgtgtgttttcagttttcgggtgaaaatagtcctaagaactctttttttaagagatagggtcttgctctgttatccaggctggaatacagtggcacaattatagctcactgcatcctccacctcctgggctcaagagatctttctgcatcagcctcctgagtagctaggactacgggcgtataccactatgcttggctaatttttaaattttttgtagagacagggtcttccgctatgttgaccaggctggtctctgactcctgtcctcaagcaatcctcccacctaagacccctaaagtactgggattacaggtgtgagccacaatgcctggcctcctggaactcttaaaataaaaaagttaggatcatttaacaattttcctatcaaaattctag

SEQ ID NO: 30243 - DNA, 1057 bp, Homo sapiens
taattgcatgatgattggagatacaatttagtatcataaataagttacttttgttaacttgttcaacaattacttcctgcattggaaaagtgaatgtgtcgctttagatttggtctgagaaaatagtatttaatgtattttgtgtgttagactcaagtttagaattattgaaagaaaatgtttcatgaacagaaatatcataatggctggtgtcattgataagttccctatgaagagttattttgaaagctgaaaagtataagagtccttatttataattagctctctgcataaagttatcatttagttcattaaatattttttaaagcctgatattgtcttgttttaaaaagctattgcaaaatggcatgtatctttgaattaatagcttaacataatgtgttttcattattaaaaattctagcttctttgcttatttttaattttcatcacaatcttcttttcctaggaagattcctgatgttgcacccattgtaagtgatcagaaaccatctgtatcaaagtctggacggaagattaaaggaaggggcacaattgtatgtgtgataagactttttttgatattatgtatctaataaaaaatttttacctattttcaaagtcctagcgttaattttagatataatacaaaatctgttcaaggaactaattgtattttccatggttatgggaaggtattgctgttagatcaaagtatactgctgtgtttgaatgggtttaattgagtatgaaaggaggaacatgtgaaaccatcagtgagtatgctgagaaatcattaagactttaaaaaggaaaattttatgtggattacaggtgaatctcagccttgcccatctcttttaatgccttgtttgaaataacttcacctgaacctaaaataaaagttaaaaactaaaaaaaaaaaaaaaaaaaaagaactttagaccatccttttggtaacttcaatcattacctttgatgggatgatctgagattgggtcttttacttaactctgtcacatagcagactgtcgtggagaggcattttttaaaatac

SEQ ID NO: 30244 - DNA, 1072 bp, Homo sapiens
gaaaggaataagaagtcttgttttgtgtgattcagagagtagattgaaaacttagggagagggaatttcaggaggagaaatttgggctgggtttacaaaactattactatcagtttaaagctctctgtcactagaaatgagttcccatgataggtggtaaattctccatctttaaaggtgtgaggctgcttcttgccagtcaagtgatgccttagaagggaatcctgaattgacagaatatatagaatttgcagatcattaatctaaccttccattttacacatgtggaagttgagggccagagagacaaagttacctgcccaagacatgcatcttagtttagatggggcatagggataaaaatgatcatctttagatttttgttgttgtttgaaaagcaataaaagaatttaaaacacctttttctcatctttgtcactctgcaccttcatgaaaaggttttttgttattgttataaattgcatcataacttgtcagcatagaatggataacagagatgagaattaaaaactaaaaatatttgtgatggtaataggaagttagtaagcagttgtgttgcattctttttcttgtaaatattttatggttttacctgtttcttaattattcatatcccttattttattgtgcttgatattcatcatttgaactgaaaataccataagaatctttgacgtttgtttcctttctagttattcatcagtctttcttcccttgcctacccagacttcctaaaaaaggaaccgccacgtgccatctatactcggtctcccattttctcctcggctgtgtgcttgctgccttctgtgccttcccctccccgcatctcttagtttactgactaagactttcaggtacttctgatggccagtaccatggcgtattttcagcctcacttctggagccctctgctagctctcctttctcccactcaggccatttcgtccctgtgttctaggcttctcttcttcctcatggccttttctctctgagttcctgttgatagatgcagttgcctattgagcgactccagcttcctgtctgcttatga

SEQ ID NO: 30245 - DNA, 1026 bp, Homo sapiens
atctttatacaatgttatgtttgcactttttattaagtaaaatacttttatatatatagatgttctacatttgccttcttcattcaacattgtgttctagagatatatccttgctgaaacatgtagctgtagttcattttcttcagaatatttcgttatatatctctaccttaatgtttttttaacccattctaccattagtggagatttggtttattttcttctcagtgttattggtgttataaatcaggcttctatgaacatacttgtgccaatcttttcttgtttttctttattttcttctgtttgattttaaccatggttgttttgagagttcctcattagctgacactgtcatatccactgtgaggagtttgtgagaggcctttcttcttgttgtgttttcccctttctgccctaccagtaattaattttaatatcatgatgagtcaacataattatatattttttcaattgctttaattgtagatcaagaagctactctagaagtcggagcagaggatggtacagcagaggccgaaccagaagccggagcagttcctaccggagttacaaaagtcacaggtgagcttgtgatctcaccctgtgatgtggtctccatcatgtccactttttaaggctacataggcagagggggtagttgttgagaagaatcatgtcattactgaatatactactggcctattttctcatgtagttttttctatgtaagagctgtggaattcttgactattcctctgttgggatcttatcagagtgaggcaagaggagcagtagaaatatttaagaagccttgacccctacctccacctcccccacatgcatcttccttaacctaagttttacatctgcattcacctcttgacatgggttagagattgggataggaagattgtagagaggggaccaagaggaagaagtatatatatggtgggaagggtggccccagatttctagttctcctagcttctttccctcttttgcatctgaggtattttctactgc

SEQ ID NO: 30246 - DNA, 1050 bp, Homo sapiens
tctttaagcattactcttatatatcatatattaaaataccataaaaatgaaattcagacaaaatcactggcaccaaaaatggtttattctgagctgtcttcactttgactatttggggggcttctctcaagtacagatgtgggttggggtcccctggagcaggcaggattggcagtaagagatattggccactcaagtctactgtgtgtgtgtgcctctggaagagtgaagaatggacttcaaaagtaacatcaaaaatctaactgccaccatcctggagacattttgcagggctttcctttcaagtctttcaagtacaggatattaccacaacagcagctgaactgttgtaaccagcatgtttttcctatttccactgtgacctgcagctgactcaaagccttgcgtgacctgacccaggtgcaagagacaggggaagagggatagagggtatagcataaattacatattttcatggctttgggtggttcctccaaaaataattggacctgtaaaaactagtgtgtgtgtgtgtgtgtgtgtgtgtgtgtgtgtggtttttttttttaatctttactttgaatttgttccccaagtgtacttaatcaccttagtgccagtttaatccagttatgcagaagaaattcatattggttgcctgatgtagagctcagcaccaccctaccacaggccttgtctggtgtatttgggaagtggaaaagagccctcagttggagggagctgacaacccttggtggagggagggtgcccttgaatgtattaaaactatcacccaaagaaggtatgaaaacagggtaaggtggtcagttgtttgccaggtcaatagacagaaagtacattagaaaacaggacttaggccaaacaaacaatactggatactgaatacaaaacagtatgatttatattaaaggtttccaaaggttgcctgcaaaggagaatattactactagtcagcaggaaaaaaatgcattcagaacccaagcagaaactgccaaatgtaattaggttaagaaaagttacccttgggca

SEQ ID NO: 30247 - DNA, 1038 bp, Homo sapiens
ggggcatgaaagaggagaagtcctgaaggcaatggccacaagaggccagggcctgtgcaggtgtggtttcccatgagcaccaggcatggagccacagtagctctgggacagcagggaccggtgctcccacttatgtgctgagccctggggatgctgtgatgagcagtatggactcattcctccctcggcaggcaggggaggtcagaaggggccagataacagagatgctgactcaggcacccgggaagacaaaagctcagatggaagacaggtggtagcctccagaggagcagatggctctccctggggaactcagaattgtttcatggcacaagtagtatatacagagagcactcactccatgccaaatggaattctaggccccggggacacgtgcagaatgagcctccttgtggcacttaactctgtatatgtagaaaagggtcagacaggactgggagggactgggagagaagtctcatgggtggatttgttgactggccagaaaggaggtgcaggttcctaggatgttggcactgcctttctgcacagtcctgctatgaatggaagaaacacaggcttgctcaagagaccctgaaacaaggctggctgacaggcctgggggcctggctgctcccccaactcttgtgcagattccactcatctctgtgtttccactctgttgacctcctcctatatcaggttgcatgacacctctttttcctccagccctccccccacctccctcattctcacagcatttccaccttcacactccagagtcttggacactgtcatcctaggctctggggcagaggcctctgggtggctgtgggatggtgggcaccacgattggtgtctctggagcactcactttccctgatcttgctctttgggaccaagcagctcactaacatctcatgtcctgaagcatgcataggtcagagcagcactgccttgctggggaaggccggactttccttctttctaaaggatcaatgaggggaggtgaggcaccctggcttagtggtgcttttg

SEQ ID NO: 30248 - DNA, 1044 bp, Homo sapiens
gaatccctctaaccacataaggtaacttgttcacaggtttggggattaggacatggatatcttaacggctgagcagtatccagtagtacccttggtttcactttccacagtttcagttacccaaggttacctgcagtctgaaaatattaaatggaaaattccagaaatacacaatttatgttttcatttgtgtgttgtactgagtagtgtgatgaatcttgtggcatctcgctctgtcctacctgggacatgagtcatccctttgtccagtatattcacactgcagatgctctctgcccattagtaacttagtagctgtctcagttatcagatggctattggagtactgcattgcccatgttcaagtaaaccttattttacttcatcatggcccaaagtgcaagagtagtgatcctgcaattggagtgtgacaaagagacgctgaaagtgcttcatttaagtgagaagatgaaagtttctctacttaagaaaaaaaaatcgtaggctggggttgctaagatctgcagtaagaatgaatctgctatctgtgaaattgtcttctgaagaaagagaaattcatgctagttttgctgctgcacctcaaactgtggcaaaagttacagccaaagtgtgtgataagtgcttcattaagatggaaaaggcattcaatttgtgggtggaagacatgaacttctagaaatgtgttctgatttatggcaatgggatttggtactgtccaaggtttcaggcatccgctggggggcttggaacgtatcttccaaggataaggggtagggactgctgtattatattatgatcacctttcctttcctgggcacctttctgtttctctctagttagtaatcatcttttttgtttccttagtttttttcatgtacttatcacaagccaacttcctcttaatagactcaagcacacatcaatttctttctttggaaaccccctgcccagagccttttgacctgctccttctgagctggtcgctttcttggtcggtgcacagccgttggcttaggatcctcc

SEQ ID NO: 30249 - DNA, 1071 bp, Homo sapiens
atggggtctggctatgtttcccaggctagagcacaatggctattcacagatgtggtttagcacactgtggactcaaattcctgggttcaagtgatcctcccaccttaggcttcctgctagctgggactgtaggcatgcaccactgtgcctggcttaaaatgaatgttatattaagacaggtaccacttcccacccccatttgtggaggaatatggtggataatttttgttgatgccattcttagtcctataataccagatgtctagttctggggacccaagctcctgaatcatcacctttttttaaaaaaaacctgaattactaagaataagaagctttccctgtttcttctctctcccatctcaaactgtgttggctttgtgcctgcttgaacttacctactgtctgtttcccacatctgtttcactaatttccactggagcatccttagtggcttgggaggcttgtaagggcaagggcatctcttactcatctctgtctgctatgccaagaacagtgcctgccacagatgaagcagggcagggcagcagcagccacctttgaatgttttctctgtgctgaatacttagcatggattctgttttaattcatttaatgtccacagcagctttacaagaaagtagattactattagtacttccattttaaagattgggaacacattttaaaataatttggttaaagtcgtagcgctctgttgagtggcctgtttttatctctttcctttggcccttgggatgaaaaagtaaaattattcaaagacaaaagtaaagtaagaagagaaataaaaagtctggaaaatgaggtggatggatcatgaggtcaggggatcgagaccatcctggctaacacagtgaaacctcgtctcaactaaaaatagaaaaaattagccgggtgtggtggcgggtgcctgtagtactagctactcgggaggctaaggcaggagaatggcatgaacctgggaggcagagcttacagtgagccgagatcgcaccactgccctccagcctgggtgacagagcgagactccgtctcaaaaaaaaaaaaagt

SEQ ID NO: 30250 - DNA, 1057 bp, Homo sapiens
ttatcatgcctgttctttagtttctggaatgaatgaatgatttgtgatgcctttcctaagtccttttcatcttaaaaattttttttcatctgaacaaaagatcattttcccatatgattgatgggtttgctttttatttaatgatgaaagaggtaaggagttgtttgttactgtcagagttcgtctaatgctagagttgagaggtccttagatgtcagctagcccagccttaccattggtgcagaaatgccttatgcaaaattttagacagatgtttgccctgcctttgctggaatacttttagtgatggataactcactgccttttctggtattgtaacggctccattgagtagttccccattttttagctgaaatgtgtctcttaagtaaccaagtttcatcctctggagtaatatataaccagtctttttcctgattgactatattgatggccatgtttctttcctccttgagctttaattttcttgcgtataaaatgacatgagttacatcacctggttacctcactagcgttgaggtaaagaacaacttgacataattgtgaccttaggcaaaattcttttccggtctcagagtattaatatattagttttatttctggtatatattctaatgggaaaaatagcagtgtgttgtctgttggcttgggcacctggatacttttcagttgatattattgctctgttaccaaaggcattaatttgtctcttcatcgaacatttattgaccattcactgtgtactagcaattactgtaaaaacattgaagaagatagacaccttccctgccctattggggcttcttttccttcatggatgtttgtactttgagatataaatgcttttgactgctcaagataaaataatattgttagcgcacttttaatgtttttggttttctaattagtccaatattttaaagtatgtctttgatttatagatatttggagtctgggagtgatccttttcatgttggtgtgtgggcagccgccctttcaagaagccaatgacagtgaaacactgacaatgatcatg

SEQ ID NO: 30251 - DNA, 1047 bp, Homo sapiens
ggagtctagtggtgttcccaggctggagtgcagtggcacagtctcggctcacttcagcctccacctcctgggttcaagcgattctcctgcttcagcctcccagttagctgggactagaggtgtgtgccaccgtgcccagctaatgtttgtatttttagtaaaggcaaggttttaacatgttggccgggatggtctcaatctcttaacctcgtgatccgcctgcctcggcctcccaaagtgctgggattacaggcatgagccaccacgcccagcctataatatcttttagttatattttttaagtctataagaagtgtggatatattgtcctttttaatttcaatagtgataatttgtgccttatcttttttttgtcttgatcagttttgccagaagtttgttattttattagtctttttctaagaactaccttttgcttttattaacaattataatttttgttttatgttttattaattttcttttctcttgtctgtagtatttcgtgccactcacttccatgggctaattctgttcttcctctttctgttgttggatacttagctcacaaatttcccttttctgttgtaataatttaagggtataaattgcctactgataccattttagctgcatcccactagttttgatttatagtccttttgttattcagttctaataagtattttctagtttgtgttgatttatttcatgtgtgagttgtttacaggggtgttttacatttccaaatgtatggcgtttttctaattagctttttattgatttctaacttaattgtgttgtggtccaataataatagcctctatggtaccagtgttgtttttgtttttttgttttttcaaattgctgagacttgcttatggcctagcataaggtctttttgttctggaaaatagtgtatattttccagttttggagttctgcataaatccttaagatcaagcttttttattatgctgttcaaaattatttgcatcctgtatgagtttttctttctcctactggatctatcagttactgaggtat

SEQ ID NO: 30252 - DNA, 1636 bp, Homo sapiens
tgttactactcatatgagatttgaagccttctttttccccaaaaaatggtcgatctcagattttaataaggtgccccttttctcaacccccatagaggtaccttttatattcactgtgaaactgtcattcaaatgaatctactcctggtctttaactttttttgcacttctaccccaataagaggctgtcttgcagtggggaggaatgcattttttgtgttttcttgttcttcccattttatcctctttttgcttatttggaatctgactatccatgaataagatggactttgagatctacttgtaagtacacaggctgaagttgaatatctgtatcccagtacttaccaccatgctttgtgcatgttaggtcacttttgtcacacatagctttaccatcacacaggtagtaaatttcctgtgctgcctttcttctgtgcatgtgacaattggtagttgagaagagcatgaactcacctatttgttattttgtttttggtgctctaggtcaggatggctaactggttggctccccacatggtgccctacgtctatatcacaccttaaagaagctgaagagaagatgttaaaatgtaaggctttcttcttgtaagttaaatgagctgtgtactaagataggtccaatatatctcattgccctgaaactggaggtaagattctgtggtgtgttcattgttggcaaaataacttttttccttttccttgtcattagaaagtacagaaatgaatgtcgggggctggcaggtaggagttctaaaactttttggtcttgggcccctgttatactcttaaattagtaaggaccccaaggagatttgtttatgggcttattatcaatatttatcatttctaatacaattagaaattaaaattgaataatcaaaaatgttaatttattaatttctttaaaaataatagtaaacccattacagattaaaataaataaaatttgtaccaaaaaaagaaaaaaaatactttccaaacattgtttacatgtttacaaatgtctttaatgtctagcttgacataaggttgctgcttctgctttcagtctgatgggtaatcacatatgtgacttctggaagactactttatacctattagagaatgagagtgaaaaatagaaagtcttagtattatgatgaaaatagttttgacttcctggatctcctcgaagagtctcagggacaccccccctgactctgcttgagactatgctttgagaacagattctaggtgtttcagagcaagcagccttgtatagtggaagtactagactggacccaggtaacttggtctaggcccagatctgccactaggtggttacaagatcttggacaagtcactttgctcagcttctcatttcttataaaatgaaggggtaggattcttataaaatgaatgggtccatagaattccttctagttctagcattctaggattctatatttatagtggtgtggaagccccttttttttccttcttatgagcactaaaatttacccaaacttgtaccatcagggcattccaaggtatctgtgggtgtagttctaagtagtggtacttattgtgcaattttgttctgctgattctacttaaaggagtggattaggta

SEQ ID NO: 30253 - DNA, 1864 bp, Homo sapiens
ctgttttattaaatgcttttactcactaactgtctgaatgcttttccttatccaggctattcttggggcaggacattatgtatatgcagatcaaccagaagaattcaaccagaaagtaaaggagatctgcgacactgtggactgaacacactgaagctctgatgggaaaacctggtgactgatatagttgttcagcaataattcatagtctgtgatgaagagtagtgaatacaacacacaaccaggcagccttcttgactatactttgcacatgttttctttaggaattcactcacacatttaaaccagttagtgccttctagaagaatggctttcctttctcctacacaaaattgaaatatacaagtctctaaatataatacctttaaataaaaggttatttgtccctctgatgtactgaaaaactgtaatttttcagctgaaaattttttaatctaactttgctagttatttttatattgcaatctatattaccaatttaggaagtgatttctgagtctcttacactgtaaaggtgcactttattttctttgtcttccccatcatgtatttattgtgtcttgataactgatattaatctaaattcaatgtgtttttatgtaaaaatttgtcagttgtttagaatatttcactttgtttttgaaacggagtgacaaggcagatttttggttagaggacgggagttgatcactatcattactttttctagtttacctgttttttatatttaaggctgctaagccatgttcagcattttaaatgtggtctatcctgacatacagtgtataacaacataactccttggaacctcctatgtgtggtataattctactcttccaaggaacatgacttcaatactttcagtgattcaggtactgaaaagccttacctaaaaggctgttctttgtttccccctttcatactattcttttccatgacccaggatgcagcaaatgaaacagatttcttctcttaaggggatattaagactgttacttcctagtaagccaagtaataccatatttttattaacatctaacttttgtagatgggtgctaaaattgcatacattttaaccactaaaatagaaaaacaagtggtgctattatgtctcatggcaccagaaatgagctagcacttgggtttgttgttgctgttgtttattaagagtattgtgttaattaaatcattacatacttgaagttatattacaaaaattctagaaggttgattgaactatttttttaggaactaccatcaagtgtagcattttcttgcagttttaaaatgaggaaaacttctttgaaactgtgaaatgctccatgtggtaactggctgctgagaaaacccttcaccaaaaaaataaataaaaattgaataggattgtcatcaagaaggcatctttcgctaacgttgcttgtctaggagaaaggtagctatgtaaataaaaacagtgaactagagcaaatagtggtttaatggttttgttattgcatttttaaaatggttaattagggaatttgtagttgttaggaaatgtaaggttgtgtcactgttgattaactgccagaaagactgaatgttctattttcaacatttctcccctataaaagaatagacaaattatactgaagcatgatataaacatcttcccaatgaacaatttgtctcacttgtcagattaactaggttagtgcaggaagcaacatgagcgccaagatgtgttgtctgatttctctaccttaagaacaataatagtctttttagttagtattttggatggccaggtttcaaacctgtatgtggtacaaataatttgggtaatatttttgtatttttgttt

SEQ ID NO: 30254 - DNA, 1031 bp, Homo sapiens
taaataatataataaagaggaccttcgatgacagggctcacaaaacatcatgactgggccaagtaaaaaaaattaaaaatacatgtgacttcatgcctctgctgacatgtcatcttgagaggatgacatccatcttgatgagaccgtacaagtcctggagggcagaccagaacctctgagaagggccctcatggtcactgcagggttgcataccatctcaaggcgataatccagtgacgtacacagcatctctggctgccatgctgtccttccctgcctggtcaggccccaggacctgcccactagctcctgtggcaacagcctatagagttcagtctccagctccccagagcttctccaggagtgccagggagcagagcccaagcctcctccaattacagatcccttctcccaggctccactttgcctgttcaagcctttgagatgccgcctcccttacctagctagctctttccctgttggattggaaaacataaccaatagaaacctcttaacctgtctctggatgccaaagtccctggtcttcttgcttcccagctcgcccccaggagaggggagcaagaaacccctctcatgctttaataatcttcctgctggccaagatgaggcagccgagttaatactttaattcaggcatcctgccacgtgggtttgccacatctgccctgtgagagtgtaagtctccagagggcagggacaaggtcttattttcttttcttcctatcagctcatcacattttatcaggtttcacacgcctctttgaccggtagccccggtgtcttcatatgcccatgcacagaaaccttcacgttgtgtccctataagaatcactcccatttttccagcgaagcttcacgtccctgggagaaaggtagacagtaggcagcagagagcagatttagacatgacagtggcccagggtccagcttggagccatctgaccccaaccctagagtaagtgaaggggaccctcaatgctgaggatcaaagctggggtgctgagagtttt

SEQ ID NO: 30255 - DNA, 1052 bp, Homo sapiens
caggagttcaaaaccagcctgagcaacatagtgagacccatctctacaaaaaatacaaaaatttagccaggcatggtggtacacatttgtagttctagctacttggaaggctaaggcaggaagatcccttgagcacaggagtttgaggctgcggtgaactatgattgtgccactgcactccagcctgggtgacaaagtgagaccctgtctccaaaaaataataaataaataaaaagtagagtcatggtggcatagaggttgccgaattgaaaattttggtatagaaaaacagaagagataatttaaggttaattgcacacagaggctacagtgagaattgaagtagatttctctgagcacaaactggaagagaagttctcagccttgccttcaagttttatgtgggacacggcacatacaacttctgcttacacccgcgggagaatattgttgtacttatcttgcgctgtgtctagatgaacaaaaagttggggattactggcctaaagagtatagaaaacagtgagattgaatacatcaagccaaaacagcaaaagtaacagtttttggacttcactcaagttaaaagggcctaagaagaatgtattaaaggatttcatagaagcagttggtctgtggttcagttgagtatttcgtagaacacagtttttatttggagctggatgtgcagccatcatgaaaagagtgccccaaggacctagaactggacttagacaccggcaaagtagtgaaaatacattgaaactatagaaagccaactcaacaagataagtgtattcaactgggttccttacctaagctcagtatttataatttttttatttgtatgtcatttatccagtaaaattccttagtctttagtaaaaggagactttcttatattacattcgactatatgagttcttaagagtagggaatatgttttgataatctctgtgtctactaatctacttcatagattcatagaatccatccagtattttcattgaactgaactaaagaattgttgaataactaaatgtgatgtgcta

SEQ ID NO: 30256 - DNA, 1686 bp, Homo sapiens
gaactcacatttcctcatttcaaaacttactgcaaagctatagtaaacaaagcattgtgatactggcataaaaacagacatataggccaggtgtagtggctcacttctgtaatcccagcactttgggaggctgaagcagaaggattagttgagtccaaccagcccaggcaccgtagtgagaccccaatctctataaaaagagaaatacacaaacatatagactaatggaatagaatagagaatacagcagtaaatacttgcatatatggtcaactgattttcaacaagaatgccaagaccactgaatggggaaaagataatcttttcaacaaatggtactgggaaaactggccacatgcaaaggaatgaagttgaacactgacttatactaaaattaactcaaaatggatctttgactgaaatgtaagacctaaactataaaactcttagaagaaaacatagggcagaagattcatgacattggatttgccagtgatttcgtggatataacacctaaaacacaggcaacaaaagaaaaatagacaaattggatttcatgaacatttttaaagtttgtgcactaaaagacactatcaacagagtaaaatggcaacccacaaaatgagagaaaatgtttgcaactcatatatatgataaaggaattgatatccagaataaataaagaactcctaaaactcaaccagcaaacaacccatttcaaaaatgggcaaaggacttgaatagacatttctccaaagaaggtatataaatggccaataagcacatgaaaagatactcaacatcattaatcactagagaaatgcaaattaaaactaatgggtgtgaggtacctaatcacacccactagaatggctactatccaaaaaccaaaataacaagagttgatgagggtttgaagaaactggaacccttatgcactgttggtggaaatgtgaaatagtgcagctgctatggaagatgatatggtgattcctcaaaaacttaaatatagatttaccgtaaaattgagagcagtgtctcaaatagatatttgtatacccatgttcatagcagcattattcacaatagccaaaaggtggaagcaacccaagtgtccatcagtggatgaatggataagcaaaatttgatatactcctacagtggaatgttagccttaaaaaggaaggaattctgacacaggctacaacacatgaaccttgaggacatcatgctacatgaaataaaccagtcacaaaaagacagatggtggatgattctacttatgtgaagtacaaggagtagtcaaattcatagagacagaaaatagaacagcggttgccagggactggagggaggggaagggggcgttagtgtttaatgtgtacagagtttgagttgggcaagatgaaaagagttctgaaaattgatggtggtgatagttgcacaacaatgttaatgtacttaataccactgaactgtacacttaaaaatgggtaaggggctgggtgcagtggcttatgcctgtaatcccagcactttgggaggctgaggcaggaggatcacttgagcttaagagttcaagatcagcatgggcaacatggcaagaccctgtctctacaaaaaaaaaaaaaaaaaaaaaaaaatttaaattagccaagctaattagccaggcataatcacaccact

SEQ ID NO: 30257 - DNA, 1071 bp, Homo sapiens
gattaaactaatagtaaatcagtagccaacatttgtggtgtatacactgtttgccgagcactgtgctgggtacttatatgcattctgtctttagctctcacaacctcactgtgcagcaggtcacccctggcatgtgacagataaggaaggtcagagggcttgcaagtaggtcgtgatcttctgaagaagtgtgtctttgggggcagcaaagctttaagtcaatgttgctgtacttttgaggtggcttttcttgatgatttttttttattttcctgaagactaataaaatattttctctggtgggggagaggagagggtcagtggtttttcctttaatgtatattttattgcagtgacagatatgctccaagcttgcatgaactcgggcattttaatattccaacactctgtgatccagcaaatctccagtggtttattctcaccaaagctcagcaggcaagagagaacatgaaaagaaaggaagagtaagtactgccagtcttctgtaaagtcagatcattcagtctaactgaaaacctcagatatttggaactcataaatatgggacctggaaacagtatgaagcttaggaaattgactaattattagatattccatatttatttcttccctacctaaattatattaccaccacggacctcagtttgagaagtacagcttcttaatataaaagtcaattcagaaacagaatgaaaaataagaatatcagcaaggaattttccagatggaaaagactgacaacaaggaaaaatattggttatttcttgattaacaggaatctttattgttttaaaattttcaaactgttgatataaaaagaactttatctgtatcttgattaagttgagaagaaaacttaaagtacaaaactcatcttaggcccggcacggtggctcatgcctgtaatcccagcacttggggaggccgaggcaggcagatcacttgtgaggtcaggagtttgagaccagcttggccaacatggtgaaaccccatctttactaaaaatacaaaagttatccaggtgttatggcggtcacctctagtcccagc

SEQ ID NO: 30258 - DNA, 1051 bp, Homo sapiens
ttactcatcccctgctattgatagaagtttaagggttctttctgtctaatcctggagagattagaagcaggcccagctgtgaaacatttgcagaaccatcagccctgactgctgtctgtctgcttgaatctctaagcagcatattctaagtaagaataatcttacagaaaaagcaaacagcacttaagaaagtgatcagtattataggccatgataactaactgctatgaccatttctgttttttactgtctagtttatggaaattttatagtacctacttttctatgcagtgtttaagggtgattaaatgtaagatatttggacattttaaaccaatgaagtattttaaatagactggttcagggacacgaccatggcagttttgctttattcacgttgttaaatgggcttgctgagtaactcatgtgttggtctagatgtagcacattgaatccacttatcaaaacactgtatccctaagcacttgccacctgtgggagaaagtatttgagacactgagttctgcctagagttgtatactttgtagacctgaactgaagcccctgatggaataagagagttgtaacctcaggcagaggggagggaacagacagggggctggtgaggtaggagagtaagagtgaagagaacctgtcctcctcaggatcctggttttctgtgagcctgcttttatctgggaaatctttagacagcattacttcccaagggttaaactttaggtgggtcctaaaactaggggttttatattcttcattttctccttccttcagtcactaacagctgctaggtaaggcaatataagagcttttttaaatttatgttatttttagccctttactgctaaaaacattaacaaatacttttagagatccatgtgacagtaactcaaaagatttaacaatgatggctattggcgtgtcttccaaacgtataatttggcctttgtgggtggcattttcagtgttgtgagtgcacagttagggccccaacatgtaagaatatatttacattgtgtgttcttttgtttgg

SEQ ID NO: 30259 - DNA, 1047 bp, Homo sapiens
tcactgccttacctacatgggatgcacctctgcatttcacatttttactctgttatgcaagatggagacctttgtattccttggaattggaagaatggagaagccattaagtaacacagaaatctgttttatttttttaagagataagaaaggaacttaaattaaaaatatttaaatccacaatttgatataacagtattatttacataagaacaaagtttctaactgctgctttaaaagtagacttttttaaaaaaattaatttctgctaggagaggttttatatgccaggcgtggtggctcatgcctgcggtcccagctacttagggaggctaagataggaggatcacttgagcccaggaggccaaggttgcagtgggcccagattgcaccattgccctccagcctgagcaacagaacaagaccttgtctcaaaaaataataatgataatttaaaataaataagtaactaataaaaagattttatatcccagtcttatgatgttggttggcaaggctagataaaaagatgttagaatgaaagaacatatttttagtgatatgtaaatgaaggattctacaatagtcatatatttttatatgaatgaatgttgggttgggctggagaggtatgtgtgtgtaaatataaaggtctcacattcagagtatagctctgaaataatggaactcatgtctacaattcaacatgcatctgtatagttacatctcatgtaaatatacacagacatattttgcagccagtaattgacagttaatgtccaaaacaggtgattgataggtaacagaaattagataaccaccaattttgcccaagagaaagactagaaggactaaaagcagttgaatgtatggtactgacattgtcataagcagtctgataaccagtttattgaaacgtgtgcattaacagagaatttaattttaaacccataatttctcctatccattaaaatattataattgttagtagtatgaaaccaacaggaaatgttttttaatcatttagtgaggtgattcatttgtttc

SEQ ID NO: 30260 - DNA, 1083 bp, Homo sapiens
tggtgatgtaagcctagagtataaaaggcaatagcaggccaggcacagtggctcatgccacagcattttgggaggctgaggtgggaggatcatttgaggccaggagttcaagaccagcctggacaacatgggaagaccccatctctacaaaaaatttaaaaattagccagatgtagtggcgagtgcctatagtcccagctacttagaaggctgaggtgggaggatcacttgaacccaggaggttgaggcagcagtgagctatgattacaccattgcactccagcctgggtgatggagtgagatcctgtctttaaataaataaataaataaaatggcagtagcataacaagaatgaagctttccacatcttggtaagatctcctcttgtgtgccctactagggatctgcaagccaagggattgggttaagatatttgcttctgataagatttatatccttgaccattagattgggatcttaatgtagcctctcatgtgtgtgagatttctttttgtacatctgtagctcactagaaacatttctgtataagacgtctgaatcataactcaaacttgggtgtggcattaaggatgggcttgtttcttttaataataacgtgaacaattttagagctatatatttcgttacaaattactaatacatcctcatttgagagataaggaaactgaggcagatgtctagctggccgcaaaaccaagtgtcttggtgccaattttagtgttagttgtatttgagcacaaagggctaggtaaaggggtcaataagtagatggtaaataagtagaagagatgtgactgaagtccgatctaaaacttaagtctgaagctaaaatccatgctcttaattactgcttattacttcccattccctccttaacccacacccaggtctggcttctgttcccaccgttgtgtacagtctcctctgggagaggtcaccagtgccatgagtggggctcgagggcagctccattgttctcaatgcaaagctttactgctgttttgatgctccatacttgaggtgggtctctctgatctcacagttgtagattgtgggcagaaa

SEQ ID NO: 30261 - DNA, 1027 bp, Homo sapiens
ccttgaattcctgggctcaagcgatcctctcacctcagcctcccaagtggctgggattacaaatgcaccccaccagcctggctaattttaaaattttttgtagagacagagtcttaccgtgttgcccaagctagtcttgaactcctggcctcaagcgatcttcctgcctcagcctccccaagtgttggcattacaggcatgagccactgggcctggtgacttttcccttacttgatggtatcctttgaaggacaaaagtcattaattgtgatgaattccagttttttttttcttttgttgcttctgcttttggtgtcatatctaagaaaccatcactaatctagggccgggaagatttatgtctatgttttcttttaagttttagctcttacatttcggtcttttatccattttgagttaatttttttatatagtatgagataaggatccatcttcattcttttgcatgtggcaccatttatcccaggcaccatttgttgaaaagactgtgctttccccattgcattgttttggcacccttttaaaaaagcagttgatcataaatatcagggtttatttctaaagtctcaaatctagtcctttgatctatatgtctacccttatgtcagtatcaccctcttttactattttggcttcatggtacattttgaaataaaaaggtgtgagtcttccaactatgttctttttcaagattgttttagctactctaggtctcttgactttccatctaattttggtatcagctggtcaatatctttgaagaagcaagctgagattttagtagggattgcaatgaatctgtagatcaatttgaggagtactgccatttatcaatgttaaatcttttaatctttgaacatgaggtttctttccatttatttaggccttcagcttctttcagtaatgttttgtagttttcagaatataagaatataagtttttcacttcttttgttaaatttatcctaatcttattgtttgagactattataaatgttttattaatt

SEQ ID NO: 30262 - DNA, 1084 bp, Homo sapiens
aaccttacgactgcagcgaatgtgggaaagccttcagtcagctctcttgccttattgtccaccagagaattcacagtggagatcttccttacgtgtgtaatgaatgtgggaaggccttcacatgtagctcatacctacttattcatcagagaattcataatggagaaaaaccttacacatgtaatgagtgtgggaaggccttcagacagaggtcgagcctcaccgtgcaccagagaacccacactggggagaagccctatgaatgtgagaagtgtggtgcagctttcatttccaactcacacctcatgcgacaccatagaacccatcttgttgaataacaagtaaggaagaggaagacctccagcattggtcataaccttctgcctccctaatgagacacctctttgctgttttcttcctcctctataaaagtgagggctgtgtccttaaaagttatagttttcaggaatgcagcagaagacacaagaaaagcatttcagaggctaatttaaaacaaaaagtaagcacctaaaggcaaggactttgttttaactgtaccttaagcggtcatgttctctgaagtggaatgtggctttcctaggaatgggtcgtacaaagctaagtggtaatgatgctatttggggaaaggtcttttttgcttaattttgttttttaaaactctgatgattgcttgagcaacaggcaggttatctgcctggttgaattctggttgaaccgtgtattctaatatttctggttaagtggtgactgggtaaggaaaccacttggggtagcagttcaacaattcacttacgaatgtttataagctttccatttcctaggtaattttttaaaagccagtcaaaacaaaaactttactgaaaatggacagaaataggaaatggactttttccttactgtctatacctcctgaaccttggtattgtaaagatctggggacctctgggtctgttctgaccattccctagtctccatggccaagcactcaaggattgatggacaccacacaccagctatattcatttgccaagatcaacagctccttctccaaacaactcaagcc

SEQ ID NO: 30263 - DNA, 1033 bp, Homo sapiens
tgccatcgagtagatatctttttgaatgctttatgtgaattaactcatcaaggattcacagattatcagagctggaatgacccgtaaatattgtctaatttgtcacccttttcagataaatagcctgtcatgtaggcccactcacatgggctattggcagagcaaactttcctgagtcccaatccagtctactatcatcttgtgaatgggaggccaataccatagccattggatctggcattttgtttttgtttttgtttctgggtttttaaaaagtaactttttctacctataaaagtaatatatgtttattgaaggagaagtaaaaatatagaagagtataaaggacaaactaaagtgacccattaactgacctagagataaatgtgttaatattttggtgggttttctttatgtcttttttaaatgtgtgtgttttatctgtttattaacaatagtttctgtttattgagtgcttaatgccagtatatgtgtgcatatttcttgttttttagtgttttgtatcttcctgttttaacatattatattttctcatgaatattctttgaaattatgatttttgataccttcataagctatctttgctagtctatcaatgtttatttgcctgtttatttaacaattgtagtaatagtgtgatctttgtacataaatctctggccatctctgattatgctttttcactttttctttgattacagaagttagttattcctatgggaaaattttcaaacattacaaaaagataggccttaaggcaaaagtttaccataattttattcttcagatatgatcacaataaataatttgttatatattcttatagatttgttttttttttaaagtggagcaaaatatagataatagaggacatttgaggaaattattcacaattcattattttaccacagtgatgattatttttccttcttgatcttattcagatgtatttttaatttttaatttttgagagggatctcactctgtcacccaggttggaatgcaatggtgc

SEQ ID NO: 30264 - DNA, 1034 bp, Homo sapiens
agatatttttgagtgaacagttttggtattgatatttttaagaagcagcatttacagaaactggtatttttgcaacttttttgtaagtcaaaacttatttcacagttaaatttatttctgtttctttttaactgcagcctgttctctgacactgagctatacctgaagaaaaactgtttaattgatatgacatcttgaagaagggacaatcagtgtgtctctagtttgtatcaagtagatagcattccctaacactatctcagctccttggcatttggtagaagtgggtaaatcagacttaatgcacaagctttgctatgaggacattttgctatacaacttttaactatattaactggcttttcatatagattattgtatgatggccagagtgtactaattgatgtgaatattcctattcgtttaatctttataattataaaaaggtaatgaataacattctgatttacttatcaagtgcttaaatatttgatagtatgttagtctgatgttaccacttcttgaacagctggcaaatggggtgtgaacctaggaggctacaagccaatgctgatttttgcggatgcttccacattgttatcctgagagttattgtgtgtgttattagatagtgtccctaggcaacagctctttgttttcgttctgtttactgggacagtaatattccctccctccctgcaccttttctccccatgagcagggttcccagttttccagacctgaagtgttttccaatcaaagcgaagagacgatctgtggatgttgaatatgcaaggagctgaagagagagacattagaagagagacttgtccaggtgagtgagcaagggacaagcagtgggagaaatagtcagccaataggaagcctttggaaattttagaggacaagctgggtgaggctcaggagataaaataactgtctcttatagggatgttggggacaggggtgggtgaacatgtctggggccaacttttccccagtactaattttatcattctcatttctagcatttt

SEQ ID NO: 30265 - DNA, 1131 bp, Homo sapiens
caccgtgcccggccaactttctttttttaaatttcaccagtttcactggggagtgggtcagtggaattcctcataatgtcatgtcagaagtcaatctctgaactcttttttaacagaattattctgcccgctaggttgagaaaagatgagagtgggggagaaagagaagcagaaagactattgtaataacacaataaagagatattgctggcttggttctacactgtggcagtggatttggcaagaagttgttggattgtgggtatattttgaaattagagccaaagctttgctgagattggatacgaagagtgagaaagaacagggtcagggatgactatatggtttttggcctaagcaactggaaagatggagttaacggagatgtagaaacacatttgggctagaggtggggtgatcaggagctcaattttggacacattaaatttgattcattgcccactgcatatccagttagagatatcaaataggtaataagttgtaagagtgtggagctcggctgggcgtggtggctcacgcctgtaatcccagcactttgggaggccgaggcgggtggatcatgaggtcaggagatggagaccatcctggctaacaaagtgaaaccccgtctccactaaaaatacaaaaaattctcagggcgtggtggcaggcccctgtagtcccagctactccggaggctgaggcaggagaatggcatgagcccgggaggtggagcttgcagtgagcggagattgcgccactgcactccagcctgggcaacagagcgagactccatctcaaaaaaaaaaaaaaaaaaaaaggagtgtggagctcaggacagcagtccaggaaggtttaaatttgtgaatcatcaatttgtacctagtatttaaaaacaggccaggcatggtggctcactactgtaatcccagcactttgggaggccaacgcgggcagatcacaaagtcaggagatcaagaccatcctggccaacatggtgaaacaccgtctctactaaaatacaaaaaattagccaggcgtggtggtgcaccctgtagtcccagctacttgggaggctgagggcaggggaattgcttgaatctgggaggtggaggttgcagtgagccaaga

SEQ ID NO: 30266 - DNA, 1058 bp, Homo sapiens
ggctgccagatttgttaagggaaagaaacctcactgtagcttctgttttccttcaagaaatggtcttttactcaccagtgagagagatattcctagagaagcctacaacattcaggaaggttctccaaggagggagggagggatgtctctctggtccaggggctgcacacagaaactcaacttattatcctcacctggtcaggctcacagagatagatgtattatctagaatgtaattttcttactttatatattggaacattccttttccatgaagacatatctggtgcttgggacatctggccctggtgtccacatacacggaaaggcagagtggttatcagaaaatgccaactgactatggaacctgagcaaaagagagtcaaggactccactagcctgaggccagagcgaccctgcctacccaaaatgtgccccctcccagctgatcacattcataccaggctcttggctctttctttcagcccccttttgttcacattcgatcttcagatgttaccacttttaactaagtttctactgtattttactttcaaccaatccttgattatatttcccacctcatctcatcttgcttttgtactgggaggaatcctgagttctggggaagtgccttatttcatccccatgtgtcaatcacatttatcaactgtactgacttgacccaatcacaatagagttagcctttctttgtacaccttggcattgctgcatataatggatttgaatttgaaattgatacttgaatatacttagcagtgttttcctatgcctcctcccacccctgttaatctatgcagtgatcagaatcatccagataatcaacagctgaagaatgaacaagaagaaagtatcaaagaaagacttgcaaaagtaagatttttttttatgtaatagtttcttcttgtctgagcaatgcttttatagttagtatttatggtagtatattttagaaatcattttactattgaaattcctgtcttttctgcatttccactgtttagcatgatatttaccattagtatttagacacagct

SEQ ID NO: 30267 - DNA, 1195 bp, Homo sapiens
ggggagattgaatagagtgacttgatgaaggtgacagctaggtttcaagcccaaggcttctggctccagacctttcctcctggcacccttagaaggaagtcagtcccaggagagtgaggttgtgcccacctgctgaagttgagtccctcacagctatctttgtctcgcaggccttcctgggctatgtgctgtatggagagtgccaggaggtcttgtggtggggaggagtgttccttattctctgcggactcaccctaatccacaggaagctcccacccacctggaagccccttccacacaagcagcagtagcaccacttggctagacggaccagctggaaagatcatgatggtggcccagccttgggatgtcatgtgggactgtatcctagggcgatccagttgtgcagccttctgaccatcagccaagggaagcaggcctctgatggagcaggctctggctctgtaaggagaggtgcagctgcagcagtgttctaccggaagtgttttgatcatctgtacagtgctttggattcttcctcccaggcctaccccagtgagccttcgcagatgctggagatcctggggttggtctgctttgtgtatggtacttgaaaccacgctgtaattattgtcctgttgccaaacaaaagccagtcatgtaactctagaagcagtgactggtggggctttctgacagttccatgctgatgtatcaggccatctgtgtcatgcttatgtattatggcaagaagaggaaaactggattaataaatacgttttttgtaagttaaaactaccaggtacggtatcttaattctttccttccctttggagtaagagggagccagagtgagctgaaatcccaatgtggaggaggcaggagagtgaggcaggtacagaagccttgtggcttcggttgctctgacacctgctagagcttgatcttgtggttacttcctgaggtcacacaggctaaggctctttgaactgcacagggtctgttcattctcctggtgctctcaaggagaaaagtttgacctccctttggagaccttgttttacttgggaaagaaagtggttcagaggtccctccattccctgccactctgttcctctagcgtttacctttagggctcttctgtcatttgcttttctttctcagattcccctttggtttttttttgttttttgtt

SEQ ID NO: 30268 - DNA, 1027 bp, Homo sapiens
cagtagatcttgttgagttttaggggtaggagggcttcagttgagatgattgtactctgtagctctgacaacatatacttcttggtgcaatttaagaattgcagatttagagagaggtggcttattttgtctcttgttcagatcttgtttttgtgtgcatattctatatagtggtatgtagtatagattttgcaatcagacacaactggcatggaaaactagctttgttttcactagctgtaggaccttggacaagtcgctcaacttctctgagtctccatttcctcatatgtaaaatagtaatgttgttgttagctacaaggacagaattttagatgatccactaagaggaaaagagatattctgcatatatcttctctagggggaaaatgggtgagtccgtttaggagttattgttgatctggggtgactataggactgtggttgttaacacctaggaagacctccgtgtggatggccgtggctgtgaggactaccgatgtgtcgaagtggaaactgatgtggtgtccaacactagtgggtccgccagggtcaagctggtgagtactgtgaccatggttcaagcccaggtggagaaatgagtaggccctaaggaatgagctgctgacgctgtctggcttttggaatgcaaattgctcttggggaaatcgaagatccgagccaaactcagggagggggggtctatccagatctgaaaagactgctcacctcctccaaagaccactttccaagtcttagcactgctcctaaaagagtcccccaggggtgtatgtccagaagaggagggaggtggtggagtacctggctgcatactctgagtgaggactcttcttgcatgtgtctgcagggtcacacagacatcttggtgggagtgaaagcagaaatggggacgccgaagctggagaaaccaaatgaaggctacttggagttctttgttgactggtcagtactgtctatgcagatatttctaaagataaatgattttaaagatgaagattcagaaaat

SEQ ID NO: 30269 - DNA, 1028 bp, Homo sapiens
ctgaggttgttattaggatgatgtgaggtgtagaggagaagcacatgtcacagtgcctgatatgtcatcagttctcagctaatggcagctcttattctctgtgctccatgaagcaccctgagttcaaatttctccagacttaatgctgcataaattctaccaaagtcctctaggcaagggactgtcaaaccttgttttagaaggtactcttccccctcccaggagagtttatgagaatttctttaaacagcaacaacaagcacagtaaacaaatagctggagtttattgtgtgcgtactatgtgccagatactgttttcactgctttaaatatatcatttagtcctcaacaacctgtgaggtaactattattattgtcctcatttttacagatgaggaaactgaggcacacagaggataagcagcttgcctacaggcctccctgctcataaatactggagctaggatttaagccaagactgtgtgcgtccagagcccctgctcccagccactgtgcaatgtcagccttataaaccagatctgccctggctgtcatagatggcagaaccagagctctgttcagtgagctgagctttgtcctcccctcaggtttggggagtgaggtctgctaactctggacaggggactatagctctgtggccctgtcttactgtttatctcacacagggatgcagcaatctggaaaatgacttggtggagctgagagccttgggggtagttgtgcaggctgccacccctagcctctgcagttgctttcctgcatctggattcagaggcgtcaaggccctctcaagtcctggcatcctgtccatctcatctcctcttgttgtcctctctccccaccctcatgtatatgaataatcagtacccctgtttgacagattcagacttttttttctttttctaatgttatgggaaaatctttccaaaggccctttttttttttgagatggagtctcacactatcgcccaggctggagtgcagtggtgcgatctcagctcactgca

SEQ ID NO: 30270 - DNA, 1282 bp, Homo sapiens
ggatgagttggttctctatattgatgtgtgccccaaagggactgctcctgcattacagccctgcaggacagcagtgagagaactgagtgcagccagtgcacttggttgttaagtttgcacaaagggataagggtacacgtggattcccggatagtagggagtaacttggctagttggacaagggcctgaaaggagtaagatgggatgatcagagaaaagggatttgtatggacctgtgggaatgggccaaaaaaagcgcagatagtcgggaatcgtgttaatgcccatcagaggacattttccaagggaggtgttcaacaagtgttttgacttcagttctgggtaggatatgtaggtcatggtggaccaccattcatgctgctgcagctaaaaatgctgaatgcatttcaagagtcatatcattaaagattttgggaagctctggaagtaaagaggatttcatggcctaaaattccagagaagggggagactttctgaagtgagcaggctgtcactggcatttccttccctgggggcatttgcagattctggacgtggaataagaatcaggcttgggaacatagaggaactctaccggggaaagggaaacctgcaaaacctccagcaaagctgtgtagggatagtgtgatgatttagaaactcaaagatccctaaacacacagctgggtttatatttgccaaattctcagacatgatgggaagtcagggagtttcagctaaagaagattgaaatctcctgtagcattctatagggctatctgtttttctcctcttgtgtgaactattatagctgagggcatcaggtaagtgcatgcccagtttattattcccaaagttacaaatcaggtgattaagttactgtcccttggagtggaaggaatcgaggtgtggaaagaggctatcaagctccttgacacactgggacagcgtggtggctcagaccacccctcctccttcccacaaccttgcaggttgctcagctgtctcccatgcgagacctcagtttgctccttgaaagaatcccatgtgcaagcagggtagagattattaccccactttacagaagaggagtttggtcttgagtaactcatccaaaacgacacaagtgccaggtatctcaaccaaatttggaactcgggactccattctctttccactgccacactacagagctttaaggataaaacaacaaggactgtgagccccttgagagctaagatttggttgagttaggacctacctaactcagggcccggtacac

SEQ ID NO: 30271 - DNA, 1017 bp, Homo sapiens
tattcgggctaatatgggtggagtgaccaaagcctgttttgtataactgagacttccagcagctttgagaaaagaaacaacaccaccacacacacaaaaaaaccttgaaagctgaaatatgcctttagagctctcttcctctgattttttttgcctgttttgttattaagatcattctttgtacagggagattagtatgaaaagactgggctgtgagagtggtgtgttagtgaacagacacttccttgagggttggggtcgctcatgaacattaatgcagcatcactgtcttggctgaagccacccccacttgccgcgccatgggccagttgaggtcttgtggacagtgtcagcagatctttaatgcaaggaagatgaaactgatatcatcttccatatgtagaaggtaaaattggctccaccagggctatcggtgaatccattgcaggtggctgcaatggcagtccacacctggccagggagagttgggggtggacaagaggatctggatatttaatggccataaactcaacagtggcaacaaatgaggcccaggtgctacaaagagcccatgaatctgtggcttcctgaatagagggtctagtctgctcacaggaggcacttgccctggcccagaggaaggcccgtgaaagcaagttttgttctgggatctgcaccacaatgaagaccataacaagcacagttttatgcagtgaggattctctggaagattgaagtagattgaaatctgtagcatccaggaaccatattgtagaggatccattgagaagaaaaaaggaacggaacatggagaaaggacagtcaaagaaggacaggctggcctctcatgtgactgctccacaggccagcactaggaaccatggggtggtttcccggaggccaacctgccccaccacagggggatcctgaggacaagccaagtgtctaacgatgaaactagttgcttttcaggtaatgagcttcctgttcctggaagggtttaagcaacatatggag

SEQ ID NO: 30272 - DNA, 1028 bp, Homo sapiens
tgcattagtttgctgaggatattggcctccagctccatccatgttgctgcagaggacatgatcttgttctttttttacggctgcatagtattctatgctgtaaacgtaccacattttctttatccagtctaccattgatggtcatttaggttgagtccacgtctttgctattgtgaatagtgctgcagtgaacatacatgtggatgtgtctgtatgacagaacaatttataatcctttgggtatatacccagtaatgggattgctgggtcaaatggtaattctgttgtcagctttttgaagaatccctacactagcttccacaatggttgaaccaatttacgctcccaccaagagtgtgtaaacattcccttttctctgcaaaggttctatttcatgaaaacaaataagcaggctcctatatatgtgtacatatgtttgtatgtatgtatttgagtggggagatagatgtggaaggaaacaaaggctggtgttattggttacatcattgacgagtagtgaccaggagttaaaaataaactttgcctttatttatcattgtattatgccatttcatttgttaaattaagcttgtattacgtttgtaatttgaaaaaacatcaacttatgtaaaaagaaaagcagcctattctgattgacctcaggatgggtgtggatgcaggaattgaagatagtagcttgggatcatctcagcctggaaatccaaggtgtcccagattcccaaaactgggaaatgcagcataggatgtggcaagccagcctcccctggggcaacagcaagcttgagaggtccacaggactgcttgttcagtaagcacatatcccttacagaaagcagttttcagtgggtcacatccaccaccaccttcaatatggcaaagtctactgtagggcagagtccttgcctggggcaattggaggcaggccccatccttccagtgcacagatggctgccttctgctgatggactgctcctggtccaatcagctgtggcaagaacagccgggct

SEQ ID NO: 30273 - DNA, 1003 bp, Homo sapiens
cctggagaacaagccttggttagcatttcctgtgcactagccaaaggagtaagagcagctctattttagagagatggtctcagttctttagatggaattgtttcatcggactactaaaaatcaacttaaaaaatattaatgtgcatagtggaagtatgcctttaaggtaagtgactccaaccactggaaggggtatgcctgttctcttactgctgcctgctaagacaggggcttaggagagaacagatctggcgactgggattgcaagatgcacctaggttgggacactttgaagtgtaagtgcttatgggacctgaggcataggtggccagtgggtagtacaagtgtgcttgtgctggacataaagatggaggaaaactccaggtgctcatgtgcaggtggaagtgtggttcgctgcagtctttctggggatgccatttggctgtatatgtcaaacgtcttaaaatttttcatacccttttaccctgtagttgcacttctagaaatttttctaaaggaaatgttaagagtatatacaaagatttatgcccaagaatgttcatcctggccttttttataatgctgaaaaatggaaataacttttaggaaaacaaatatagctggtcattcaaagcagtcactaacaggctgcattgacagcaggtacagtgaaaaaccagagataaaaaatacatatataaataatatattctcaatttttaaacattagatacaaatttaccacatgtaactggtacgtatggctgtatggtagaataacaggtgagtcttattttcttctatttttctctacttaccaaattatggtgaatatgtaattatggaagaaaacaagacctatttctttagttgaaaatgtcccattctgatatgcgtgtgtggtgaggtggtgccagtaagtgcctctcagtattcgtcattattttaaggaaatgtgtgtgaacataagcctagcttctctgcatgatcaaaaagcaaagta

SEQ ID NO: 30274 - DNA, 1073 bp, Homo sapiens
cctggcctctatccactagatgccagtagcacacatacagcatacacaccccagttgtgacaaacaaaaatgtctccagtatttgccagatggtctctggggaacaaaattttcccggttgagcactcttcctttagagaagggaagaaaggactattaacatcacctctgtgggtactgaaacccctagaagacccttgtctacagaactgggttttgaataggcacttcccagtgaaaatatgaaaatagactcttgatttctagccaggtgactaaaataaaagcttttcagcagtttaatttcagaaagatggctttgattattttgattgagataaagcattagaagactcaaaatagctgtttttgttttgctttgttttaatgagaaaatcagggaaggttccagagggctctatgactttcaggagatgtatttctaagtggtgtctgttcccaactgtgtttatgatccttgtgagactgaactcctggtgagccttgcgagtgtctgttctggcatttcttcatggagtggacattactgaaggtcggtcggtggctgggccctgtgtgcagcagatgggaataaaagggacaggagcacagtgtcttcctcagggcactcccagcctcctctgggcaggtgagtcacgcatttcagtacgacggaacttatgagtgctgtgaatatgcctggaaatgaacccgccagtgattggaataatggtccggaagcagtggttttcaagctgtactcttttagcagttgaggttgctttttcttcaaatgacatgtgcagaaatgtaatataaataaaatagatcagatccaaatttgaagccagggtgaaagcaggggcctgtaattccccacccctccctttgcctcagagctgacacttccaaagagaatgccctttcgttacaggtttgactgaaagtaggctaacgcttggttggatgaagatcattgtttttcctgactagatctatcctcttttttttttttttttctgagacagagtcttgctctgttgtccaggctggagtgcactggcgtgatctca

SEQ ID NO: 30275 - DNA, 1072 bp, Homo sapiens
tgggtgcagtggttcacacatgtaatcctagcattttgggaggccagggcaggcagatggcttgagcccaggatttcgagaccagcctgagcaatatagtgagataccccatctctatttaaaaaaaaaattaatttttaaaattaaaaaaaaggaagtgttcatatggcaagaataccaatcctgaaaatgttacatgtgtaataagcatttatatacacatttttgcatttttggagacaaggataaaatatacctttttttctaggttgtataattatgagtagtttttcatttcctgtatattctgtgctgagtgtgtgttagttttttaatcagaaaaaataaagcaagacactgaaatgaaactgtaatgaatttctgtctttccattccggaatttgggaagtccttaataataacacacagagctaaacacaactatgtttgccggaattgaccaaaggtatttcagagaataggggtccctaagtagggtatagaggcccccctgccctaggtgtttcacagtttaacacctttgagcaggtctcagtgcatttctctgtggacctgcagcacagaggaaacctagcagagtgggtaagagtttggctacagtgtgcctgggggcagattgccctcccttgctgatccttagctgcttcatctgtccaatggggtaagaataccaccctcaaagagtggtgaggactaaataagttaacatcatgtatttgttgttgctgctgctggagcttttttttttttttaaagatagggtctcactgttgcccaagcttcagtgcagtggtgcagtcatagctcactgcagccttgacctcctggtcttaagtgatcctcccacttcagcctcctaagtaactgggactataggtgtgtgcaactgtgcctggctaatttttttttattttttaatttttcatagagatgaggtctcactatagtgcccaggctggtctcaaattcttggcctcccaaagtagtgggagtataagtgtcagctaccacacctggcttgctgtagtttatctcagtgctatcattaagt

SEQ ID NO: 30276 - DNA, 1110 bp, Homo sapiens
aggaacctctcaaatgaacaattttgttcctatcaaaagttccccaaagggatcactgtcattccaaattgtctttggaaatttgtggcacttaaaaagatatgcacaggagttagggctgtaattagaaaacataaagaaagcctgtgcttgtggtggaggaggcagttttagattgaaaagaccaagacatgagccgcaacatatccatgggttgctgcttgtggaattttgcatcttggtgcttgatcaaagtcaagtcatcattgatcaggagccagacaaagcctcctgcttatcggtagacaaaactaacataaaagcagttctcaggaacacaagaacaagactgagggagaagtcattatgagattttgcaatggtgactcgggcacagcgtgtctccaagaagtaactgactgaccactttaccacttcacccttagggctagctcaaggacaaatttatgggacctattcccatcctctcccagtggacaaacaacattcaagatagtacacaagcagatagatagggcattaggccagcagatgttagttactagaaaacattttcaccaaagaacaatagaattctgatcaaaaaaccaaatgtccaaaatgggacctattcttaagaaaataagataaatgcaacagtaaaatcttcagtgaaatcctggagttcaattcagcatgaacgtagttcccagccaagggtgagtggcacctcatccaggtagagacacaagtgggtctcagatgcatgcactgtttctgagtcaaaggttccagtcaaaggtagtgagagtctcagttgaaattccatgaacctgcaattctatcagcatcctccagccagagaccaccaggaacacaccttcagataacaatttgggtttattaccgggggaaacactgggcatctcagagggtgctaggaaggacctgttatataatgaatttgggctttggtagaataatttggggaagggtctcaggaagtgaggatttgctctggattgagtgctgtcagtaagtggggacagttttgtgattgggtatcttaagaaatcttatcttgccgggcgcggtggctcacgcctgtaa

SEQ ID NO: 30277 - DNA, 1052 bp, Homo sapiens
cctgaagcccctgtgctcaccctccctgctgtgggtgggcctggggatctgtcacggctaaagctaaccaggagagagccacattctgctcgctgttaggaccagaggggtgggaaaggcaagaataagcaggttccagggtctcctgtacccaggaagtggatggacaggcctgctcctcaccagcatggagaaaggaagggttggcattgtgtttggtttttctgtctttggtggatgtcctttcagcagtatcctaacccagaaaactgcagtgacagaccccccttagcctgggatcctgaaagcaggtgtgactcctcctgagaatggccctgccctgaccggggccagggagcctgtcttacttgattttactttcctggcaatgcacagggttaaacgagcagtccaagcaaggaacatgtggatgtcctatctatgtacctacatgtcctatttgcatgactacagatgccctatctgcatgtctacatgactacagatgcccttccatctgacagtctgttgcacactgagctgctcctcgttttcatgactttttttttttttttttaaattgagacggaggctcactccgtcacccaggctggagtgcagtggtgcgatcttggctcactgcggccaccgcctccccgggttcaagcgattctcctgcctcagcctcctggatagctgggattacaggcgcgcaccaccatgcccggctaatttttgtattttcagtagagacagggtttcgccatgttggccaggctggtcttgagctcctgacctcaggtgatctgcccgccttggcctcccaaagtgctgggattacaggcgtgagccactgcacctggcccttcatgactttttaattactgtttatcagactttattagcaatagatgcttgaaatatggtgcttaattccagcctagattaaaaaatcgagcatttttcacataaaaggaaacaacatgggctagtcttgtaataaagcagcccctccagaattccagaacagaggtctgtctgtgttccccaga

SEQ ID NO: 30278 - DNA, 1956 bp, Homo sapiens
atggggatgcccaatcctttagacatcgggcagtctctgtgcattcttttaaaaaattgaggcagagtctcaccatattgcttaggctggttttgaactcccagcttcaagtgatctcccacctcagcctcccaaagtgctgggattacagtcgtgagccactgtgcccagcccatgcatttttttaatggaccaggcaatcttcctaagtcaggaagacatgtattcttaaccttttattgatgtacgatgtacacatatcatagatgttcacaaagtgaacccatctgtgtagccaacacccagatcaaggcagaacatgaccatcacccaggacgctccttgtgcccctgtacagtcaccaccaagtgtccaaggatcagctgtctgatttctgatagcaaaaatgggcttttaaacaaacatgggatttgatgtaacttttaaaaacttggaaaatgtaaaaacacattatggcatgtttggggatggatgaatggagatcgtgtggctgacctgggtgaagcttgggctggagacagcaaggagttggtgccgtctgcccagggccacctccactgtatgtcctcctgggctggaagctcgccctgtaacagcggtgactcctgtgtggtcagtggtcaaggactggataccgtctcggtcctctgtgttctctgaagggatgtgactacatcatgtgcctcagccccgtccctgcatgccatctctctccacagcacttctcttcagagttttccaggggcagaggtgaggaagctctcaaacttcatttagataggttcatctttttgctcaatcagcaggtcaatgatgcatacgtgtcaggtcacactgtgttctcagcactgggttgagtgctgtggggaaggacagccagtgcgatggattcacactcctctcactgtgaccttggagaccctcgctctggcccacccctcctgtgcctcaccttgctccttcttccccgtcatcccagccttgttttctctgagcctgttgaggtccttgccttggtggctcccaacggatgttcttctggccagtgctgtgctgccaatgccaccaatcccttccaagcaggctgatctgctgggagctgtagccctggcgcgtcccgacatggattcccacagcgtctgcctgtcccgtcatgctttctctctggagtcctccctccttggtatggtatgtttctgctctgttcttttgtgaccaggaaagaatgtcttgtttcttccatccagccctcctgctctttccattaacagtccagaacatgaaacggttattttgacatgatcattcttgccaggggtcttaaaaagttatgtttctttacatctgttgatttgtgactgtcacataggagacagaactgtgcaagaaagacacatatttgggagtcaggaaaccaggtcttctgggcctgataccaccagcagctcagggtgtgatgttgggcaagtccctctagctctattgagccaagatgacctctcagggtccttcccggcccaaagtcctgtgacagtggcattaggtataactagatgcctgggtttcagctaaccatgtaacagggactgggcagcattattgttggcagtggcagagagcctggaaaggcagaggccaagcggcctggcatcccagcccctttccagacctttacggaattaaaaaacaatttttatttttagttatggttacatttgcaattgtaagtggtaatcatttttactttagatattctggaaaatacatacaattaaagaagaaacatgaatcactcatgtaccttccattcttagaataatcagtgttaagactgtctgcagaaagtatccagtacaaagtagtggctgagcccactggtgatacagaatgtatcaggcactgtgattcttggatctctggccaaatgtagaatca

SEQ ID NO: 30279 - DNA, 1029 bp, Homo sapiens
aatggtgtgatctcggctcactgcaacctccgcctcccaggttccagcgattctcacgggtcagcctcctaagtagctgggattacaggcatgagccaccatgcctggctaatttttgtatttttagtagaggtggagttttactatgttggccaggctgatctcaaactcctgtcctcaagtgatacgccttccttggcctccctaagtgctggcattacaggtgagagccaccatgcccggccagccaatgtattgtttatctcagacattttggttttcatctctagcagctcagtttgagccttttaaatattttccatgttgctacttaacatttccaacatattgaatatagaaacaatagcttttaatgtccttctctgctaattctaatatctgtgtctgatcggggttgatttccatagattgattattctcttccctgtgggttgtgctttcctgcctctttgcatgcctgggaatatttgattggctgccagacattgtaaactttacctttttgagtcttggatattttgtattctttcaatcttctgagcattgttctgggatgctgttaaattatttaggaacagtgattctttctagtcttgcttttatgatttattagatgaattcaaagcagagctcagtctagggctctattattcctcattctcagggctggtgggaataggcactgtttccagcttttgtgggtgccaggcactgttcttgcgaatcctgcagatgtttgtcctctgactttggttagtttcctcacaggcaagagctgatccatgctctgctgaacacttaacggagaccctctgcacatctctgggttgtctctgtgtgcagtattctcatctctgatccagacgataatagcctggaataggggaaatggaaaactaactataagacaaagactttggagtggcacgtgagaagagaattggagcgtgaggcagcagtgctcagaacatggtccttggccagcaccagcaaaggccgagaaagaga

SEQ ID NO: 30280 - DNA, 1055 bp, Homo sapiens
aaaaaattcattcactacatctacaggaagtgtctttttggagtggattctctgtgagtctgcacatttatcagtcaatttttttttttttttttaagacatagtctcactctgtcacccaggctggagtacaatggtgcaatctcagctcactgcaacctctgccacccgggttcaagtgattctcctgcctcagcctcctgagtagctgggattacaggctcacgccaccaggcctggctaatttttgtatttttagtagagatggggtttcaccctgttggccaagctggtgtcgaactcctgacctcaagtgatctgcctacctcagcctcccaaagtgctgggattataggcatgagacaccacactcggcctatcagtcaatattttataaacggctgatgtaaataaagaaaataaagaggattttgactactgtcttctaaactgtaaaaatggtctattgagtatatatttagtgtgacgatcatcagctatttcctagtggagggaattcctttactggaagcaggacgattctgaaactagaattataaagatgtaacactgacactcccacccccagtttatgtttgatgctgattattcagggatggtttaggtcttagcatttttgaccaagatgaacagcatcaaatggaagtgccagttcagagacaagcctgaggcatagtctgacttggtggttctcaaagtgtggtccctggactagcaccatcagcatcactagggaacttaactagaaatgcagagtctcgggccccttcccacacttactaagtcagcagtctgtgtttcaacaaactcacctggtggttctgaagcatgctaaggtttgagaaccacctaagtttttggtgtttatccctcggctattccattttgtcctctgtccttattagctctgccaaagccgcagcagctccctagtgttacgtctctacgtatgagccgccataacaagtcagtgaggacagtgaaatttgcctcttcaagggagcagaaggaagtttaattgggaatgccaggaa

SEQ ID NO: 30281 - DNA, 1071 bp, Homo sapiens
tgtatttttagtagagagggggcttttccatgttggtcagactggtcttgaactcccgacttcaggcgatctgcccgccttggcctctcaaagtgctaggattacaggcatgagccaccgtgcctggcctcaccatgcagattctaaatatgtccactcagaggcgttgccactcatgggcagatttcctttccagtctttttttctttgaatttctttatatagttgagatgcacaatttttaaatcttgctttttacttttcacattataacataagggttttcttttaagattaaaagtattttttcatattatacatatttctagaaaaatttaatatagaaatatgtgaagtaaagtgaaatttctctctaataccatctgtcactgtacctaatactagaaagaaaatttaaaatattaaagtatataaagtagaaagtgatgtttcactgttatacttctaccagtgttacccactgtttgtttttttcccttttgcatatcagtggtatctgcaaattactgaaatggaattgtactataaatacacttgtcaagtttgcttttttcacttgttaatatattttcagtctgggtgcagtagttcacacctgtaatcctgagatgggctgatcacttgagcccaggagttgttgactagccttagacaacatggcgaaacactgtctctacaaaaaaatacaaaaattaggcagttgtggtggtgcacacctgtagccctatctactcaggaggccgaggtgggaggattccttgagcctgggaggctgaggctgcagattgcaccactgcactccagcctgggtgacagagtcaggctccatctcaaaaaaaccccaaacatatatatatgctatccccaaacatatatatatgctatatataagcattttccaatatgactaaaacactatttaaatgacattttaaatagctatgtaacatttcatcatttatatgtactctggtttatataaccattcctctaaggctgccagtttggatctaagtaaatatttattcactttttaaaattctttcccaa

SEQ ID NO: 30282 - DNA, 1034 bp, Homo sapiens
ctgcgaacgttcaaggatggggaccttctagaagagagggcaacagtaactttgaggggaggacaagagagcagctttggagacctaaagagttgtggccttctatgtaagtcctattatcccttccatgcacccccacccacattcccctactccattaaactttgtttcaggttataaaaataatgcataattattgcaggaaaaaatggtaattgaaaatcacctatttcttacactcaaagataatgacttaaaatttggtgtacatcttatgtgtatgagtgtacacataattttgtcatcatatatgtgagtgtgttcataactgtaacccacatacttatatacttcctttaaaatattttaagtatttttccctgtcaataaatatttttttgaaaacacaatctttttatggctgcataatattccaacatgtatatgggttatcatttaataggaattggacatttgatgctcatttttagcaagctattataaatctgagatgacgatttctggaactaggataaattcctgaaatagaatttttggggagaaaatatctgaactttgtaaattctactgacatttaatacaaatttctctcctaagagcttgttttagcttctgctatcccttgcagagtgtgaacaagtatctgtttgtctgtgtcattactaacactggggttatcattctttttaagctttgctagtctgataggtaaagcatagggttttttgttgttgtttgtttttggagagacagagtctcactctattgcccaggctggcgtgcacagacgtgatctcagctcactgcagtctcaacctctaggcacaagtgatcctcctagctcagcctcctaagtagctgggactacaggcgtgccccactacacctagctaacttttttattatttgtagagatgggatcttgctgtgttgcctaggctggtcttgagctcctgggttcaagtgatcctcccaccttggcctcccaaagtgttggaattacaggtgtgagc

SEQ ID NO: 30283 - DNA, 1073 bp, Homo sapiens
tagtgcctgcaaatgaaaacgcagttttactttattctgttaatattttgtatatcctgagtcagtccctcaccatgctgagttgcttgcctgaactatttaagttgtttcttgagaaaccaactgttatttttgttagactctaattacaaagttgcataaattttaagtagtctctctcaaccgtgtttctacctcctttattttttattttccagagtgagtttttttcaggaacatatatatgggtttctaaaaaaacaccccacctgaatgttaaagtaatttgtttttaaaaatttcctggaaatattttatttaaaatgcatttcttactgtttttagctaatacctcttgcttactatgcgtcagatgttcaaagtacttaccaaagattagctcatttaattcacacgatgctgcgtgatgaatctggtattatcgttattttacagaaagggaataagaggatcagagagaatgagtaacttgtctaaggtcacactactggtagtctggttctgtaggctctggtcctactatgctacattgccttctgtaccctgttgaatataataaactagatttgattatggcatttttttgtatatgttaaattgatggtttcatagcaaatcaaaacctagtcagcatcaaatatacaagtgaaaagagttgcagtgaactcataaggacagcaaacttaacagattcatccttttagaagctgggaaaatgatgtcaaatttatactctgtaattgtcataataagtagttttttagaagtcttcatttcatttggttagttatttatgttttacatttcttcttaggcatatcacacctgaaaaattttatgtggaagcttgtgatgatggagcagatgacgtacttaccattgaccgtgtgtccacagaggttacccttgcaggtattttacagccagatttagaagtttagggagaaagattttatacataaattacagtaattaaaaaacatcactcagaggtgtgtcagtgtgtggatctctgagtgcattcttattaaaatttttattcttgctacctc

SEQ ID NO: 30284 - DNA, 1664 bp, Homo sapiens
tataaatatttaaattatatttataaattacataatgtactccagtaaaatatgtaactttttcctctctagatggacggtttccaaaggcattttgattcccaagtaattatttatggaaaacaagttataatcaatctggtatgtttcttatgtttcttggggggaaaaaaaagccttaactttttcttgacagaaaatttactattttaaccattttttaagtgtacagttcagtggcattaagtagttcataatgtgcagccatcatcactgttcatttccacaacatttcatcataccagacagaaactctacccattaaacaattaacttcctattatatccctccccacagcccctggtaattctattttactttctgtctctctgaatttgtctattctaagtaccctcatgtaagtggaataatacaatgtttttcttttttaatgtttttaaggttcatccatcttgtagcatgtatagaatttcattctttttttaagactgaggaatattccattgtgtatgtgtatgcatatatgcacacacacacacagacacacacacacacacacatatacatgcataccacattttgtttatccattaatctattgatggacatttgggttgttttcattttttggctattatgaataatgttgctatgaacattggtggtgtgcaagtatctgattgagtccctgttttcagttcttttaggcttatacttagaagtagaattgctagatcatatggtgattctatgtttaactctttgaggaaccaccatactgtttgccatagcggctgcaccattttgtattcccaccaacaatacaccagagttccagtttcttcatatccttgctgacaattgttgttttctggtgtgtgtgtgtgtgtgtgtgtgtgtgtgtgtgtgtttaatgatagccatcccaatgggtgtggagtggtgttgagttgatttacatttctctaatgatttgtgtgattttgagcatctttgcatgtgctcattggccatttgtgtatcttctttggagaaatgtctatgtaaatcctttcgctatttttaatcaggttgttttttgtttgagttgtagtcattctttatgaagtctggatatttatctcttagcagacaggtgctttacaaatattttctcccactctttaggttgattttttactcttgacaatgtccttggtatacaaattgtttaagtccagcttatctagtttttcttttgttgcctctgctcttggtgtcaaattcaagaaattgtcaccaaatccaataacataaacttacccctatattttctttttaggagtctttatagttttagatcttacagttaggtctttggtctgttttgagttgatttttgtttcgtgtatgtgtgtctgtgtattacttcttaaaactgcacatgagttaatttttgtatatggtgtaggtgtaagggtccaacttcattcttttgcatatggctatccagttttcccagcaccatttataaaaagactgttcttttcctttgaatggtctgtcaccataataaaaactcagttgaacatatatataaggtcttattttgaggctctgttctattccattggtctccgtgtctgtccttatgacaggatca

SEQ ID NO: 30285 - DNA, 1076 bp, Homo sapiens
ggtgcgaatgctttttttttttttaattgaaaaacaacacagcaaaaaattaaacatctttaaaacccagtaacaaaaaatattcacattgcccacaccctaacccagctctttttatttttgtgtcttgcccatggatgtcacattttccataactagggtcagtctgtgtatgcacagttttcacttttgccattttcccttagcatttatgtaatcacagtttctggtggttgtattgttgtgccgtaatttactaagccattcagattgctacatttttggtttataaataacaccgtagagaatatatctgtatatgttattattaacttgaattatttccttcatgttaattcctagaagtggaattactgggttaaagagaataaatatattattttccaagagcgtcataccagtttacactgacaccaataatgaatcagtaaatccatttcattgaactcttcccagcatttgatattttaattttttttttgtttttccttgagaaagtgtctggctctgttgcccaggctggagtgcagtggtgcagtctcggcttgctgcaacctctgcctcctgggctcaagccatcctactaactcagcctcccacaaagctggggctacaggcatgtgccaccacacctggctaatttttgtatttttttttgtagagacaggatttcaccatgttgcccaggttggtctcaaacccctgggctcaagcagtctacctgcctcagctcccaaagtgctgggattacaggcttgagccactgtgtctagcctcttttttttctatttcgttaatacaaaagtagcacctcaagattgtttctatttatctctctcttattactagcaaggaatattgactccaaagtaaaaagtttctgacacagctttgctttaccactagactatgctgttgagaaaaatggtttttttcttctgtgtatatttggaatgaaaaagatgtagagccccaatttttaaatcacattggcatttgttgtgaggggcagacaaaatgcataccacatggtttcctgttcaggtaattagtaa

SEQ ID NO: 30286 - DNA, 1077 bp, Homo sapiens
acttcatgataggaaagaggaggatgaggtctggggttctttaaagtctctggtgggctgcctcatgactttaatcagcttgaactgccagtgcaccagcagtttaggtgtgatgagagaattcagatatactttatctttttaaaaaagtgtaaataaaatcaaagaatgtaaagtctatctcttacgctagaggtccaaagctgcctctgttttaaagattatcccaatgtggaagatgcccatgactggtcagctacttcctcctatacattttggtttctttgagggtcactcattgagacacgcaggcctctgagagggtcttgttctagatttcatattgcacttggagggtaacagctgctttttcacgcatggtactcttgatgtttttcactctgtcaaggattttgttggctatcaatgaatgtgtctaaaacttagtgcttccaggtagttatagtactccaaatcaaggaccaacttaaacgttaatttttgtgcaaaaacaaacctgaaaaatatgcttcggaaactgtgcatagttctaattgtaagtcagattgtatattcaaattgtaattaagagatttaaatattagaacggtatgtaaggtagtataattaccactattttaaataattcagttaaacactgctgcaatatttcagtgttgtgcttgaaaatatgtacagtttttttccaatattaataccttatgttgtccttaaatatttctaaaagcgcctttatttcagcattacctttttttcatcactatcttttataaaacattaatataagtcgttacttttagaaactaaaggaaataatagctggaaaaccctctgtagtttaaaatcagtcattaaactcacaatagggtaagtaaatatagccacctgttaacatgtaaataagcataatttgttccaaagatggaatattgaaacttagttcatgtctgctgtaaaatattatttaaatgctgctgggcatttcacttaaagaacttaatgtcaacagctacaacaaagaccaaatctgaactgctaatgtggctgctttgtagg

SEQ ID NO: 30287 - DNA, 1033 bp, Homo sapiens
ccaacaccagagcccaactgtcctctacccagttacagctggggacaagccgccatcactggcatcaccggcacctttatgtctacacacctctgctcctaaatcggcttcggggaggctgccttaggggatctgcaaagggagacttgcttaatgtagcagctaaaatccaggattatggaaagatgataccgtggctggtgccagggtacccgtgtggctgggcacttcctcctctctttcccttcttccaaggctgctgcttcagtgtcaagcagatcttagctccatccctggccctcctctttctgtgactcttggcctcagtgtccctgtctgtaaaatggggatgtggtagaaggtgcaggaggcatgggttttaaagctccttgctgaccatggggaggatgtgctacagtggagggtattgaagccaagcaccatgatggctgggttgggggagtcaagtcagccctaatcaggaccataggaggagtgttggggggatatgggacagctggtgcagggctgggtggcctgtaagtggtgggtatggactaagtgacccctggccacagcccagccccagtccctcagtcctcacccctgagacccaagatctgcagatccgctggatctaaggggacgcaagcctgagtcctctgcaccctggcgctgagccaagaagacaggaactcctcaagggagagagggttggaggggcggggagaagggagtagcagacagggggcatgccaggctgagaagagatacagctgtcagcatttccccttcatccccaggagataaggcctcctcagtcagggcagaggcagaggagggggtcctttttcctcctaagctcaagcttggggcctctggcagtaaccttgaatcctaatgtaagtccagagtggatccagaaatgcaaggagccattgggatactcttccatcccaaaagcttgccaggaacaccttatctagcaggtcctcctgtagtccctgcccccagtccaccctggggccccatc

SEQ ID NO: 30288 - DNA, 1046 bp, Homo sapiens
tcccgccccaagtggaacagcaggagagaggcctgccgcccttctgtgatcctgaccctattccaggctcaggaaacagcagggcttggccagggatcaggttcacctgaggttagattcacctgaattgaggctcggcccaggagagggaaaggaggaaccatcaggccaagattcagctcaggatcagagtaggatactgggtcagaggtcagcctggggctggaattgggatccgggaccctccctctaccctgagccccatggactaggccagcatctattaccccaccagtccccttgctgggatggggcgcggggctgcccacaccattgccagcctcagcaggcctgcggggtccatggcccagagccgtgggcccagcacctcagcatcacctgagcttcacagcacctctgcagaatgggttgctggagctgcgcactcctcccagccccccacaggctctgggatccagttaccgataattgtccattattgttggcagctgcagagcttggctgggctccgggacaactggccagactgcagaggggtgggccgggtggctggagccctctctgcactcagcacccagaggcccacaggtcaacagccaccgcctccctgcccctcgacatacatcctgaccctgacctcaccatgacaagccccagagttggggagacctgggcccagtcccaggaacagatgcaggctctggggctaggaggtgtcctagtggactggcgacatgcagattgggagtgcatagaatcctggggcacaggaatgtcacagctctttttcttaccgtaaagccaggtcataccctatccctccaagggtgtaccaggcctagagtcaagttggtggtatgtggtcggggaggacctggggctcccttcccagaggcacagctcacccaaatataccatgtgccccttgagctggcgcaggccaggacatactgacacaccgaggtctccctgtggcctctgcttgggacaaaacctctcaccccatccagtctcatccacgaggg

SEQ ID NO: 30289 - DNA, 1051 bp, Homo sapiens
ctacagctgaaaggatgcccaccaccccagggccgaggcacgcagttggagaatgtggccctacatgctctgcttctctgcgagggcctctttgacccttaccaaacctggcggcgccagcgcagtgggtgagacccagcccacaggaagggaacccagaggagggtggggagaggatggccgcgctgggcccaaggaggggtgacggccaggagtggtgagagccgggctgatgtacttggcctcactgcccccagggaagtcatcagctccaaggagaagagcaaatacaagttccctcctgctgctttgccccaggaattcagcgccttcttccaaggtcaggccccgcccctgcccccacttggctccacccccaaacctaggccccttcctgtcgttccttgatcctgccatacacaggaaccacttggtggtggctgcatgcaggactgggagaaccaaagaccaagcaagagtttagggacagagacaagagaagacatcttgggctggagcgagggcctcccatcaggtggaggggtggggtcaacctgcctacccagatttctcatcctctttccccgccatctcctggatccttctagccacttgtaccctactgtgatcttaaaactctctggtccaatccctttgtccccatagcctccacgcatctccacccatcccggagacacaggaggtatctccacctcctgttccctggctgctggaggatctggtgcccaggacagctgtggctgcctgttcacaggtggtcctgtgaacctgttctccctggtgaccctccacccctgggtcccctctctcctctcattggagggagactggccaggactttagataggctcagggtgggatatggcctggacagaggtgggcagggctgtgaaaaggtggtgacctattgggatattaaatgtctcagtgatgcccccatggagctgtgggcctggatctagagttggggcagcaactccaggaggggaggcacccctagggagctcctcgactttattttcccatagcc

SEQ ID NO: 30290 - DNA, 1125 bp, Homo sapiens
cacctggatctagggggaaggggcaaggtgggacttaaaggtctcgaaggttcttctggttctaacatcctgtgattgattgtccctaaatctctgacccctgtcaatcactgtgggtgatggggcacttgctggcctgtctgtactcatgtgtctagctttagggagacaggttgggggtagggccctaactccactagagaaagggggactggagggtgcagtcagagtgtccaccattaatctgtcccagtgaggcccttcccagcctttgttagagtgggtcttgctgagctgctcagagagggccctaggtcatgatagggtcacagcagttggggcaaggagtagaaggcctggtgctctgacagagttgctgatccagcacatgccacatgccttggggtgcttggctctgcaccttttttactgcagggggctgccagctgtgacaccctggcccctgcctctcctgatggcccctccccaccccaaggtcctggaccaagacacagacgccattgcagtccatgtagtcagagtgctgacctgcatcatgagtgactccccctcggccaaggtgaggctgctgcactgcagctttagtaggggtgcggggtggagttcaactgaccatatccccagaacaggcctggccggtggccataagcatcctgctccctggagcaaagcaggcgagctgggaggtgactgccctgccctaaagctcactgggcaggtgtggtcgccagtctgtcctgggagctgcatcttctctgtcagggctggatggggaatggacacttgtaggcccacctccatctacagccttctgagatgtactcacgtcccccccatccctctgcagcccactgcccaccagcactgtcacccagaggcagagctacgcaagggaaccccaaaacatgatgcccctccagagtttccagggggtctgagtttgccctccggcccatgtatgtgttcacttcttccccatactaccttacacaggaggtgtttaaggagcgcatcggctaccctcacctgcaggaggttctgcagagccatggtccccccacccatcggctgttgcaagagctgctcaacatggtgagggaaggg

SEQ ID NO: 30291 - DNA, 1016 bp, Homo sapiens
tcccactcgcccctctcttttttatttttcctcgccctctctctcccttgcccgttcatctcgaccctttagcaagcatggaagcccagcgaggcgggggattgctcggaggccgagctcccggcagcctcctccgccttccttcccgctgtgccctcggggctcctacctccacctcggcgcggcgctctgcccccacccgaagtctccaaggcggcagctcccctctcctgtgtggttcttggggccttagaggcaatgtcatgaaaaaaagggtattaatcactttcctacagaaatgataagatgagactaagtagaataacttgaaagagctacgagttgttatttttggaaggagagataggaacgcgtaaatccaatagctaaactttctagacgctgaagagtttttggcgatagatcattttgacattgggggttcatagggttagcgttttttgtgttgttgttgctgttgtttttccactagaattttgaatcggattttaccagcaattggtaacggaaaggaaaggatgtgtcttccaattgagaaacagtggttaaaaactgaaagtgggccgggcgcggtggttcacgcctgtaatcccagcactttaggaggccgaggcgggcggagtaactgaggtcaagagttccagaccacactggccaacatggcgaaaccccatctctactaaaaatacaaaatttagccgggcgtggtggcgcacggctgtaattccaggtacgcgggaggctgaagcaggagaatcgcttgaacccaggaggcggaggttgcagtaagcccagattgtgccactgcactccagcctggcgacagagcaagactccatctcaaaaaaataaataaatgaatgaaaataaaaaataaattagctgggcgtggtggtgcgcctgtaatcccagctactcgggaggctgaggcaggagaatcgcttgaacccaggaggcggaggttgtagtgagcccagatcgcaccattgcactcc

SEQ ID NO: 30292 - DNA, 1027 bp, Homo sapiens
acaatgcacaacctacattgagctccacctcctataattcctattagatgttatttgtatcaagtcagcaccctcctacatagtattattatactctgtagttgtttttcctatacagataatctttctgttacatattgctttgttaacagattttaattacataatatatctatcttaccaactttataagtttgttgtaggcagaagcaatctgtctttcctattttatagtgtttgaggctgtaggtagcaagtgttgaatgaataactactttgttacttctgaaaagcttactttttgattaatacttttcctttttaccaattcctttttctttttttttcaggctcatccatggaataccaattctttttcttagtgttcacattggatttttctgttaaaaatagattgttggagttggctaacaagttgattacttccagtcaggcactctcttctgtaaagtctcttttgtaaactcctacaagcagctatttcactggatttgaaaagactgactaaaaagaaccatgcactgtaactctcaagtatacaggaatattgttattaggtaattttttttttcaatatgtgttaaccttgtcttccctacaattttctttttcttttttttttttttttgagatggaatctcactctgtcgcccaggctggagtgcggtggcacaatctcagctcactgcaacctctactgcctgggttcaagcgattctcctgcctcagcctcctgagtagctgggattacagacgcgcgccaccatacccagctaattttttgtatctttagtagagacggggtttcaccatcttggccaggctggtcttgaactcctgaccttgtgatccacccgcctcagcctcccaaagtgctgggattacaggcatgagccacggcgcccagcctccctacagttttcaaacattcagagaggtgattatggtgtatcttttattctgttttgctttggatcttggcgttcttctagagaactcatctgct

SEQ ID NO: 30293 - DNA, 1099 bp, Homo sapiens
acttattacttatttgatcagtttagtacaatgccatcaatataacagacctatagtattctgaatatagtattctgaaggatagccagattatttatttttcttcagtttatagattgacagaggcaggagaggtaagataactttgggcaacactgaaatgtatactgttgtccattccaagtgaatgtgaactgtttctgattctcatatctggcaggggcaggaaaacaacacactcagcagaataatcgccatatatcatcttcctgaggctgtgataatctgcctaggccagtataccacatctggcacagcagctgcatttgggactactacttgactgagtttgcagtagtccaaatgtctttctccaggatccatctgatgttttttgggggtcgtattggttaattaaatggggatataaggagtacactatccctgatgtctttaagatagttgtatattttggctgggcgtggtggctcatgcctgtaatcccagcactttaggaggccaaggcaggtggacaacttgaggccaggagttggagaccagcctggccaacattgcaaaaccccatctctactaaaaatacaaaaaaattagctgggcatgttggtgcacgcctgtaatcccagctactcaagaggctgaggcaggagaatcgcttgaacctgggaggtggaggtctcagtgagccaagatggcaccattacacaggagcctgggcaacagagtgagactctgtctcaaaaaaaaataaaataaaaattatctttttaaccatctgtgcaagttcccttggctaccatgctgactttgccagtcattatgattatatccacctggcttttaatggttaagctatctgatatctatgggggtgtgcacaattattgttattcacattgctattagagagcccagattaatggcttcttctaacttcaaccctgacctacagagaaaagccactgtttgacttagtgatgcttggtgtcccctcaccaattcattccttacagttttagtaaatggtgtctccttcaagccctcccatggactattagggtatggattcctcttaggaaaa

SEQ ID NO: 30294 - DNA, 1032 bp, Homo sapiens
gttttcttatagaagtggttttgttttgttttgtttgtttgttcatttgagacagagtgtcaccttgtcgcccaggctagagtgtagtggtgcgatctcggctcactgcaacctccgcctcctgggttcaagcaattcttcgcctcagcctcccgagtagctgggattacaggcacccgccaccatgcccggctaattattgtatttttagtagagatggggtttcaccatgttggccaggctggtcttgaacccctgacctcaagtgatccgcccacctcagcctcccaaagtgctgggattacaggcatgagccactgcacccagccgatttagcaccttaatcaaaaatcaactgaccagcactcacattcctgatttcaaaatttattactccagtctgggtaacctagtgagacctcacctctacaaaaataaaaagataaattagccaagtgtgatggcaagtggctgtaatcctagctattcaggaggctgtgacagtaggatcgctgagcccaggagatcaagactgcagggagctatgatcagtcgtgccactgtattccagcctgggtgatagagcaaggccctgtctctaaaaaaacaaaaacaaacaaacaaaactactgataatctacaggtcacatttggcaggcttccaaattaacctgcctagaaaaggtcttaggattcttggcttacattctgtcccttaataaaaaatcttggcatgcctgtaatcccagcactctgagaggctgaggcaggcagatcacttaagcccaggagtttaagaccagcctgggcaacacggtgaaaccccatctctacacaaaattcaaaaattttgtggttgtggtggtgccatctgtagtcccagctacttggtaggctgaagtgggaggattgcttgagccgggggagttcaaggctgcagtgagccactgcactcctccagcctggggcataacagagcgagaccccgtctcaaaaagacaaaacaaaacaggcagggcacggtggctcacg

SEQ ID NO: 30295 - DNA, 1003 bp, Homo sapiens
aagtgtgctaccccaagtgtggtcctggactagcagcatggacatcatctgggagtttattcaaaatatagaatctcaggctccatcagtatctactttttttttttttttttttttttttttagacagtttctcttcgttgcccaggctggagtgcagtggtgcaagcttggctcactgcaacctccacctccctggtttaagcaattctcacacctcagcctcccaagtagctgggattacaggcgtgcacaggcatgcaccaccatggctggctaatttttgtatttttagtagagatggggtttcaccacaatggccaggctggtctcgaactcctggcctcaagtgatctgcccgcctcagcctcccaaagtactgggattataggcacgagctattgttaccggccatctgcattctaaaaagacccctggtgatttgtgtgcacagcacaggatgggacgtgctgctctatgggaccttcagaatccatgtaagagacccctatgcttaagcctctctggatgggcttcagctcctcacagccatcaggtaagtgaagatgtcagcttaatcctaaacgtaaagagtgaattcaactaggggaaatgatgacacaaaatccagaaactaagaaaaagaataccgataaacttgtgctatggtctgaatatcagtgtctccccaaaattcatatgttgaaagctaacccccatggtgatgctatgaagaggtgaggcctttgagaggtgacaggtcttgaaggctttaccctcagggatgggattagtgccctataaaaggggcctgagggagctcgttagtttattgcacttctgctgtgtgaggacacaactagaaggcaccacctctgaagcggagggcaaacccttactagcccatatctgctgatgccttgatgttatacttgccagcttccagaactgtgagcaatacatttctgctgttttttttgttttgttttgttttttttacggag

SEQ ID NO: 30296 - DNA, 1084 bp, Homo sapiens
agactaattctgacttgttcttgaaggaaattctgttctgcacacagtgacaatcagaggttagaaacttgtcagcggagccgtgagtcgagcagagctgctcagctcttggtggttgtaaaacgtgcctctacctcatgtttgagaaagcttgtgttttccgtgtatatggcttagcattttaagtaatcacgatatctgaggggtaatgggaatgcaggagcagcaggtggtggctagttttctgtaggatttaggaaaggactgctgatttaactgaatctctgattattctaagctgctcatagaaatccaccagtcactgctgtctcagacgtcagagggagaagcttaagcatgttctgttgttgacagccattctggttgacttctctaagactgccagctgtattcttgatattcagagtcctgcagatgtggcccctctctgctattctaccctgctttcccacagtgtcctcttgcatcagctggccatctctccatgactgtgttccccctcctctgggcctttgctctagtgttcctttggcttggagtatctgctcacatctgccaagcagagccgtatccatgcttcaagctttcttccatattttcttcctttgctttctttcctttttctttcttcccttgctttccctttccctttctctttctcctcttttcttttttctttcttcagggtcttgctcttgcccaggctggtgcagtggtgcaatcatagttcattgtaacctcgaattcctgggctcaagtgatcttcccacctcagctttctgagtagctggaactacaggtgtgttgccaccacactcagttaatttaaaaaaaaattttttttttttggtagatacagggtcttgctttgttgcccaggctggtctcgaactcctggcctcaggcaatcctcccacctcggcctcacaaagtgctgtgtagccactgtgcccggccccttcaaagttttcttttctcaaagggacccatgccctctttcttgtgctctgtcctatcacagtggggggttgtgtgaagtcccatctctctgaagacagtcttc

SEQ ID NO: 30297 - DNA, 1056 bp, Homo sapiens
tcatcttcacattgagtagtctgggaggaggaagagaagggttggtcttgctgtccctggtggcagaggcggaagaaaatttgtgtacaagtggacctacacagttcaagccggtgtcgttcaaggatcaactgtacattgtcatttctatctgactttttgctttttcgtttctccaaacatttttctatatggtaccaattcttttccaccatttgttttagtttcagtgcccgtatcatagaagagtccatgtcataaaagaaaccatgaataattgaaactcttttgccaagttgtctaatgtcaatttgttttctggcactgcttcttgaatgtcttccttgttgtccagcactggtttgggagctctcatctctatcaagttgtcttctattaattcctcaggtatagtatcaattagctgtttaatttctcaaagatctatatcttgaaactcttcacccctcacctttttgccatattcatgatctcttccatgactggctatgtcataaatcccgtgacgtcatgtacaacagctgaacagctttctccagcaggaacttactgtttcagtcttgatggctttcacagctttttctataacaatgatggcatcttccatggtataatccttccaggcttttatgatgttctctctactagggttctcttccatagcattggcaatcctttccatacagtactgtgtataatgagctttaaaggtcctgtgacaccctgatttagaggctgagttagagacattgtgtttgggggcaggtagaccactttgatgccttcataggtgaattcttggggttccagatggccaggggcattgtccaataccaaagaactttaaaagaccatcccttactggcaaggtacttcctgacttcagtgacaaaacttcaaaggaaccaatccagaaaaagttttcatcatccttatcttcttgtacaaccaaaagactggcagctggtgtcatcctttccgttcaaggctcagggcttagcagctttataggcaagctctcgttctgtcacctag

SEQ ID NO: 30298 - DNA, 1031 bp, Homo sapiens
actgcagtgagctatggttgcagtaccactgtaactccagcctgggcaacagaacaagaccttgtctcgaaaataaaataaaacaataaaaaataaactaaaaacaatttaaatagaaatggaatggtctaatatggaaagaacatgggctctggagcccaaatgcctgggtttcagtcatatccccatcagttattagcaccgtgaccttggtgaataccctaactctttgcctcagtttcctcatttcctcatctgtaaagtggtgatgataatagtgtctacctcttagggttgttctaaggatggagtgattactaggcactcagcacagtgcctgacctgtggtaggttctcagttaagcatctgctgctgatcttataggaggacggagatgagattcagatagaatgtgacctctaggcatgatttgctaggggtgggagcagcatctttctgtcaccattgtgtgaacagcagggtcagatgttcctagtgatatcacgggaagccttgtttctaggatgtaggagtctcctgtccatctgattcctttggcctctatcccacgagacctctgagctacacttttactcattttctctaacctaagggtgggcaaaacctcttactgcaagggagttaaccacagaacattctctcatatagtcaagttttacctcatagcttaggccacattttaaaaaatattttagttaattaattatttttgagatagtgtcacactctcacccaggctggagtgcagtggcacaatcatggttcactgcaaccttgaactcctggtgtcaagcagtcctctcacctcaacctcccaactggccaagagtataggcgcacaccaccacacgtggctaattcttgtgctttttgtagaaatggggttttgccatgttgcccaggcttgtcttgaactcctgggctcaaacgatcggcccaccttggcctcccaaactgctgggattacaggcatgagccactgtgcctggcctatttttattttttaata

SEQ ID NO: 30299 - DNA, 1050 bp, Homo sapiens
gtaatcccagcactttgagaggctgaggcgggtggatcacaaggtcaagtgttcgagaccagcctggccaaaatggggaaaccccgcctctactaaaaatacaaaattagccaggcatggtggcgtgtgcctgtagtctcagctaattgggaggctgaggcaggagaattgcttgaacccaggaggttgcagtgaatactgcattccagcctgggtgacagaatgagactcttttttttttttttttttaaaaaaggaaaaactatgtgggatagattcagtcggccagctgccagccctggcttgtggaatgttttgttgaacgactataggtatagccatggactttttgggatcccttggtgtgtgcagtcggccagctgtgatgcattttcctggcatttgtgagttagctggcctgcgtgtccactgccccatatgacaacaggcctgcttctcccatcctgccccccagaatgctgtccgtgtcccacgagactttgagggctgtagtgtcctccgcaagtacctcggccagcttcattacctgcagagtcgggtccccatgggctcgggccaggaggccgctgtccctgtcacctggtgagagccgcaggcagggctggaggatcccacggggagtctgggtggtgggggtgctcctcccctcccttcccccttctccttgctgcataggatggggaatggcctcatatggtccccccaggcctccccacatccccacaatggggtgtttagtccccttacctaatctcagggccctggctagctcctgccctcgagataactggggtgccatgtctgcaggacagagatcttctcaggcaagtctgtggcccatgaggacatcaagtacgagcaggcctgtattctctacaaccttggtgagctgcctgatcccttcccccggccctactccccagtcctgccagcctagctttcagctcttcagatggccacaaaggcagtgggctgataaagggaggactccaggattcccgcccctccactgacctccccacagccctg

SEQ ID NO: 30300 - DNA, 1034 bp, Homo sapiens
ttccctctttttgtgaagggtcttgtccctctgctggcatctacatgggaagtaggttctggatccccactgacaccccgtgactgcccactccccctgctcctgatccccaggtacaattctgccaagaaggacaacgacttcatttaccatgaggctgtcccagcattggacactcttcagcctgtaaaaggtcggggagctgagaggtgggggcagaggtgacggtggggtggggacaggacacaggaggctgcctcaaggactctgcgtgggcctgatctccacaattcccacccccccaggagcccccttggtgaagcccttgccagtgaaccccacagacccagctgttacaggccctgacatctttgccaaactggtacccatggctgcccacgaggcctcgtcactgtacaggtgggtggagggtggcacagagggaggtggggtgtcttgagatgtgggtcttcagcaaatgctctgtcgcttctgcagtgaggagaaggccaagctgctccgggagatgatggccaagattgaggacaagaatgaggtcctggagtgagtgtgggacttgggcagggaggcggaggcaggcagcacttcccgggcctctgggggccccagggctgcctatgctgggagaggaatgaaatgtccattccaaacaggtttcccaatgctgccttcccgcctggggtggtggggctagtgtgtaaggcaggagtcatgtcttgggaggaggaggtgccttctgttccactgtttccagcagtgccctgggcatgttctgtgagaccaggccagacctggtagtaggggtccgaggtcacaatttgctctctgctgagacctcagattgagtggtgaggcttgccctagcggctcctttgacatggtcagagttggatcagcacccagcacccacctggccctgttgctccccacagccagttcatggattcaatgcagttggatcccgagacggtggacaaccttgatgcctacagccacatcccaccccagctcat

SEQ ID NO: 30301 - DNA, 1090 bp, Homo sapiens
aagagccttctaatgtgagcagagctggcagttaccgaggaagcccaggtggaggtggagttctgaaacagccactgtggtgaaggagtgtgtgcagctgggactgtgggggaggagggttggagtgcaggacttgcttctcccctaacattttgttgtgaaaaatttcaaaaatactgaaacattgaagaaattgtatagtgaacacctttgtatctaccaccttgattctctataggtataggcactcaattttaataaaaaaaaaaatagctgaaagggctttttctttcctgctgaagattataattctactcctgctttttcagctcctttgctttcagaattttttgaaacaagagtcttgttttactgatatctttctcctctttaccaattgtatatgagtcaatttgcattccacaaatgaacatctttgtagaacaggtggtttctcaagcttcaggtgtgtgtggccatctctgctccccttctaccccatttactgtactgaaaccagaggggcaaagagagcaaagagtgcatgcatttctcccagccccaagactagtgactctctgaatgtcaccatttaggtggtttaaaaggaccttaagccttccttacccatatatttccaccttccttacccatgtatttccaccttcccgtggaagactcagtgccttaattttcgttcatgtacctcaagttgttgggacttcttagaaatgtactttctggttactaataagtagcatttagcccccaaatgaatggaagtatttggaatggcaggttgttctcttttagaaagagggagaaggctggtaagtgtgcgtctggttttagctctcaagctggacccacatagtccagtcgtccctctcttacccagctcttggagggaaagaatgatttgagatttggtggctgaggtagccatctggggaacgcatagcaaaggcgtaggtagctaccataagaagcagacacgtggtgcttttgagttgatgtagtaccaaggctttcagctttctcctgttgtcctgtcacatcctcacaacttaagactaagagaagtatatag

SEQ ID NO: 30302 - DNA, 1054 bp, Homo sapiens
attagctgggcatggtggcacgtacctgtagtaccagctgcttgggagactgagacaggagaatcgcttgaacccaggaggcagaggttgcagtgagccgagatcgtgccagtgcattccagcctgggtgacagaacaagactctgtctcaaaaaaataaacataaaaaataagaaaggccaggcgcagtggcccacgcccgtaatcccagcactttgagaggccaaggaaggcgaatcatgaggtcaggagatcgagaccatcctggctaacacagtgaaaccctgtctctactaaaaatacaaaaaattagccgggtgtggtggcgggcacctgtagtcccagctacttggggggctgagccaggataatggtgtgaacctgggaggtggagcttgcagtgagccgagattgcaccactgcactccagcctgggcaacagagcgagactccatctcaaaaaaaaaaaaaaaaagaaaagaaagaaaagaaaggggtttccccttattaatctatcagatctcttgagacttactcactactatgagaacaatatgggagaaaccacccccatgattcaatgacctcccaaccacgtccctcccatgacacatgggaattatgggggctacaattcaagatgagatttgggtggggacacaaccaaaccgagacaaagacccccctgggaacaaactagttggttggcatccctggttgttgtttttttttttttttttgtctttttgagacggagtctcactctgttgccaggctggagtgcagtggcgcaatctcggctcactgcaacctccgcctcccgggttcaagcaattctcctgcctcagcctcccaagtagctgggactacaggcgcgtgccaccatgcccagctaatttttgtatttttagtagagatggggtttcaccatgttgaccaggatggtcttgataccctgacctcatgatccgcctgcctcagcctcccagagtgctgggattacaggcatgagccactgcgcctggctgatttttttttaacataaaaatctaaa

SEQ ID NO: 30303 - DNA, 1067 bp, Homo sapiens
ctaggctggtctcaaactcctgacctcaggtggtccacccgcctcagcctcccaaagttctgggattataggcatgagccactgtgcctggctctcttttgggttttctatatataagatatgtcatttgtaagcagggataattttacttctttctttccagtttggatgcctttttttcttgtctgcctgcactttctagtacttttagtactatgttgaaaaaaagtgctgagagtggccaggggccatttggcaatgtctgtagggattttcgttggacacaggtggaggagtgctactggcagctgtaagatcaaggccaggaatgcttcttcccagcttacagtacacaggacagccccctatagcaaagaattaccctgctcaaaatagcaattatgctgaagctgagaaatccttctctgcctggctgactggctggctggatgtttgaaggcactttaaactcagacttttgttttttgagatggagtctttctctttcgcccaggctagagtgcaatggtgcaatggcgtgatcttggctcactgtaacctctgtctgcctcctggatttaagtgattctcctgcctcagcctccctcatagctgggattacaggtgcctgccaccacgcctggccaatttttgtatttctagtagagatgaggttccaccatgttggccaggctggtctcaaagtctcctgaccttaggtgatccgcctgcctctgcctccgcctcccaaagtgttgggattacagacatgagctactgtgcccggccatcccagcctgtctgaagcaggtcattatcacatttttctccatctctttttctcttccccatctatgtgtatagttttgttttgttttgttttgttttgagatggtgtcttgctctgttgcccaggctagagtgcagtggcgcaatctcggctcactgcaacgttcacgtcctgggtttaagcgattctcctgcctcagcctcccgagtagctgggactacaggtgcgcaccaccacgcccagctaagttttgtatttttagtagagacagggtttc

SEQ ID NO: 30304 - DNA, 1097 bp, Homo sapiens
tcctgcggttttcacgcgtctattcttaatagacagactttagaattggtttgtcaaatgcttaataagaagcctctgcagactttgattggaattgtgttcaatttatggattaatttaagaggtttttgtctcctcacacataaaagttctatcatccaggaacatatatctccatggatttacatccttttgccaagttgtgtgcttagtccatacctttctgacccaccttagttcaccttaggtaggtgatggtttttgttactgttgtgaatagaatttttaaaattaaatttaattatctcaaaaacccaaggagaaagttttatgaaggcaggccatggtcactctccagcttgtcatgagttgggtgggattgaaagctcactgtagagaggttcctggcccgtggcccgtgctgtctgctgtcacatggccctgatgttcacctgacaggccttgttcttgctgtcccgcagactttgtcgcctttaccactcccagtggcagctcctgcaacctgtgctttctttgcagttgctcctgttctcccagctgctcactcatctcacccacgtctttgttccttagaccctggccatctgcatttctcttctgctgcttagattccttgtttgtttgtttgtttgtttttggagatagggtcttgctctgtcacccaggctggagttcagtggtgtgatcatggctcactgcagcctcgatctgtaggcctcaagtgatcctcttgcctcagcctcccaagtctctgggactacaggcacataccaccacccctggctaactgcctcttatattccgaactgcttgagggcaaggaccaggtcttgtctctcctgatgatgcttaggtggccaacatgttgctgcgtacatgctagagacttaggcaatgtttaatttatattttctgtagaaaagcatgaagctataacacatttaaaatcatatttttgtataaatagctttaacatttcaagttatttctctagaatgtattcctaacataggattcttatattctcttttttttttttttttttttgagacggagtttcgccggaggtttgctct

SEQ ID NO: 30305 - DNA, 1392 bp, Homo sapiens
ttggtccaggaagagagaattctttcagttaaacttttggtcctcccagggggagttcctttgagatgacagatgacgacagtgccattagggctctgacccagtttccacttcccaagaaccttctggccaaggtgattcagattgcaacgtcatcctccacagctaaggtgagttgggtctcctagaagtttgtgtgggggccgtttacttggtcatgtctggtgttccctaaaggcaggtttagagagggctgagggggtgtgttcctccagcccaaacctaggccaggtggaggaactcctgcttgggaggaaaagcagcaggtgtgatggaatggaggtcaagcctcagcagcacagggagtgggcttgggggccgcaagagcagaagacccatacctcttctgggcggtggattgtcagtggggaagggttagaggtgtgggtcttggtgaggtatgaatttctctcttgctgccaggcgaaggggctttggtcatgaaatgcctaaccttgtttttactttaactcgttgctttgaattttgtcctgcttgtctctttaatcacctagccttgcttctcatgtaaaataagactctctctagctaagaaagccgtacaaaccccaattgaccccttaatttacaagacactaagggctcctcacccaaccccctttcgtaaggagttggcctgggtaaacagatcctcagcatttcaaaggagcctaattaactgataaggtacgaacaccaacaatatatgaagttcccaggaattttctccaagagataacaacataaaaccttgagttcgtgtctggcgtagaccctatatctaattataatgaaagatttagaatcttgcacctggtactgttgctcttcttgtaaccatttgtcttttaagttgtttatcactctgtaaccattttgattcttttgattcttgcatgtttttacttctgtagaattattacatttaagtccccctccccttcctaaacctaagtataaaagttaatcgagccccttcctcgtggccgaaagaattttgagcattagctgtctctttggccgccggcttaataaaggactcttaattcgtctcaaagtgtggcgtttccttaactcgcctaagtacaacagttaagcagagcttctgtccaggtgcagggtctttttgctcccgcaggatgtgcctggtttttagctcatgctgacagcttcaacccacagctgccacgatgttgccgagatgacagtgggctaggagggcaggtgatggcattgcccaagcactgtcttctgcagtggaagtcgaggtatagcaggagaagcgagcctgggactagggtgcctgagcccatgggcctgctcctggctatg

SEQ ID NO: 30306 - DNA, 1161 bp, Homo sapiens
cgtttgcagcaacagctggctcatgccccagggctcctttacaggtgggatcctgtgcttcctgcctgggtggcaggagatcaaaggagtgcagcagcgcctccaggaggccctgggcatgcacgagagcaagtacctcatcctgccaggtgagagccccggcggagggaccagggacctttggaaaccagcctgacctctgtcctagggactgacccaactgggactccaggggccccggtttctgaccaagctgtggcacttttcactgggcatagtgtttatctgcgcctgtttcatcaaaatggggtcaaaatccttgccctgcccacattccaggggggaattctggtggaagcagtgcccataactggtgtgtgtcttgcccaccagtgcactccaacatccccatgatggatcagaaggccatattccagcagcctccagttggggtgcgcaagattgtcttggccaccaacattgctgagacttccatcacaatcaatgacatcgtgcatgtggtggacagtgggctgcacaaggaagaacgctatgacctgaagaccaaggtggcacctacctcctgggcccggccaaccactgggggagggactccgttttgaggtggtccccagcccagatctaccttagacctgctttgtgtgtcttcagaaggccgcgcttgtggggtctcagtgttcctgatgtagggggctggtgagggttactcagggagtggggaagcactgaggaagtggcatttgtgtgctgcttacttgccacctcctccaggtgtcctgcctggagacagtgtgggtatcaagagccaatgtgatccagcgccggggccgggcgggccgctgccagtccggctttgcctaccacttgttccctcgaagccggctggagaaaatggtccctttccaagtgccagagatcctgcgcacacctcttgagaacctggtgctgcaagcgaaaatccacatgcctgagaagacggtgcggcggggcggggcaggggctggcctggggaccaggcaggtgggaggcaggctcatggcgggctctggctctgtcataggcggtggagttcctgtccaaggctgtggacagtccaaacatcaaggcagtggacgaggctgtgatcttgctccaggagat

SEQ ID NO: 30307 - DNA, 1035 bp, Homo sapiens
gtaaaaatgtaatagggaagtggtgcagagcatagagaagttgactcaagcataaggcaggaggtgagaggagctcagggtctgggtcagctgagaaggctcaggtggccacagccaaggctcagagggctcttggggatcctcatgatgggcctggtagggctggcttctcaaggttgcttctttctttccccagctctgcctgccaaggattctgcctggccctgggaagagaagcctagatatctggtgagttgggcccgcccttctcttttctgaaatgctggctcatttctcagagaatgggctcatctgtctttcttgggaagggaggaagtgattaacatttaagtggtttatgccttgtgttagccattgttctaggcttattataatggtttttgcacttagtctttctattttttgagcttatacaaaaacatgaccaagtttaattttaattcagagtattctaaaatataatggtaactttttataaaaaccttgggttattaagatcctaaaatgcactattaaagttccctacatcaacatttgcacaaatagttataacactttaatagtatctaatagtctgatcttgtacattggacctctttttcacattttgttttagaaaacaaagatgcaaaagtagaaaaagagttaactcttctgtatccatcatcccacttcagcagttatcaactcatggccaattttatttcatctccattcccactggattaaagaaaatccaaggcatcataccatttaatccataaatatttcagtcctgtgtttaaatcattaacagctgtaggagatgggtggtgacatccccattttcgagatgagatcatctggcttagagggattacgtgatttatgcacagggacacgtggatggccaaatggtagagtcaggaattaaatccagatttctctgatctcaaaccatgaattttctgtgatgccttcttgactgtttttttctcctagaaaactacccaatgataaaagaacacactttcc

SEQ ID NO: 30308 - DNA, 1023 bp, Homo sapiens
ttccattgtagctgagcctgttgttttatgtttcagtggaaaaactagagggggaagaggagtcaagagagaaatggagaggatattggaacatgagagacacaaggcttgaacaagagaaattatgagacctggggtataaaaagaaaaggggaaagatcactgagaatatgagaaccaggatgtgcctgaagcagcaggtcatggaaagcatgtaagggacagcagcccacaccactgcccgctcaggccttggctgcctaatcctgggtcctggcctgctgtctagactttttgtcctccctcgtacactgtgccacgcggcctgactgcctgggctgctggctatagatgtgacatccctcccaaaacttctcacacactcaaggatttcagtatctacacctagtttcctactcttagctcagcatcattattattctctactgcttctgcacttctgtgctgggttttattaaatctcttttatagtccagctctcaggggaggatgctaggaagctctggcttggtagccttgcactgtgtttccttcagcccctactgtcatctttgatttgctagaagcttaattagtttagctttagaacctggaatatacattaccaactcctagagtgccaaggaccacttggaaggtggacaagaagattgatgtatacctgagaataggaggaagaagctgagtcagagaagaggtactcagggtaatcagaggcagctgggaataatgtgcaactgttcccaaagtctgcagagtgaagttaaaattctaaagcaagtccgaggccggcagatcacttgaggtcgggaattggagactagcctggccaacatggtgaaatcccatcgctactaaaaacaaaatacaaaaaaaattagccaggtgtggtggtatgcacctgtggtcccagctacttgggaggctgaggcaggagaattgcttgaacccggtaggcaggggctgcagtgagccaagatcacgccactgcagttcggcctg

SEQ ID NO: 30309 - DNA, 1047 bp, Homo sapiens
gacacacacaggagaaaagccttatgtctgcggagagtgtgggcgaggctttatagttgagtcagtcctccgcaaccacctgagtacacactccggggagaaaccttatgtgtgcagccattgtgggcgaggctttagctgcaagccatacctcatcagacatcagaggacacacacaagggagaaatcgtttatgtgcacagtgtgtgggcgaggctttcgtgaaaagtcagagctcattaagcaccagagaattcacacgggggataagccttatgtgtgcagagattgaggccgaggctttgtaaggagatcatgtctcaacacacaccagaggatacattcagatgagaagccttttgtttgcagagagtgtgggcgaggctttcgtgctaaatcaactctcctcctacaccagtggacacattcagaggtgaaacctcacgtgtgtgaggagtgtgggcatggatttagccagaagtcgtcgctcaaatcacatcggagaacacactcaggggagaagccttatgtgtgtggggaatgtgggcggggatttagccggaggatagtcctcaatggacactggaggacacacacgggagagaagccttacacgtgctttgagtgtgggcgaaactttagcctcaagtccgctcttagtgtacatcagaggatacactctggggagaagccttatgcatgcacggagtgtgggcaaggctttatcacgaaatcacagctcatcagacaccagaggacacacacaggagaaaagccttatgtctgcggagagtgtgggcgaggctttatagctcagtcaaccctccactaccaccggagtacacactccaaggaaaaaccttatgtgtgcagccagtgtgggcgaggcttttgtgataaatcaactctcctcgcacacgagcagacacattcaggggagaagccttatgtgtgtggggaatgtgggcggggatttggccggaagatactcctcaacagacactggaggacacacacaggagagaaaccttacgcatgcatcgagtg

SEQ ID NO: 30310 - DNA, 1048 bp, Homo sapiens
agaaggggggatcctggcaaagagaacagcacatgggatcccctagaccatcctccacctaatacccctagtccccctcctaatacacccaacccttcccctcaggcccagcctaagtccccctccccggaaaaactccaagctcctaattcaccaggtcgcttttgctgggctagtaacatcaaggatccaccgcaacatgtctgcatcgtccctcccatagtacaccccagcggcaggcaaagcccatgctcctgcccccccgctggtccaacatcccagcaccatattgacggcggctctgcaagacccatgggccaggccccagcctatgccccaagcagactacattatgggatatctgccttacttttgccaaggccaagtaatatggggcctcagccgcagctccaagcacctaggcatccctgcggctaagtctcctgagcaagtggtaaataatctttcagctgatatatccgctagcatttattgtggtcaggccagtgttaaaagtaaaaatatccaccagaaaagaactttgattctttaaagtcgcttttttgttgttgttgttgtttgagacggagtctcactctgtcgcccaggctggagtgcagtggcaccatctcggctcactgcaagctctgcctcccaggttcacgccattctcctgcctcagcctccccagtagctgggactacaggcacccaccaccacgcctggctaatttttttgtattttttagtagagacggggtttcaccatgttagtcaggatggtctcgatctcctgatctcgtgatccgcccgcctcggcctcccaaagtgctgggattacacgcatgagccaccacgcccgacctcttaaagtcacttatattaaaatgtgctaccagaaaataattacatgtgtataagtatgaggctattctgttaaaaaggatggtttaacattaactactgataattcgcgtaacctagcaagtttcttaacgagagatccaaatcaaaaagaaagcacacatgtttagatttaactgattacc

SEQ ID NO: 30311 - DNA, 1048 bp, Homo sapiens
cttgcagagacttaccgctttatccaatgaattagctaaaaattctggagtcaatgaccccatttaaggatggctaggaaagtggttcggtaaatggaaaggaatcacggtctcaatttttatttcccttgcagttgtagtaggcatcctcgttctcattgggtgttgtgtcatactatgcatctgtgggctaatacaaagaattgtacaaacaccacttactaaagcctcccttagttctcctctaccttattcaagtacgcttttccttttaaaagatcaaatcgaatggcaaagccaagacatgtttaaaaagtttgaagagaaaggatcgtaagaaaattaaaagggaggaattgtaagatgcaataaatctgagtttctcttcaaagggtttagcctattaacttccttatccttgttctcaaactcaactttcttgttcttccttgcccctagttaccgtaaacagcctatcccccttcccatcagctctaatcaataattcacatctgttcccttggttacctgtatcctttgtttccctgaaactgcacatctcacatgctccacctctgtacctcatgtccccctccccttttatatttgggaaaatatgtacaagtagccaatcgggtcagctcagattgtgcggtccagccacagcccatgggggagtgacacagagatagggactgcgttaaagataaacccccccgccccggtctcctttgttctgtgtgctcttgtgatcttgattgacacaagtggcacccttttgcagaagtaaattgccttgctgaaataatttgcctgagtgctggttttcatggtaccaagcatttattcctagagcattttatatccaacaagacgcagaggggacctctgtccggccagggcagatggctttgggtgccttctagtcaagaatcaccccttcctttgtctcttcgaaaagaggatgaaatcagggctgtaatggcctcatctgtgcagtaacaagctcgaggtgttgtgagatcttcacaataaagggttgcagggg

SEQ ID NO: 30312 - DNA, 1081 bp, Homo sapiens
gcctttgcaggagtgctcgctcagtgcaatcccaggggtcttggttttccgcagctggtcctttccaacatcactctcttctctcccctgccttgttaaccctcctttcccatcttgaggggtcccttcatgtcctggcctcaggaattcctctttttaggccttggagtgaggtgagaatcaagatctccacaactggctcctgtgattcagatgctgggccctatggtaaacctctccaggaaaggaacaggcaagggtggagtgagacttgggcatttataatgagtcttcaagggatcatgggctctcagaactgtaaaactcaggacttgtgaatcctgcatagctcctggggaactgagataatgctgggctcagattaggaatctggggctgctcgccactgggggaaatgaatcccactgttcaccctgattcgggtgattcaagggccctgattccccagggccatgtttgattaagaagggagtaagcccaaaggagaggctgtggaatgatgaatgcgtgggagggagatggttagatgagggtttgaacttggagattccaattccatgggggagaattttgtgtggtgggaggctgacaagtgagaactgtgaaatgttctaatagatactgggaagaggtatctgtcttttgaaatatccaagcttttatggatttctatattacctcttgttctcaagctgaatctatactgaagatttaaaaaatctggtatatctgggccaggtacagtggctcacatctgtaatcccagcactttgagaggctgaggctggcggattacttgaggtcaggaatttgagaccagcctggccaacatggtgaaaccccgtctctactaaaaattagctgggcgtggtacacacgcctgtaatcccagatacttggaggctgaggcatgagaatagcttgaacttaagaggcagaggttgcagtgagccaagattgcaccactgcactccagcctgggtgacaaagcaagactctgtctcaaaaaaaaatttttgtttctttaatcttaataagtgttttatgtaattttaagtaa

SEQ ID NO: 30313 - DNA, 1039 bp, Homo sapiens
ctttcttttctgggttttttttttccccttttttttttttttttttaaagacagggtcttgctatgttactcaggctggccttaaactccaggcagggctcaagcaatcatcttgtctcagcctcctgagcagctgggactccaggcatgtgccactgtaccaagcagaaatttcttttttcacagttctggaactgggaagtccaagatcagggctcctgcccctggacctgaacctggatctttggctttgatgttggaccttgtgtgtggatatgaactttgaacctgcaccttggaactaaacctctgacttggatttgttctgcattttggaactcaccttagacctgaaccttggtcatgaaatggatctgaatcattcttgggtcttggacatgggacttggacctccatgtgtatcttggacttaggaccatgatctggaccttgtaaattgacttggactttggacttggaccttggactagaatttgtccctggctgtggacctcgtctttggatctggatctggacctggtcttggatgttggacctagatgcaggccttgatttgatttggaacatggacttggtccttgcacatggcccaacacccgcgtctttggaactgcatcttggaccttggatctgaaatttaaacagggaggtgaccttcatttcttgtatttgactttataactggaaattcaatctctacctggatcttggacctggatctcagaccttgctttttattgggccatggatcttataccttaaacatggaaattgtacctggatttggacctttgacttggacctggatctggacccagggataagatttggacctcacttgcaaattttggtaatgaaattttcctttgctcctgtagtccttggacctaggcttcagtcatggatttagaccttagacgtgaccatcagaccttagagttgaacctaaattcctggtccccagtcctataactcagaatgattatgcataaccttggacttagaacttagatctgga

SEQ ID NO: 30314 - DNA, 1026 bp, Homo sapiens
tctggcccaagcaaagaaactgccatggtcgctcctattcatgtcctttctacagctttcaacctgattttccactcaaaccataaagccacacccaatctaaccagtacaagatcagctaacccactctccctaatgccacaggtggtaacacgtcattttcagcaactgtctacagagacatccatgacacctcccctccctcactcttcatatccacacgatcaccaacttctggcaattttccctacctaatatatctcaaaacccataccattctcccatcctcaactgctaccaccataactctaagacatcatcattcccctctggacatcttgacagcctcctctttggtctcccagtttctgtcctgccaacctctacaatctccacacagcagccaaagtgaaccacacatgaaaatctaatcatatggttcccctccttaaccctttaaagggcaccctgttcttagaataaaaaccaaaatccttatcacggcctcccaggctctgcatgatcttgtggttccccacgtacctctctagcctcatctggaaccccacactccttaagtttctctagctccaacctcatgggcctttcagttttgaaagaatttctggcttgacagcctttgtgtgagtagttttcgcagtcctgaatgtgctttctctggttgcctcctgcccaccttagtgatcttagctcacttcccgttacactttctcacagctccttgcaagttcccttcagttccgtcttcaccaccagaaggtgtaagcagtacctagcacacagctggctcttaacagtatctgaatgaaccaacgaatgcacctcatccagccattccaaggccaggctgctaggggttctcgtggcaagaacacgcggcctgtagggaggacatggttcctttactaacgcagctaagttgtggctgtcttgactcttggtttacaacaaactgacaagtcgagaatcctgttagacttaaaggtgactccatgagaattaaaa

SEQ ID NO: 30315 - DNA, 1044 bp, Homo sapiens
cactgcactgcagcctgggcgacagagcaagattccatctcagaaaaaaaaaaaaaaaggacttctttttctgtaaaatgggttgatatggcatgaggattaaataagccaatctgtgaagtatacagaagtgtagatctagaccagtgcacagccagccactgcttgtactccatctcatcctcattttacctttacctagaacagacagtatcagtgaagctgctatccatgcttgtgttaaagtgaatgcccaatacaaaagccaggctttactaaggtccacagcaggcccgtggggcttctaccgtaagaactatatttttccctaattgtgactatttttcttttgcagccacaggtggaattaagaaatctggcaaaaagtaagctgttccttgtgcctgaggagatggtgaccctttatttcatctgtatttaaacctctctattccctgccataacatcttttgccacgtatagctggaattaagtgttgtcttggagctgttgtacatttaagaataaacttttgtaaaaaaagaaaaatcttacagtggctcatcatctctttagttgttttcactaagtcattcctaccataactgtgaatttaaagtaaaaccagctcagaatcttgccagagtctgttctttggtccttgttctaccctaaactttgtatcacctgaaattaaaccaactcatttgaaaggatggcgttcttgtgtggttgtatacctgacagaataccttacatgagtttagtggaagaatttgcacttttttttggtgggggagggggtggagtctcactctcacccaggctggagtgcagtggcatgatctctgctcaatgcaacctccacctcccgggttcaaactattctcctgctttggcctcccaagtagctgtggttacaggcacccgccaccatgcctagctaattttttgtatttttagtagagaggggtttcaccatgttggccaggctggtctcaaactcctgacctcaagtgatctgcctgcttcagcctcccaaag

SEQ ID NO: 30316 - DNA, 1537 bp, Homo sapiens
tttttagaaatgggagcatttatagttaacatatcaacttagatatagtgagtgtttttttttttttttaagatagagtttccctcttgttgcccaggttggagtgtaatgatgcaatcttgtctcactgcagtctttgcctccggggttcaatccattctcctgcttcaacctcctgagtagctgggattacaggcatgtgccaccacgcccagctaattttgtgtttttagtagagacggggtttctccatgttggtcaggctggccttgaacccccgaccttaggtgatccacccgcctcggcctcccaaagtgctgggattacaggtgtgagccaccgcgcctcgccaatatttttattatataaaaatgtgactgtaggctgggcacagtggctcttgcctataatcccagcgttttgtaaggccaacgcaggaggatcgcttgaggccaggagtttgaaaccagcctgagcaacatagtaaaaccctgtttatacaaaaaataaaattaggtatgggggtggcatatgcctgtagtcccagttactcaggaggctgaggcaggaggatctgttgagctcaggagttggaagctgcagtgggccatgatcatgtttttatatctcagactgggtgacagagtgatactatgtctcagtactccatagtcttttagactggttacaaattctttttccttttggtagacgtgagtgtcactatgttacccaggctggtttggaactcctggttttgaatgatcctccagcctcagcctcccaaagtgtggggattatgatacaggcgtgagccactgatacagatgtgagccactgtacgtgggccttttttttttaagtagaagattatttacctgaattattattattattattattatttttggagacagaatctctctgttgcctaggctggagtgcagtggcacgatctcactgcagccttgaccttccaggcccaagcagttcttcgatgtagccaggactacagacgcatgaccgctatgcctgtcttattttatttatttgtttattttttgtgtgtgtgacagtgtctcactcttgcccaggttggagtgcagtggcatgatcttggctcactgcaacctcctccctggttcaagtgattctcctgcctcagcctcccaagtagctgggattgcaagtgtgcaccaccctgccaagctaatttattttttattttttatttttttattttttcagattgagtctcgctctgttgcccaggctggagtgcagtggtgcaatctctgctcactgcaacctccgtctcccgagttcaagcagttctcctgcctcagcctcctgagtagctgggattacaggtgcatgccatcatgcctagctaatttttgtattgttagtagagatggggtttcacgtgttagccaggatggtctggatctcctgacctcgtgatctgcctgcctcggcctcccaaagtgctgggattacaggtgtgagccactgcgcccagcctaatttttgtatt

SEQ ID NO: 30317 - DNA, 1197 bp, Homo sapiens
ccagtagaactctttaaacctgaaaaatcagtcaactttgcagactagaggaggatgttgaacacctatgtgtgttttttttttctttaccaactatgcacctatttttcagacacctaaaagtaatgtctgtgaaacagtggttttctttttctacatattacagcaggaagtgttcctatttatgtactgtctgtatcaatactaacggggcatgataagcaaaattttaaactttggtagttaaacctttatgttgcctcccctctgggctgccagctgtggggatgtgcttctcccttaaggactttggcaagaataacaagttcattggaatttgactttctgacatagagcagacagccttgccctgtcatgccaggcctttcatgtgaagttaccatttattagctgcttctgtctctccagggaaggatttcccttttataagcctgggccagggggatgatagtaagattccccatgtgataccagagttggaataggctgtagtgagattagggccaggactgtcccattttgattcttgaatggtttctgttacaacttgtcatggggaaaaagtaacacttattttttttttcctcccttagaagacaaaaatactaatgcatttgagaaagcggtagttttggggggagggggaaaaagcaactgctttcctgatctgcaacttggctggatgctaagatgtcagtggacatgaatagccaggggtctgacagcaatgaagaggactatgacccaaattgtgaggaagaggaagaagaagaagaagacgaccctggggacatagaggactattacgtgggagtagccagcgatgtggagcagcagggggctgatgcctttgatcccgaggagtaccagttcacttgcttgacctacaaggaatctgagggtgccctcaatgagcacatgaccagcttagcttctgtcctaaaggtgagcagtgttgtaaactccagtgtaatcccccccagttaaatctaaggatgagctgttgttaattaatgtctcctccagactaattgaatggccttgtagcttgaaaccaaatttaagtgtatgtcaacatcatttggacattttgttacatttactttgttttctaatatatgcatgtctaaggtcctcagattcccaaattagtaagaattagaaagtaggggtggg

SEQ ID NO: 30318 - DNA, 1032 bp, Homo sapiens
tggaacttaaacagaaataactaaggtgtgccttgtatgatttctataaaatttgctttatctactagtttagggatttttttttttttccccagatggttggcaaaggctaataccttgaatttagatactcaggtctttattagcaactggctggaagctgaaagctaagttgtttttttttttgtgtgactaatttctagaagtgattgtagacttcctgtcttgtgctgagcagaaaactctgaagaatgaggacctatggatcctctgggtttgggatttctgcactatggctataacaaagctgctggacccctgcctccagagggcatttccctggtagaaaacaataatcgggtttctcttcctcaccatgcacacctctcccttgttgatcaatagttttcttttgctttagtcatactgtcaggttatatacaatgttggtatttaaaataagaaaaggatatgttcataatgttaggttagaaaaaataatattaggaattatgtagtgtgtaaccatgctctggacagtgtcagttgaccaagttcatgaggatgttcctgtctatacacaagaattctcagattgtcaagcctctgtgctggctttttctgccctgctagagacagctgaggggcccaagcacctgtccgtccgtccgtccgtccttccttccttcctttttttttttgttttttaattgtggtaaaatatatgtaacataaaatttactgttttacattcttccttcttatacatggtcagcctcctggaaagctttcccttcgccgcctcatctcttactgcccttaggagtcctcagagtctagctcatgctttctctgagtgagtttccttgagagaccctagagcacagtggccatgccttctttggtctgtgtccaaagaatacagctcgtttatttttttaggttatgtactgcagtcttctgactgctttatgttttacctgttcacacattttggcatgatctctccaactagattgtcagttcttggag

SEQ ID NO: 30319 - DNA, 1012 bp, Homo sapiens
acattgagaatggcctaaatacaaatggtgcaaagatgtccttgtcttgccagcttagaaaagttattgtcatcgctgtgtacctgataccatacaaaacatgctcatcatcttccagaaaagaagctcttcatcagattcaaggccagctttcattctagtctttttgttgtgctttctgtctacctcaggaaacatggaagtcatgtgtaatcaaggggtgatacggtatttgtgtgtgtttgtttttttttgacatttatattttaatcttgagtttataaatttttttgtcaagatgttactacagtatttaagaaaataatatcattcatgttttcattaacctaaaataagttttcttgcttgcttatcatccttcagctcttgtccatattcatacatagcattattgttcagtatttcattcaaccaatattgggtatttattgagaacctactacgcctcctgttatgttcctgtgccaggcacataacaggaaaaataactgtaaacaaaacagacaaaaatctctgccctggtagacattgcattataataatcagtagatatatgtattttatgcattctgcttttttcatgtatatttcaaacatttccccatttttactttgtcctcataaatactttaaatggctgtgtagcatgccatcttgtttttgaactgtaatttgcttaagctttctgcattgggcatttaagtgagtacctatgtattacagttgttgggggactggttacattgttgtgaatgtctttatggatatgacttttatgtctgttgggccttgtccagagtctgggctagtggtcagatgattgggttccagtcccattttttccatttaatataatatgacctcagataagtctgtcagcatctctatgcttgagtttcctcatctgtaaaataatgataacacctccttcacaacattaaatgtgatgataatgcagataaagtgcctggaacatgaatgttcaaatcga

SEQ ID NO: 30320 - DNA, 1031 bp, Homo sapiens
atttaaagtggattcttcaggctccagcctgatttccttattgttcctctccctaactcatatacttgattttaacctcctccaacctattgtcagcatctccgcccttcttgcaaccctcgagagactgctaagccctccaactttttttaacccgtctcagagaagctgtgtctgacctctcctgtatccctgtgcattcctgagggcttggaagaccttgggcaccttcatacgctcttgtggtggatgtgggtgtggtgacaaggctggaccaccggagacagacagagaatggtcttggcgtatgggacctaatgctagcacaggtattgttccaggttcttgggtttggcagagaaggaatccgtcaaaaaatttctgccctcaatgggctttcattctcttcctgtttatatagttttatataaacagaaaggttataaaaatagggttatatgtttctagcaaaaaggggtagctaaggaaagcagtcgatgaggtagtagctctgtcattgaaacatgctgttggaatctggctttttcattaagatgtgctggcctctgaagtaccctccttttggagaagatggtactaccatcttattggtagtacttggatggtactacctagctggttatttggcattccctgtctttgcctccttacagtagcagtagctgagacatagcattgtttcaaataacttttggacaggatgggctgtggctgcaggaatggacacagcttttagtcctactctgtgcagttcatttgatgtcagctcccatctgcatttcttttggttgggtttgctggacatgatctgcctatgtggcattcccctggaagtctgttaagagttctaggaggggcagtaaccagctctttgtactgagtccttctcaaaaagtttccattaaatgcaccctaaaagatatgctggctgggatttacttcacaataatctgaagggaggaggggagggctggaatggagacatagtgggtctggccaccagctggtta

SEQ ID NO: 30321 - DNA, 1046 bp, Homo sapiens
gggtcctaaatgtcatatgtgcttaccatttccttcagtagcaggaattgatctctctctggtattttaagttctttgtggtcaggggactcaaatgtttgttccaatgactaatttaaacttctgatagaagacttgcttgaatgcggtggaggggaagggacttggtagaaatcagaaaataagtttgtggctgttattaacaaacttcaggtggacttgcaatttgtgatctgaaaaatgatatcacaatctgcttacactgaataaagctgaaacagaagtagggcagcaagtcacagaattgctagtctaaacccacaagcaaattgctattggaattgccttacttaagatcctgaaccctgcagccgtctccttgtagcaagcgggtcagaggacacagagattcaaagttttatcttataaggtagtctccattctaagctgacagtttgatttcagttctctagtctctaacacccttagactgtggaagaaagtgcctccagaacaaaatgctgagattgtagatttgcatgctgctaaccacgtcagtaacagcgactaaagcattcatattcacttcattacatctctgtgagaaaatcttagcattattggcccacagcctgaatttccccctggtcttcatcctccattcctcagtcctgcttgtgaagcaggcatagaactgtgtgacacatttactatgttattcatttaaaaaacagaaaggagaacttgactcccaagcagccatctactctaggtttctaggccagtgtaaccaagtggtaactactgaacatgttttgagggcctgtgtcagatagtattttccaaaggtcatgagcaaacaccttctgtcatccactatagtctgtgcattttagagtttcagtcaaaaacagactatagaggatgacagaaggtgtttgctcatgacctttggaaaatacaaatgaccataaacaaagtcctttttgacatgcatgtagcacatgcttcctgaaataaagatctggaaaccatctgagagtatt

SEQ ID NO: 30322 - DNA, 1026 bp, Homo sapiens
acctcaacctcccaggttcaagtgatccttctacctcagcctcccaggtagatgggacaacaggttcatgtcaccatgcccagctaattttttgtactttttgtagagacagggttttgccatgttgccttggctggtcttgaactcctgggctcaagtgatttgcctgccttagcctctgaaagtgctgggattacaagcgtgagccagtgtaccaggccaactttgtattttttttaccttagtaaattcataaattcatttattagtgttttttttccccctgtggagtttcactcttgtccaggcttcagtgcaatggcaaatttttaaattaaggatttttgtgtctatgtctgtggaatattggggttttttttcttggttatgttttatcatggttatgctaacctcataaaatgagtttggaagaaatgtccctttcttctctagtttgtaaaagtgtttatgtaaaattagtgttgatagaattcatcagtaaaatccctgggcctggaacttggtgggaagggtttcgatcatgacttcaatgtctttactatataaagagctgctcagtttttctttttcattttgtgtcattgttggtaagtattcttcaaagaacatgttaatttcatttaagatgtcaattttattagaattaggttattcataacattttcttattttccctttaatgtctataagaattgtagggggtggtccatcttctacctctgttatggataatttgttttctcttttttcctaattgttctgttttatcaactttgttgatatttttaaagaatccatttttagacttcgttaatttttgctgttacttggattttatttctttctctttttaattgttactattttcttctttttacttcgttttaacttagtcatctttttctagcttcccttttttagctgtaatacacggcagtgactaaatttttctagcgtcttaggttagatctttatgtcattgatttttggaccttttttaatata

SEQ ID NO: 30323 - DNA, 1033 bp, Homo sapiens
gctgaggcaggagaatcacttgaacccgagaagcagaggttgcagtgagccagcgtcgcgccactgtactctagcctgggcgacagaatgacactccatctcaacagaaacgaaaaagaaaaagcattcataaataaataggacttttaatcctctggttacatgttgatctaatagaactgcaagtttcttctgaacaccacattggtcacatgtgttccttctaagtcattagtctttttttttttttggcttacattggttgtttactaccctggatccatttttcttttggaaaagatttggccttttctttataagttgtcttgataatacttaatcctaactaccaacaggttgttagctccttcattacaacagcccagcaagagctcttcttgattctactgaaaggttttctcttcacaattgaacaaattataaagggtaacaaggggacagggggtgaaggactcagttatgaaagtgttgactgtgatagattctaaatggattgttgagctctttcaagcattaaagactaatggtgtgaatactagttcgttccttagaaagctcagctgtttgtactcagacagatttttacctttaatctggcttaatattgtttagaagatttgttttggccctcctgccaggaggccaagatggctcaaggtggccactgcttcctctggaaaactgctggggagttgagatgggggttcagtcagttctctcttgtgacccaaatcagggagaaggtagcctccttgctgagactaccttttagaatatattattctagagtatcattttctcactgtttttctccatctctgtgctgcttttgctcagaggactctggggaatctggctttcctgtagatccttcctggtgtccattactggatgaggtgcagtgacactacattttcccttaattagtggtctcagaatctcatcaggtttgtagtagatttttgagagagagagtctccaatcttctgtgtactatcaacctaatatgtgt

SEQ ID NO: 30324 - DNA, 1051 bp, Homo sapiens
cactcactgattgcatagcctttgacactcattatatgctgggatgtgcccttgtttagtaggtgcgcacttgtctcctttcaggagtgacttgagcgctagaaggagggatcatgtggtgttcactgtgtgtcttccctctgctgcagttcttatctgtggaccaggcacatactaccttacaggtccatggtagctcttgtttaaggactcagtccagtgagcagacaatgttctgtgtgttttcttgtctctctagccgtaaatatgttcctactttctccttgctttagtagtaccctcatggtgtgtattgctctctctgggaagcctgatctaaggcttccaaacacatcccaatcttctgtgatctcacccaagtcttgacacttagggtgttttgtaactagcttaacttcccaattacgattataacatgtagatgcttatttgcttctttaacctaacattaaaatgtgaacttctaaggcgggtgaagtggtatgcacctgtagtgcccgagaggttgaggtgggaggatcacctgagcccaggagttcaaagctgtagtgtgcaatgatcatgcctgtgaacagccttgtattccagcctagacaaccgtagtgcagctcattatttaaaaaaaaaaaaaacaaaaaaacctggccgggcacaatgggtcacacctgtaatcccagcactttgggaggccaaggcaggcggatcacctgagatcaggagttcgaaactagcctggccaacatggtgaaaccctgtctctactaaaaatacaaaaattagctgggcatggtggcgcatgcctgtaatcccagctactcgggaggctgaggcaggagaatcgcttgagcctgggagacagaggttgcagtgagccgaggtcatgccactgcactccagcctgggtgacaaagactgtctcaaaaaaaaaaaaaaaagtctttctatgttaataaacttctcaatcttttaaaataaccatgtagtagtccattgcatagatctgtcatatattatttaactcatttttgtt

SEQ ID NO: 30325 - DNA, 1050 bp, Homo sapiens
gtgtcccactttatgaaattctttccctgggtatttgcctgagggccttttctagccacaaagtactgttggcctccacaaaagaaaatttcaaaatatggaagcctagcccgacgaatattggagtgtcttttttttctgttttaagtttcagtgtcatcagatgtatcatgaccctacagattttgcacgttctggcatttgtgcattcttgtgtgcatatctgactgggagatccgatgagactcccggaagtgggtctcaatcctgccttaggtctgagctaaggagtccttctcagagcacctcaccatgccctttgagagtcatagctctgtgtttgacatcttgggagttggtaaacaagatgtttaaacaaggtatttaacatacatatcatagctcactgcagcctcaaacccctgggatgaagtgatccttctgccttagcctcccaagtaactgaaactacagatgcccagctaatttttttaaatttgttgtaggggccaagtgtggtggctcacacctgtgaccccagctttaggacccctgtgactttaggagactgaggcgggtggatcacctaaggtcaggagttccaagactagcctggccaacatggtgaaatcatgtctctactaaagatacaaaaattagccaggaatagtggcaggagcctgtaatctcagctagtcaggaggctgaggcaggaaaatcacttgaaccagggaggcagaggctgcagtgagccaagatcatgccattgcactccagcctgggtgacaagagcgaaactccatttcagaaaaaaaattgtagagacagggtcttcctatgttgcctaggttggttggtctcaaactcctggtctaaagcaatcctttttttaaaaaacagggtctctctcagttgtccacgttgcagtacagtgatgcgaacacagctcactgcagccttgacctccagagctcaggcaaatcctcctgccttagactctctagtagctgggactacagacacatagcactacacctggctaattttttc

SEQ ID NO: 30326 - DNA, 1043 bp, Homo sapiens
ctgcattctcctttggcaaacatcagggtcagaattcaggatagcccttcctagggcactggactttctggcatgggggctgtgtttgcacaagttattttcatgttacctggagagtgtccagaggctgctctgaggctgaggtgtgttcccccttgcctggttccagctgtcagagggataccatcctagggtctgggaatccaaggccacgagactccttggtttgtggtccgagatcctgtactaaggagggtctggccagaggaacagaccagcttttgcacaatgaagcgcaagggaacaagtggtttgcctggtgtcctacctgtcctgaacctggtcctgtgggccattgaaaagttagatctgtgatctctggggtttttgtggctttgttcaatgcttccactctagggcaggcagagcagtctatactctcccaagcctgcttgacctccaagtagagctgatacagagatctgtgaatattgtgatagaaattctttggtattcatacatttcagctgcaagtcagcaatttcccaggtaccatgtaagctataaaacagtcattcttaaagacagaggatagctgtgactcatgggatcatgaggtccatggctggttgcaggttccctttttccttcctcaggttttgtctcttcctgtgttgtccccagcaagggagagactgtggggtggattgggagaacagattaggagtatagcaaatgaacccagaatggaacagtggggagctaactgtgaatgaggagagtacctgctgcaggacctggaggtcaggtgtgaatgctgtattggcacagggaataaatatcctggcgtctggagccttcacctctccgtcaagtccttcctgtgatactgccatggcacaggatctgagttgcagctctgcaccctaaatcacaccctgggcattgtctgggctgcagggctgccaggttctgtacttgtgtccagctgtggccctggatgctggagctggagggttttctgtgctcagactgtagcctgt

SEQ ID NO: 30327 - DNA, 1984 bp, Homo sapiens
aagctggacaagcgagcagaggccacattgtttcaggccttgatctgactttatccctaagggcagtggggagaacctattgaagggttttaaggtggggaataacttgggaaatgcagtttaagaagctctgcaagtgaattcacctacttctgtggcttccaaagtgacttttatatagctacaattctgtgtgtgtgtgttttttgtttgtttgtttgtttgtttttgagacagtcttcctctgtcacccaggctggagtgcagtggcacggtctcggctccctgcaacctccgcctcccaggttcaagtgattctcctgcctcagcctccggagtagctgggattacaggtgcccaccaccatgcccagctaattgttgtatttttagtagagatggggcctcaccatgttggccaggctggtctcaaactcctgacctcaagtgattcgcctgcctcagccccccaaattgctggaattataggcatgagccaccatacccggcctctctagcctcttcctgagctcttcatttcctgttccatccaccatactcaatgctcttgcccatctcagggcaatcatacatgctgttttctccaccaagaaagctgcaaaccctcccattgctccccacccccccccccccgccccaacatttcccagtccccctcttccgcctcctttcctctggctaactgctgcttatccttgaatcctaactctaaatattgtgtcctcaagttggcctccccttacactcacccagtcttgttagattagaccagggttttctcaatcttgcctcgattgaccttttagaccagataattctttgttggaatgctgtttgtgcattgtaggatgtttagcatcatccctggccttacttgccagtagcacaacccctggagacagccgtacgtgtctccagctattgctagatgtctcctgtggggaaagttgccccctgtggagaaccactggattagactttctcattttacatcttttattttctttttgcattgtcaaaatccttctcattttattttactttttttttttttgagacagagtcttgctctattgctcagggtggagtgcagtggtgcaatctcaggtcactgcaacttccacctcttgggctcaagagatcctctcacctcagcctcccaagtagctgggactacaggcatgcgccattatgcccagctcatttgtataatttttttagaggtggagttttgccctgttgcccaggctggtctcaaactcctgggcttaagcgagcctcctgccttccaaagtgctgggattatcggtgtgagccactgtgccaggccccatctctattttttttttaattaaaaaaaaaaagtgaggtgaggaggaggctctgagtttgagaaatttgtggttgaagtgaacatcaagcgtgactgatgaggctgggcgcggtggctcacgcctgtattcccagcactttgggaggccgaggtgggcggatcatgaggtcaggagatcgagaccatcctggctaacacagtgaaaccccgtctctactaaaaatacaaaaaattagccgggcatggtggcggatgcctgtagtcccagctacttgggaggctgaggcaggaggatggcgtaaacctgggaggcagagcttgtagtgagccaagatcgcgccacagcactccagcttgggcggcagagtgagactttgtctcaaaaaaaaaaaagagtgactgatgagggggccgggcacaatggctcacgcctgtaatcccggcactttgggaggccaaggtgggtggatcaccgcaggtcaggagttcgagaccagcgtggccaacatggtgaaaccctgtctctactaaaaatataaaaactggtcgggcttggtggctcacgcctataatcccagcactttgggaggctgaggcgggcagatcacgaggtcaggagatcgagatcatc

SEQ ID NO: 30328 - DNA, 1002 bp, Homo sapiens
gtagctgggattacaggcacgtgccaccacacctggctaattttttagtagagatggggttttcaccttgttggccaggctagtcctgaacccctgacctcaggtgattcatccgcctgggcttcccaaagtgctaggattacaggcgtgagccaccgtgcctggccgagaccaaggattttcttttttttttttttcttttgagacagagtctggctttggctttccaaagtgcccagattacaggcgtgagccaccgcacccggccgagaccaaggattttctaagattcaagctgcaggattgtgtgtcctgatgcattcataggctacatgccgagaagtttccctgatccccatctcttccctgtgggtcatcagagttaggtacctagctctgacatggctctttgcctctatctaggtgagggtcccgatgtcctggtgtacagcttggactttggtgggcatctgcggatgataaagcgagtgcagaacctgcttggccactatcttatccatggcttccgggtacggccagagcctaatggagaccttgacttggaggccatggtggctgtgtttggaagcaagggactccgagttgtgaaaattagctggggacagggccacttctgggagctttggcgctctggcctgtggaacatgtctgactggatttgggatgcacgctggcttgagggaaatatagccttggccctgggccacaactcagtggtgctatatgaccctgtagtagggtgcatcctgcaagaggtgccctgcacagacaggtgcaccctctcttcagcctgcctgattggagacgcctggaaggagctgaccatagtggcaggtgctgtttccaaccagctcttggtctggtacccagcaactgccttagcagacaacaaacctgtagcacctgaccgacgaatcagtgggcatgtgggcatcatcttcagcatgtcatacctggaaagcaagggattgctggctacag

SEQ ID NO: 30329 - DNA, 1934 bp, Homo sapiens
ttaccttatcagtgcaggagaggattgtgtctgcttggtgtggagccatgaaggtgagatcctccaggcctttcggggacaccagggacgtgggatccgggccatagctgcccatgagaggcaggcctgggtgatcactgggggtgatgactcaggcattcggctgtggcacttggtagggcgtgggtaccggggattgggggtctcggctctctgcttcaagtcccgtagtaggccaggtacactcaaggctgtgactctggctggctcttggcgactgctggcagtgactgatacaggggccctgtatctctatgacgtcgaggtcaagtgctgggagcagctgctagaggataaacatttccagtcctactgcctgctggaggcagctcctggtcccgagggcttcggattgtgtgctatggccaatggggaaggtcgtgtcaaggttgtccccatcaacactccaactgctgctgtggaccagaccctgtttcctgggaaggtgcacagcttgagctgggccctgcgtggttatgaggagctcctgttgctggcatcgggccctggcggggtagtagcttgcctagagatctcagccgcaccctctggcaaggccatctttgtcaaggaacgttgtcggtacctgctgcccccaagcaagcagagatggcacacatgcagtgccttcctacccccaggtgacttcctggtgtgtggtgaccgccggggctctgtgctgctattcccctccagaccaggtctgctcaaggaccctggggtgggaggcaaggctcgggctggtgctggggcacctgtagtgggtagtggtagtagtgggggtgggaatgctttcactgggttgggcccagtgtctaccctgccctctctgcacgggaagcagggtgtgacctcagtcacatgccatggtggctatgtgtataccacagggcgtgatggagcctactaccagctgtttgtacgagacggccagctccagccagtcctaaggcagaagtcctgtcgaggcatgaactggctagctgggctccgtatagtgcccgatgggagcatggttatcctgggtttccatgccaatgagtttgtggtgtggaaccctcggtcacacgagaagctgcacatcgtcaactgtggtggagggcaccgttcgtgggcattctctgatactgaggcggccatggcctttgcttacctcaaggatggggatgtcatgctgtacagggctctgggtggctgcacccggccacacgtgattctccgggagggtctgcatggccgtgagatcacttgtgtaaagcgtgtgggcaccattaccctggggcctgaatatggagtgcccagcttcatgcagcctgatgacctggagcctggcagtgaggggcccgacttgactgacattgtgatcacatgtagtgaggacactactgtctgtgtcctagcactccctacaaccacaggctcagcccacgcactcacagctgtttgtaaccatatctcctcggtacgtgctgtggctgtgtggggcattggcaccccaggtggccctcaggatcctcagccaggcctgactgcccatgtggtgtctgcgggggggcgggctgagatgcactgcttcagcatcatggttactccggaccccagcaccccaagccgcctcgcctgccatgtcatgcacctttcgtcccaccggctagatgagtattgggaccggcaacgcaatcggcatcggatggttaaggtagacccagagaccaggtaatatatgctcctgggcagggtgtggtatgggtcatgcagatgctcccaggcttgcaggctccacctgacagctgcatgttgtctctgcaggtacatgtcccttgctgtgtgtgaacttgaccagcccggccttggcccccttgtggctgcagcct

SEQ ID NO: 30330 - DNA, 1044 bp, Homo sapiens
ctgagggtggccacgctgccaggtgttccactcccccgggactatgggcaagggcccggggcggggagggcggcaggtgctgacactggagctgcgccggaggtcggggaactcggcctcctaagactgaggacactcgcctgctgggccggtcgagctgtgcggtgccctccgggacgcagggggcgctgcagccacgctgggtcaggctccgcagggccctcccaacccggggactaacggcgccggtgacgacttcgccgcgcgttggtcagccatggccaccgctctcgcgctacgtagcttgtaccgagcgcgaccctcgctgcgctgtccgcccgttgagcttccctggtgagcttggaccccgcgccctcgaccatccagccccctagggccggcgactgccagcccagcaccttccggcctctcgggctgcccggcccggccccgcgcccctgaccctttccctccgcagggccccgcggcgagggcatcggctctcgccggcggatgacgagctgtatcagcggacgcgcatctctctgctgcaacgcgaggccgctcaggcaatgtacatcgacagctacaacagccgcggcttcatgataaacggaaaccgcgtgctcggcccctgcgctctgctcccgcactcggtggtgcagtggaacgtgagtcctggcccgcagtgtggaaactgaggcccagagtcacaggccctcaccctgcttggtccctgcaaacttggctttcctctgtctcctcctgcagtggatggagatggggagaggctgcgtggatttgtcgtattaaatgtgcctcctccctgcacaggtgggatcccaccaggacatcaccgaagacagcttttccctcttctggttgctggagccccggataggtactggggaaggggagggagaacagaggtgttctgggccccagaaggcgacccccactgcagcctctcaacagaactgtagactagccacacccacccttccctagagatcgtggtggtggggactggagaccggaccgaga

SEQ ID NO: 30331 - DNA, 1036 bp, Homo sapiens
ctgtcagtgcaggattagggtggggtaactggcttgcctgtcccacctgaaatatctgttctggctgctgaggtgcttgtccatggcatcgagagaacccataccgcgatatttctttagccggatcccatcggaaaagaagtattcaccaggggcctcagtggtggcagccaggagagagcccatcatgactgcggacagatggagtgcttgggttagagcctaagcagcactagggagggggtcccactggccttcacgggtactgggcctcacctgtggaggccccaagggccaaggctttcgcaatatgacccacattttggattcctccatcagcaatgaccggaacaccaaagcgccgtgcatactctgacaccttgtacactgctgttgcttggggccgcccacaggccagcactgttgagatggaggaacacatgggtggatagggttaatggggacgggcagtggaccctgtggccatatttaggacccaggagcttttggctacatctgcatcaggactgcagcttggctgaggaacagacgtgtctgggatggctgctgccacatctgccttaaatagtacaaacagctgtgctgacctctactcacccccacatgtgcacgtgcatgtgtgcagtgcccagggcagcctcaggcacatgcagtcttagcagccgggaaagcccccgtccagctggtatcagatggggcaggagtcaccgtgcagttagtccccagaggcactgaggtcaggcccagcccttcctccctgaatggtgggcagctcaggcaagataagggcagtggttgtgtaggagagcaggctgtggttgtgtggagcaggcagtggttgtgtgggagagcaaggaccacacaaaggagttggtccctgaactatgcctactgcagaagatgtgggcagaaaaggtcctgcctagggaagaaggtcctgccctatcagcaccccagaaggaagagggagctatgttcttgagcaccacccccaaaccatggtctgtgtatcagt

SEQ ID NO: 30332 - DNA, 1048 bp, Homo sapiens
actcggtctcaaaaaaaataaaaaataaaacaaaacaactggccaggcgcggtggctcacgcccgtaatcccagcactttgggaggctgaggcgggtggatcacgaggtcaggagatcaagaccatcctggctaacacggtgaaaccctgtctctactaaaaatacaaaaaattagccaggtggggtggcgggcgcctgtagtcccagctactcattctcctggaggctgaggcaggagaatggcgtgaacccgggaggcggagcttgcagtgagctgagatagcgccactgcagtccggcctgggcgacagagcgagactccgtctcaaaacaaaaaaaaaacacaaaaaaaacacaaaactttatctcctacttgaacctggggtactgcatttcctcttgcgcacagcaggcatcttaacccgtgagagacaatgtgtgttcatccttgtggaggcagttgagagcatatttcatttcttttcttccttttttttttttgagacggagtcttgctctgtcacatcacctaggctggaataaagtggcgtgatcttggctcactgcaacctccgcctcccaggttcaagcaattctcctgcctcagcctcccgagtagctgggatcacaggcacttgccaccacgccaggctaattttttgcatttttagtagagatggggtttcaccatgttggccagcctaatcttgaactcttgatctcaggtgatccgcccgcgtcagcctcccaaagtgttgagattacaggcgtgagccactgcgcctggcctttttttttttttcttctgagacagagtctcactctgttatccaggctggagtgcagtggtgggatcttggctcactgcagcctcgaccagcctccctggctcaagcaatcctcccacctcagcatcctgagtagctaggaccacaggcgcacgccatcactcctggctaatatatgtatatattttttgagaccgagtcttgctctgttgccgaagctggagtgcagtggtatgatctcggctcactgcaacctccg

SEQ ID NO: 30333 - DNA, 1434 bp, Homo sapiens
atttctatagatgttgtttttgtatatgaggtatgagaatctacaaacaagcacctcttatagagttctttctcctaatcggtacacagttttctgtatctataggttccacatctgtggattcctccaactatggattgaaaatatttgggaaaaaaggatggttgcgtccgtatgaaacatgaataaacttttatcatcgtcatcatttcctaaatgttagaacaactattttcataccatttacattgtattatgtgttataagtaatccagggatgtttaaagtatacaggaagatgtttaagggatccagggctgtgcaggacgtgccttgttaacaaaatgtttacaagcagtatacttggtaaaagtcatcgctattctctagtctcaataaactggggacacagtgcattgcggaaaaccacagggacctctgctcttgaaagcggggtattgtccaaggtttctccccatgtgatagtctgaaatatagcctcgtggaatgagaaagacctgaccttcccccagcccgacacctgtaaagggtctatgctgaggtggattagtaaaagaggaaagccgcttgcagttgagatagaggaaggccactgtctcctgcctgcccttgggaactgaatgtctccgtgtaaaacctgattgtacatttgttcaattctgagataggagaaaaactgccctatggggggaggcgagacatgtttgcagcaatgctgccttgttattctttactccactgagatgtttgggtggagagaaacataaatctggcttatgtgtacgtccatccagtcacagtaccttcccttaaacttaattatgacgtagattctattgcttacatgtttttgtccttattatgatgcaaatattacaccattttatataagggacttgagcacttgtggattttgatatcctggaaccaatccctcatggataccgagggaagagtttgtaaatgtattaaaacaaagtagtggaattggaatcaaattcttttgattttgtaggtatctgtgtttagccttttcactgtgctgtgaagatttcccccccaggcatcctaggggttgatgggagatttacttaagattcccaaggctgtctagggcagaagtgaaccagttctgccttggttgtcataaacacctctgttaattagctcagttgttctccagggatagattgattctctagctagcttttgccaagaaaaatgatccagtcaataatggaattccaaataagatttcctttttatttggctattaatcagaacctgggataacatccattttctgggccctgattttactatggaatatttccataaaacatgcatgtgattactgtaaatgtcctgtaaacactcctgcttgggctggtaggtcatctttttttttttttt

SEQ ID NO: 30334 - DNA, 1029 bp, Homo sapiens
atttaatttcatttttgtaaataaataattttgaagccaaattcagatttttcatctttatgtctacttaggttgcttagacctaatgtggtagatcaggttttgtttttgttttctttcttttttttttttttttttttttgagacaaggtctcactctgtcacccaagctagagtgcagtggcatgatcatggctcactgcagtctgaattcctgggcttaagcaatcctcctgcctcagccttctgcaaagctggaactacaggcatgtgccaccatgccagcctatttttttttccttttgtagatacatggtcttgttatgttgcccaggctagtctcaaactcctagcctcaggtgatcctctcatctcaaccttccaaagtggtgggattacaggtgtgaaccaccatgcccagcctgttttcttgttttgaatccaagctttctgagggttgtcctttaggaggagaatgtaaggaattccagagtcagggaggcatgggctgtgctctgggagaggcctggggaggcactgctctggaactgcctgtaggagtggtgtcagactgccagcagaagccagggtggtgaggggagggctgaatgttctgcaagagagatttataccactattttctttttcttttatttatttatttatttatttatttatttatttatttatttattttttgagacggagtcttgctctgtcgcccagactggagtgcagtggtactatctcggctcactgcaagctccgcctcccaggttcacgccattctcctgcctcagcctccctggtagctgggactataggcgcatgccaccacgcccggctaattttttgtatttttagtagagacagggtttcaccgtgttagccaggatggtctcgatctcctgaccttgtgatcctcctgcctcagtatcctgaagtgctgggattacaggcgtgagccaccgcgcccggccctttttcttttttttgagacagagtctcactctggagtgtagtggcatg

SEQ ID NO: 30335 - DNA, 1062 bp, Homo sapiens
agatcacctgagatcaggagttcaagaccagcctggctaacatggtgaaatcccatccctactaaaaatacaaaaattagctggacgtcatagtgggcacctataatcccagctactggagaggttgaggcgagagaagctcttgaacccaggaggcggaggttgcagtgagccgagattgtgctgatgcactccagcctgggtgacagagcaagactccgtctcaaaaaaaaaaaaaaaaaaaattaaaaaatgagccaggcatggtgctgtgaaccagtagtcccagttgtgggaggctgaggcagaaggatcacttgagcccaggagtttgaggttacagtgagctattactgtaccactgtactccaccctgggggatagattgagagactgtctctcaaaaaaaaaataaaaataaccccaaacccacctttttaaattgtgaaaaacacaatataaaacttaaccatcttcaaagtcaagtatactgttcggtaataaataatgtttaacgcagtgtatggacttcagtggaatgtagaaggaattctttcagtgagccccattacgtaccatgttaaaatctactcagattaaaagccatggttcagtggagaatgactgttctgggttttgaaccttgcttttcttccctttccctagaacatgtctgcacctgggtggatttatacctaggttttaaacctttgcttctgtctttgttggaaaaaaccaaaccaccgccagcagaagccactgccctttgtttatctgtgataagtgagaatttgtaagaattttccaagtgagagaagtgttcaaagtagcttttatgtttgatagaatgtgtagtgcttgcctctcaggggtggtattttttctcccacgtatttttacctttaaatctcttgctgtatatgtgaccctggctccctttggttggtcctccagctccctgatggtcctggggctccctccatatcactggtggtatttccacattgcctgcagtttaggtaggaacctgtcccatgtcagggaaaccctatctgtcccctg

SEQ ID NO: 30336 - DNA, 1081 bp, Homo sapiens
aagaagggacctgcctgcgcagagggtatagccccaagatcctggctcttctgctctgccccacacctgacactccttcatgttctgacagctcttgtccagtctcagcctggccagcacttgttgcttaaccaatgctgttctccagttctgccttgagaattgatattctgttattgaccccagcttaactcacacatggactgctttgaccagacgtgtgagaaggggctatgggctccctcaaggtcctcatggccagcatagcttttttgagagacctgtgccatggggcccctgtctcctctcttgtggccttaggaaaccctaaagcagatagtcttgatgtttgctcccttgaatcagactggatgcctgtatacaaagctcagcccagctcttgactgtccttggctctcacagctacttttggagctgagaggaccctttctccttatcagggtctgtggggatgggtcccacagaagccaacctggccttcactcagtggatcctggcctgtcctgggctggcaacagtatgagccacccttgtctcccttgggtttggtgctggatccctgcaggcacctctcctctgacttgagtgtgggactggctgagaaatgtgattatatgccaggagatgttctaacctctcctcgaaggtggtcagggagagacatctttacatttcatgaaatgcccaggctgcccctcagatgtctcattttggtagagcctgcaaggatggcttttcatccctgcttccctttagccttcttgcctgcagacaatgtggaccttccctcagcccaagatgttggcaggctgggagcagcccttcctgggactgtgctctcagctgctggcacgggcccccaattgttcccctgagaacaatgggcactctctttggctaggaaggggagttcatgaaaggagcatttctttggatgcttgagagctttgtggcagccccgcctgtgtgagatgagctgcagtttcttcctgccttgagtgggtgttccgcatttctgaatggaccccttgtgaacaaagcacaccgggaaatgcgggtt

SEQ ID NO: 30337 - DNA, 1033 bp, Homo sapiens
tttcctcttgttagttgtgggggtgtggaaggccagacctactatgtgtgggctatgtgaggggaacctgttgctggagcctgtgggccatgtgcagtaagttggggctaactgtgaaggtaggttggcaacactgtaatagcagttatgactaccattactgaatgactgcctcatcacagacattctgctaggtgttttatttcttattccacctgcttggccattcagcttctgcaggccctgcctgtcctgactttacttactgcctggggactgactttttaaatggtaaaatggtggctaagccctgcatgcctacagcaagggctgactgtcactttaggacatgaggccctctgggtaagctgggacttggtgaacaatctagctgtgggggactcctgctcagtcctttcatttggtgccaggagcatgtcatgctggtattgatcctgcatttgtagcacttgcccgagctccttttctggagggacctctgccatctcctctcactagcacagtggttgaagctgtggagtgaattgggacactggcctgtgggctcctgcctgtggtaggggtgatagaattttggtgtctcactctctgtggttccttctgtacagatcgggcttctagtgggggtctgttgccccctagcattctcttggcccatttgtcttatattttaggttctggtcagctctgctgtggaatgggatactccctgacacatctgtgttgtgccttgggctcccaggctggccacagggctgctgtgatctctccttcctattattcgtctttacgggcacatagggttctaaagagagctttgctctagcagagacctggggcccctacttctttctaacaagagggtcacatggaggcacatgggaagcctccagggagctctagatcaccccaggatcagatcaaatcttgaatggcctggagaggcctggttgcccctaaagtgggtgaggctgctgtcagggccaacggtgaagaagagattttccctgag

SEQ ID NO: 30338 - DNA, 1048 bp, Homo sapiens
ggctggagtgcagtggcgcaatctcggctcgctgcaaactccgccttctgggttcacaccattctcttgcctcagcctccccagtagctgggattacaggcatctgccaccacacccagctaattttttgtattttttattagagatggggtttcactctgttagccaggatggtctcgatctcctgacctcgtgatccacctgccttggcctcccaaagtgctgggattacaggcgtgagccaccacgcccagcctcattattgtacttttcaacaacagaatttctagtttatttttataatttctctttattgataatctgtatctgataagacattgtcatcatagtttcctttaattttttagatgtgattttctttggttctttgaacatatttgtaattgttgctttgaagtctttgctgagttcaacatctagactcagaaacagtttctattgcttacttggttttctgtgtatgaatgggttacactttcctgttgctttgcatgtctcataattttttgttgaaaactggacattttaaggaatatattgtacaacttgttattgattctgtcctctttcagggtttgatattgttgctgttgtttgcttggtcatttgtttagtgatgtgactaaactgactctagctaaactgactctatggagtctgttttccctgaagtgtgtaacttctgatatcagatttttttcttgttttaattttttatcctaggggtcacccctgggtgagagatcaaaggtcaacaattgatgaaatcttgtgcttaagcctctttgaccagtcagatttttgcccttgaacttttggcctcaagcaatcctcctgccttggcctcccaaagtgctgggattacaggtgtgaggcaccatgcctggcctttttgtaaattctagagagggtctcactattttgcccaggttggagtgatccacccacctcggcctcccaaactgctgggattacaggcatgagccaccgtgcccggccgccaccattacacttaatggtgaaaaac

SEQ ID NO: 30339 - DNA, 1128 bp, Homo sapiens
ctgtgcttgagggggtccctgagaatgtgtcccctggacaggtcagcagcaacagcctgtgtcccccctggagtctgggacccttcttgagctaccaccccttgctcactcctgccctttgatcctgtttacaggcattttgggcccctggagatgctggtgtggtgtttgtgggctggtggcatgagcccttccggttgggcatccgcttttgcaccaatcgcaggtgagggagtggggcaaggcaaggggccttgcagcccagctggccttgagactgagtgtctgtctcgtggttccaggtcagccctgtattatgtggacctcatcggggggaagtgtggtaagtggctgatgcccacctgtgctttgctgacacatgttggccctgccagcctgcgtgatgctcatgtttccatctggcccagagctcctctcggatgactccctggctgtctcttctccccggctgagcccagaccaatgtcgcattgtctacctgcagtacccatctctgatcccccatcaccaatgcagccagctgtgcctggtgagctggaggtggcagggatgggagggtggtcagcaagaagatgggatggtggatgagagctgaagggccagtatcatctccccataggccctcagtaggtgcccttctgtcctcaatgcagcagcggtgtgagttctgcctgtcctctcaaggagggcctagaggttgagagtgctgccatggagagctttgcactgttggggcattccaccttgagagaatgctcgtctgcaagaatgctcctccccttggctctcaactgcatgtagccaggctctgcaaggggctgggatatagtggggagttacacaatcccagaccctccccaggaagagctctgggcccctggtaaaagtcagagggacatgcctatctgaggccccttgggcatctggtccaggtcaccagaaaagagatacatcaggcttattccagttcccccatctcctggggctacctgaggcaaaaggggataggcacagggcactgtgccctaagggaactgcctgtcccctactggacctgaccattgtgttctcttgcagtatgactggtataccaaggttacctcagtg

SEQ ID NO: 30340 - DNA, 1021 bp, Homo sapiens
gtgtgatgttagatggaggcttttcatatatggtctttattatgttgaactgccttcattctctgcatcttcagcactaactcacctgtgtctttctaatcccattattaatggagagattcactcctgtaaaccagcactttgggaggctgaagcgggaggatcacttgaagccaagagttcatgaccagcctgggcaacccatctctacaaaaaaaacaaaatttaattagcggggcatggtgacacatacctgtagtcccagctactctgaggtcaggagttcaagaccagcctggccaacatggcgaaaccccatctctcctaaaaatacaaaaattagcagggcgtggtatcacatacctgtaggaggatcacatgagcccaggagttccaggttacagtgagctgtgattgtgccactgcattccagccttgacgctatatgtgcccaaaagttatgctctctccttctttctctgtcttagctgctacatcttccccttcatctccctccagcacaggctcttccccatctctgaaatagtctcaccagggtctctgtctgcccccatctcaatccggccggcacatttccatctcctttgcattgataccttagctctgatggggccattgccagcccctcaccagacacagtcttcgctggccttctgtagcagcaggatcatcgctgcctaggtttgcgcctaggccctcccctaacctcttgcttacatcttctcctcagttccttgggctttagggcacatcagagagctggtgtgaagcccaggtgctgtgaccgcactccaagacacacgggtgctgtgggtctgggctggggcctgaggcctcattcttgcctgggctcctttgtgagaccctgacatagactttgtggaaaccacattgtggggagcagggccctcagcaggttttgtctgtttcctgtgacctctgttccaccagtcacactgccccctgctttcccaccaccttctcctttgcactccagatc

SEQ ID NO: 30341 - DNA, 1043 bp, Homo sapiens
gagcccaggtcagggctcctgccagggcctgtcatcccttcacagtgagcctgtgccttagcccttgcacagccaccaatgaatgctttgcccgatgtccccagatgccaccctgggtccaggctggccttgggagccagctctagagcctgctacccaagtccacccaccctgctgacatgcctgcctctggagcccccactcccagccgacacgtctcacttcccacccttgcaggctatgaagagaccctgacccgcctggctgccattctcgccaaacactttgccgacgcacgcattgtgggcactggtgaggggcccctacagagggtacagggggagggggatgggatggcacctctggtcggctttcttctatgaaaaatgtggccaggtgggcatgaagtatgggtccagggctcatgccaagcccctgctgaggcacggtgtgtccccgcagacatccgagactcactgatgcaggccctggccagctacgtgtgctacccacactccctgcgggctgtggagcgaatccccgaggagcagtgagtggggcctggggggcacacaccctggccacaagcaccatgcccagcctcaccccgtctctcccctccttgccctcacaggcgtatcgccatggtgaggaacctcctggcgccctatgagcagcggccctgggcccagaccaactggatcctggtgcggctctggagggtaagcctgactcgaggggaagtggctgaggctggctggagggagagggtgcgctgtcccattgacctgggcactgacccccacctccacagggctgtggcttcgggtaccgctatacacggctgccacatctgctgaaaaccaaacttgaggacgccaatttgcccagcctccagagtgagtatctgggttgggcgagtcctgggcaaggcaggcgggggcgcttacctcctacccatgggttctttcagactctccacttcttccagcccctctctggttcccccattgggtcccagactccctacgtgtcccctgggg

SEQ ID NO: 30342 - DNA, 1082 bp, Homo sapiens
atcttggcttaagcaacctctgcctcctgggatcaagcctcgggatcctcctacctcaacctctgcagtatttgggactacagacacctgctaccacacccagttaattttcgtatttttttgtagagatagggtctctattgatgtgcatttaggctttataatatttatatatatattttttgaaacaaagttttgctcttgttgcccaggctggagtgcagtggcatgatcttggctcactgcaaccttcgcctcccaggttcaagtgattctcctgccttagactcccgagtagctgggattacagtttttaaaaaatgtatcctaggctgggcgcagtggctcacgcctgtaatcccagccctttgggaggctgaggcgggtggatcacctgaggtttggagtttgagaccagcctggccaacatggtgaaacctcgtctgtactaaaaatacaaaaattagctgggtgtactggcgggcacctgtaatctcagcttcttgggaggctgagacaggagaatctcttgaacttgagaggcggtggttgcagtgagccattgcactccagcctgggtgtcaagcaaaactctgtctctctctctctctgtgtctctctctctctctctgtgtgtgtgtgtgtgtgtgtgtgtatatgtatatatattctgccaatattttgtgattagagagtttaaagtatttacatttaaagtaattactgataaggacttttgccattttgctactacttttatgtttagctgatttttttttttttggtagtgaaaaaaaattttttttttttgagagcatgagactgttgcctaggctttggtgagcaaaatagtgcagtgccacaatctcagctcactgcaactttgggctcaagtgatcctcctgtcccagtctcctgagtagctggtagtataggtgtgccaccaccatgcctggctaatttttgtattttttgtagagatagggttttgccatgttgcccaggctggtctcaaactgggttcaaacaatctacctgccttagccttccaaagtgttgggattacaggcattagccacttt

SEQ ID NO: 30343 - DNA, 1080 bp, Homo sapiens
cccttagcctcctgagtagctgggactacaggtgtatgccaccatgcctggctaattattgtatttttttttttagtagagatggcgtttcaccatgttggccaggctgatctcaaactcctgacctcaagtgatccacctacctcagcctcccaaagtgctgggactataagtgtgagccaccgcacctgccatttggattggcaatctgcaagattttattacttaaatgcaacagatgttctcattcattgttctgaagcttggagttccaatgaaaaatttaggtggagaactgagtttagaaaatccatataatgtttagtaaaactagtatttcataaatgctgaatgacagagattggtctttaaattaaaacaacagtgtgatgttgggtattttttttctttcaaaatactaaggattagatcagtggtcagcaaactacagctgatagcctgtttttgtaaataaagttttactggaaaacagccactcttactcatttgcagattgtgtatggctgctttcatgctatgatggcagagttgaatagttgtaacagagattgtataacccacaaaatccgatatgtttacgaactggctcttcatggaaaaagtttcctgacctctcatctagatcaatggggttgtacgttaccatttaaaaatatttaggttgtaatctatcctcttattacttgtatttatgggtaactattttgtaagtaaggctgtttcgtatagaattaacgtggtttaggtaagcattcagaaatgttaggttaatttagctttattgtctaacttttttcaaatttagaacatttgtctttgactcgtttaaacttatttaaaattatattttcccaccttaattttagtttaaatgtaagtcattatatgctgttttttaacatctttgactaggagggagacagtttttgggaactaatttgaaccaaaacagatataggaaaatgattttgttacatttcctttgaacttttcttttaaaatttgtttttatttggttgaaaataattttcataactactgatattttatattagtaga

SEQ ID NO: 30344 - DNA, 1341 bp, Homo sapiens
aatatgctggtgtgtagatttcaaactctctggacaatatgaataacactgtctttgtttctacagtgggagccaagaagaaaggtttgctcccgggtggaacagggattatcctcctcctccccttaagagtcatgctcaagagagacactctggcaactttcctggcagagattcacttccctttgatttccaggggcattcggggcctccttttgcaaatgtagaggagcattctttcagctatggagctagagacggaccgcatggtgactatcgaggaggggagggacctggacatgatttcagggggggagatttttcgtcttctgatttccagagcagagattcatcacagttggacttcaggggtagggacatacattctggggattttcgggatagagaaggaccacctatggactataggggtggagatggtacttctatggattatagaggtagggaggcacctcatatgaactacagagacagggatgctcacgctgttgacttcagaggtagggatgctcctccatctgacttcaggggccggggcacttatgatttagattttagaggccgggatggatcccatgcagattttaggggaagggatttatcagatttggattttagggccagagaacagtcccgttctgattttaggaatagagatgtatctgatttggactttagagacaaagacggaacacaagtagactttagaggccgaggttcaggtactactgatctagactttagggacagggatacgccacattcagatttcagaggtagacaccgatctaggactgatcaggattttaggggcagagagatgggatcttgtatggaatttaaagatagggagatgccccctgtggatccaaatattttggattacattcagccctctacacaagatagagaacattctggtatgaatgtgaacaggagagaagaatccacacatgaccatacgatagaaaggcctgcttttggcattcagaagggagaatttgagcattcagaaacaagagaaggagaaacacaaggtgtagcctttgaacatgagtctccagcagactttcagaacagccaaagtccagttcaagaccaagataagtcacagctttctggacgtgaagagcagagttcagatgctggtctgtttaaagaagaaggcggtctggactttcttgggcggcaagacaccgattacagaagcatggagtaccgtgatgtggatcataggctgccaggaagccagatgtttggctatggccagagcaagtcttttccagagggcaaaactgcccgagatgcccaacgggacct

SEQ ID NO: 30345 - DNA, 1034 bp, Homo sapiens
gcactgtcaccagtgctggagtgcagtggcgcgatatcggctcactgcaacctccgcctcctgggttcaagcgattctcctgcctcagccatcggagtagctgggattataggcgcctgccaccatgcccagctaattttttgtattttttagtagagacggggtttcaccatgttggccagcctggtctcaaactgacctcatgattcgtccacctctgcctcccaaagtgctgggattacaggcatgagccactgcgtccggcctatattttatctttaaatgatcagcagaaaccttgtaagctgaagactgcaatcaacagcttatgtcaagtaaactatagagcagtggttctcagagtggatcctggaccatcatcatctctttaccccttgggaacttgttggaatccaaattcttaagccccatcctaaacctactgaatcagaaactctggggtggggcccagtagcctgtgcttttaagaagtcctccagatatttttaatgtaccctgaggaccactggcagtagataaagtgtttgtttagattctttattctagaacttttgtatagtttaaaagtgacttaataataagcaagtggaccttttgtaagtagacaaagctaatgcttatgtgctttaggagccagtgctgatcacatgccttgcctacctaatatcagttctcctgctctgcatagcaggagaaggagctggagtagtgttggtactatcttatgactttagttatatgtaactaaggacatataacttagttgttttttctgtttatatatagtatacttcctccagagatcttggaatggttgtagatcttctcattcacacagtgtttctgtgacatatgaatgcaggcagaattgcttttgatttttaggtttgtttgcatactacgtagtatataagcttgctgtgatatttttccaaaagggatttatatcatttaagcaaaaatgatacagcttctggattatgtttcctaataaggctcaaacatagaaagta

SEQ ID NO: 30346 - DNA, 1658 bp, Homo sapiens
tcttgatctcctgacctcaagtgatccgcccacctcgacctcccaaagtcctgggattacggacataagatactgtgcctggctgagtttgtaaatttctttctttcttttttcttttttttttgagacagagtcttactctgtcacctgggctagaatgcaataatgcgatctctgctcactgcaacctctgcctcctgggttcaaacaattcccctgcctcagcctcctgagtagctgggattacagccgcctgccactatgcccagctaatttttgtattttttgtagagatggggttttgccgtgtaggccaggctggtctagaactcctgacttcaggtgatccacccaccttggcctcccaagcgtggggattacaggtatgagccaccacgcccggtcatcaaagataatgtttttaatgatcaggagcactttgagatgtttagaacaatctgaaacctgatttccaagccatctcaaaatatactttggtaatcaagacagggaaatgatggtgttatatcatttgtgggactcaactgattttgttgagtattgattttgctgtgggattccttgttctcttggttgtgttgggcctactgctttttaaaaaagtattttgagacagggtcttactctgttgctcaggctggagtgtagtggcgcagtctcttgtctctgcaacctcaatctcctgggctcaagggatcctcccacctcagcctcccaagtagctgggaccacaggtacccaccatcacacctggctaatttttgtattttttgtagacatgggggtcactgtcttgcccaggcaggtcttgaactcctaagctcaaacaaccgtcctgccttgccctcccaaattgctggaattacaggtgtgagccagtgcgcctggccttcttttttttttttaaccactattttttagaactagatttggcctggaaagagaaaaaagatattcctcgacttgatctatatattttatggttcattcatttgctttagaggtagaaggagcaggaaaaagtacaacaaaacaaaatcttacctttggtgtttaatttgaatgcccacagatgcttttgcatttattagtagtgagttttcataattatcaaatatgtagtagaaaaatctggctgtgcatggtggctaatgcctgtaaatccctatatgctgggaggctgaggcaggtggattttctgagctcaggagttcaagaccagcctgggcaacatggcaaaaccccatctctgccaaaaataagctgggtgtggtggcacacgcctgtggtaccaggtactccggaggctgagctgagaagattgtggaggtttcagtgagccaagattgcaccactgcactccaacctgggtgacagagtgagactccatctcaaaaaaaagaaaaaaaaatctccttgtccaggagctgtgttgagtgggctgtggactagcaggaattcatagctctggtgaaagatgactagataatgtcattttttttttaaaagtccctgaatgattgtgacagggtaggaaaatcatcacatagcaaaatcttcattagattttccctaatgacttatcaactgggtttgtgcaccaaacgaaacaacttcctgcctttgtttgtctgaaa

SEQ ID NO: 30347 - DNA, 1029 bp, Homo sapiens
gttctggttgatccttctgtcatgcctgcaccatcttttctgccagactgaagtgttcttgcttggggaaaagcagatttgcaaaggttctctttttcctgattgttgctttgcagattgagtatatttgtttgtttgtttttaagtgaacaaaagttgaatgagattgattactggctctttaaagaataattactcccccttttgacttatgtagcatcttgaggtgatctatgaccgtttgtacttgtcatgacttccattagattaaactctggggcaaagacgttgctcttcattgtgctcatatgacaccattactgccagtggaattgaaataaattgagtaagggcgagtgtttcctaacaaatgttatcctgggcctgaggaaccatcatcaagatggagtggccctgcgattaattttggacttaaagcaaaaaacaaacaaatttttttctttaaataaccagttggcacagatacagaataaaataagatagatccacgtgtagtttttgaaaatttaggtcaggtggctcactcctataatcccagcactttgggaggccaaggcgtgtggataactcgaggttaggagtttaagaccagtctggccatcatgatgaaaccccatctctactaaaagtacaaaaattagctgggcatggtggcgcatgcctgtaaacctagctactcaggaggctaaggcaggagaattgcttgaacctggtaggcggtagttgcaatgagccgagattgcgccactgcactccagcctgggtgacagagtgagactctgtctcaaaagaaaaaaaaatttaagaaataatcatcagtgtatatcttccttttttcatttttctttaaaaaaaaaaacaacccttgtatgcatagctgaaggagaaataattgaaagtgtttataagatttcaaggtgatgggctggacacagttgctcatgcctaataatctgcacgcctgtaatcccagctattcgggagcctgaggcaggagaatcacttgaa

SEQ ID NO: 30348 - DNA, 1030 bp, Homo sapiens
cttactttcataggctagtttgctaattgctgaaaatccttatggcacaaccatgagtcttgaacacacagaataccttttttttttttaacgttttaggcagtatagttaaaccttaaatttctgttcttgtttgatagctaaagtttcagtcagaataaatttagtgttgggcttgtgaatataatattaaatctgaagtatgttgtcaacatatagtattgcagggttgatgtctagaaatgctatattagatgctcataatgttttctgtatctttttcttcccaatgtctacttgtcctttagcaaagtatgaacgttgtcatgaatcttttctctctgtccacagattctgtgtgctcctctgggccacagtagttacttctttaagcacagaaaggaaacttagggctttgccagttttagtattagttctctatgtttttcatccgggcagctatggagagggttgctttccacacacctgggtactccattgatatgttctgtagaggtaatcaacacactagagagtacacctgtttgttccatggctaaccctttctgattgtagacatgcatttgagtgtttgcagtggatatttggtgctaacaggtgtcttagttccttctgttattctgtaatgtttcccaagaatattcagagctgtttataaaatgcagagtgatttatgtattaggtgttcaatgagtttgatcaagaagattcacttgaaaggaattaactaacaaagcagtttccattgttaataggatatgcatgctgtttctctaaagtatttttatttcttcaaagagttattaagcagaggagactgattttgtggtaagtttggaggggttagttttaatccacgttggtcaaaactaaaagtagattagaaaatctatttctcatcctacagtagtgctgaggtttctagtagattgtttttcttcttcctagtcattttctgaaactcaaaacaagaatcaacctataccattgtaatgtttcacagttaact

SEQ ID NO: 30349 - DNA, 1045 bp, Homo sapiens
ggttaaaatgtttcgggtccccacgtgaactctctgtgggattacccaattctggggtaccttcaccagatcaccagtgctaaagagggcaaaggatcttcttggttaatagaaaaggctgttttggaatgaatctcaaagtccagaaacatcgagacttttcttcaatacttttttctatttggggtagcaactttacctagtgtaggggagggaggggttagttgggagggcttgtgtttaaggggttcagaaacaggggatttaagtgtgtcttttgtgtttgcaaggcactaacaccactcccgtctgtatttaaatgctgtccccaggttacgactatggctatgtctgcgtggagttttcactcttggaagatgccatcggatgcatggaggccaaccaggttgctttatacttcggtcaaatgatgctggaaggatatatttttttatatatggggagggagggtttcaaatgattttactttggaaaggtacaagaagtctatctgtggagcatactgtattccaaccatcggttgtgaggaaaatctttaaaaaggctggaaagctttctctacaaaacttaatgggcacagagtgcattttaaaagctagagcccagttgcttttggactagattccaaagacaatagttggaaaaaaaaaaaaaagacacatctggagtgtttccttttggagtgtgactgagatggtaatcctgatgcaaagaatgatccttgattgtctgtgaccccaaggatctgcctagcacagaaattctaggtcaatagttacacccagacctagggtgaagacctctgatggtgacttctgtggcatcagatcctgcctgcaggggctacttccaaaagagagctatcagggaagagagaggagtggattgttggtgtctattgcattcatcattgttttttgccaattggagttgcatactcaagtccttggctgcgtatagtcagagctggtgaatcagaatctgtactcaccttacgtttgaactatctggagttactcagctt

SEQ ID NO: 30350 - DNA, 1025 bp, Homo sapiens
tcttgtttcccaggctggagtgcaatggcgcaatctcggctcaccacaacctccccgtcccgggttcaagcaattctcctgcctcagcctcccaagtaattgggattacagccatgcgccaccacgcctggctaattttatattttttagtggagaccaggttcctccatgttggtcaggctggtattgaactcccgacctcaggtgatctgaccacctgggcctcctaaagtgctgggattacaggcgtgagccaccgtgccaggcccacccagattcttcttagcacatttgaatgcagatttttgaatagttatgatctattctcattgaaaaagggacatcatttgacttgacctcccaccagactcttcctttgaggttggatggaggtgcttaatggatgctgtggatggtgtgtgaatttccattgggttgagtggatgatgtatgtggaaggcgattgggatttactttgtcggtgtctccaagaggtcccccactgggctttgtcaggtgctggggttggaggtcaagaagtagggcaacatctaaagcttctactcctgggcactgtgaggtttttataggtcttttaaaaaaaacagtgaataggccgaacgcggtggctcacacctgtaatcccagcactttcagaggccgagggaggcggatcacgaggtcaagagatcaagaccatcctggcctcgtggtgaaaccccatctctactaaaaatacaaaaattagctgggcatggtggcacatgtctgtagtcccagctactcgggaggctggagcaggataatcgcttgaaccctggaggtggaggttgcagtgagcccagatttcaccactgcactccagcctggcgacagcgaggctctgtctcaaaaatatgttcttccatgagacagcgggcatttggatgcctgatacaaaaagaggagggactatgtgctagtcagctttagactgagaagcagcagcaaccatggcaaaggggaagcaaactttcctgagtggc

SEQ ID NO: 30351 - DNA, 1050 bp, Homo sapiens
atattactgttactgacttctagtttaattctattgtgatctgagagcatatattattttttctgtcattttaaactggaaaaggtatgttttatggcccataatgtgctgcgtgagcttgaagagaatatgtagttcgctgttgctggatgaaatagtctacaaatgttgattagattgctgctgttattttgatgcgtatccttccagatttttctatgcatgtatcatctatctgtgtatctatctgtaggataggagagtcttgtacaaatggttttataactctttaacttcaaatattgtggacttacttccttgtcattaaatacatttaaggctgggtgcagtggctcatacctgtaatcctagcactttgggaggccgaaacaggcagatcacctgaggtcaggagtttgagaccagcctagccaacatgttgaaaccccgtctctactaaaaatacaaaaattagctgggtgtggtggcacacgcctgtaatcccagctgctcaagaggctgaggcacgaaaatcggttgaacccaaggaggcggaggttgcggtgaaccaagattgcgccagtgcactccagcctgggtgacagagcaaaactttgtctctaaataaataaataaacaaataaaatacatacctatgtacatacatacattttaagaatcattttgatatattcatctccatactgaggaatttaagtgcttttttttttttttttttttttttttttttgagacagagtctcactttgttgcccaggctggagtgtggcggcacgatcttggctcactgcaacctctctacctcctgggttcaggaaattctcctgcctagccgggtgagatttcctctttagcttgtgtgttatttagaagcatgtttttgtacctatcgtagcttctctagagaagggaggtaggagaatcgcttgagcccgggaggtcaaggctgcagtgactgacccatgaccatgccactgcactgtagcctgggtgacagagtgagcccctgtctcaaaaaggaaaaaaaag

SEQ ID NO: 30352 - DNA, 1034 bp, Homo sapiens
gacttcaggtgatccacccatctcagcctcccaaagtgctgggattacaggtgtgagccactgctcccagccgggtgtgatatttttaataaaacaagtattcaaattcacttacaggaccaatgaaagaatcgtttgtcgtaattttatgccaaagggtacttgtggcttaagataaacttcccataatgacattatccacagattcaaaaagtagtttatcttaaacaacttctgtgacattttaaaatgatgtggcttagaaaattgctaggttatctaaaatggctctattgatgatgtaaatgtagcacatgaagagcttgaataaaatagacttttgaagtgtgcaaatggaaagaacagtccttctaaataattatttcccctcccttttattgacgtatacatacagaaaagatatcatgtcgtaagtgtattgcttagtgaattactccaaagttggatatacctggttaaccaccacctgaatgaaaaaaacagaacactgcttcatatggagaagcccctcctgcccctcctggtcattgtccttttcatccctcccacaggtagtcactgagttctaataccacagagtcttttgactttcttttgagccttatgtaattagaatcacaaaagatgtattcttttgcctgacttttatacttagtattgtttttgaaattcatcttgtgtgtaactgcgatttgttcattttcattgcttagtgaattattccaaagttggatatacctggttaaccaccacccgaatgaaaaaaacagtttttggccgggcacgatggctcacgcctgttatcccagcactttgggaggctgaagcgtgcagattacgaggtcaggagatcaagaccatcctggctaacacggtgaaaccccgtctctactaaaaatacaaaaaattagctgggcgtggtgacgggcccctgtagtcccagctactcaggaggctgaggcaggacacctgtaatcccagctacttgagatgctgaaacaggagagtggcgt

SEQ ID NO: 30353 - DNA, 1050 bp, Homo sapiens
cccagagacatgtttgcatttgtttctgtcaggtttcctggctcaactggcaccctttaaggccagagaacgttagtttaggcacttttcctagtaaaatacttcttgtggctcttcctgtgtacttggaataaaggaggcattccattgttagacatgcttgggtagttcagggtaatcttagagtcatgagagatatgatataaaggaataactagctaaaccagaaaaaatgcctgggtaatgactagcaaataggtggtcaacagatgtcctcattagattgaaaggtccatgaaagcagggactatttcttttctttactgcttaaaaaggttagaactggacctggcaacatatgatgagctaaataaatacatatttgtgaattgggttaacacatattgcataaagtggttttggctctgttttattcttcataagccctagtgatctttttaatttctgtaaaatgtggtcttgacccccccaacccaagtgacctccttatttgctaggctctgatatttctgttaggtttctactgtattttctgagatagcaattagtagatactatttctcctttgatggagctagccatatattcttgtttgttcattttagctttcaaatttctgtctgattcttgttcttttactctggaatgtagtgaatggaatgacttggaaggtacaaggtaggtcagtttaggttgtctagggccttgcatttaaaagtttaatttgatgacatggtggattacaagaatgtaacagtatcaaaatgatactatcttcttgtggtggtatgtagacttaaaaagagaaactgcagagaaaagggtcccttaggatgtagagcagcagttgatatgtgagaagttgatgccttgcattagggattaggagtagatgtggaaggaagagatcaggtttgaaagagtttaaacaaagaatctctaggatttgataacactggatatcagaggggaaggtacaagagagagggcagaatcaaaggccactcagaggttaaaggaatcataccg

SEQ ID NO: 30354 - DNA, 1077 bp, Homo sapiens
tgagtaagaccatcagagaaatgcaaatcaaaaccacaatgatataggtggctcacgcctatatgtatctcacaccagttagaatagtgatcagtaaaaagccaggaaacaacaggtgctggagaggatgtggagaaacaggaacacttttacactgttggtgggactgtaaactagttcagccattgtggaagacagtgtggcgattcctcaaggatctagaactagaaataccatttgacccagccatcccattactgggtatatacccaaaggattataaatcatgctgctataaagacacatgcacatgtatgtttattgcggcactattcacaatagcaaagacttggaaccaatccaaatgtccatcaatgatagactggattaagaaaatgtggcacatatacaccatggaatactatgcagcaataaaaaaggatgagttcatgtcctttgtagggacatggatgaagctgtaaaccatcattctgagcaaactatctaagggcagaaaaccggacaccacatgttctcacttatacgtgggaattgaacaatgagaacacttggacacagagcggggaacatcacacactggggcctgtcgtggggtgggggaggggggagtgatagcattaggagatatacttaatgtaaatgacgagttaatgggtgcagcacaccaacatggcacatgtatacatgtgtaacaaacctgcacattgtgcaccatgtaccctagaacttaaagtataaaaaaaaagacctactatttgataccacaatagggtgagtatagtcaataatgacttaattgtacattttaaaataacataaaaagaaaaaaataaaataatgcagagtataatttgattggttgtaactcaaaagataaatgcatgaggggatggatactctattccccatgatatgcttatttcacattgcatgcctgtatcaaaacatctcctgtactccataaataaatacacctactatgtatccacaaaaatttcttaaaaaaggatacttttgagcgtttcaagcattacttctagttatgttcagttgatc

SEQ ID NO: 30355 - DNA, 1542 bp, Homo sapiens
catttgagcccaggagttcaagaccagccggggcatcataggaagaccccatgtctgcataaaataaaataaattagccagacttggtgacatgcacgtattgtcccagcttgtcaggaagctgaggtgggatgattgcttgagctcaggagatcaaggctacaatgagctatgatcatacaacaccagtgcactctagcctgagtgacagagcaagaccctgtctcaaaaaaagcaggggggcatagtcacctccctaaaatattagttgaacagtatgtattcagaagtccagaggctctgtattttattaatattttcaaggcactatttctgcagaaatcaagtcagcaagactctttgaggacgttacaggcagaggggctaaagatacctttgaggaagctcaagtacttgggtgggaggtgatagataaagggtcagtagaaataatgtctctttttattttttttcccattaaaaaattttgttttaatagcaatggagatggggtctcactgtgttccctgagctggtctggtctcgagctcctgggttcaagcagttctcccaccttgaccttctaaagtgtagggattatagacatgagccaccatgcgtggcaaatttcttttctttcctttttttttttttttttttgagacagagttttgctcttgttgcccaggctggagtgtggtggcacgatcttggttcactgcaccctccacctcccaggttcaggtgattctcttgcctcagcctcctgagtagctgggattacaggcgcccgccaccatgcccgggtaatttttgtatttttagtagagatgggatttcaccatgttggccaggctggtcttgaactcctgacctcaggtgatccacccgcctcagcctcccaaagtgctgggattacaggtgtgagccaccgctgccggttccaatgtctcttttggatggtggatcctgaagaatagctgctggttctttggggatgcctggggaatactgtgcaggctttgtgatgggctcagcagtgaggcctgtacagtatcttaggtcttgtgggcctcagtctgctctcttggctgttctctaccacctcctgccattaagtttttaagaaaaaggaatagttttattatattctttggtaaacaaagcaaattaagaagctttatattttccacatttatttaccaaactccctatttgtttttctctatagtgattcagtttagagacctattcaatgaagcatgccttgatgttgaatttagagtctactttttccagaagaaaagagccagggagctccaatagtagtcatctcagaatataaaagtgttatagaaatgatgtaaatcaggccgggtacaggggctcacgcctgtaatcccagcactttgggaggccgaggcgggcggatcatgaggtccggagatcgagaacatcctggctaacagggtgaaaccccgtctctactaaaaatacaaaaaaaatcagccaggtgtggtggccggcacctgtagtcccaac

SEQ ID NO: 30356 - DNA, 1125 bp, Homo sapiens
ttgactcccacctgctgatgctggtcttttttggttcctagggcttataatgatcaacatttcttgagccctcactatattctatgctaagctctttacatgtatgaatttacttaatcttcacaaccaccctaagaaataggtactgttgtccttactttacagatgaggaaatggaagcacaaagaagttaaggaccttgctgaaggtcatggagtagaggcaggattcaaatttagggaactcagcctacagtccatgctcttaaagatgttatatcctgtctctgggcttagaaggggttcatcttaggccggacacagtggctcacgtctgtaatcccagcactttgggaggccaaagcgggcagatcacgaggtcaggagttcgagaccagcctgaccaacatagtgaaaccccatctctactaaaaatacaaaaattagccaggcatggtggtgtgcgcctgtagtcccagctactcgggaggctgaggcaggagaattgcttgaacctgggaggcggaggttgtggtgagccgagatcgtgccactgtacttgagagtgagtgacagagcaagactctgtctcaaaaaaaaaaaaaagacggccaggcgcagtggcttacgcctgtaatcccagcactttgggaggccgaggtgggcggattacctaaggttgggaattcgagaccagcctgaccaacgtggagaaaccccgtctctactaaaaatacaaaattagccaagcgtggtggcatatatctataatcccagctactcgggaggctgaggcaggagactcgcttgaacctgggaggcggaggttgcagtgagccgagatcacgccatagcactccagcctgggcaacaagagcgaaactctgtctcagggaaaaaaaaaaaaaaaaaaggagggggcgcttcatcttgactaacttcctgcattggtggagcttgatagagtggtccttcccagatccttccctgcatacagagcctgtctcttttctgattggtccctaaggccagattacctgtccctaatactgagcagaagctggtgaatgaaacaggagatccctcagtcaaaacaaaaggaaaaagaaaaatgaaacaggagatc

SEQ ID NO: 30357 - DNA, 1086 bp, Homo sapiens
gtgctcatccagagagaggcatctgtagatgcacctatttgtgttggtcaccctaattcttgggttcttgatgagtctccagtaagggcttcattggacagagactaacattggctctgatcttgttacctttagcatcatctgactgctacatatatgattctgctactggctactattatgaccccttggcaggaacttattatgaccccaatacccaggtgagtttggggcttttttttttttttttttttttttacctctgtcaatgattcttttgagaaaagcacccataatttgctacttgaggattttattccctggattctctggatgctcattgcatgaaaagtggaaaagtttagatctatggaaacagaactgttgcctatatggaaaatcagtgccttgtggcaatacaggtaagaacagtgttgctcttgaaaaagtggacagtgggtggtctgaatgtgtcctggtccctggagtgggtttttagattgatgtggactcttcttagacttgtaagtaaaaaagttgtttcttcccctaaaagggaactgtgcgccttagacctggaattgctgggaaactgaaacattctgtagacttacttgtttccaactgtatcgcagcaagaagtctatgtgccccaggatcctggattacctgaggaagaagagatcaaggaaaaaaaacccaccagtcaaggaaagtcaagtagcaagaaggaaatgtctaaaagagatggcaaggagaaaaaagacagaggagtgacgagggtaagaggaattgttaatttgctgtcttttgccacatagttattaaaatgttggaggtacgaacagaggatatctatgtttgcaagtgtaaagtaactttaaaaatactctgtcagccgggcgtggtggctaacgcctgtaatcccagcactttgggaggccaaggcgggcggatcatgaggtcaggagatcgagaccatcctggccaacatggtgaaacccctgtctctactaaaaatacaaaaattagctgcgtgtggtggtacacgcctgtagtcccagctactcaggaggctgaggcagg

SEQ ID NO: 30358 - DNA, 1058 bp, Homo sapiens
tttttggtccattttccagtaggcatgatacccttgagagtagatgagccagggatgtacttaatttcaccctttaaaattgggtgaaattcgagtaactgctttcttcctgtttttggtcactaagatctgaatcagggatgaagggataatatgtagactctaggcttgacaaaatgcaaaaataaacttggacaacatgactctttcttagaaatattcaacccaaatgtttatttcagatttagcatacattcctgagaattatcattacatttagggatgtaggtattttcccagtggttatcttagtaaactggaatttggtaatactttttaacactttaaactatttggattatcttataaactgatctgtgggccgtgtgtatttttaactatgtcttttaaaggtacaaaatgtgactgactttagaatgaaaattattttccctggcagagtgagtagaacagagcgtagtggaagatacggttccatcatagacagggatgaccgtgatgagcgtgaatcccgaagcaggcggagggactcagattacaaaagatctagtgatgatcggaggggtgatagatatgatgactaccgagactatgacagtccagaggtgagtgaccagcggctgtataaccccccaaaacactctgagccttatagtaatagaaataacagccaggcagccaggtccagtggccccttcccataatcctatcactttgggaggccaaggcggccagatcacttgaggtcaggagtttaagaccagtctggccaacatagtaaaacccgtctctactaaaaatacaaaaattagctgagtggggtggtgggcgcctgtaatcccagctacttgggagactgaggtaagagaatcacttgaaacctgggaggcggaggttgcagtgagctgagattgtatcagtgctctccagcatgggtgacaaagcaagactccatctcaaaaaaaaaaaaaaaagaaaagaaataatggccagggtttacatagggatcaccatgtacttttgagcacttgacttca

SEQ ID NO: 30359 - DNA, 1130 bp, Homo sapiens
gtgcttgagcccaggagttcaagtccaacctggacaacatggtaagacgcatctctccaaaaaaaaaaaaaaatagccagtcttaatggcgcttgtctgtggtcccagttacttgggagactgaggcaggaagatcacttgagcctaggaggtcaagggtacagtgagttgtgttcacgccactgcactccagcctgagcgacagagcaagaccctgtctcaaaaagagggtcatgtcggaaaaggtcctattgaaagaggtctgcctaagagctcttgaaggttatttaaaggaaattgttactagtggagggtaaggaatcttctatttttatttttgtgagacagggccttactctgtcgcataggctggagtgcaatcgcgtgattgtggctcacagcagcctccaacttttggggctcaggcaatccaccagcctcagcctcccaagtagctgggattacaggcatgtgtcaccactccgagctaatttttttttttatcgtttgtttttttttttgtagagacaaggtctctctttattgcctagactggtcttgaactcttgtcttcaatcaatcctcccgcctgggtctcccaaagtgctaggattataggcgtggaaaactaagggaatggtgtggtagatgggcccttcaggcggaggggtatcacatgagcagggaatagaaaggtactgaatctagataaggcctagcaatcggcttgatttggctggagtcagaggcttttggcaggagagggatgagtggcaaagtgctattgtggctaggggctagagttctcaaaagtctagctaagcctaaaagaatattactgagggttggccaggtgcggtggctcacgcctgtaatcccagcactttaggattctgaggcaggcggatcacaaggtcaggagatcgagaccatcctggctagcacggtgaaaccctgtctctactaaaactacaaaaaaattagccagccgtggtggcgggcgcctgtagtcccagttactcaggaggctgaggcaggagaatggcatgaatctgagaggcggagcttgcagtgagccgagatcgtgccattgcactccagcctgggcgacagagcaagactgtctcaaa

SEQ ID NO: 30360 - DNA, 1081 bp, Homo sapiens
cgatctcggctcactgcaacctccgcctcccggggtcaagcgattctcttgcctcagcctcccaagtagctaggactacaggcacgtgccaccacgtctggctgattttttgtatttttagtagagacgggatttcactgtgttagccaggatggtctccatctcttgacctcgtgatccacctgccttggccccccaaagtgctggaattacaggcgtgagccactatgcgaggcctaatttttaaaatttttgtatacagatggggtcttactgtgttccccaggctggtctcacactcctgtgctcaagcgctcatcttgcctcatcttcccaaagcgctaggattataggcttgagccactgtactatcctgcagaacaaaggacagggagattagactaaaggatggaggcttgagacatcataccacaagcaaggatgtgtatcataacagaaattaattgcggccaggcattgtggctcactcctgtaatcctagcactttgggaggccaaggtggccggatcgcttgagcccaggagttccagaccagcctgggcaacgtggcaaaactctgtctctacaaaaaatacaaaaattaaccaggtgtggtggtgtgcatttgtagtcccagctacttaggaggctgaggtgggaggatcacttgagtccaggaaggcagaggttgcagtgagctgagatcacaccagtgcacttcagcctgggtgtcagagctaggccctgtctcaaaaaaaaaaaaggaaaaattaattacacctgagggaaattcccatgcaacatttaatgaatgccttcagtgctgttataatgcattaatttctatgagaaatgttctctcttttttgtgccttttaggaaaattgcattttggtgatagaagataaaaacttggctaattaggccaggcatggtgggtcatgcatgtaatgatatgggaggctggcatatcacttgaggccaggagttcgagactagcctgtccaacacagtgaaaccccgtctctactaaaaatacaaaaattagctggatgtggtggtggatgcctgtaatcccagc

SEQ ID NO: 30361 - DNA, 1018 bp, Homo sapiens
tataaactcctttttttttttgactatagtcggttgcatggttactttaagcgtggaatcaaatggagtggcatttagttcaggcggcttgttccttgccatggcaaagtatcaagaagatccccaagtcaagtcacatttgtaaagctgcttcccaattggctttgtcacgcagtgttgaagcagtgggagagagattcacctgttataaaggaactgactaacacaagtatcccgtctatatctgaatgctgtctctaggtgtaagccgtggtttcgccttcgtggagttttatcacttgcaagatgctaccagctggatggaagccaatcaggttgcttcactcaccaagtctagatattcatgaaaatggaacaagtctgtacaattttaaaaaaaggttgaaggagtggtttgttccaaaggagtgacttttttttaaaaaaaaagctttgtatatattaaaattgatgttactagaataagtacagtaccaaggacttcattatagaatttgttctgcctttaaacatggctacctacctggcagggctttgttaactactgaatacctgtctggtaatcactaaaacatcttaatgtttcccttttttctagtttgttatattcctattatgtccattgagagtaagcttagtatatcaaactctccatttgacagtgaagagaacatagtgaaagtctgtggcggcatttttataagtaattccttatttctgcctgaagaccacaaagcctcctggaggcgtaactgctcagaccggtcttcagggaatatttaaggacttagtggaatttatgaacaataagtctgatgagattagcctgggagtggtgtcctgcagctgtctaatctagttagagtggcattaacattctaatctccttgagaatgccttttatagtctgttcaaagcaagtcattgatggttcttcgaggtagtgttaactgaagtgttcttcagtttgtcaagataatgttcagtgcttggcact

SEQ ID NO: 30362 - DNA, 1034 bp, Homo sapiens
ccagcactttgggaggccgaggcgggtggatcacgaggttaggagatcaagaccatcctggctaacacggtgaaaccccgtctctactaaaaatacaaaaattagccgggcgtggtggcacatgcctgtaatcccagctactcgggaggctgaggcaggagaattgcttgaaccccggagacggaggttgcagtgagccaagattgcgccactgcagtccagtttgggcaacagagcaagactcctcttgaaaaagaaagcaaaaaagttgtcaacatgtgttttgctgagggattgccttagattattgctacagtgtgtctgtcaggggagcccttcctcctggatgattgcagtgatttagctctcttaaaaggctttacagttgaaattatattgaagctgctgttctttccagactgaggaagcacagcctagcactagcacaagtacacaggccccagccgcttcccctactggtgtagttcctggtaccaaatatggtaagccaaacctcatggggctgttgacagttggaaggtcttagttgttgtctttgtttaatgagagttcttctccctttgcgggtgtcagagggacacttggggatgtgagacagagaagaaacattaggcctgctgcatctcactggcttagaatttgaaataaagccaatttcttacctggaatgactgtatgctggattttgtttttgcagcagtacctgacacgtccacttaccagtatgatgaatcttcaggatattactatgatccgacaacagggctctattatgaccccaactcgcaagtaaatgtgctgctttcctcctcaatttcactagaagtagtttcgcttagtgcatttatgaggcataaaatgaaatatttcctgcaaaagaatatatgactcagattagttttaacttcttcaaagccaccaaaatgtaatttttatatggagattgtaagttttaattgtagggttaaaaaatgttttgaggtataatatacacacaaaaaaatacacaaaac

SEQ ID NO: 30363 - DNA, 1058 bp, Homo sapiens
ccacttctctcatttgtgaagcctggccatttatttccctgtcagttctttttttttttttttttttttcccgtcagttctctttggtggccttagaagttgtgtctgtaggctgggcgcagtggctcacgcctgtaatcccagcactttgggaggccaagatgggaggatcactaggtcaggagattgagaccatcctggctaacacagtgaaaccccgtctctactaaaaaaaaaaaaaaaatacaaaaaaattagccaagcgtggtgtcgaatgcctgtagtcccagctactcgggaggctgaggcaggagaatggcgtgaacccgggaggtggagctggcagtaagcgaatgtcgcgccactgcactccagcctgggtgacggagcgagactctgtctaaaaaaaaaaaaaaaaaaaaaaaaaaaaaagttgtgtctgttagccacgccaccttacccagaagagacagacactgtctcctgggtccctgttgagcagatagagtgagcgactggaaaatagaggagaggatatgtgacacctctcctctgttgcaattcctgctgagcttgggtcccttcaccaacacctccttccagctctgtgctagtgtttacaccctgtgtgtggttgcctggtatccaatggattctatgtggatgggcccaatgatgagctgttgtcatggcagatgtctgaactccatgacacgcccacctgttctggctgcctggtttatgtaaatagtctgtggaacagagtgagacaaattgctctttgggtgccctctaggtaggcccagggattaaattaatgggaactagactttttaaatttttattatcattttttttgagatggagtcttactctgttgcccagactggagtgcagtggcatgatcttggctcactgccacctcctccatctcccaggttcaagcagttctcttgcctcagcctcctgagtagctgggattacaggtgtgccatcatgcccagctaatttttgtatttttagtagagatgagttatcaccatgttggccaggctggt

SEQ ID NO: 30364 - DNA, 1051 bp, Homo sapiens
atcatgccactgcactccagcctgggtgacagagcaagactccatctgaaaaaaaaaaaaaaaaaaaaaaaacccaaaataaataaaaaggagggatgttcagaacaaattggaaagtccaaccatgtcatgaacagtcagtgtaagtcacaaaaaacccaaaaactttttttttttttttgagacggagtctcgctctatcacccaggctggagtgcagtggcgcaatctcggctcactgcaagcttgcctcccgggttcacgccattctcctgcctcagccttctgagtagctgggactacaggggcccgccatcatgcctggctaatttttttgtgtttttagtagagacagggtttcaccatgttagccaggatggtcttgatctcctgacctcgtgatccacctgcctcggcctccagaagtgctgagattacaggtgtgagccaccgtgcccggccaaaaacccaaaaacttttatataatcaagttgtcgtatacttttttcttcagggtagagtcttgctttgttgcccaggctgaagtgcagtggtgcaatcttggctcactgcaacctctgcctcctgggttcaagtgattctcctgcctcagcctccccagtagctgggtttacaggcatgtgccaccacacctggctaatttttgtatttttggtagacatggggtttcagcatattggcttggctggtctcaaactcctcgcctcaggtgatccgcctgccttggcctcccaaaatgctaggattacaggcgtgagccaccatgtcaggccacgttgtcgtattatatattattattattattattttttgagatggattctcgctctgtcacccaggctggagtgcagtggcgcgatctcagctcactgcaagctccacctcccaggttcatgccattctcctgcctcagcctcctgagtagctggggctacaggcgcccaccaccgcgcccggctaattttttgtatttttggtagagacagggtttcaccgtggtctcgatctcctgacctcgtgatctgcccac

SEQ ID NO: 30365 - DNA, 1036 bp, Homo sapiens
cactggggggagcccagcaggcaagaagggtctggggacacttgaacagttcggaggtgagatgtgatttgggtgccaaacacctgcggcgtcccgctttgggactccccatcccaaggcgcagaccagactctcagggcctggccagctcaggtccttcagtgagggagggacgaggctctaaggcggggagtgtggggcaggagggtgggaaaggcgaagaggccgggtgaggtgggagtggaggtggggtggggcagggtgctcagaggcggcgagaggcgtggacgaggacttgaggctgcggccggggcggcaggcccaggaggagcagcagttgcagggagaccaggacgcccagcgacggcgggaaggaggccccgcggccacagtctgaggtatcttcctgcggggagagacaaggagctggtcggcctgggcgggcgcaaggccgcgggatttcgggtccaccgccccctctcctcactgtcgcgttgtagtcgaagcagatgtgcgggcctctccggtatcgcggtctctgcactagctcacactgctccgggccgtccgctgggcatgggtggggagtcaaggaggcggacggcggcggcggcacggagggggcgcgcggggcagagggggagcgggcggcggggagggcgggggcaggatacagtgcgtctccttctgcagcagccggccagcctcgcactggctgcacagcggcttctcggccaccacaaagagaagattggtgttggtcagtctctgcgcgtggaacagcctgcgggcagcccggaaaggcggggcgttgagtttgccccgccctgacccacccccatcctgcggccccgcccccggccgctcggaggccccgccccttccatcctcccgagcgtctcgccccgctcacaggttccgcccttggcctctggtcccgccccactgccagcacctggagcagtttccgcagtcgatgatggcgttgtaggaggcgtttaccgagccgaagtagtactgggtctgtttcatgacg

SEQ ID NO: 30366 - DNA, 1068 bp, Homo sapiens
gccagggcaggtacagtgcagtcaggcacctccctctgcacccatgcctgttgacctatgcctgtgtatgccacagccctcaggtccttagtcaggaccatgtccccccatggcccatctcctccaaaagagggaattccctgtccctttggcctaggagcctccctgggggcctctcaagcccagctctgtgaggaggctggggacacaccagctcctgattcttggccaccatgaaaccacaggccaggctcaggtggggccttgaccccaggcctcagtttcctcatgggacacttgtgaggatttaacagattaatacaggaaaaactctgggagcagggtcaggccagagggagtggacaggaactatcaggtatggttcttagcttttttcttttgagatggagtgttgctctgtctcccaggctggagtgcagtggcgcgatcctgatccactgcaacctctacctcccgggctcaagcaattctccctctcacctcagccttctgagtagctgggactagagacatccgccaccatgcccatgcctggcaaattttcacacctttagcagagacggggtttcaccatgttggccaggctggtctcaaactccaaactcaagtgatctgtccaccttagcctcacaaagtgttgggattacaggcatgagccaccgtgcccagccagttcttagcatttctgtaagcacagaatgggaggatgtctgtaaagggcttagctggggttgattgaacacttaacatgaaacaggtgtggattagtgcatttaatccccaccacatccccacgaggtgggctatcctcaactgggctcagatgtacagatggggaagctgaggcctggaggggcagggtgacttggccatgccccagctgacatgaaggtcagtctggctttggctacctccccttcctacgttcacaagggtaactgcttaggcctctgtaccaagacccccaggagccacgttggcaccgactctgatccagatccctctgcttcacaggaactggttgagtgggtgctggaagaggtggcc

SEQ ID NO: 30367 - DNA, 1034 bp, Homo sapiens
tttccccacaggtagaagggcgctgctgatccttgttgggttatggtgaccactgtgtgaggtggcctctgcacagtactggcccagcaccagggacagactgttgtcctgtagggagcgctaatcccacctgactccatcattccctcagcacctacctggggcctggacgtttggggtcagtggtatcatgtgagccgccctccttggaaccgagcctctgaggaggagaggtaaatggacagggtgagacagaggacaggatgtggttggaacttaatgaagcgaggtctcatctggcaggaggccaactcatccatagctgcaaaattggttccattacctcctttaatgagctacgaaagctcggagaatgagtttgtgagagaataatggcacatgtctgcagctctgatttgaaactgtggctaaaaagttagatattacactaccttccagctctccaaatagcaccagtgcccttgtcgggagggagagggaggacatggggggcaggagcggggttctggcattataaggaagatgctgaagctttaagaaggaaaagtctgcttctgaactctgaattcagggtcaatcccatcctgacgtcttccctgcagagcagaggctgaggctgtgacccattctctgagtgggcaaagcagctcacaagggtcacactggctggcagggccgtgtgtgttaatagcccacacaggtgccagcagcactggcaggggtttcaacaactggctgtaaaataaattctgctattccagtggtgtctcttatatcatttgagatgtgatcctcatgggaaataatcccaaataatcatacaactgggagctgggagagatcttagagatggctgagtcgaagacttgtcaaggagggagtatggtaggttcaaagtgttttgtcttattcacggcctgcctctgtaagaataggggttcccaacaatgaaacctaaatttccctacaacattctctacagttttgctgcctgagatttcgtgttgagcacg

SEQ ID NO: 30368 - DNA, 1022 bp, Homo sapiens
gagggctagcttgaaaatataaccattatcattttcctgtgagaaaatgtttgagtttcagctttgatttttatgactaacttggagcacagatttgtgtctttgtttgtcaacctataatcacatagcaaggagggaaaccccttacacttacttcctaccaatttggagaaatttgtggaggagggcctcgagggcctccttttgccctgatgttagtgagggaaggagtcccctgttgcagcagtacaaagggttttttccactgcagctgttcatttgtatttgacattgataaggctttgagatcctgtagtaatacttattaaattttttataatataggaattctgtacaggttataacatgactgaattgtttggtttattcatttaggatgaggtgatgactgagcccccctttccattgtaatattctgtgagtgattttaggcagtggggaggacattatcctttctgagggtcagtgataggcctgtcagtgtgcctgggactctcacttaggtaaccccatgtcgattcccagagtagtcttaatgttatcattattacacagataaagaaactggatcccaaaggttgttaatttttttttttttgtccttcaacgattgtatatttttcttaattttcttcttggcagtgggcagtattttgtgaaatacttgactgtcttgctttctttttgtggtactgtaaggtactgttctttactgtacccgttcgcccgtgttttgacttcttatgtccctttccctcttagagaatctctgctttcctttctgttgccatgaatgcttggaaagtcctgcatccttccattctttattctacctttccaagaagcttcctgctctaaagtgtattaggtgagaaaaatccagctatttttgtgaaacacctgtctttccctatactgactgtacccagagtaccaaatatagaatacaaaaaccaagaaaatgcttttctcaccctctaacaggagcaacagcaggagca

SEQ ID NO: 30369 - DNA, 1034 bp, Homo sapiens
acaaacaaacaaacaaacaaatcctgagtccttaaaagaaacttgtaaagatcctgtggtgcaggaaaagaatctgaaggtggggaggaaatagatccttgaaaccagatctggaagaattagtgttcacaaaatttgagtaaatctgttggtaaatggactagaactcaccaaaatagtctgaagacagtgtgctctttagttatttattcagtgagggaagcccaacctttgcaacctctggaagggccccaatacccctttagaggtaaagacatcatccactaggggtaggaaagatttcatagacctatgactttattttgttctgaaaagtgaggatgtgcttgatgtcttgtttagtgtttatggggaacttccttattcatgattctacttgagctttacactatatcaccacctctcccctcttttttaaacagatgagaaagaagctttagctgagagaaattaagtaactgatctaagatactttagatagtaagtgctgagttgagatttgaacctaggactttgagattctaagccacagattgtattattacaccgtgtcctctgaaaggaattgtcagtagtatatgactgtggcttgaaagataagacatactctgcagttttcaatttaaactggatagttatatttaaggaattttatttctgtattggactatttttttctttttctttctttttttttttttttagacagagtcttgccgtgatgcccaggttggagtgcaatggggtgatctcggctcactgcaaccttcgcttcctgggttcaagcgattcttctgtctcagccttctgagtagctgggattacaggtgtgcgccgccacacctggctaattcttttctatttttagtagagacggggtttcaccatattggccaggccggtctcgagctcctgacctcaagtgatctgcccgtcttgacctctcaaagtgctgggattacaggcatgagccaccgtgccctgcttttttttttttttttttttttttaaga

SEQ ID NO: 30370 - DNA, 1034 bp, Homo sapiens
ggtggatcacctgaagtcaggagttcgaggccagcctggccaaaatggtgaaaccccgtctttactaaaaatacaaaaaattagctgggtgtggtggcgggtgcctgtaatcccagctacttgggaggctgaggcaggagaatcacctaagcccaggaggcggaggttgcagtgagccgagatcgtgccactgcactccagcctgggcaataagagcaaaactccgtctcaaaaacaaaccaaccaaccaacaaaccaaccccaaaaatgagccgggcacaaccttagcctctagaagattgcttttgtgtcttgttttgccatttcttcttttattattgttatggactcatgggtttttgtttattcagtgtgactcagctcatcattatgattataattctcaaattattctaatgcttttaaatttcttctgtgatggtttcctgtgactggagagacacctgtttttgtctgctgctttgttgtgataattgattatatttggtcttaggtcctaaagtctgtgctattttaatttttttgaggtaaaaatcagttatataaaatttattctcatagtaagttttcttccatgatgtttatcatcttttgcttactatttttctttttttatcttttaaaaatagcaggggtgtcgaggtataattcacataccatatagttaagtctttaaagtgtactatcccattatttttagtatatttgtagagttgtgcctccatcaccagtatctaattccagaacagtttcattacccccaaaagaaatcctatacccattagcagtcactactcattctctctcccccacccgggcaccccctaattggctttttgtctctaaggatttgcctattctaggcatttcatataaatggaatcatgtattatgtgaccttttgtgtttggctgctttcactgagtatgtttttaaggcttatccatgttttagcatatatcaatacgtcattcctttttatggctgaataatattctattatatggatatac

SEQ ID NO: 30371 - DNA, 1045 bp, Homo sapiens
tgcctgtgcttttgaggtcttagtcataaaatctttgtgtagaccaatgttttcttttagtagttttgtagttttgggtcttatgtttacctccttaatccattttgagttgatttttgcgtatggtgagagacaggtgtctagtttcattcttctacatattgatacccagttttctcagcaccatttatggaagaaagtgtcctatccccagtgtatatttttggcacctttgttgaaaatcagttggctgtaaataggtggatttatttctggttttctctgttctgttccagtggtttatgtgtctgtttttaatgccagtaccatgttgctttggttactgtagctttgtagtatattttgaagtccgatattgtgatgcctctagctttgttctttttgtacaagattactttggctattcacagtcttttgtggttccatacaaattttagattgtttattctatttctgtgaagaatataattggtactttaatgaggattgcattgaatctgtagatttctttgggtagtatggtcattttaacactgttagttctttggatccatgagcatgggatttctttccgtttctttgtgtcctcttcaaatctcccttcagtgttttgtcatttttgtcgtagaggtctttcatctctttgattaaatttattcctaggtgttttatttttctgtatgtgttttagctggttcattagtggcatatagaaatgctactgattttttctttttttttagatagagtcttgctctgtcacccaggctggagtgcagtggcgcaatctcggcacactgcaacctccgcctgctgagttcaagcgattctcctgcctcagcctcccgagtagcttggattataggtgtacatcaccacacccagctaatttttttttggtatttttagtagagatggggtttcaccatgttggtcaggctggtctcgatctcctgacctcaagctatctgcctgtcttgtcctcccaaatggctgggattacagatgtgagccactgtgccca

SEQ ID NO: 30372 - DNA, 1010 bp, Homo sapiens
caggttttttatttttatttttatttatttattttttaatttcagatgagctcttacaatattgcccaggatggagtgcagaggcagtttacaggagcagtcatcacacactgcagcctcaaactcctggggttatgtgattcctcctgccccagcctcctaagtggaactacaagcatacaccaccatgctgggcagaatcttcctgctttcaattttgctattctttctcccttttctgcactgtaacttcccaagtgattttaataaaaacaaaccatgtcttggcactccctttcttaaaacctttttattgcatcatttaggataaagtccacatttcttaaaatgacttaaaagcaacttggacttctggttcctgcttacttcaccagctttgtcccaatcaccaagctactaatctgccatattgaactttttgagtttaaaatgtggcatattctctgtaacctgctgttcttgcagatctggtcctgatttatgtctctgactacttcttttatttatttatttatttttggataggatcttgttctgttacccgaggctggagtgctgtggtgtgatcatggctcactgcagcctcgacctcctgggctcaagggactgtagatgcatgccagcacatctggctaatttttaaatttttttgtagagatggagtctcactatgttgcccaggctggtctccagcagtccttctgcctcagcctcctaatgtgctgagattacaggggtgagccactgcacccagcttctaactacctctctaagtctccctctttccagctgtattatccaaccaatcaagtatcttttagttcctaagagttattctttctcttgccttttggctctttgcacatgctcttctaacacttttactccttttcacccatttttgccttactcctattcattctttagttttcaggttgtttgttcaaggaggccttccttgacccctagaccaggtttaatttttctgc

SEQ ID NO: 30373 - DNA, 1073 bp, Homo sapiens
tatatcttttgttctctggtatatccctggttcttagaagagtgtttgtcatataataaatatttgttgaatggatctctacccatttatatgcatctcctttttcagaagtataaagagaatgggcttggttactgcacagtcctggatttgaattctgtttttttcttcttactagttgtgtgacctggggcaggctaattgaacaatctgttatctgtttccttctctatcgattggcaactatacctgttggatataaaagtgagccatatcaattcaccttgacattaaaaaaatttataattgatataatctatacctatttaaagtgtacattgataaattttgacatacgtattcatctgtgaattcatcactgtaatcactcccagaagtttcttaagcctctttttaatcctactctttcatctctatttctcctcttgccttttcccccatctccaaacaactacttacctgctctctgtcactgtatattactttgcatcttctaagatcttatataaattggtcatactgtatgtactctttttgactacatttctcattattcatttagtctcattattttgtgatttatctctgttacctgtatcaatagttcttttctttatttttacagaatagtattccattgtgtgaacataccaaaatttgtttatccattcattgttgatagatatatggattattaccaatttttttgctaatcaaataaagctgctgtgaacacccatgaatcaatcttggtatcgtcatatttttttcatttctcttgagaaaataccgaggaatggaacggttaaattatgtggtaggtatatacttaacttttttagaaactgccaaactttcttccaaaacgatagtatcatttttacattccactagtgatgtgtaagaattccagttcttccacatctttactaacatttggtatggccagtctttttaattttagcagtctataggtgtgtagtggtatctcactgtagctttaatttgtatattgagaatccttttatgtgacagctgttttaccgtcttgg

SEQ ID NO: 30374 - DNA, 1058 bp, Homo sapiens
tgttgtagtatggaatcattaatttatttgtcatgcattttgttgaccataaaatttcatgccttgtacctgggttttactttttaccacaatagctttttaaagaattgtgttaaaatatatataacataaagtgaccattttaacaatttttaaatgtataattcggtggtattaagtatattcacagtgtgtagccatcaccactatctagttcccgaacttttttattacaccaaacaaaaagtcaacacccatgagacaataactctttgttctcccctcccccaagtctaggtaccttatataggtggaattatacaatacatgttcttttgtgtttggcttgtttcacttagcatagtgttttcacggttctatatcatgtgctagagcttcattatttttttggatgactatatatatatattatatatatgtatatatcccccattttgtttatccactaatatacacttacattgtttccaccttttggctactgtgaataatctatgaacattgatgtacaagtatctgtttcagtctctgtttttttattttattttattattattctttaagttttagggtacatgtgcacaatgtgcagattagttacatatgtatacatgtgccatgctggtgtgctgcacccactaactcgtcatttagcattaggtatatctcctaaagctatccctcccccctccccccaccccacaacagtccgcagagtgtgatgttcccctccctgtgtccatgtgttctcattgttcagttcccacctatgagtgagaatatgcagtgtttggttttttgttcttgcgatagtttactgagaatgatgatttccagtttcatccatgtccctacaaaggacatgaactcatcattttttatggctgcatagtattccatggtgtatatgtgccacattttcttaatccagtctatcattgttggacatttgggttggttccaagtctttgctattgtgaatagtgccgcaataaacatacgtgtgcgtgtgtctttatagcagcatgatttatagt

SEQ ID NO: 30375 - DNA, 1046 bp, Homo sapiens
tacagttctgcagcatcaagtacatacatactgttgttaaataaccatctccaccatctatatctagaactttttcatcttcctcagcttgaactctgtacccattaaagactgactcttcattccacactttcccagcccccggcaaccaaaattctacttttttctttatgaatttgagcactccgggaacaatgtattacagatactccttctcttttgatgagggtacatccaaaagcttattgtaagattgaaaaatcatgaattgaaccatcataagttgaggatcatctatagtggaatcatataaaattttccttttgtgactagcttattttacttagtgtagtactttcaaggtttatccatgttgtagcatgtcaagattttgttactttgtaaggctgaataatattccattgtaggcacgtaccatattttatctgttcatctatcagtggacacttggattactttcaccttttcactattgtatataatcgtgctagaacacgggtatacaaatatctgtccttgtcccctgcctttggatatatacgcagaagtggaatggctggatcatataattctgtttaatatcaaattaaaattaaatttgttaaatgaaattagatatttaattaactaaattaagtatttaatttaaattctttttaaattaaaataattatatttgattattctgtttaatttttttaggaattgctatactgttttccacagcggctgcaccattttacatccccaccagcaatgcaaaaaggttctaatttctccacacctttaatatttgttcttttttattttttcgtaatagccatccaaatgggtatgaagtggcatctcattgtgctttgatttgcatttccctaatgattagggatgttgaacatctttttatgtgcctgttgagcatctgtgtatcttctttgcaaaaatgcctactcaagtcttttgcctattttaagaatcaatttgggttgggtgttttggcccacacctgtaatcccagcactttggga

SEQ ID NO: 30376 - DNA, 1025 bp, Homo sapiens
aaacaaccctgggtcacttctcacaggtcacacttagctttctgcactggtgcttcaggctcctttgtttcccgcttcttacgcttaggtggctctgcactcttcctgcaacctcttgtagttctgggagtaggggaagtggtagctgcagcaacagaggcagctctcctcattcttctttctgtaacgctgactttctctgttatcttctcctttttcttctgcttatcattctctccatagtcattgctgttatctgtggccccttcctctctctcttcctcctcattgtttaagaacaggagtctctttggattgagaagaggtacccttttcccctttaggtacatttaatgtttgattattaaggtttacctccactatgatctgctcccttttgtaaaagacttcttcctcttcttcctcctcctcttctgtgtcatcagaattctcctggtcttccttaatagcatgcacatcagactctgctcctgtctccctgaaatgtggctgttcttctgtttcatggagatgtagtttgctcatcttggtgtccacaaacacagaataaggacttcctggttccctttgttacactttggtggacaggtcaagttccttgtggcaccatgatgaaagctggatggcacttgcccatgacggctatcatcttgtgccattcctgctacaggcacagcacagttttcaaccagctcctgacgagaagtggctgtgtgcctcattggtaaatgactcaatttattaagcagttcagactgtaaagaaaatagctttaaaacaaggtaattattaagactaaaatatttttccatccctaagaatcactcaaatgaaaaaaagatattcctggaaactgaattcttccagtgttgcagcaccaaagcataagtcaaaaaggtttggtattatggcaagagcagaccactagtgatttttcttctgaagagaactacaagggacttggtgcatcttatctgggccagccacctccaccgcctagatca

SEQ ID NO: 30377 - DNA, 1030 bp, Homo sapiens
gttgggtagcatgatgcctccagctttgttctttttgcttaggattgccttggctattcgggatatttttttattccttggccattcgggatttttttttgttccatgtgaattttaaaatagatttttctagttctgtgaagaatgtcattgtagtttgataggaatagcattgaatctgtaaattgctttgggcagtatgaccattttaatgatatggattcttctctgttagcatgaaatatttttccatttgtttgtgtcatctctgattttttttttttttgagcaatgttttgtagttctttttgtagacgtctttcacttctctggttagctatatttctaggtatttcattctttttatggcagtgaatgagattctgttccgatttggctctcaagttggctgttgttggtgtataggaactctagtgatttttgcacgtagattttgtattctgagactttgctgaagttgtttttcagcttaaggagctttggggctgacactgtggggttttgtaggtataggacatgtcatctacaaatgggtagtttgacttcctctcttcctatttggatgctgtttatttctttttcttgcctaattgttctggaaaggacttccaatactatgttgactaggagtggtgagagagagcacctctgtcttgtgccggttttcaaggggaatgcttccagctttatagattggttatgacgttggctgtgggtttgtcatagatatctgttactatttcaccaagcttattgagagtttttaacataaatggtgttgaattttaccaaaagccttttctgcatctgttgagatgatcatgtggtttttgtttctagctctgtttatgtgatgaatcacgtttattgatttgcatacgttagagcaatcttgcattccagggataaattggtcatagtggataagctttttgatgtgctgctggatttggtttgcgaatatttcattgaggatttttgcactgatgttcattgaggatattggcct

SEQ ID NO: 30378 - DNA, 1082 bp, Homo sapiens
aagatcatgtcatctgcaaacagggacagtttggctttctgctttccagttttgatgcctcttatttatttttcttgcctgattgctctggctaggacatctagtgctatgttgaataagagtggagatccttgtcttgttccagttcttagaggaaaagctttcagttttttccccattccagaagatgctagctgtgggtttgttatatatggcctttgtatattgagatgctttttttctacacataatttattaagtgttttcatcatgaagggatgttgaatttcattaagagctttctctgagtctactgaggtgttacggtttttgtccttcattttattgatatgatgtatgatgtttgtttatttgcatgtgttgaattattcttatattcctgggatttatcccacttggttatggttatctttttgatatgttgttggctttggtttgctagtattttgtcgaggacttttgtgtctgtgttcatcagggatattggcatgtagttttcttttctgattgtgtctttatgtggttttgctatcaaggtaatgctggacttgtagaatgaattagtgagaattccctgcttcaacattttgaagtagtttgagaagacttggtattaattcttctttaaaagaatgatagaattctttggtgaagccattatttttggacttttctttgttgaaagaccttttattactgagttgtctcattacttgttattattgttattggttcagattttctttcttcttagtttacttttggtatgttgtaggtgtccaggaatttatctgttctaggtttttaaatttattgacatatttcatagtaatcaccaatgagcctttgtatttccatggctcctgttgtgctgtctcatttttcacttctgattttatttggatcttctcttttttcttagtctagctaatggtttaccaattttatttattttcaaaaaaaacaacttttagttttgttgatcttttgtttttagtctcaattttgtttatttctgttctggtcattattatttctttacttctgctaactttttgttt

SEQ ID NO: 30379 - DNA, 1028 bp, Homo sapiens
tggtatgattttgatcttgttataaataaagtttcagtgtcgtaaaagaaatagtgcttgaatataaaattttctgttttttttcttctcagcaaggcaatttacttctatagaagggtgcaccctcacagatggagcaatggtgagcacacacctggacaagggaggggaaggggttctgattcctgacacatgtggcccctgctgcttgttattcctcctattagctagggttaggccgcacaggctaaactaattctgattggctaatttaaagagagtgacctggtgagtggtttggcaggaaaaatggttatggcagagcaggtaattggaatgagttagggtgcagcaggtaattggaatgagtcagggtggagcagataattggaatgagtcagggtggagcaggtaattggaaggagtcagggtggagcaggtgattgaaaaaggttgctttatgaggaagttaagtttaaaagtagaaggcaaagaattgaacatactgacatattgatactttgaagagaaatttagaactcatatctaacaatcttaaagttttttttgagacttgttttgtgtcctaacatatagttaatcctggagaatgttcaatgggctgatgaggagaatgtgtattctatagctgttgggtgaaatgttctacaaatatctgttacatccatttggtctgtggtgcagtttaaatctgatgtcccattgttggttttctgtcaagatgatctgtccattgctgagagtggagtgttgaagtccacagctattattgtatttggatctatttcttcatttgggtctaatagtatttgttttatatgtctgggtgttctgatgttgggtgcatatatatttataattgttatattctcttgctaacttgattgctttattactgtgttgccttgtctctttttacagcttttaactacaggtctttttcgtccaatataagtatagctattcatgctcacttttggttttcttttgcatggaatatctttttt

SEQ ID NO: 30380 - DNA, 1087 bp, Homo sapiens
tgatttttttctgaatcatattatagatagtttcacacatatttgatagcagatttctcttttaaagtgtattgaacacactattccttagattagccaaagttttaagaataacagaatctaggtggggcatggtggctaacaccttaatccgaaagaagccagtcaaagctcaccagaaccagatggcgacaaaagcgacctctagttgtcctcatttctcattatacactaattataatgcattagcatgttaaacgacactcccaccagtgccatgacagtttataaaggccatggtgagccaggcacagtggctcatgcctgtaatcccaacaatttgggaagccagggcaggtggataacttgaggtcaggagtttgagaccagcctggccaacatggcgaaaccccgtctctactaaaaatacaaaacttagccaggcgtggtggtgcacacctgtaatcccagctactcaggaggctgaggcaggagaatcgcttgagcctgggaggtggagattgcagtgacccgagatcgcatcactgcactctaacttgggcgagagagcaagactccgtctcaaaataaaaaacaacaacaacaaaaaatgccatggcaacatctagaagttacagtatatgtctgaaagggggagaaagcctcagttcaggaactccccacccctttcccaaaaaactcatgaataatccaccccttgtttagcatataatgaagaaataaccataagtttactcaggcagcccatgccgctgctctgtctgtagagtaactgttcttttattcctttattttcttaataaacttgctttcactttactctgttggctcactcttaaattccttcctgcatgaagccaagaacccacatggcctcccagctaaaccccaattttggggtttgccctgtgacaagtaggagcgatcatgtatcattttttatcagtggggtctttgtgacccttacgttgcaaaatcagtcctgccaaattgctgtctcacacttataagtgagaacatgtgtatttagttttctgttcctgtgttaatttgtttaggataatag

SEQ ID NO: 30381 - DNA, 1092 bp, Homo sapiens
ttcaaaggcttgacatctggatacgcttatattggggattaggtttcaacatatgaatttgcaggaggaagacaaaacattctgtctgtagcatatataaatattagaatggtgcaaaagtaattgtggttttgccattggaagtaatggcaaaaaccccaattacttttgcatcaacctatagcttgtggtttgggagtttatttttgtttaaactgacaatctggattatttagtccatttgcactttgatatagttaggtgtaggtgtatcatcttggtccttgttttctttttgttccttagtttctcaacttatcctttcttattttccttgaattaacccagcattttaatgatttcatttaggctcctctattagcttgttggttttacagtgttttgcttttcccttagtgattatcctagagtttgaaacatgcactctttttttttttttgagatggagtcttgctctgtcccctaggctggagtgcagtggtgcgatctcggctcactgcagcttctgcctccatggcctcagcttcctgaatagctgggactacagttgtgcgccaccatgcctggctaatttttgtatttttagcagagacaaggtttcatcatattggccaggctggcctcgaactccggacctcaattgatccacccacctcggcctcccaaagtgctgggattacaggtgtgagccaccacacgtgccagaaaacatgcactcttattagagtctaccttaaatttgttcttttaccactccccagatcgcatgaactttacaatgatttaactacatttgtccctcttgtcttttatgcaactatggtctatattttacttctgtctacattcattcgtttgcccacattttttacccttttcttttcttttttctttttttgagacaaagtctcactatgtcacccaggctggagtacagtggcatgatcttggctcactgcaaactctgcctcctgggttcaagaaattctcatgcctcagcctcctgagtagctgggattacaggtacccaccaccacgcccagctaattttcatatttttagtagagatgg

SEQ ID NO: 30382 - DNA, 1034 bp, Homo sapiens
tttctgtagcttaatatttgatgcagtatgtttttgtttgtatagaaaaataccaaaattatcacttttttcattcaaaaagaaaattgtttagagttctaataatcagttttgccagtagaatcattcagttttattagttttaaggtaatgattataaggaaacagtatctttacattttaatgcctcctagctgtggtttctcattcttggcactgttggcattttgggccagataattctttattgtgggagacagtcttgtgcaatgtgagatgtttagcagagtatatggcttctacctactagatgccagcaaccctctgtcccttagtgtgacaacaaaagaggacttcagacattgctgaatttgtcttggggacaaaatgacccctggttgagaaccactgcttataggtaatttttcttatatttctgattttgaaatacattcatgaatgcttacgtgggaatagtttctacttgtggtttattttttaaattttgatttaaaattgttgaaaagttagaactggaataaatgaggaatcttataaatgaatagttgtaatttgtgatattgcgtgctatttatttattttagtaatatttgtggtcttggccacctcccactatcttatttccaatactagtgtttgaggatcagcgcgtggactgtgctcattaaaattattgtatgtttgtggttaaagtatgaaattgatgcaaagtttgtggcttgaaaacattattgagacaggaatgatggtacccttaaaatattaaacatcactgttttgattatatcttcctacacaatgaagtactccaaatttgtggattaaactaataaacattttatctcttatgcttttgtgacttgactgggtcagctgggtagccagttattctgggatgtgtgaggttacctgtggcaacagtcagctgtggggtcagtgtccaagacattctggtaggaatgtccaagagagtttacttgtatgtctggcatcttggcagggttggctggaag

SEQ ID NO: 30383 - DNA, 1032 bp, Homo sapiens
gcagctggaaaccataattctgagcaaactgtcacgaggacagaaaaccaaacaccacatgttctcactcataggtgggaactgaacaatgagaacacttggacacaggacggggaacatcacactctggggcctgttgtgggatgggggtcagggggaaggatagcattaggagaaatacctaatgtaaatgacgagttgatgggtgcagcataccaacacgacacatatataaatatgtatcaaacctgcacgttgtgcacatgtaccctgtaacttaaaatataataataataataataataataataataaaaataaaatgtttagtataggctcccagtctcttctggcttgtagggtttcagctgagacgtctgctgttgccctgatggggatccctttgtaggtgacctgcactttctctttatctgcctttaacattctttcttttattcaaaccttggaaaatctgacagttatgtgtcttggggatgatcttcttatgtagaatcttgcaagagttctctgtatttcctgaatttgactgttggtttctctagcaaggttggggaagttttcatggatgatatcctgaaatatattttccaggtcgtttgctttctccccctccctttcagggatgccaatgattcatagatttggcctcttttttacataattttatacttctcagaggttttgttcatttctttttattctatttttctttatttttctctgtcttattttagagagccagtattcaagttctgagattctttccttagcttggttattctcatgttaatacttgtgattacactgtgaaattcttgtattgtgttattcagctctgtcagacccgttaggttcttttttatattggctattttgtcctttagctcctgtatcactttattgtggttcttattttccttgggtttcatattgtcatcctcctgactctcgattatttttgtttctacttgtattctgaattctgaattctatttctgtcattccggctag

SEQ ID NO: 30384 - DNA, 1028 bp, Homo sapiens
gtgtatatgtgccacattttcttaatccagtctatcattgatggacatttgcgttggttccaagtctttgctattgtgaatagtgccacattaaacatacgtgtgcatgtgtctttatagtagcatgatttataatcctttgggtatatacccagtaatgggatggctgggtcagatggtatttctagttctagatccttgaggaatcgctacgctgtcttccataatggttgaactagtttacagtcccaccaacagtgtaagagtgttcctatttctccacatcctctccagcacctgttgtttcctgagtttttaatgatcgccattctaactggtgtgagatagtatctcattgtggttttgatttgcatttctctgatgaccagtgacaacgaatattttttcatgtgtctgttggctgcataaatatcttcttttgagaagtgtctgttcatatcctttgcccactttgtgatggggtggttttattcttgtaaatttgtagattctttttaagtttaagttctttgtagattctggatattagcccattgtcagatgagtagattgcaaaaattttttcccattctgtaggttgcctgttcactctgatggtagtttcttttgctgtgcagaagctctttagtttaattagatcccatttgtctatttttgcttttgttgccattgcttttggaagtccttgcacatgcctatgtcctaaatggtattgcccaggttttcttctagggtttttatggttttaggtctaacatttaagtctttaatccatcttgaattaatttttgtataaggtgtaagaaagggatccagtttcagctttctacatatggctagccagttttcccagaaccgtttgttaaatagggaatcctttccccattgcttgtttttctcagctttgtcaaagatcagatggttgtagatgtgtggtattatttctgagggctctgttctgttccattggtctatatctctgtttttgtaccagtaccatgctgttt

SEQ ID NO: 30385 - DNA, 1050 bp, Homo sapiens
ccctggggatcttttgggttccattcatgcttcttcctactctgttgtatagcaccaaaagtacttctgttgaagacttgtaaaaatcatgccaaccaatgccaaaactgctgctgtttttgtttgtttgtttgtttgtttgttcagtggcaggggtaacctgaacctgaaatggcctcatgggaatctcagcttcaatataattgaatcatattgttatctgtgtatgcatgtttcccttgaattctaaattagcagagccagagtcctcaaagatagaaagcaaaaaatttgcaagtgagtcattaggtgtgagaatgagaagttgtcttttacatttctacttcatgtttctggacccatgtattgtggttatgggagaaacataactttatattagttactggttcagaataattgtcgcaatttgtggattgccccatcattaaaaaagctagcataacaaagtcttctatagtcttgtctattgttctatacagtctgttgctctggatgatgaagtaattagtaagatcagttaatctgtgagtgtcagctccttatcttccttctttgtgtttaaaatgagttccttgctcatattccagttttatatgcaacagtgttatggcaaatagggtattgaatagtctactgaaggttatgtttccagaaatgaagcagccagggaaagtaagtccaaatctcatcctctttgtcatgaatggggtcaaaagtatgaacttgcctgtaggcagttggctaatccacttggaatatgtgtaccacatccaagtctcagggttgcccactgctaccggtcagttctgattcagcagttgtggtgtcagatcagccttggtgagggaaagttcatggagttgagctcctctatagctgctatttctttcacagcattcttttcaggatggctgggaaagtaaacagattgaatttacaggacactggggacaattatgcgggtggtgtatggtctaaggaaaatgggcttctctttgcaagataattcactcaggtgatgtagtctca

SEQ ID NO: 30386 - DNA, 1073 bp, Homo sapiens
cagttcattcttttcgctgttaagctttcacgtgcactcttctacatatatttgaattctcacacaacaaaacaactgtatatctacctattttttaatttttaaaagtcattttttctggtaaaatatgacataaaatttaccatttcaactatcattaagtgtatagttcagtggtattaagtacgttcacattgttatgcaatccccaccattgttatgcaacccccaccaccatccatctctagaattttttttcatttgccaaattcaaagtctattcctattaaacattaaccccacgtttctccctcccatatatcctggaaaccaccactgtactttccgcttctatgaatttgactgctctaagtaccttatatgagtagaaccatatggtcctgttgcgactggcttatttcacttagcataatgtcttcagggttcatccatatgggttcaggatgtgtcaggatttccttcctttttaaggctgaataatactctatcttatgtacagtgtcagtggaatctgagtttcatatagataacaatacagaaagaaccaggatttgggagttaaatatgtatgcttgggtttaaatcctatctaggtcactcacatgctctatgacctgatggagatttgtaatttatctgaatctcagcttcctcatctatgaaataatgaaaataaagcctttctgatgggactgttgtgtgaattatattatttatataaagtacccaatatagtgactggcccgaggagaacaattaagggtaaaagttcgtatgcttgttagctgcatgtatattttctttggaaaaatgcctgttcatgtcctttattcactttttaatgaggtggttttttttcttgtaaatttaagttccttgtagatgatggatattagaattttgtcagatgcatagtttgcagatattttctcccaatctataggttgtctgtttactttgttgatagtttctttttctgtgcagaagctgttaagtttaattagatcctatttgtcaatttttacttttgttgctattgcttttggcatctt

SEQ ID NO: 30387 - DNA, 1023 bp, Homo sapiens
gtgggagtgtaaattagttcaaccattgtggagagcagtgtggcaattcctcgaagagctaaaaacagaactactatttagcccagcagtctcattgctggttatgtactcagaggaatacaagtttttctgccataaagacacatgcacacaaatgttcattgcagtgccattcacaatagtcaagacatggaatcaacctaaatgctcatcaatgacagactggatcaagaaaatgtggtacatatacaccatgaatactatacagccataaaaaagaatgaggtcttgtcttttgctggaacatggatggagctgtaagttattatccttatcaaactgatgcggggacagaaaaccaaatactggatgttctcacttataagtggaagctaaatgataacacatggacacaaagaagggcacaacagacactagggcctacttgagggtgaagagtgggaggaaggagaggagcgtagaaagaataactattgggcactaggcttagaacccgggtgatgaaataatctgtacaacaaactcctgtgacatgagtttacctatataacaaacctgcacgtgtacccctgaatggaaaacaaaagctaaaaaaagggataacagttgattgcttaccactaactctcctgaagatgcttatgtatgcctggccctctttatgtcctttgaggatgatggtacttttgttgaaattatcatttcaaatcagtatttggaattttccctttacccacagcagagcccaccttgactgtgatgctgaatttttactgaggtcaactgcttcttattttctgtgtgccacatttttttttttttttaaaatgctggtcagccaccagccactgtttgatttgcatttagttcagaatttgagaagtcagctgttttcttagcattctgccatatatcaagtctatctgaacttcatatttcattttatagaagatattttagagaaagttgtggaaaaaggaaaaagtctgtggttggagagca

SEQ ID NO: 30388 - DNA, 1050 bp, Homo sapiens
taagtcatggacaaattgtaatattgtaccagccctttcctattatatttgtatatttatttgagatgtttaatattgtaagaaaattttgattcataatattgcaaataaatagctgttgtctaaatacagaaacaatagttttctgccaacaaagaggaaaacatttagagccaggtactgatattgaagttcatttggtttcaaattgatatttaagataaaataactttcttttaaaaatggaaatttaatgagcattagatttcatttctaattactaccttagcttctgtaatctagcactacctagttgctattccagatcttgaaatttttaggactaccttactctgaaagttattctgctaatctatcaaaaccaaatgccaggagacttccactggatgttactaccgctagacacagtgccagcttctttttgtctcatcattctgtgcacttacataacaaaactttgttaaagtagaaccaaacgtttcatggaggaattgttatttaggcgaataagatttctgtttactaaatctatgacactcaggtaaatattgtaaggaatgcttacactgttgaacaccagccagaacacattagacaagtttttaatccagaaaccttctggtacatgacagattgtttgtattattctctagcaagtgttagaataattctagttctcttcatttgttcagacttcactaggttaattgagaaggaaagattgttaaattatttaaattaactaaagccaaaatttccactccacaatttccctagtttattctatttttttctgtttgaaaacttattttttaatttagtgttttttgtttttcttggcttcttaagttggtttctttctgtagattgctcttctttttctctcctatcctgcagacaacaagtattttgtcacccatagcaattcttcctttgatatgtcttctaatttctcctgtctttgtccagtcccactgctattgtctggatattcacctcctcggataagatttagtttgtttcttcctc

SEQ ID NO: 30389 - DNA, 1058 bp, Homo sapiens
gaccagcctggccaagatggcgaaaccctgtctctactaaatataaaaattagccgggtgtggtggcacacacctgtaatcccagctacatgggaggctgaggcatgaaaattgcttgaacccaggaggtggaagttgcagtgagccaagattgcaccattgtactccagcctgggtgacagtgagactgtctcaaaaacaaaaacaaaaaaataaattgtttgctgaatcttcttgcaaaacattataatgtatatccagaccatcttacctgtaagtcttgtttcttttgtcagtgcctgaaaagttttgcataaaatttgtacttctgtttctgtcctgtcattctgattacttctagtaaatatgacagggtggtagtgttctttatttctcttcttgtggtagccattatatttatattgtttcatgaacttagatgtgaaacaaaatattcaaattgaatccagatatgtaaacagaataacacatcatgaccaaatattgtttatctgagaatataaacttgatttaatatttaaaaatcaatatagacttctgcttctgcccacgataaagtcaatgggactgtatatacccagacagtatatataccttcccacctgaacaacagcaacatcacagataaaatatactaaataatggttttaaagaaactggacatcaagcacaaaggatagtgatcctttagacacaggaaataaataaggtgagctgtaagattgcttcagcttactgcatggagcatctcctctgcattgcattgcagggagatggaattcaagggaaatccagtgggttcactgaactgaggagacagaactgagattctagggagaacaaggcagttagagttggccggacacagtactgaagaggagagagcttcaagagacctagagatctgtagaaggtatcctctgtgtattcagcagtgtgctcatcaggcatcatgtgaggaaactactcagggctagggaaacactcattagaatggatttaatagtacagtgcctgcatttacactgtgctgcaga

SEQ ID NO: 30390 - DNA, 1421 bp, Homo sapiens
tttgttctggttgcatagcttttaatcactttcagtgggattcaatagtacatatttatttgttgaacaggcagatattaggctacgcatttaaaatgacaactctgcttctggtcagttcaaaaaatatatatactgagctcctaccatgatgtgccaggcattgtgctgagcaccataacatatgattaagacaggttattgaactcaagagacctctatcatgtcttaggtcagtgttttattttgacaggtatgaatgtattttcagaactatggagatagtattttaaatttaaatttatttattaaattaaattaattaaattaaataaatttatttaataaacccgggatgtattgtctctgtacgacagccatgtgaccctcttctaagatttttttagctaatctattttaaaagttttaaaaattttatgccaatatagtgtatttttctgctaggcattctaccttgtgcttattttttattaaatatctatttatatattgtcactccccagtctgcaagtatttgtactttgaacctttgagtcactatttccagtacaacgttgatttgattcagtttctattatgtttaattaacatttactgagaacctaccatgtgcccagatcctcccttaggacccaagaatacaagataaatgacctatgatttttatcctagagtgtataaagagtggtggaagaggtagatgaataaaccaaaaaaaattatgcaagtatatagttacaatctaaagtaaaacccaaatatatgcccattattttctccttatcataaacccctttaatgctatctaacaagtttgcctgatagcctgtgacatacttctccaagaatgacaaatgtcagtgaaattgtgaagattagtttggctactataaatgctgtgtgtagaattcacatgtgacaaattcacccacatatcccatactctattcctacccagttacacaatgacattatcctggtacaggattttttaggcccattcccatccttactagaatagctttggaaatttcaaagtaagcccaattatagtttgcattgcttttccaaatgtttcaaataatcatattcttttggattttctctgttaacattataccgaatcttttatttctgcctcacacctggcatgttttatattttaaaatgtatattctatattgtataaatatttatgagacagattaaattacctagtataaaaacaatatacttttacacagaactctgtattccctcagtctaagcacaggcttgctttttacaagaaaagatgttaaagatcctgaagttgttcatacttttcccacaaattaaagctctatgcatcatttatgaaagcagcgtgctgctatgatcttaaggtgctggagcctgga

SEQ ID NO: 30391 - DNA, 1180 bp, Homo sapiens
tatctgtccccttggctaaaagagctgttaaaactgtggttttgcctggattagcaattgcacttggggaaaaagcagttttggttacttggcttctttttctgggtttttgccttttttcaaaatttggcttaataattccttgccatcctattaactatttgatacttttcagaagctgaagttttataatattttatccagtaattttaggtaatttcagcaaggagatataaatagctcagcctggaatgactggaaatagaaatcttcttaattaacatctctttcagattgtctcaaggcaactcaaccctggactttcaaaacaagacttctatcctcctctgcacccccagcatggtctttttccagtgttcatcagtttattgcacacatgagaaatccatatgaactcaccatctggttctctatagttttactaaatagttctttaatcactttacttctattgctttcattctgatctgtcattactcaccagtacaacagtagtagaatctacacctccatctttaggctcccttagtctgttctagagattgtagccaaaatgacctttttaaaattcagatttgatcatgccattgccctgcttaaagtcctttaatgacttcctatgatattcagaacaaagacccaaattactactattgttggtcaggccctgcattgtctgccctgtgctgcctcccaaccacagggccttggaggtaaaactgtctaatacaggtctagaaaaggctattggtcctaacttagaaagttgcttttttttaatggcagtgaggagtctgcagggaaccacaaaaaaagacttaaagcaatagaaagatacatctgcttccgtagcattgatattggactgagtggcaggactgagagacctgtgaagatgacaagtagtgaagacctggtccaggaggatggcagaggtttcatacagaaatgctttttgagatagaattagtgagagtcagcaacttactgcatgtagttggtaagggaaaaagataagtcaaaattataaaatatttcacatgtaaatttatcaagcagttacaatgtattagacaccattttaaacatttttctatattctcttttacttctcacagtcatcctgtgagataagtattgttagtatcttcagcttttc

SEQ ID NO: 30392 - DNA, 1031 bp, Homo sapiens
ctctagtgaagtgtctcgttttaaaattagtttatttgttgagattggagagtttttcctatattctgggtattagtcctttgccagatatttgatttgcagatattttctctttgcctatagtttgtcttttcatttcttagttgtatcttcacacagcaaaagtttcaaattttgaagtccaagtttattgatcttttatagattatgcttttgatatcatgactgaattcttagcttatccacagcttataaagattttctcctgtatttattctataagttgtatagtcttataactgtgatccagtttaagttaatttttatgtaaggttcaaggtttatttgggggagcagtggcatttggagatccagttgtttcaaaaccacatttgtttaaacagccttgaactttgacaaattcaatttgttaaaaggactgttctttgcactcagacttatcacccctcctacttgtttattcccttgtcattttggataaaatgcttgtagctcctctctgacccacttaatgatcttagacaaattacatttccacttgttatgacatttttttcttaagctatatttgaccctttcaacctcaaagtatttgaaaagaaataactggtctgttaactctggataaatgtatgtgattaattttaaatgattattattcattctggaaagcattatttaagtctatgtggtatgccctgactagtcaaatacaataaagagattactccttagatatggggcatagagtctagaaacataaagaaggaaatgtgaatacatattcctaacataagatgtttcagatagccagaatctctttgtagctctcttcttttcagtgctttgcattttcctattgattcattaaaaagtagttaaggggaaaagaagatgagaagaaaacctcaaatagatctcagtgattcttcacatttttttaaagagctgctagtcagtcttttagcagaaagtgtgtccagcctaagcagtacattactctgtagtct

SEQ ID NO: 30393 - DNA, 1059 bp, Homo sapiens
gtggttctcaggtcgctggggtaatgtttcacaggggagtataactgcctctgctgcacagaggagtttacaaaaggagtggggagtagtgggcagcagtgagccttacctagttcccacatcgttttcaaggtcggtgtcactcctgcggtgctctggtgacagcacctggtttagatctaggcagtctgcacacagaattcagacctgccccagcctataagcttccccacagagatagcaaccacagctttcaggccgcacccctccccgtctttctgcaaagtcacgtgcccagcttctgcactcctgtctgcagctcacttcctgctcattccccaggttctgttcatggggtgtttgtcctctcttgagattatatcacaaaattcagttgggagctgcatttaccctgtgaattctccctcgttgaccgacttccccaagggctcctgtgagatatagtcaggaatcacttcccttggttcacactggagactgggaatgcctgcaagccccttcccactgttgcttctacttttatattttatgccactttctaaatttgatccagctcttggtagagtttaaggtcttcttccatggcctgaattttcagattccccagtgaggatgtactcagaggcagactctccccttctcacactctgagaacttagtttttcacctgtctcatggagtaggctgcagcctgccatttgtttcaaagggtctgtagattcttttgatttttctattaagttcctgtgttggttcttgctttaaaaaaaaaaattcacagtgtgaatctctacacactattctgaccttccaagtgggagaggcaagctaacactgcctccaatctgccattttgaaaaaaataaaaaatgaaaaaatgagggtttgtattatgaagtgacgttggattttattgaatggtttttctgagtctattgagatggtcatatgtttttttttgtttttagttccattgatgtggtgaatcacatttattgacttgtatatgtttaccatccttgcatctcaggaataaag

SEQ ID NO: 30394 - DNA, 1033 bp, Homo sapiens
ttcacattcatgtctttaaaccatctgggactcactgtccagatggaaatttgtaatctctacttttctcaatatgataagccagttttctctataccacctactaatcaatctgtttgtacttcattgacttctaatgctgtctctaccaaataccagattccatgtgtggtttatttctaggctcttcttttattgtctgaaatgtgccagtttttttttttttaatcaaaatggctttgtgatctgtcttaatatatgacaaggcatatcttactaccggcatacacctcagaggtactgtaaatgtggttccagattactacatcaaagtgaatattgcaataaagcaagtcacatgaatattttggtttcctaatgaatataaaaattatgctgaaactatacataccttaattttaaaatactttattgctaaaaaaatgctaattatcatctgatccttcagccagtcatgatcttttctctagtggagggtcttgtctaagtattgatggctgctgactgatcagtgtggtgattactgaaggttggtgtggctgtggcaatttcttaagacaacaaatttgttgcatcaattgactgttcctttcatgaaagatttctctgtagcttgcaatgctgtttgatagtattttacccataaacttctttctgaattggagtcaggcttctccaaccctgccactactttatcaataaagtttatgtaatattctaaatcttttgttataatttcaataatgttcacagcatcttcaccaggagtagattctgtctcaggaaaccacttcctttgctcatccataaaatgcaactcctcatttgttcaaattttatcatgagattgtagcagttgagttctgtcttcagggtccacttctaattatagttttcttgctaattctaccatatctgcaatcactttcaccatggaagccttgaaccacttgaagtcattcatgagggttggcatcaacatctaaatttctgttactgctgatattctgac

SEQ ID NO: 30395 - DNA, 1051 bp, Homo sapiens
tgacaaacccacatactgaatgggcaccatcatactgaatgggcaaaagctggaagcattccccttgaaaatgggcacaagacaaggatgccctctctcaccactcctgttcgacataatattggaagttctggccagggcagtccagcaggagcaaaaaatgaagcccattcagatagagagaaaggaagtcaaactattcctgtttgcagatgacatgattctgtatttagaaaatctcatcatctcagcccaaaagttccttaaacagataaacaatgtcagcaaagtcccaggatacacaatcaatgtgcaataattgctagcattcctatagatcaacagtagtagagccaagagccaaatcatgaacaaactctccttcacagttgccataaaaagaataaaacacctaggagtacagctaatcagggaggttgaaagatctctacaaagagaactacaaaccactgctcaaagaaatcagagatgacgcaaacaaattttaaaaaattccacactcatggataggaagaaccaatataattaaaacggccatactgcccaaagcaactatagattcaatgctagtccattaaactaccattgacattctttacagaactagaaaaaactattttaaaattcatgtgtaaccaaaaaagagcctgaatagctaaggcaatcctaagcaaaaagagctggaagcatcacactacctgactccaaactactgcaggtctacagtaaccaaagcagcatggtactggtacaagaacagacacacagaccaatggaacagaacagagaacacagaaataagaccgcacacctacaactatctgatcttcaacaaaacagacaaaaacaagcaatggggaaaggattccctattcaataaatggtgctgggataactgtctagccataggcagaagattgaaactgcactccttccttataccatattcaaaaattaactcaagatggataaaagacttaaatgtaaaatcccaaactacaaaaaccctaggagacaacctaggcaatac

SEQ ID NO: 30396 - DNA, 1094 bp, Homo sapiens
gtacccatgttcatcagtgatcttagctagatcttctgaataacttgctacagcttctccatcagcacttgctgtttcaccttgcatttttatgttgtggagataccatctttctttaaacctcatgaaccaacctcttttagcttagacttttcttcagcagcttccccacctctcttcgcattcatagaattaaggagaattagtgccttgtgctagatttggctttggcataagggaatattgtggtcattttggttgactacccagaccactcaaaaattttttttatattagtaatgagactggtttgctgtcttatcatttttgtgttcactggagtagcacttttaatttcccccaacaaacttttcctttgcattcacaacttggttgtttggtgcaaggggccttgcttttgggctgtctcagctttcaacatgcctttgccactaagcttaatcatttctagcttttgatttaaagtgacagatgcatgactcttgttttccccttcaacacttagaggcccattgtagagttattacttgacctaattttagtattattttgtctcagagaatagggaggactgaggagagggaaagagataggggaatgcctgattggtggagcagtgacaatacagacatttgcgattaatttctccatcttatatgggtgtggtttttaatgccccagaacaattacaatagtaacatcagagatcactgatcacacacagttcaccataacagacataataataatgaaaacatttgaaatattgcaagaattaccagaattccagagacacaaagtgagtacatgcccttggaacaatggagctgatagactcacttggcacagggttgcctagttttgcaatttgtaaaaaccgtaatatctgtgaagctcaataaagtgaaatgcaataaaacgaggtatgcctgtatttagtagggcaggtctatttttatttctcatcttttgcaaagttgatgtagctattcatggtcttaattcataggatatcatacttttgtttgtagaatttctttatttaaaaaatgtcttggtatttataatggaat

SEQ ID NO: 30397 - DNA, 1065 bp, Homo sapiens
gtaatcccagcactttaaaagaccaaggtgggtggatcgcttgaacctgggagttcaagacaagcctgggccacatagcaagaccttgtctctctaaaatacaaaaaattagctgggcatggtgcacctatagtcccagctacttaggatgctgaggtggcagcatcactggagcctgggaagttaaggctgcagtgagccgtgattgtgccactgtactccaacctaggcagcagagcaagaccctgtctaaaaaatgaatgaatgaatggactagagtagactagaggtaggagttaacgcaacataatgcctttaatagagagttcctggatgcccttggaatttcagctcttttcgtgtgaaaggactgagcctgctgcatgccagtgtgcactttctgcttttttcctttatttgccttagcaaggagactcagatcttgaaggggcttggttggcagggtagcaactatcatttctgctttgtatgtactgtcactaatgtgaaagctgtgaagggacagatgctatatgtaatcaagagacagagctttccatagggtattcttttactgtggaatgtgtttcatttctcatccactctaggaatgagaagtataaatggtctagcttttgtgttgattctgagagggatcattgcactagtgcaggtttggctggttctatttatttaaagtaataaatagcagtgagggctaaattgagactgcttaactttgtgacccatagcaacccagttggggtggaggatggaggaaggccctttatagtaaggattattcagtttcatcttttaaaaaagtcaaagatatatatatatatatatatatatatatatatatatatatatatggattttaagttatatattacagactacttggcattgaacaaaaaaatagctttaaattcctgtccctatctctccccattcctgattctcactccccattttttaaaccctcttagttgtttcttctggtgttttacatttctaaataatgttattttaatgtatatcttgacttttctatttaagtta

SEQ ID NO: 30398 - DNA, 1027 bp, Homo sapiens
actttcctaacctctgaatgttggaaatcagtgtcagacttagcatgtccaaaattaaacttagtttccttcttccaggcatgctttccaggccacaaaacaagagtgatactttactctgttcataacccacatctagtccgtcagcaaattctggcacctctacctacaaaacatgtcaaaacttcaagcccttcttaacatcagcattcttaccttcatccaagcagctgttatgctgtgaactgttgcactaaatagcctcctgactggaatccctgccttcctctttgcctttttatggtttatcttcaatagagcactcagagtgatgctttcgagacttaagtcatatcacatcactcttctgctccaaatctccagtaacttcccatcttgcttagaataaaagccaaagccttaaggtggtttacaaaatctgtgtttaacctggtgcctgctgcctgtctgcatcatcaatcttccctttctcaagacacactgaccctgtttttcctgaacatgccatgtttacttccacctcaaggcctttgcacttgtttcttatgcctgaataatgtccccagttttcttaaatgttgccaccttacttcattcaggtgtattctcaaagttcagctcccaaaaagtctttccctgaccactccacctaaagcagtaccttccccagtgccccagccagcctacccttggccactctgatttttctttttataatttatcaccatcattaatgatttgcctattgcctgctctctagatcaaaagtgccatgagagcagggacttttgatcacaacaaagtgttagtactcaagaggtgctgcacaagcatttgttaattggatgaatgaatgaatgcttgtggatgtatacatgcaatggactatcatataggctttgatgggaaaataataattcaaactttctgttttatacttaaacaggtgattttgttttatcaatatgaaacgtatgtgttggaaacaaatatcacattgccttta

SEQ ID NO: 30399 - DNA, 1089 bp, Homo sapiens
acccgggagtagagtgcagtgagccgagatcatgctactgcactccagtctgggtgacagagtgagactctgtctcaaaaaaaaaaaaaaaaaaaaaaaggaaaaagaaaatggtttcctggagaactaagatatttgtcacctggtggagatttttagttcacttgtaagttggaattactgtccctatatttcttcactgtttactcctcccagctgcttgcttgcccacctcaacccaagtctgttgatgcagcatcccctacaagcagagaaaacatcttcagtttctcaaataatctccttcagtagtgtgaaaagagtttgtaatttagtttccactttttaatgatcaatataaaaaataactaaaataaaaatcactgggtttttttcttcctcattaggtagatacaatgcgcccacgtcatggggaaacatgtcggatgccagtgccacatcacttcttcctcagcctgaagagtttcacttacaatactattggggaagataccgatgtcttcttttccttatatgacatgagggaaggcaagcagatcaggtgagagtcactggaaattctggtgaggttctatgttaggatggtatgggtcataggcatctctggccatcagagaagacagatgcacagaagaggcaaaacaagataaagtaacctcatctcattagctaggagttttggccccaattccctgtgtgcccttaagtcacgtaaaccataccatgggtggctgccttttttatgactttttccacatagaagctcaaaatcgagtcttggctatcaccacctcacagagagaaaaggatgcatctatttaataccacaaaaaaggcataggagaaacatagaaccaaacaaatgcagcagagacacacagctccagagtgcaggaagccctgggccttggcttgctgcatgtggaagagagggtttgaagaaaaagggggctgatggtgtcttgtctgggcagcccatgaaaggagagcatcttctgagtttcttttatattgcttgggaacttcttgtgttaggagtgctttatggcttttacttgctttagtact

SEQ ID NO: 30400 - DNA, 1091 bp, Homo sapiens
aaggaaatctcagcaaagaatttcatatccagccaaactaagcttcataagcaaaggggaaagaagatccttgtcaggcaagcaaatgctgaggaaattagttaccaccagacctgccttacaagagcttctaaacgaagcactaaatatggaaaggaaagaccattgccaaccaccacatacacacacttaggtacacagaccagtgacactataaagcagccacacaagttagcaaatagcttaaacaaataaacacgaacacaggataaaatttacacattcactactaaccttggatgtaaatgggcaaaatgccccaattaaaaggcacagagtaacaaggtggataaagaagcaagacccagtggtatgctgtcttcaagagacccatctcacattcattgatacccataggctaaaaataaagggatggagaaaaatctaccaagcaaatggaaaacagaaaaaagcagggattgcaatcctgatttcagacaaaacagatttcacaccaacaaagatcaaaaagacaaaagagcattatataatggtaaagggttcaattcaacaagaagacctaactatcctaaatatatatgcgctcaacacaggagcactcaaattcataaagcaaattcttagagaccttcaaagaaacttagactcccacacaacaatagtgggagacttcaacaccccacttacagtgttagatcatcaaggcagaaaattagtgaagatatgcaggacctgaactcaacactggaccaaatggatgtgatagacatctacaaaactccaccccaaaacaacagaatatacattcttatctgcacatggcacataccctaaaattaactacaccgttagacataaaacaatcatcagcaaatacaaagcaagcaaagtcacatcaaccactttctcaaaccacagagcaataaaaatagaattcaagaataggaaaatctctcaaaatcacacaattacagggaaattggacaacttgctcctgaatgacttttaggtaaataatgaaattaaggtggaaatcaagttctttgaaactaatgagaacaaagatacaa

SEQ ID NO: 30401 - DNA, 1034 bp, Homo sapiens
tacatagatcttctgaaacctgtctcaagcccagattaaaaactgtcctttaaagcataaaagacccactctgataacagtccccatgctgtcatatgcctcatacctcagcatccacttcattttatccacctactctggctccacactttgctcctgaccagggtgtggtcagccataaccagtccgtagcttcattccactgcccgggaggataattcagcctacccatggtccatctccacccaacactagccctgcccatggttttccagcttcagcccataagtcagaactcacaaggattcctgagtttgacctctgagatctgtccttgtccttgtcctaaactctgaactcacactgccactggccttacctgccctaccctatattctttgagggttgcagagatgtaagacatacagtctctgctgctttgcagacaaggatgctggacttaaaagacatgttggggttctccaagaccacccttagtgattattcactacaaggactcatagggcttagcatatacttgtagtcatggctaagacttatgacagtgatgtagtaaggatacatagctggatcataacagaaagacacagactttggaggaatctacacacaagcttctttgtgctctctgtctcacacatgaggggtcacacagagcactcttccagcaatgaaaatgtagcattatgtgtgtgatatttcagccctgggaagcccattagggactcagcacccaaggtttattgggggctgtcacatgggcaccctctgtgtagcacatgctaaattccgagctcccaggagggaagcaggtatttaacataagccgtattgttcacacagacagtctaggcatagtgagccacgcttagttgttgggaacactctgaaaaccaaataccagatgccagctaagggccagccttgcaagcagacccttctaaatagcagtctcaggcctgctatgttaactcttttctgtgccccaagctcctggttcatagaattttggc

SEQ ID NO: 30402 - DNA, 1842 bp, Homo sapiens
ttaattcaactaaagatttgtcagccgggcgcggtggctcacgcctgtaatcccagcgctttgggaggcgaaggcgggcggatcatgagatcaggagatcaggaccatcctggccaacatggtgaaaccccatctctactaaaaatacaaaaattagctgggtatggtagcacacacctgtaatcccagctactcgggaggctgaggcaggagaatggcttgaacccaggaggcagagattgcagtgagccaagattgtgccactgcactccagcctggccacagagcaagactccatctcaaaaaaaaaaaaaaaaaaaagatttgtcaatttaatttagctttccaagaaaccaactgttaacgatgtttatcttttctgttgtctttctcgtctctatttcatttatttttgccctaactttcattattttcttccttttgttaactttgagcttagtttgctattttttagttccttgagatataacattacattatttgagatcttttttctgcaggtaggcatttattactgtaaatgtttctctgagaactgctttttctgcatgccttaagtcttgataggttttgttttcattttcatttatctcaaggtatattatgaatttccttctttgacccattagttgttcaagagagtgttgtttaatttccacatatttgtgaaattttcagttttcctcgttactgatgtctggtttcataccattgtggtcagaaaaaatagttgagatttcattcttcttaaatttgttaagatttgttttgtgggccaggtgcggtggctcacacctgtaatctcagcactttgggaggccaaggcgggcagatcacgaggtcatgagatcacgaccatcctggctaacacggtgaaatcccgtctctactaaaaatacagaaaaattagcggagtgtggtggtgggcacctgtagtcccagctactcagggggctgaggcaggagatggcatgaacccgggaggcagagcttgcagtgagccgagatcttgccactgcactccagcctgggcgacagagcgagactccatctcaaaaaaaaaaaaaaaaagacttgttttgtggcctaataaatgctgtattgctgtatcccggaaaatgttgcatgtgtgcttgagaggaatgtgtactctgttgctctgtatatgtctgttagatccacttggtttacactgttactcaagtctgctatttcattattgattttctgtttggatgatctcttagcttttcaaagtgaagtattgaagttccctactgttattgtattgtactatatctcttcctgtagaactattaatatttgctttatatatttagatgctctaattttgggtgcaaatatatttacaactgttatatacttggatgaattcactctttatcattacagagagtccatatttgtcttgtgacagattttgaatatctattttgtctaatttaagtattgccactcctactctcttttggttatatttgaatggaatatcgtttcttttttttttttttgagacatagtcttgctctctcacccaagctggagtgcagtggcacaatctcgactcactgcaacctccgcctcccgggttccagcaattatcctgcctcagcctcccgagttgctgggactacaggcatgggccaccatgcctggctaattttttgtatttttagtgagagatggggtttcaccatgttagccaggatggtctccatctcctgacctcgtcatctgcccgccttggcctcccaaagtgctgggattacaggcatgagctaccacgcccagctggaatat

SEQ ID NO: 30403 - DNA, 1028 bp, Homo sapiens
ggaaatcatcattctcagtaaactatcgcaagaacaaaaaaccaaacaccgcatgttctcactcataggtgggaattgaacaatgggaacacatggacacaggacggggaacatcacactctggggactgttgtggggtgggggtaggggggagggatagcattgggagatatacctaatgctggatgacgagttagtgggtgcagcgcaccagcatgtcacatgtatacatatgtaacttacctgcacattgtgcacatgtacgctaaaacttaaagtataataataaaaataaataaataaataaatacagtgaaaaaaaaagaaaaagaaggtccacatctatcaccacagtatgaggtttaaggatttagaaagcacttttacctaaatatgcctttaataactacatcaggtataacacgaggatgctgctaaaagaatggaagagtaagatagagaggcatgaaatgatgaagactttgatggggttaggactaaagagaataattttaaaaactgaacaattggcccaggtgtggtggctcatgactgtgatcttagcactttgagggctaaggcgggaggatcgcttgagttcaggagttcgagaccagcctgggcaacatggtgaaaccttatctctacaaaaaaaaaaaaaagacaaaaattagctcggcatggtggtgtgtgcctgtggtcccaggtgctctggagactgaggtagggggatcacctgagcctggggaggtgaaggctgcagtgaccagtgattgtaccgctacactccagcctgggcgacagtgagaccctgtatagatcagttaatagatagatagaaagaaagaattcattgttaacagcatatagtatttgaaagcaagtgctgtattaagagaataaaaggaagcattggtaattgaaggtaaattgatgcctttgtaacaataacttggcagttctgcaaagctaaatgttttttatagccagtcatgagtagactgcaaaatttcgagagttcagtcttg

SEQ ID NO: 30404 - DNA, 1021 bp, Homo sapiens
tttagaggaccctctgactcttccccttgtgctcagaaacacactctgtccttttctttgactcctgacaaaaatgtgcatgtttcatcactgaccttcaagtgatgtttctttcttttcgtgtttgtcttaattgttcttgtttttctctgtgctgtcccttcattttcgcccctttctttctgacgcagagatgaagatagttgggtgtaagttctgtcttttgtgtgctctgtctgcttattgcctgctttgttctcatcttcatttgtttcatggaatgttgcaatactggggtggggtatcatgtacatattaataatcctcatcagcctcaccttcttgggtaactgacaagacataaaaagaaaagctaccagcccatcctataacactgtgtattacttttgagtattcactaagatctgaagaaactggagacatattggaatgtctagaaaatcttaacaagcttaaggtgtatagatacaggaaactatttttgtatgagactgatcagttgcattcattgaaaagaaaaggaatcgtgcttactccaagccaaaagaatcagaaaggtggaaagcttctctttttggctttgtgggacatacttcacatgaaaaggcaaaccaacagagatatggtttttggaagaaagctttcctcaaggggagcaatgacattatttaccacaagtgggttcatagcgctggtcaatctgagtgtcaaatgaggctatggcagtgtatctaagggatggtttaagaataatcacatctagtctcaaaagaggttggaagatcatcacatccctgactcaagaaaggacaaactatctatagtgatgtcacactatgcccatacctctcatcctgttagagcaaagagcatcactgactttgttgcaatggaaaccagaagtgtgacaccaaagacatggtaagaagaagaaagaatccttctttcctgggtactctaaagaagtcctctcaagagcctttttttttcttttggtctc

SEQ ID NO: 30405 - DNA, 1400 bp, Homo sapiens
aagaaaggcatattacttatagaaaattcagaaactatagaaaagcataaggaaagaaatgtagaacaaaaatggatttttaaattataccattttattaggttgctagagaatagaatttcacatgcatttaaaatgaagggcagttgccaggtgataagaatatacaaggataggctatccacatggagtgggagaggcaccttaaaaaaagagtatattttgttcgagcaggggacagggactcaataggatactctgatgttcaaacttaaagtgccatctggtgacaggggtctagcttggcagagagtgactatgatggtgataatggccctattatttgatcttggctccaggtaagacttggcagctcttcttcccaccaggcctcagagaagccacaccaagcacataagatctactcatagcccaaggttgtattgagggggtggacagcttattgctaaaggaaggagagaaattgaagcaaaaaaagaggaggaatggaacacaagtgggaaccagtaaaaacttggaggtgacggtttggttgtgtttgtggggctagagtcagtgtaattagttgcttataactacccaaagatacatcactggtaagtgttatgatcagttcgacagataggaaagatgactttggtcccaagagctgctcaaattcttcatgtggaatggggcagagtatagttaaaatggatggatgggtagagggacaatgaaactgaagctcaatgagagcagagatattatctctcgttcacctctatatattcaggttctcaaacagtgactggcacatggtaaatgtttagtgaatgataaatcgatggatgggtgaaagatagacaccaggaccagtagtagtataaacatcttagacgaggggcaacaggaatctctttgtgagataattaaaatcatgctacagaatttgagatgaatgtgagaagtctataataggataatagactcttcctaaattaggaagtggcccttagtgaggagacatgctccattgtttttgtgaggtggccagagaaagatgcactgaggctggagtccttcaaatggaccctgtaacacgagcaagagagctgaggagctagaagtggacccaggcatatctaggcagcagtcccggctggcaaaaattgagggcacccaaggggaagaccctgaggagaaaacagcgtgcttagaaagatgagctacttctgtgcattagtgctatgcactagtgaaggtgcagctgccacaccctgtagtgtgaatttgtcaccatttctcaaactttatcattccaaaagtgtcagcagagttttgccttctcctgactattctagggaaatcaaagaaaacatttaactcaagatctttgc

SEQ ID NO: 30406 - DNA, 1031 bp, Homo sapiens
gactactgctgatgtggctgacctagtaagtgctgccagctgtacttcagcctggcttgctgctaatggtgtgctctcttgctgctcgctccaggaggcagatgtcatggaggaagtagagatgatggtggagagcctcctggacgtgctcttgcagactctgctcaccatcatgagcaaatcgcacgctcaggaggcggtaagagggcagcggtgcccgcagtgcacagccgagatcactgttagtaactaacatccaggttttcttgccttcttttctaacccggggcttctccacaacactccccctccatcttaccatcccaccaccttcatctcagccttccctcctgcatggttgtcagcatgctgccctcttcccttcttgagtctgactctcctctctactctgaaagctctaggttcacattcccaggactcttctttagggcagatctggggaatgtttcttgtcctgttttcctgcatactttgagccaagtcattttctatattgtagaatgaagctgggatgtatgtaagatgtagtaagaggttgaaggtgaaaaacagactatttcttctaggaaccccctcatacaggttctcctaaatgatgtacaggacagaataattttctcagaattggcttctatctacaaattagttgcttttgtccattatgtttgtatctaaatttttagcatttggaaaaatatgatgaggtaaatttcactggcattagtgaataacgatttttctgtgatctaattagaagagaaacaaactgggaaggcttctcaggaggggcagagagacaataccttgggcccctcatgcaccccaactccagagtagacttacttctcagccctgaggtggggatgtgataaacagttttcgtggaatctttccattggcagatgggagattacagtgatctctctgaagaaaaccctctggagcaagccaagctacagcgtgctagggagagcagggagcactcagggagcaggtatgtgttctggagc

SEQ ID NO: 30407 - DNA, 1050 bp, Homo sapiens
ttcttctgctagctcagatctgctgctgagcccctttagtgaatttttcatttcagttattgtattcttcaatcctagaatttatattcggtgtactttaagtaatttctaccctttttgttggcatcctctatttggtgagtcattgttcttacactttcctttaattctttaagtgtgatttccttcatttctttgtttaaagtattttccaagcaagtccaatgtttgagctacctcaggaaaagtttttatttacttctttttgcccgtgtatgggccatactttcctatttttttatatcttataatattttgttgaaaactggacattttaattaatttggcaactctggaaatcagatcccttccccacatccccagggcttgttattgttgctttttattgctttatgttgttgatgatgcttgtttctttttttagtgacattattggactcattgctttttggggtttttttagacagggtcttgctgtattgctcaggctgtagtacagtgatgtgatcagagctcactacaaccttgcctggactcaagaaatcctcccacttcaacctgctgagtagcttggattacaggcatgcaccaccacatgcagctaattttttaattttttgtaaagatggggatcttgctatgtttcccaagctggttccaaactcctggcctcaagtgatcctgttgcctcagcctcccaaagcactaggattacagatgtgagccaccatgcctggacccattctttaatatctgtattttttaactatatgcagtcactaaagtctccatgcagttagttaatgatcagctaataactgaacagatattttcttaaatgccttaaatcaataactctccgcattttgtaaagtgttttttttatgtgtatgtgttggggctcactgtcattgctccagcacttttcagttcagccatagccttcacttcctgcttgcccagagcctcaaggtcagcacaggtgagagattaggccttctcaggccttccctaggaatgtgcacagcc

SEQ ID NO: 30408 - DNA, 1086 bp, Homo sapiens
tccataaactctaaaaagttgagggagagtacctcagaaaaccataggggagagcttgttttgctctcagaagcttccagtatggattgtagcatgtgttgtggccccatttgggaatcttccatggaaggagcaaagcaggcataaactaatttgggttttgtttttcaggtgaacataagatccactttattccgggaatgattggtccttttctgggtgtgacactggtcccacagccagaagtacggaatatcatgattcccatctttcatgacatgatggactgggagcagagaaaaaatggcaacttcaaacaggtaagacacctggcagtgttcggggtattctctggaatggatcccttctgcttaggcaggtggcctagatgaccaagccatgattctagtggggatgggctgtagtttggctaatttgaatcctgttcaagggttttcccttacttgctggccaaaattgatttgtggattttctccatgaagttagaggccagaaaataatgaggccaggaaagaatgaacatcactataactttctgatcaaggaatgattgagactgtagcctcccagtttcaatcatgatagggccctgggagtgtgatgtcattcctttactgaggattttcactgtataatccaggcatttctagggctgcagcccagaccagatgacttctcatggctcagggtagcccagcattttatagactactgcacagaggggttggtccaggagatacaggccccttggcttccaactgaatggcttcaggctgtcctcctgtgtagttcttttgccaccactaagtgtaggagatggcccctgcctttatatctgtagctccaggggatagtaccaggaccaataggggctaatgatgaggaagccaattttagctaatcaaataaataacttgctaacagcaaaaactgtccactgtaagcaggcctgctttgggagatagagattttctctcttggcagatgatcttcaagcagaagctcccaggaaacctctaggggaattttctgtattggcttgggaattgtaccagttccccacta

SEQ ID NO: 30409 - DNA, 1044 bp, Homo sapiens
tgcttacccacgtaacaaacctggcacaggtaccaatcaatcaacaatcaaacaaacaatcaagcacgggtatcccctgaacttaaaattaaattaaatttaaaaaaaaagtgactgagtactgctgaatgcccttgcaaatccgtggggtaggaacaaatatagtcttgctccttatgatttaggtatccaataacaaatgcaggggcccggtgatggcccagtgataggaacagcagcctcaagggctctaggttctgtgagtacaaacagtagagcctgttatcctgaaggaaattggctggaggaaacactcaaatctcatttagctccatttaatgccagtcattagagtgaggacaagctccccagaaagcatcctttttgactggctgactacagggtaaagttctaaccaaatgtattttacgcatacaaattcttttgaattaatgtttttaaagggggaaaaaaacatctgaaaaaggcctcttttgaatccaaagtacttttctctgtagggaatccttgccttttgcccttagattggaaagagtacctgagacttttaagtcctatctctttttcaaaccattagggtgggaggcctttttgatttggggagcagaatggtttcttggtgctataggtaaaatactaccttccctgggatttctttggagcaaggacaggatcaggaagtagtttcccaccatcctcacccaccacaggaactggatttcccattctttttctgaggtcatctcaggtttatgaagtctctgcttccttctaggtggaggccgagttgattgacaagctggacagcatggtgtcagaagggaaaggtgacgagagctacagggagctcttcagcctactgtaagctgctccagccccaggcacaccacactgggggatgggatgaagtgggccaatgaaaagtagaggttgcaactgcactggcaggctttagaggttggtcatcaagagggacctgggttgttcctgatggtagcaatgctcaacttctgtcaacaagaa

SEQ ID NO: 30410 - DNA, 1033 bp, Homo sapiens
ttagcccatttttcctgggcctttcgagttcaaagctggccttggggccccttttacagcaggagacttctttgttcacaccaggtccgtagcttctcctgcagctgcaattagacagggaagagaggtgggtaaagtgctgcacctccccctttccaaaacattttctaaagtttggctttattcaccgtggcctaacaaaggagcagaaaataatttcttaggctccaaggccttattctagccgcctgtttgatttctttagctgccttctacaagcagctcaaactcatgcccaaaagcaacttcattctctatttcttgtctcaatggtggtatctacaaaaaggccaaagtctttaatatggcatcactggcctttactcacttctccagaccaatcttctgctagtccccagtactcatgccctacacaccagcctcccagtgttgcttcttgctaacatgaaaggaaacagcataatgttgatgatggcccctgtttattgaaaatctaccacgagtgctctacatacattttctctaatcccataagcatcctcattctttttatccatgaggagacaactaaagtatacatatgtaacaaacctgcaggttgtgcacatgtaccctagaacttaaaatataatttaaaaaaaaaaaagaaaaagccaaaaaaaaagaagaagaagtaccactgctaggatttgaacccagatctagctgactcaagaaccatgccctatctctgtgtccatgttgtcaccacttaatcacttgtattttcccttcaggtttctctgtatgctgtgttctctcccaagagtggtcttccaactcacccctattaaggaagctttcccaagccaggagcttacctttccgtgcacacattgaatgatgatcatttgtcattctgtcttaccttacaaaagaggaccagctccttgaggataggaaccttgtccttatctccctgttcccctgtatgggggccagctcctggcaggtgcatagtaaataatgagtg

SEQ ID NO: 30411 - DNA, 1066 bp, Homo sapiens
tgcctggctccaacagagaaaggacatatttctttttgctggtatttgttctctaggaggagctggccaaaagaattcacatgtccactgctgcttctgcagagtggcaccctcagaccccaaggtccagccatcattcctctctcctcctgaaaagtctgtcatcccaactgtggctgaggggacagtattctggcagtggactccttctttaacacagaagggcactctgtgcttccctttttcctgggcccactgcacccctgcatccatggcatgtgggtgctaggaactggggttctgtagacgccaaagggtactcatcggctccacagccctccctcctcctgttaggaagcagtgggtccagctggatctgggctgcagtttcttccaacaggtacctgtccttgctccctgcttttcccactgagcctgggcagtaggagagctgactctagactttggcaaggagctctatgtcctgtgctctctctatattctctcattctcatctctactcttctgtcctgttttctcttctcctcctggcagatcccagaggctgcaggcgttcactccttgctgcacattcagctatctcatcctgaatactctttagacataaactcactctgttgccctcctcttaagcagcttcaatccctggccactctcccctgtggaccacagtgccttgcttggccagcgtttttagttccaggtgctggcatgccccacatgtgtgctggatacgtggtgcacactggagaagccacaagctgtacttctcccagagggtggctcaagaagtaacctcccttcatgccatctgtttccacccttcagctgtgccagcagcccccagcagctggagtctggatagcggagcccaagaggcccagcccttcctgtctgcccatatggggcgcatcctggcccccccagtgcctccccgaagcctgctgcatggtaagaagacctccagcgggtcccccgatagtccctggtctcagactctgctcaagggccacagcaacagccatctaagctgagaagatgggcc

SEQ ID NO: 30412 - DNA, 1055 bp, Homo sapiens
ggcccgcatggcctgggagcacggccgaggggagcagtgaggggcaacgaggcggctgggatgccgccctcagtaagcagcttgccaatcactccaggtctgaaaagcaagtcccccagccccaccccagggagccagagaggcttgcactcaggagagaaccacccccaagtctccgttctactgccgtgaactcatgtgttgccatgtacagaggccacagcagcatgaagggttgtggcttccctttttatttttttacatttccatttctatgggttttcctttctttcctttatgcagtagatgctttcttcctcctgcagttctggaccatgtggagctacatggagaaattgcacagacagaatcactttgccacactgcagggcccaggagtgggagcccaggccctccctccagggtagagatgcaccgaatggaaattgcactaaggacctcttcctttgctgtatggacagaagagttcatggttgcattcagggattgcaaggaccatatagacatgtcacaggtggaaaaagggccacaagccgttttgcacaaatgcctgcccacctgcccctcttccatccaggagtgtgctactgaggggctggctggaccaacctgctggctcaggcatgtgactggcctaactgcatgcccagggcactgccagggttcaatgggccagccgtctcctactccaccttggatttttctctccatcacatcatttctgaccatttgctcccttccattcttgaaacacctcatgccccacaggagccccagtggtgactggatctgcaagggttatctcccgccctctggggtttgagtggaggtatggagccagagaggctatcctagctaccttcctcctagggggagctggtccccttcctatgtggtagagagactggtgtaagagtgtggggtgtggcaggcgccggaaatcctcaaagctttcagaagcatccagaatgcctaccatcagctcctgaatcagggattttcagcactacctctgagccatggggttggctgcc

SEQ ID NO: 30413 - DNA, 1101 bp, Homo sapiens
aaaatcggtgatggaaaagctcacctctaatgattcatctccgtgtctcctattaaaattgctggcggagttcttttctggtggattggaacagcttggtgattgctgagcatctcccgtccctctcttttccagtttgtatttcttatctgggaagattttaccaggacctcaaagacagagatgtcacattctcaccagccactattgaaaacgaacttataaagttctgccgggaagcaagaggcaaagagaatcggttggtaagtagctggtgatcctccccaactggccctggctcatgttaaccctcggcttcaccagccgtttgataaaaggccttgcccacctctctgttcaggaagccagctactctctccataaactaatgtgagaagactgaagtgcttctatgtccttcccaaagcagcatgtgttctgcaactgtgatttttttttatcctgttagtctttattaagcacctactatgtgctaggcactgggaatatcaggggaaagaagtgacagtcggacacacaaataatgcaatgtctgggtgtcatgaagaaaatggaccagcaggtgctgatttagagtggccaagaagtctctgaggaagggttatcattgaagtggggtaagaccatcccatacagggaacagcagtgtgagtgcccagaggcctgaaagagtgtggcatgtatgtggacaggagaaggtgacagggtgcctacaggataggcaagggccgaatccaagacaaaagccctagtgaagcaatgggttttctaacttgaatttctctgacagtctctggcttttctctctgttaaaggtttgaaccctggtgacacttaaattcatttggtggctgtcagcttggactgagcatgtgttaagagtccagggtttacactggctgaatctgactaccagtacaggcagggcaccgaaaaatgccgctgtgggccaggtgcggtggctcatgcctgtcttcctagcactttgggaggccaaggtgggaggattgcttgaacttaggagtttgagatcagcctgggcaaagtggtgaaatcctgtctgcacaaaaaaatttttag

SEQ ID NO: 30414 - DNA, 1076 bp, Homo sapiens
agtgctggttgtcagtagtagttaatgtgtattattatataggacctctaatctcagtagtattaatagtaggaatgtggctgggtactgtggtgctgtgcaggattcaagtttccttgtctggtgaggaaggcagctgtctgcacctgttggcactctggacaggtgaggaaattttgaggttgtcttttttttttttttgagacggagtcttgctctgttgcccagtctggagtgcagtggtgcgatctcggctcactgcaagctccacctcccaggttcacgccattctcccgcctcagcctccctgggattacaggcctcccgagtagctgggactacaggcgcctgccaccacacccggctaattttttgtatttttagtagagatggggtttcatcgtgttagccaggatggtctcgatctactgacctcgtgatccgcccgtcttggcctcccaaagtgctggggttacaggtgtgagccaccgcgcctggccaaggttgtctttattcagtgccggtaggcaggagtccacactataaagtccaaggtcattcctggcagtagaaggttttttcctgacagtttgtatggggaagccaggaggtaactgtttggcatgttcttgtttggaaacagcgggctctcccattgatagaacactaaagtataccaggcagcattgtgttctatatggcccctgatcaggacatttctctggcattcttctgctggcaccagagacctggctttggtgtttttgccaggaattctccagatgcaggagagatttgtcattttctttaattggggctactttggtaaaatctagcactctgttcaggcatgtttttgatgaacagacttagttatagaactttcagttttattttttcccaataagacaggaaaaaaaaaaagtcccactaatattcaagagaaaaataagtagaggccagaagtgacttgaaataactggtctctaatttcttgcagtcttgctgtagtcaaatgccccctccattctgctggtctttaattccagataagagtaagtaatggccaggcgcgg

SEQ ID NO: 30415 - DNA, 1083 bp, Homo sapiens
ttgaagagcaatactttactagcataatttattttaccttccaaatcattttcttttttttctttttttttttttttgagatggagtctcgctctgtcacctaggctggagtgcagtggtgcagtctctgctcactacaagctccgcctcctgggatcacgccattctccttcctcagcctcctgtagtagctaggactacaggtgcccaccaccacgcctggctaattttttatattttttagtagagacagggtttcactgtgttagccaggctgcgatctcctgacctcatgatccacctgcctctgcctcccaaagtgctgggattacaggtgtgagccaccgtgcctggccccccaaatagttttcaaatctggcctttcctctggctttttaactggccttctattttcaatccccttttattccgccttccacatttcttccagcaaattttttttctaggccatgttttgaatacaatgtgctaaatactgagccaggtatctttattgtagaatttatattccttcaccacttgatcctcttaagaaaatttgaaggtagggaatatcttcattttacaagtgaggaaacaaactgtggtccaaagaatttaagtagcttgctgaagctcatgtagcaaaatgagctggtacttgttttcagtttgaaactgttcttttaagcattaacattctatgccacagagtgacctttataaaagacggatctgcttataccattctgctcttgcttggaggctaaaatcctatctccttagcaggtctccaggttgccctatgttcttggccctgttacttctccaggctcattttctactcttctcccatacttcctactttatgctttagtaatacagactgcttggatttccttgaaaacattctgctttcttgtctctgaatcattgttcatgaaattccctatctttttttaggtgagacagagttgctctgttacccaggctggagtgcagaaatgtgatctcggttcattgcaacctccacctcctgggttcaagtgattctcctgcctcagcctcccaagtagctgggat

SEQ ID NO: 30416 - DNA, 1026 bp, Homo sapiens
ctcagaaaatcagcggtggttgttattattattaacgagactctgtcgcctaggctggagtacagtggtgcagtctggacccactgcaacctccatctcctgggttcaagcgattctcctgcctcagtctaccaggttgctgggactacaggcacgcaccaccacaaccggctaatttttgtatttttagtagaaacggggtttcactgtgttggccaagctggtctcgaactcctggcctcaagtgatccacccacctcggcctcccaaagtgcagggattacaggcgtgaggcactgtgcctatttgcattataaaaggattcatatagaattcctgcacggtcttatttaaaagctttgatttgttgaaatgctacttccacagagcttttcaggatcatgtctggtgagtagtttgactagatagaatctttgtcacacagttcatactgaatgttcatgcggctatgaagggcaaaacatctcctctgtgcgcagcttgtatcggtctgggctcgaaagcacccagactgagctctgtggctctgtgatagagctctcaggagagggaggatcctcagagggcttgtactttgagaagagactggcaagggagaatggaggcagtggtgattggggaattggaaggatgagacactgagcatggcttggcttttttccaagcctcttcagtctcattgtctagcagataaacctgatctgcttttaagctgttctgaactcagggctgacttaggcttagggaagtctgaggaaagtggaccctccatgtccctgccatgtgggttcttgtttctgtagtctcccttctcttttcttttttttttttttgagtcagggttactctgtcacccaggctgaagtgcagtggtatgatcatgacccactggaaccttgaacacctgagctcaagtgatcctctggcctcagactataggtgggcactagcatgctggctaatttttaaatttttttgtagagatgaggtctcactatgttgccc

SEQ ID NO: 30417 - DNA, 1022 bp, Homo sapiens
tcggtaatgcccactgaggacctctgggagccatgtcagacgaatctgcctcagggagcgatccagacctggacccggacgtggagctggaggatgcggaagaggaggaggaggaggaggaggtggcagtggaggagtgtgacagggatgatgaagaagacctgctggatggtaagtgggctctattgagtgacagaagttgccttatattttcctccagtggaatttttgctgggagaccttggcgtttccagttagatttcttaggccatccatagtgggaagatacagactaggaactgagatgcaatgaattcagatgctcattcctaggaaatagattattgttcctccacataagctttgttttactgctggaagaacctttagcctttagcttgtctctgacagatgtttggactcaggtccagagattcgagtgttgcatacttgcccaggtcatggaggagtcaatggcagagttcctatggtaagactttgcagtctggaggccatgggctcttcaggtagatgtgagggtaactgtgagtggtctgtaagttttctgaaattatacatacaattgtgcttgtgtgtacatgagggaattgtccaggcagagattcttagacagattcacaacttcagaaagctcactgcatctcctgcagtgctgcgctacctcttggccattccagtgactataaattgcccctactgggagggcactacatctccatagctggtagatccccttttgatgccttctatttggtttgctcagctcactccttcctttgccctcagcttcttgaaatggcattgaacttttaatgttcagtctaatgttaggttatttggccagccacaaggcttctcaattaattccagccttttatggcataggatttagttgtttgtaagcttcctactgactgaggaatagggtttttgtctgttcataacagaccccctagtgggactgaacgttgcattagatcatctaattacttgaatctgaa

SEQ ID NO: 30418 - DNA, 1032 bp, Homo sapiens
tataggtaaattgcatgtctcaggagttcagttcatcttttttatacaataggagagagaagagatggaacccctggggaaagagtcctggaagtgtttgtaccttgtaccttcattgaatgtaacgtaggaatttttctttcaaagctactcatttgcctagtcaaatttatagtggtggtgttcataattcattcccaagaaacttatgtaagtgttctttggtgtttatataactcttgtggttactgctcacagctggctcacgtgaaggagaaagttcaggggtatttgcaactaggcctgattctgtaatcctgaactgtggtagtaatagtcattgacttttaaactatgcagatactaatttaatttacatttgttgtctgtcaaagcacatgtctctttacctccttattgaactttttttcttttctctcagtaactgttggtgggttatagtctagaatctggggaagggctattttttggaagttacattattttgcttaggttgtgaattcacttgattcagtgttcagaaggtaaaaaaaaaacaacacagtgaaaagttacattttgactgaaggaaatttaattatagaatttttgaaataacagattttttattaagaatagtttattaaaggtatagcatctattataatgttatgtaaaaaccataatcatcatgaaacagcaaaaatgaagcacttgaaagacatgtatttacatgacaatgaactttaaatattagcacatctgtaaactaaattcctttaataagctaaaagtagttgttgaacccagaagctgaggattcattcaaagaatgctgggtggtaaggaactggtttagacatgtatcatctgtataaggcatgagaattaaatatactgtgcctgatgattttaaaattgttactgcacttggccacattcagcctcatgtcagacaggagttcacagtgggccacaagccttataacttgggatgaatgtttgataataaatctgttggtgatattgaaa

SEQ ID NO: 30419 - DNA, 1049 bp, Homo sapiens
aagtgcttctctcaaaagttatctttaaaggtactggagacacctgtcttacttgctgagagaagcaagaaaaaggtaccattctgctgacttaccttaggctagtctaaagcagacccctcatttttccttgttgagatggcatatggagcgaaagctcagagaggcagcccaaattaaagtaagaacctcaagttcccctgtctctgtcatgcagtcagacttgacctgggacaggtcactctgcctcttagtgttagttttcatccttaaggtgagtttcttcttggttgttgaaccactctgcattattgcaaggctgcagtgcatgttgagatcctcaagagggaggtgtggcaggagtgcaaaaggctctgtttttatcttgtgctgacccctcctggccacactaccttgccgtttctgttctgtttgcctccataggagaggccacactgtgctgaagattcatctccctgccaaggaagaaaatgtgatccttgtgcggctctccaagatccagcgagatttgtatacacagttcatggatcgcttccgggactgtggtagcagcggttggctggggctgaacccccttaaggcattctgtgtgtgttgcaaggtgcattggggcctcagggaagattgagatggggactaaggatacacatggtcccaagggagttactcctactgagagtcttcaataaagggagaataaagtgagagggggccacctcagttcactgcactggaggtttgggggctccaaggagagaggtgatggttttgtaccacataactcctgggggtgccattcacacagtgtaatataactgatgccccctgcagtgtgcaactcagctgcacaacttgttattccaaggggattaatggaaaaatactgtggggcagcgtttttgactgctagcataatcagaattcaagagatatatagcttagacaagttattaggggtaccttccattggattccatacttaatcagattgagacctctctcattcttttcttgagggacctgtttca

SEQ ID NO: 30420 - DNA, 1075 bp, Homo sapiens
tcatgggaaattggagtgctaccaggtccatggtttttgctttttttttttttttttttttttttttttttttttaaagaaaataacctgaaaacacttctgacttttccactgtctctttatatgtgctgataggcaaatgtgcatgcacaccaaacataagcatgtttgtgagggaagcaggaagtatctcagagcctaagaaccatgttttatagtttctttgatcataaacacttggtggtgtcttccacccattatccaggcctgaggggggcagggtggctggtgataagagggagggcagaaaatcaggcctaggcgttttcccttaccattgtcttccatggaatgttttcaagggcctctcaagccccattcatctggtttagccaagttctcagcctggggaacacagtactacttaatgattgaggtttaccatttatagtgatgcttgatttccttttcttaatatatttgtagataaaaattgaacagggacaaagtagctatttaagaaaggaagtgaaccatgttgggtcatatcattttctttagattggatatctatgaagtccacacccctttgagttatgctttttaggcatctatctcatcatctcctgatttaaggataattctgtctggtccttggagctctcttccctaggaattagtgtgtggagtctctatatgcttgtgatccttggagctctcttccctaggaattagtgtgtggagtctctatatgcttgtgattcacaactaaatatgaaatttctcaattcaggagcaggaagcaaagtgctggggtacagttttgcagattggttgaaacacttagccaaacttaagtggcctgggtaggaccatcactcccaaagttgtcagcagagaagggccctctgtgtgagtctattcaaacctggcattgctctgaaattgagtcctcatcccatggggaaggtcttctgggggctttacattccttgttactagtgttctggatattaccttctgcttcccacttccttttttttttttttgagacagagtcttgctctgtcaccca

SEQ ID NO: 30421 - DNA, 1027 bp, Homo sapiens
ccatcaggacatcccaaccttctgggcacttgacagccttagtaggccttttccctggaggcgggtctgggctttactgggaggccaggaaagctttcctctgccactggatcagccttgccactccctaggttattttagggcctgtcccatttcctccttgctggtgccttgttcagctgcttcccagcttcaactttgcatggggccacttagtgggtggtaggcttgctgagagaccttctaggctcctccttaggccagggcaggggaggaggtaggaagtgttcttacttgtggaattagggagttgcttagccaggaaaggagctgctgtgccccacacacctcctggatcctgggagccctgtcttcttagctcccttcttccactttgacaggagctctgccttttctccaggtggagggagaggaagtttgttatggtgcagggcttgcttgtgtgtgcatgcatgtactgtcactgagcatgcctcaagaactttctgtgtgcgcaggatcctggacctttttgcctagaggcctggagtgatggagagagatggggaggccatcagttacagtgcagcacaacacctgctccctggtgggtacttgggatcagagaggaggggctgcttggtggagagcaacagaaggctttgaaggggaaagttgagctgagtcttgcaggatgggcaggagtttcccagtcagaagggactctggaatagggtgaagaaggacatttcaggcagaggaagtagcttacgcaaaggcaggaagcatgggaggatgtggcatgtttggggagctgcaaatagtttcatgtgggtgtgtgtgggggtgtggcgggtgaggaggctggcaaggcgggctgggccagagcctggatctgtccctccctctgccatgcagacactcagttggtgcctgcccacctgggctctggcccctgctggggcctgaggctgcagaaagggagtgcaaggtgagtgtgtgggcaaattcatgcagtattatgtgg

SEQ ID NO: 30422 - DNA, 1044 bp, Homo sapiens
cctgccagccgtggcaccgctgccccgggtgctgggaccccatcccccactgtcccagtcacccgccgccttgaggtcagcgtttatcctccagatcttttgcctagacggccgcctcagtttccccctttcggccccttccggctattcccggttgaacccgccgctttagaattcccttctcatacccctcccgtcattctcgagacctcgaccgcgggtcacctctgacccccactgccggaggactgccttctttctccagactcaactccctcgactttataagcccctgcgcgtccccagtgaggcccaaggcgctggccctcatacccctaccctcatttgtgcccctcctttctcagttatgcccagttcttcccgctgtggggacacgaccacggaggaatccttgcttcagggactcgggaccctgctggaccccttcctcgggtttaggggatgtggggaccaggagaaagtcaggatccctaagagtcttccctgcctggatggatgagtggcttcttctccacctagatgtaagccaagatgtcttatctgcactgtgcatctccctaagaaacctctggcctcccaaacctgttcttgacctttccctcatccttccgcccccttgattatgtactgtcagtattcatttggtgaagttgctttgcaggtgcctttgtgtagcgctggagaatgaagaagttggtgacccgggtaaagtgtggtcaccattccttagctcacatcagtgctgtccttaggcatttttgagggagaagtgttagtattccagggtaccctttatataaactgcggttgacacctgaatccagtgagcttgcagtgatatttgcctgattattaacaactgttgatgtcactcttcatcagtctttccacaggagccagcatacttcctgaacatggagagtgttgttcgccgctgcccattcttatcccgagtcccccaggcctttctgcagaaagcaggcaaatctctgttgttctatgcccaaaactgccccaagatga

SEQ ID NO: 30423 - DNA, 1031 bp, Homo sapiens
actcaggaggctaaggtaggaagattgcttaagcccaagacttcaaggttcagtgagctatgatcacgctattgcactccagcctgaatgacagacagagactcagtttctaggaaaaacaaaaaaatgtatggtgagttgaggcttgaaagccatatcccttgcttgcgtgagcaggtgcttttggttgtggtgactacaggtgctgttggtagcctgccttctgtcctttaatacttaccgtctacacatggcactgagccaaacacgacatacagtcttatttacttacaagatgaggacatcaaataacctgcccaggatctccctcagttgccaagctgagacttgttgtatttcaccaaaatgcagctgtgtttcacaaccaccattctgtactgtcttttgttcaatttttagctgtttccacttttcagtatgatcgtttctttgagaaaaaaattgatgagaaaaagaatgaccacacctatcgagtttttaaaactgtgaaccggcgagcacacatcttccccatggcagatgactattcagactccctcatcaccaaaaagcaagtgtcagtctggtgcagtaatgactacctaggaatgagtcgccacccacgggtgtgtggggcagttatgtaagtagcccttggctttcaaatattactgttgttatttggcaagccaatgatgatgtataggggttggatcttttatggagggaacattcagtagctgaaagtgtgccatagcaaaatactattcttagcttctgaaaaatatctacagattacttttaaaggaactctaatatgcaggtagctgctggagccccttaacttgtgagggttcaagcttataggctcaatgaccacacacgtcagtccactttctatcactctgcaagtgagtgtgcctttaacaccaggcagtctttcacagagacatccttggttgtggctgtgagtggagaaatacgaatctagcagcgctagagaaaaagctactccaaaagacatgttaaaa

SEQ ID NO: 30424 - DNA, 1021 bp, Homo sapiens
ggccacaggccctgggctggctgaggggaaggacagcaagggggcccacatcaaaagaggaaagggcttattcaagaccaccagcctgtcgaggtcaagtcaggcctttgacctgggtctctgaccacttggtcaacgccttctgcatcctcccctgcagcacaggcacaccagtcttgggctgtggtcaggggccctcgctgacgcccactggatgaccccagggaggggcgggcccccaccctcctctattacctccagcccacccaagtgaagcccaggggacaccagtgcccatccccctgaagagatttcagccaattagcacgtacagtatttacttaattagggtaatgacataattagtgtaactcgggctccatcacatggcttcaacatgcaattaggagctgtcagcgggaggcgacattgtgagagcgctcattcaattttggttccagcatggaggcctagcagctgcctctgcttggagggagggagatgggtggatggtggcggctgctgtgtgtgtgaggtgactgcaggcagcccatagcctaggagagaagagtaagtggggacagaaaggcagtttcctgggctaatggagtccctgactgagcctactcacatcctcaacagacattgccacccttgaccccagccccagggcaaggcagaggcggtggcttggctggagtgtctgcgattagggggctgagcactgcaggctcctctgcccccaagttctctgcctgaaatgccaccattagcaggctgtcttgtctctctttagggctttgctgttcataagagccaccatctgatacccactggccagtaggctattcttcgtggccccaggaggccacagactggcaggactgggatgatccctgttatcctcattggattcatggggaaagtggggcttaggtcaaggaaggtggtagagccagtcatggcagtgccaaccccaagagggagcctgttatggctggagactccccaagcctgggca

SEQ ID NO: 30425 - DNA, 1050 bp, Homo sapiens
gagtacctgtgtgaatgccaacaagaaaaataaaaccacagtttggattcaggaaaggttgcaccaccatcaggtcttgaagggtgagtaggagtccgccagatgcaggagtggatggagacaggttctagacagaggaagcagaagcctgtgcaagggctgaaccactgtctccaggcatagattacaccctgcctctaggttcctcatggcctggcctctccatctttcccactcaatacactttatggtggggatagggtccagttcagttccagacacttagtgcccagcaacaggcctggcaccaagccagcacgactaaaatgccaagtaaaattcaacatcagggcctatgacctcccctagtactaaccgtctcagcaagtctgtttccccatctgtgaaatggggccagttttgagaaggctgtgggcaggggttctcaggtacagatggggtgatgtttttcttttggttcttttggtttgtaaaccacttctttcccttacagaaaaaattggaagactagtacatggacatctgtgaccttcagattccctaattgttatattgcagcacttttgctttatctcctctttgtctttttatctagctatgcttacctatatgtataatttttgctgaaccatttgaaaggaaattgtagcggacattctgacgtgtttcttcaaacacttcaggccacgtcaactaaggacagtctgatacaaccacagtagcattatcacatctaagaaaattaacaataattcaatattcagaatagggcaggaagatcaaaacctgaacccatgccaggtgctgagagcagatgaggggcatcagagggtgggcgcccgagccgaggggtgtcgggcgcatccgctgcccagcggaagcggcggcctgagtggagtcaccgtgcaatgggtgggtgtggctttgtgagccaagccccaggagaaccagaacccaccttttcctcagtgccctgaccagctgtcccgcagctgtggcttaaatgccaacttccagttcgtaaatttc

SEQ ID NO: 30426 - DNA, 1050 bp, Homo sapiens
ccctcgagggaagggaccaggccgcattcccctgtttcccctagtgcctcccagggcctggcacagtcctgacactgctgactgtgacccccatcccatgaggaagaaatggatgagtgcgtgagtttgcgctgatgggagaagacaagagatacatcctgaatggggaatttggaggcagaagggggaaatggctcattttgaagatgtctcacccttggactcatgtttcagagagtattttaggactctcacactcaagacccattgaatctcagagaatcctggggtcatggacccagaagtccttccaggaaggaggctggtttgtctcccaggcaccgagtgtttcctgtcactgcaggctttgctggcgtgggtgtgttcctccctttggaagagcagctcccccggctcctttggaggcttgggcgtcctgtggggatgtgggacttctctggagggcaggcatccctgtatcctctttgttccctggagtatcacagatgacagcaccatctagaaatctccctgtagacactggctttggtgtccagtgctctgcccaacatgctggtggggtgaaatgtcccagtcattgggacaaaccccagcttggaccctgacagtccatatcacacccctccctgcccctcccctccccaggaggttctggaggagtggctgaactgtcagcggtcctggctctacctggagcccatctttagctctgaggacatcaaccagcagctgcctgtggagagcaagcgctaccagaccatggagcggatctggaagaagatcatgaagaatgcctacgagaaccgggaggcaagctcaatgagggtgggaggggcagctgggatccccaagggccctggtcacattgctggtagcctcctagtctcttccctccctacacagaaaaggctggtggacaagcctgaggatttgatcttgaaccatgtcctccagagtgggctccccagcctcagagttgctccttagaggcacagtcactgacggtttttctcttggagatccacagcc

SEQ ID NO: 30427 - DNA, 1030 bp, Homo sapiens
agtgcactcctgggtgccggcgctcccacacacccttctttccaaaatgctccccacccccaatcagagcaactatcccacatggttttggaaatgcactcaactcttcccaaatagaaatgacccaaagtcaagcccagcctcttcatgcagctccaagtccgagatttctggaacatatgctagtctatgggttgggtctagatggagtcctcttggttgggcaccatggggcagaatgattaatttaactatttccaactcacttactgtgtaatgaagagaaacaggctgggggaaaaagcatggtggtgtggccagaaagacgggtctggagagatgttatgggagaatgttagaaggaagctcaagggccatcaaggccaagctgattgttgcacagatgggaaactccttcattcacttttccagcacaactagagggccctcctgcccctggccatgtgctgggacagtgaccaaaggatgcagaatgggtatcggataaaggagggggctatcgggacagtaaagtgcagggtgcccggggagcccaaagaaggtgcacctgcccaggctgggcatgtaggtggtcccagcaggtctgcaagggaagtgctatgagctggtgatgagacttggccaactgccaggtgggaggcagagtgttccaggcagaagccttggagagggacagtgctcacccatgcctccttctgtatggcgacaggatcactatgacttcgggatgagagccgtgaaaactgtgatctcggctgctgggaacctcaagcgagaaaaccccagcatgaatgaggtgagctccacccagcagggctccaggagtggaactctgggagggctcctgggcagctggagggcagctggcccactgccctgaaggctcagccggcacctgctgcaggagctgatctgcctccgggccatccgtgatgtgaacgtgcccaagttcctgcaggaggacctcaagctcttctctggcatcgtgtccgacctgtttcccaccatc

SEQ ID NO: 30428 - DNA, 1062 bp, Homo sapiens
ggaggaagcgtcctggggtgcccgtccactgtgtcggggaccgtgtttggggtccagccccctacagtaacatcgggtgttcttttctttcacaagaaactgatcccaaagattgagttcctggacctgagtcacaatggattgctggttgtggacaatctgcaggtagtgcctttggagaccagtgctgcccgcacacactcccaaggccccgccctgagatttcaggagactgacgcagccttgggaattggccaggggttgtaagggcaggggttgctgtcttcgctttaggatcccagcaatgcactgagtgattgttgctctagttccaaagaattaggaagcatgagtaaatacaaaccaggcatgatgatgcacctccgtcctgaaggtggacagccatgttttcaacgcccaccccaactgtctgcaggggtgccactgtgctgtggcatgtgcggcagagaagagggacttcccttcctaaaataactgtcagagtgacttgcagaactgggtagtttgggttggaaggcccatcctgccattagtgtcaggcccctatctttggagacttgacctgagccactttacgctgttctccacgccgctgcagcacctgtataaccttgtgcatctggacctgtcctacaacaagctctcctccttggaagggcttcacaccaagctggggaacatcaagaccttaaacctggcaggcaacctcctagagagtctgagtggcctgcacaagctctactcactggtcaacctggatctccgggacaacaggatcgaacaggtgagcccaaggacctcacagttttgggatttctgtgccttggtgtgtatcatgttaaagaagaatgttaagattcctttcatttaaaagagaccatgaaacgtgttggcgtgttgctgaagtgttaagagaagggaccaaaggggatggaactcataccttgcagatggaggaggtccggagcataggcagcctcccgtgtctggagcacgtgtctctgctgaacaaccctctgagcatcatccccgactaccgga

SEQ ID NO: 30429 - DNA, 1090 bp, Homo sapiens
ggttttttagcgcgtgggagcagctttgctgacccatgcctgttgcttccagcctgattcccgagaagggagcctgcttgcgaaggaactggcactcgggcctgcctgaagggggcgctgtccagacaacacccagcctcccgtcgtggcaggcgctgtcggagccatggatgattgtgaccaataggggtggtcgccagagttgattgtccagccaggcccaggggctgagaggaggctgtgtggagaggtggttaggagccagggctcggtcagctgagttcgcatgccagcttcctagctgtgggacctcaagcaacttgtagcccctctgaagctgttttctcaactgtgaagtggacgcaccctacttcattgattctaagaggcacgcatttccaccttgtgacttctctgaaactgaggtgcgtctttcagtcagtggcgtctcatagtcgctgtcagccagctggtattcgagatggagtcgtggaaaacccgtggacaccttccgctaggaccaagatggcgccacctgccgcatcttagatttgatgaaatgtggtaaataacgagaggcatgcatgagcgaatgctggggaggcgcttggcactacccagagctccacagaggtggtcgatgagggctgccctttcccacatccttagtagggggttcaagatgacccagactgtgcccctggggagcttggagccatgcgggaggatgagccatgtgctggaggagaacagggtaggatggtgtggggcttttgtagactgtctagagcagagaaggtctgcagtggaggtggtgtctgaggtgaatctcgaaggtgaataggagttgaacgttagcaggcagagggtggattgcaggagagcagcggcctgggcaggtgcccagcgtggcccatcagggtgcttcatgcatggctgtgtgcttgccatccttcctgcctgcctaccccctgctgcttcgcttcgtgggggcgtttgagcttgggcccacctgcctgcctcgcttgtgggcagaggacccaggctgtgtgagttgtcctgtcccggggagcagctgagctggtcgggg

SEQ ID NO: 30430 - DNA, 1024 bp, Homo sapiens
aggtggcgagtcaaaggtctggcaaagcagcagctggaacaaggaaactgatctcctctccccacctgaaggtttctggatatgggagagggagcatcagagagccaagaggcaagaagtgcctttgaggagccaggttttagttaagaaggatgacttcagagcacagaatagaaattatgggggagaaggaagtgagggacatcttaaaacactaagagatgtgctaagacatgattctatctttcaagacactgacttttaccctatttaagtctagaactccattatcatagtcctcatctaactcaagttttgttttaagtttattttggcattgagttaaatattaatgccaagattcagaagtaggtgacagacctagactattggttaaattattcagattgttttaattttaaatatgtttcttaaacatctgagcaactttttgtttgatacagatgatgtctaccgtagaaaagcctcagaaagacagtatcagagaaggctggaagatgaatgagactgaacttcagcagtcaataaagtcaatatgaatttttactattggtttcagtgccttttaaaatatacttttcagatctcttgttctgacacagcttgtcctttatcagctgcacaatattccaataactgtttttgcaaagaatttttatagttctgtctctgcttgagtacttcccaagtcactgctggacagcacttgtgggaaaattatttcctcctaaaacactcactcgatgaatctagtccatgaaatatttcttaaacaattcaaggatcaatcaggatgcttttcagtgaagcccgaattgttttcggcaatctttgtttttaggcaactaattataaccttatttacttttttgcagaattcaaattaaattatggacacattctctattgccagatcatttaaaccaggataattatgcaggttgtatttctgccagctactagactataaactttttgctagggtggtggaaattcttgattg

SEQ ID NO: 30431 - DNA, 1042 bp, Homo sapiens
gcctcccaagtagctgggattacagacaccagacaccacgcccagctaatttttgtatttttagtagagatgggatttcaccatgttggccaggatggtcttgatctcctgacctcaagtgatctgcccgcttcagcctcccaaagtgctgggattacaggcgtgagccaccgctcctggccctcatctggctaatttttaatttttttgtagagacggggttttgccatgttgtccaggctggtctcaaactcctgaactcaatcgatctgtccacttcagcctcccaaagtgggagccaccgtgcctggccaataatttttaatttacccaatgcatctatactaatgtccaaatgcctgaaaaacaaaacaaaacaaaacaaaacaacaaacaaaaaacaatgtacttaaaaagatggcagtgatgtttatgagaaaactaggctttgaaatttggcaaaaaaaaccacaacaacacttttaggcagggcgctgtgactcatgcctataatcccagctctttgggaggctgaggtgaatagatcacctgaggtcaggagttcgagaccagcctggccaaaacggcgaaaccccatctctactaaagataaaaaaattagctgggcgtggtgctgagcacctgtaattccagctgctcaggaggctaagacacaagaatcgcttgaacctgggggtcggaggttgcagtaagtcgagattgtaccactgcactccagcctgggcgacagagtgagactgtctcaaaaaaaaaaaaacaacccaaaaaccattttcaggccaggcacagtggctcacgcctgtaatcccagcactttgagaggccgaggcaggtggatcacttgaggtcaagagtttgagaccagcctggctgatatggtgaaaccccatctctactaaaaatataaacattagccaggtgtggtggcatgtgcctgtaatcccagctactggggaggctgaggcagaagaatcagttgaacctggaaggcggagactgcagtgagccaagatcgcgccac

SEQ ID NO: 30432 - DNA, 1027 bp, Homo sapiens
ccgcctgcagccccggccgcggtcaccgaccgccgcgccccgccccgtggccgccacggctgctgctattgctcctccggccgcggccgctgccgtcgcttcggcacccgccgccctcacctcccttacccctcccggtgccgccgcaaaaccagtcccgcggccgccaagcgatccctgctccgcgcgacactgcgtgcccgcgcacgcagagaggcggtgacgcactttacggcggcagcgtaagtgcgtgacgctcgtcagtggcttcagttcacacgtggcgccagcggaggcaggttgatgtgtttgtgcttccttctacagccaatatgaaaaggcctagtaagtggggtcgggaggcgggcgtggagggacccacgtctggaagttgctgcagccaccacgacgctcttctacggctacggctttgtctctgctggtatgggggtgggagcctacgcgtaggccttggccctatttcctggtagaaccgagagttggaagtccctacggcgatcatgttaaccgcgcgggctcattctgcggaacgaagccgggcagagggtggggaagactaggctagattttcgtaaggaagcagcgtctgagccaggtttgaggcccaatattttctttccgtggccacgtgcagactggcccaggtgagagctgagaatcgcctcccagactcagtgttcctctcctgccttatgattcgtgctgtttgacacgaagtggttgtcgttttgtgtctcatacgctgttgtgtatgatcccattctaatattgtgagggtaagtgcagggaattttgactccattctggatctactgaatttaattctctgggatttgaaagtagcacgtatgtttgcattaggcatttcgcattagacttaacgttaggtttggtagccaataacacaagaaaaggatataactccatagtgcgttaacccagaactaatcatttgggttaacagatttgtgatgtgtttctttgtagagttaaagaaagcaagtaa

SEQ ID NO: 30433 - DNA, 4858 bp, Homo sapiens
acttacatatgcattactttgtaagattccaattaaagctccattttcctaggacattttataggcataactaaattgcagccagattggtttctcacttgaattctgcttaagtataaagatatttttgtaagcagacaaaatctctttattttaataggttcgagaacatcatcgaaaattaagaaaggaggctaaaaagcggggtcacaagaagcctaggaaagacccaggagttccaaacagtgctccctttaaggaggctcttcttagggaagctgagctaaggaaacagagggtaagttatgttagccagaattttcattgagtggtgtagtgtgttatgtgtgatatttttcagagtaaggtaacaacactagtcactggttcacctatttcccttatggctctgacagcttgaagaactaaaacagcagcagaaacttgacaggcagaaggaactagaaaagaaaagaaaacttgaaactaatcctgatattaagccatcaaatgtggaacctatggaaaaggtatgattaggtctctttatgaatgagagatcaggggttttgattttggtttttttgcttgggcctgagtgcagtggcacaatcacaactcactgcaacctggaccacccaggctcaagcagtcttaccacctcagtctccaagtagctgggactacagaagcacaccatcacgcctggctaattttttttagcagacacgggctttcactatattgccaaggctggtctcaagtgatccacccaactcagcctcccgaagtttctggtattacaggtgtgggctgttgtgcctggctgagagatgagttctgatgcagaaataaaagcacatccacaggctgctgagcttcttgggaggaagacaactgagttcagactccatcttacctatttaacaactgcaagggctgctactcagctgtggaaaatggagttagaggttacagttgctctacttctaattttgtgttatttccccctttatcctctaggagtttgggctttgcaaaactgagaacaaagccaagtcgggcaaacagaattcaaagaagctgtactgccaagaacttaaaaaggtatcttagcctaggtcagtgtctgacagtagtaatgaggtttaaaagactcaagtcattttttttttaaccttttaagatgaagggtgcatgtgcaggtttgttatatgggtaaacttgcgtcataggggtttgctgtacagattatttcatcacccaggtattaagcctagtacgacattagttatctttcctgatcctctccctcctcccaccttttcaccaacaaatcatttcgtgactcgactctagcttatgctgtttaatgcctttcctgctatgtttacctgacggaaatagtttctttggttctaaatatttgcacaaaactggttctgcctgtaagcatgatttacaacattaaaaaaaaacgttgacatagtgttgagattgagaaaggtacattggagtaagcagtgtcaggctaaaggtctctaaagtactctgttgaaacctaagtgaaggaggacaacttggtgtagttgctctccagcactcccatccccaacatccattttcccaagctcactcccccatggatagaacctgactgcccctcagcagcttttggcaaggccagaaggacctatcaaactatataattcactatgggaggattcagacagggatatttgcatttttgaaatccatcttgatcagagactgctgagcaagcctatgttttactttcctgtgtgagaaatgatgagggtcaacattcttcataccaaagtgaagacatgagatccaactctgagctcaccctgttgctaaatggataatgccagtactctcttgtggaaggtattaccagaacaagggatgtagttctgatcattttctccttgataatgtagttctggtcattttttccttgataggtgattgaagcctccgatgttgtcctagaggtgttggatgccagagatcctcttggttgcagatgtcctcaggtagaagaggccattgtccagagtggacagaaaaagctggtacttatattaaataaatcaggtgagtaaagagggtaccctttgtcttctgtgtacatgggtgaggtacgaggaaacagtctgatagtcactgaagactgattagatccaactctgatctcagcaaagccagagtacgtgcactttgccagagacagtgctaggcagtggggagccaggtgacttttacaactgactcaactggtttctactattcttttgccattcagtatttaccatcttttaaataaagagtgtaagctgctatacccagcttattgtgtagtatatttcatctaggaagtgatgacagtgtgacaaattccccacacctacacaatgtcgggtattagttcaagagtgaaataaattggaacgtatgtgacaaaatatttaaatgaaatgcataattatgcatctgagtttgagcagcaggaaaaagaaaacccagaacagagaattacaaagcagaaaatgggaatgagatctaaaattgttgttggggttaagaaacaattggctgcttgggaggctgaagtgggcacatcacttgaggccaggagttcgagaaaagcctggccaacacggcgaaaccccatctctactaaaatacaaatattagccgggcatgatgatgggcacttgtagtcccagctactcggaaggctgaggcaggagaattgcttgaacccgggaggcggaggttgcagtgagccgatactgtgccactgcactccagcctgggcaacaacacttcgtctcaaaaatgaagaaacaattggctgctagctaaaggtaaattctggaaacatagctctagggttagtagggttgtaatccagacgttgagtctgtcctgaagttttcaagtgagcaatacaaggggaattgaaatagagaagtgcagatgctgagctctgttaagatacgggcagtatggtaggggagcttaccctgccctgattttctagttaaatccttttgaaaggactgggaaaatgtaaaccagagtaaaatctatagttgccagattttgcaaatgcatctcaacaaaatagccacattggagcaaatgtctttttctttttttctttttgagatggaggcttgctgtgtcacccaggctggagtgcagtggcgccatctcagctcactgcaagctccacctcccgggttcacgccgttctcctgcctcagcctcccgagtagctgggactacaggtgcccaccaccacgcccagctaatttttttgtatttttagtagagacggggttttatcgtgttagccaggatggtcttgatctcctgaactcgtgatccgcctgtctcggcctcccaaagtgctgggattacaggcgtgagccaccgtgcctggccgcaaatgtcttatttctaattgctatcagatctggtaccaaaggagaatttggagagctggctaaattatttgaagaaagaattgccaacagtggtgttcagagcctcaacaaaaccaaaggataaagggaagataaccaaggtatcctttattagtggtaagaaatgtgattctttcagattttggttgaaatatgatgagtgtacaaaatcttgatttaagtgaatgaaaaattacaagatccaactctgatttcagccagagatcatctgaaaggcaatgtagttatcttaagagctgggctctggagcctgattgcttggggtttgttgaaatttatcaggtaagttgccagaataattcaactatttggaattttagcgtgtgaaggcaaagaagaatgctgctccattcagaagtgaagtctgctttgggaaagagggcctttggaaacttcttggaggttttcaggaaacttgcagcaaagccattcgggttggagtaattggtgagtttcagttcattactttttactttttaagtgttgaaatagttaagaagtttagccagctctccaagtgcccaagcagcagtgtatggagttgttgtcaagtaaaaggctcactcaaatactagcttcttgcttataccttactgaaagcacataaccacacacaatttaaagaaaaaaacttacacaactgctgccagattcaggttttttgttgggactgattactgtaggaagctggtttctaaaagttcttggtttgtttgaatttatagtattttcctgcctttgcattacttgtgcaagaaatgaagaaactaaaattggtcttagtattgaagtgaagacactgagatccaactctgatcttgccctaaacatcagggaaatggaaaattaggcagtgaaaatttcataagtgccaacatataatgctttttatatctggatttcccatttatttgtaggtttcccaaatgtggggaaaagcagcattatcaatagcttaaaacaagaacagatgtgtaatgttggtgtatccatggggcttacaaggtaaatggaggtgtccataattgtaatattatagtgacacactattttattttggttatctcaaggaaggtgattttttttttttttttttttgagacagtttcactcttgttcccaggctggagggcaatggcgcaatctcggctcactgcaacctccacctctcaggttcaagtgattctcctgcctcagcctccagagtagctgggattacaggcatgtgcccccacgcccggctaattttgtatttttaatagagacgggtttctccatgttggttaggctggtctcaaactcctgacttcagctgatct

SEQ ID NO: 30434 - DNA, 1001 bp, Homo sapiens
ccgcctaggcctcacaaagtgttgggattacacttgtgttgggtggcatgagccactgtgcctggccaacttttagattttttttttttgggagatggagtctgtctcccaggctggagtacagtggtgctatcttggctcactgcaacctcagcctcctgagtagctgggatcaaaggcacccggctaatttttgtatttttagtagagacagggctttcatcatgttggccaggctggtctcaaactcctgacctcaggtgatccacccacctcggcctcccaaagtgctgggattacaggcgtgagccaccgcgcccagccagaaggtggcatatttatagcaaaggaaatagcatgtgttttggttgatgtaaatatataagctataacatgtagtgttctctttagaacagtcgggtatgctgttacagttttagataaatgtgaagcaaatgatgataaactggatctgactgactgtgctgagtctgttcaatccaaccctgagcttcatgttctgtctcttaacctccaaatagaccaatgcccccatcaattccatcgctcttctttcaggagcatgcaagttgtccccttggacaaacagatcacaatcatagatagtccgagcttcatcgtatctccacttaattcctcctctgcgcttgctctgcgaagtccagcaagtattgaagtagtaaaaccgatggaggctgccagtgccatcctttcccaggctgatgctcgacaggtaaaaggaccccttctcatgagctccttggagccatcttctttcatcataagcattttgagtagaaaaatcttggaagtgttttaaagtactggcatgtcagatgaaggacagctcctttgtttggttttttttttaaggtagtactgaaatatactgtcccaggctacaggaattctctggaattttttactgtgcttgctcagagaagaggtatgcaccaaaaaggtggaatcccaaatgttga

SEQ ID NO: 30435 - DNA, 1058 bp, Homo sapiens
ctgaccaacatggtgaaaccctgtctctactaaaaaatacaaaagttagctgggcatggtggtggatgcctgtaatctcagctactcaggaggctgaggcaggagaattgcttgaacccgggaggcggaggttgcagtgagctgagatcatgccactgcactccagcctgtgtgacagaatgagactgtgtctcaaaaaaaaaaaaaaaaaaaaaaaaaaaggtgggagcgagctgcatgctgccatatgcttgtccacgcctagaattgctctaaggagagcctcatgattgagctcagtggaaggtagactttgtactgtttgccatttctagttcccatatgcattaagtatatactcaaatgactaattactaaatatagacatggtctctgcctgtgggaagtagacaaacctgaacctgggggtcacttctgctgctgactgctaggggaccctgggcgagtgacatcacctgtttgagccccatttgggcttcaggaagtagggcagtgtatgcccagcgtttagcacacagtaggggacttgcaagaagcacctgtttttaggatctctttctccttctgcttccttttctgtttctcattcccttgtacccttggggacagtcctggactaatacggctgaaaattaggacatggggggcagggttggaaggagaagaaatgtcccctgctgactcttacctgtcccctgtccttagggacctcaaactggacaatgtgctgctggaccgggatggccacatcaagattgccgactttgggatgtgcaaagagaacatattcggggagagccgggccagcaccttctgcggcacccctgactatatcgcccctgaggtgagccgatacccttccagccccccgctcagtcaggcaccttgcctccccacggtgggccagggaaggattcccaagggcagtgatgtccaagccaaagcccataggctgaggcggcctggctaggcttcgtgcccaggggcccctctcagcctcagcacctcagctcctgctgacctgctgctctccccac

SEQ ID NO: 30436 - DNA, 1179 bp, Homo sapiens
tgttggctttcatagcagagcagtctaggaaattttgtactctggttccagggctcagagtagcaagagtgctgggacctgtctgagaagcagtgctgggctgtggatgcttgcctgtggcaccagatgccttacagtggccaggaatgctgcgggacagtctactttgattgctttctttcctccatggctgagatctgagtgtagtgttaactgggcttaaaaatcaagtccgttgtatctgcatggtcacgtagttcggcatctcatggcttttgcacctagaggtgtgaaccataatacctgaaacacaatttcataacctggctccttgggcttagcctatatggtggaggttaggtctgtatatcatcaagactgtgtctttgcatggttgtcattctgttggaattgaactttcttatttctgtaggcctaggttctgtctattcttctcagacagctcatatgctgcttcttcccttcagccttctctgatacttgtccactccccgcctgcctacatctgagtacttgctttccctctggacacccctgtgcccagtccaactctcctgtacagacaccagcccctttcccctggtttataactgttgtgggaagtggcgtggagtgtgatggtctgctcatgggctgtggggtctgacagcctgactctttggctgattagctgagtgactttggatggaactagaatatgagttcctagaggctgagactgcagtctgatttgggtgtatagccttgtgaacttaatcctgtgcctggcacacaggaagcacatcaggaaatgcacgtcaaatgagtgaataaataaatgaatgaccatacaaggactccatggtatattcttgtagatcattagttaattatcaacaattggctaatgattaatgtttgcctgagaggctgactttttgtccattagtaatgacatcccaggaaacacctggcagagttcgtctttaatttcaggagtatatctttctttcttggcaaatttaactattaaagagagaagaaagacaagtacttgatactttttgaatctgtaagttataaacctgtcttctgtattcaatgttgtatattagccacattgcagatgattctatttggatggatgtgtgactgtcacctttcacataaaaattgatt

SEQ ID NO: 30437 - DNA, 1045 bp, Homo sapiens
cctttctgatattgaattcactagctttgctttgcttttgtcatgtttgcagcttgacaattgtgtaattatttccagctgtttatggctttgttatcatttcttgctgctgcctggcattttgtaatctgatgcgagggaaaggtgaggtgttgcttggcattgcgttccagggtgggtgtccaccctagtccttggtttggaatcgtctgctctgggggtcctgaaatactcacggctttgggttacttggcagagactttcataagtggtgggggagcatgttagacaacttggggagcatttttcagctatgttttggctgttttggtccactatccccgcaaatgcttttgtatttttaaaattagcaaagaacattggtttagagagttcagagtatgaatgggagtagatctgagtgctcagagtgtaggagacataacatcatttggaaaaacaagtggataattgcttctcttttgctaattttcaagtttctgtccatttgcatgaggaattactcctctaagtcagagctctgtgcaccctgccatcatatcactgtgtccttaacaattaagatgctttcaaaatgagttagaaaatttggctggaaaatgcattaacactgtattaaggggactcaaagatgacaatactatgttgtataatagagtgtaattgctctttttaaggcatggatttttaaacttgattttcagttaagtaaggtgtgctgtataccaccatataattttatgtattttatgtagtttcactaattgacacttcatgttgtgaatcaatatagtgtgttcatttttagaatggaagtttagtcatttttgcactaaaacatacactttacaaagtagttattatgaatataagttaaataataattggccatgcatctattttaaggtgtttagtgactgggaaaactgccattttggtaacatgtttttattaggtgatataatttgaggtagcagtattgttactgacttcatcaatgtaaacacaaacatttagcaatgta

SEQ ID NO: 30438 - DNA, 1035 bp, Homo sapiens
taatgtgtgtctctgccagtaacgctggaacagaattgacatttaccttggacgcctcatggagcacttaccaaacacgcacatcttggaatgcacaatctgttttttacattatcaactatttattgagagggcagccttaatatataaagttgatatctctttccacaggacagagtcagcaaagtaaaaggttggtgctttaagccatttttataattatgacttttcatcaatgtgaaaatcggtggacttttaaataactgaataggtgtattcacttatcaggaattaggtagcagtgccttgctgctcgtgggaagcccagcactcttcagattgctcttgtgggggaggcgctgttttgctaacattttgtgttgaataaacacagttatttgccatcctgaatgataaatgcgttcaacctatgctgcggatgctttaattcatagcattactttaaatactggacttttccttagcaggttatttttaaaagcttgaaatctctgaagtgacagtttttaatcattcagggcagtttattggtctcattaacacaatcacccagacagtagcagagcagggcaaaccaatgagcattcagtttgtgcctcttatgcatatagctcattgcacttgtagagttactcatgaccacttgctaactttcggtctgagccttttttgctcattttttttttcttttcctttaacttgttttttttctccttaaaatttcttttctgccagatacatttctactttgccttttctcccattaggaactgctgcggcctgtgttgctcaggagaccaacagatgctactcaaaattaagggaaaatgaaaatataggcatggttttctggttggaggcaaacttcaaatttttaattcccatgtggttataattttgattgattagcatggtgatcgcatgctgattttaattaattaattctaacactactgcaatttttaggcaaacacatgaataccaaaccacctgataattctgaaatccattggg

SEQ ID NO: 30439 - DNA, 1043 bp, Homo sapiens
aacttcttaaaccgtggcttacagtaaagaatacatgttacattgcaacccgttacaacctcacatgtgaaacatgtttcatgaaacatcacttagtcttattctttgcagtgcaggctggtattttgtactttattctattatagtctattcaacgcaagttgactagacgggactctgttgtactctattctacactattctactctactctgttttctattctgttcattttagaaggctgactctgacctataaattgatttcacaatataataaatgtgttttaaaaacccgtgctctaaatgttaccggggtaaattataagttagttcagttttattctgggaggtgcagcattgatctttgagacctaggctgtgttttccccagtaataacgatcagtggtgatagctaatgcttatgagccagtcacagtgctgtgctgtctgtataaatttcatttcaccactgcgacgatcccatgggacaggtgctctgatggcatcattttccagaggaagacatgagttcatggaggtgatgtgacttgcccagggcaacacagctaataagtggtggcctcgatttgtgaatccagcgctgtctgaacatgaagcctggactctcaactgcatttgcatttgcctcttcctttgccagcagccactttagttggttccaagtgttagcactgggctatgcaatgtggaaggccagagagaggaaatttggagatggcatgctggggagcagtggggaggacatgtgagagagagcggggagattggaagagggcagtctgtgaagcttggggtgagcggtggtcctcggagcatctggtattttgcctagcacctagagaacctgcagtgtttttgcatctctggttatagtgcctgcctcctccttaaagcacccactgcatccggtgtttgttattgtacttgctggacaaatacttgttttcacatctccttctctgaccaggggtcattgttttgaggccagaaatgatggcttgtacttcttgggatgccag

SEQ ID NO: 30440 - DNA, 1038 bp, Homo sapiens
gagtgtcattaatttcaagatacaggagtttgttgccccctttttgtttttattttacccttggatgttcatttaattaaattatttaaatttggtaatgtggggaagataatatgggggaagattttattttcttccccagtacctttaatcacaatcatcttagttaaaaaggtgttagtgatgctattgcctgtgtggtgcttcatttataggagatgaattttgaaaagtttgttgcacttatcagataactttatgaaccttttggaacattttaaatgagtttttatgagacttccatgacaatattctgtgtatctctttgatgtggagagaggaagattgcagacttcatggtctgaaaaattatgatgtatttttatttacattggactgatgatagatttcaggtcatttttcctatcaaagatatcctgatgaaagttaatattttgcgggaagattttatgagttataatattacctggattacagttttcttgaattacgtaaaaacgtcttgtgagattgttttagggaaaaggattccacttgtcttcaggtcttgggggaagcatcttactccctttgcggaacaagaatttctatgtacagagtgtcctgctgtttcctctgcttgcacttaattccctccaccttgcattcttattgagttattgagttattctgttgagttattgagacagctgtgttccccactaggtcataagctcacctggggtgtttagatattcccaaaccaggtatatagttgatccacagtaaattgttctcagtcaagccatgttcaatggaaatatgtatgattttgctagctctgcaaaggcactgattggacctgataccctccaactctgattaatgcctccccagccttctgcttttctctcaccaagacatagcatcttccagcgggttccttatacccatctgccatttgtcattgccatacaccgcagagcctggggatttgtaatgactaagctcaggtttgggagataatgtgtccaactt

SEQ ID NO: 30441 - DNA, 1031 bp, Homo sapiens
gagtagctgggactacaggcgcccgccaccacgcctggctaatttttagtattttttggtagagatggggtttcaccgtgttagccaggatggtttcgatctcctgaccttgtgatccacccgccttggcctcccaaagtgctgggattacaggcgtgagccactgtgcctggcctgaagttggactattttgaagaaaaatgtcaggtttttctggaaggaggagatggacatttggtagtggcagtgttggtggaggcatcgatttttgaggtattgttacccttggtttctgcctcatttgctgctataggccttttggttgagcttcagctgtgtctggggcagggggttttgaagtgaggcacggccagctccatctgcacagttggatttgtacctatcccctgacttcccaagacattgaaactcttctttgagagttcagacaattcagtgacttaagtttttcttgccatttcaagtgccaccatagcacagactgtgtcacacacattgtagctggtttttcattgcttttaaaatgcttttgaagtgaaagggggccccattgtgtaagtgttcatagttagcattagcaaatggacttgtaggggccatgggggatgtttcctctggccctctcaagatttgctgagaaattaactctcaagaggcagattaaggccgggcgcggtggtttacgcctgtaatccccgcgctttgggagaccgaggcgggcgggtcatgagatcaggagatggagaccatcctggctagcatggtgaaaccccgtctctactaaaaaaaaaaattagctgggcatggtggcgggcgcctgtagtcccagctactcggaaggctgaggcaggagaatggtgtgaacccgggaggcagaacttgcagtgagctgaggttgcgacactgcactccagcctggggtgacaaagcgagactctgtctcaaaaaaaaaaaaaaaaaaaaagcagattaattggagaaagtgcatatacatttatttaatcattgtt

SEQ ID NO: 30442 - DNA, 1029 bp, Homo sapiens
gatgaatgggattttcctcctttggatccagggcttttggttctgggctacagaggggcagagtctgggacacaaacagatgaggctgcctagtgaggagttggtttccagatctgtgaaaagcctctgtttggaaggcactataggtgacagccttgaagcttcatttgcatagcaaacttttttttttaaatttagcatctatattgatgtgagttggtggctgacagtacccagcactgcctctgcccacaccgtcaacctttttgggaggagaggggttagtagtggcttgaagccctaccttgagaggctgtacatagctcatcctgagaaggtcctgtgaccctcatcagaggcccagcacctttttgattttgaaagaggaaaaagggaaagagaaatagccatgaaagaatcttctttgctgaagattaaactgtttgactcaaagtaggaatgtgaccgcttgcatcgtctgtcagtacctcagaagttgcctgtggattactgacatgcagaaggatctggaaggctgggcctttgggcagtcttgctctcttctggctctcccagaagaagctccttctgcaggaattctgttgctactcttggggaacctttctcccatgatccagctagattcttgggtctgtcggtgattggctgagatgttatgttctaaggcagctgtctacgccctcatgcctcctgcccagtggtggaggaaacgcgtaattgggggaattttgctgggattccctgcgatggactgaatgcttatgttccctcaaaattcatatgttgaagcttaattcatatttatatgttaaaaccgaatttgtattcatatgttgaagcctaatcctcaatgtggtggtagttggagatgaggcctttgggagctaattaggtcagaaaggtggagccttcatggtaggattagtgcccttataagaagagagatctgtgaggacacaatgagaaggtggctatctacaaacccggaagcgagccctcaccaggaac

SEQ ID NO: 30443 - DNA, 1024 bp, Homo sapiens
gtgttttctatgctaggacttatgaaaaatgacagtgttttgggtaagccacttagcagtacagccttgtccaacactccctgagaactcatcagcattcagtaatcctgtcagaatggaaaaatctttttgctttaaatgagattttgcttgattggtatttttattttggaaatccaattttagctttttgtctcacttgataatgagttttttgataaatattgtcaccctttattgtaagcataaagaagaggtaacaaatggctttctgtaatgtgatactgtaataaataaaatcagatgccaggagtccgctcgtcactggcataaataaatgcattccttcctattgggcagatgggaacaggatgttgattctgagttggtaaaactttgattcccattcctttgaaaaatccaacgaatggctttattttcacatctaatgtttcttctgtagtctgaaacaaatgttactacgttatttgatttagagtgactatgttagataactctaccagttaatttggttgggttttactttgctgtggctgagtgctctgcacttgctgtggttggtggttgggaaagtgggccctgggcgatcacttcctctctgtgggtttccactgggatggcagaaactgcttatcatgccacaggctggaaaataaatcctggaagcaccatatagctcaagagacaatttgaaaataacaatcagagtcatgaatagaagccgatgcacaaattcagttaacaagcagaggaactaatctatcagacattgggtggaaagcctatttctgagtttatttcacagcacattatgacatttctttaaatcacaacttgtccccatgtaaaagatataatctacatattcctgtgggaaataatcagagacaaagctttactgtatttgtcgtttctgaagttgacctcattccccccccaaaatatttttcatgttgtgaaatgtaatttgcttgaccccaacaaaattggaataaaaaccatc

SEQ ID NO: 30444 - DNA, 1058 bp, Homo sapiens
gaaggaatgagctagctcttcagggcctcttttataagggcactgattttattcctatgggtggagccctcatgatctaatcatcctccaaaggccctgcttcctaataccatcactttgggagtaaggaatttgacatgaatttcgggggcacacacacatttaggccatgctacagtattccttactggaagcagggttattagaaagtgtcaatggcaggtgaggtgaggtacccagaaagggtgaatgtttcttaaatctgctttcctctgtagaagggagagagaatggaagaacacaagtttaggacctactgatggtggctaaaaggttgtgctctaggtgagtggtgtctcaccctgccaccagcacacacaccactttccaccttccccaaattgagagttttaaaaccttacatcattgtacgtttgatttttagccccagctgaaatctctaagcatgtcactatcagagtttctgtctatagagacctttggacatgaatcttaaatactcctgctgttgtgccttcccatctctttcactttgatgccattggcagtgagccattttgcttccagagaaagtaaatctctttttttcaatctctccttataagattataagtaaaatactccagatacattttacaaacattagttgcaactgcagaagtgtcgagatccactagacagaacacagggtgttggggtctgtagagctgaattctaattctgactctgctccctagtggccatgtgatcttggataaaagacttaacctcgttgggcctctgttttctcatctgtaaaatggggctatctgtctggaaacaaaaaaaggacccccgccccagaactgtcataaagatgaagtgggataataccagaacctgccatcatatatggtgttgaattgctacttgatcaatgtaggtggaagcaaaaaaaaaaaaaaaaaagtgcctttcttgagttggatttgttttaatcagtcacgataaacccactcaaagaaagttttgaagaactcgtatgaggccaaaacaca

SEQ ID NO: 30445 - DNA, 1006 bp, Homo sapiens
atttcaaagaagtaaggagaatatttgtgaagtggaataatttaccatcaaataaaatacaccgagtgcctcctaacatagaatgctgagctgatttttctctgtggtatcagttccatctccagctttagtggtggatatccagctgggaggaaagcatcaaggtaaaataaaatgcaaacgatctctagcatatatttgtgattttctcatttcagcatccattcctgctgtaattgccagagtaggaacaaagctgcagggagaactgttctagggtattgcatttcatagcatttgattacttaggattgaatagctttgagattatattgaccctgtagacttgtctcctgtttccctattttctaaacattttagacaagtgctttggaaaataggaacttttttgttgttgttgagattttaagatgaaaatatttctttatggttcaaaattgttattgttatattttgtgggagaagcaacttgctgaaatgatcctgtggtttacttagaactgcattgtccaatgtgatagccactgagccacacataatgctactgagcacctgagagtgtgtggccggtctgaaatgagacgctctgtaaatgtgaaataagcgctgggttttggtgacatagtacagcaaaacgaatgtgaaatctttcataatttcggaatactgattatatgttgaaatcacgttttgtatatattggattaaaccacatatatcattggaattattttcacctgtttccttttaccttttaaagcagctaccagaaaatttgaaattacacattatagttagcattatatatacttcgaaaagtgctgaatattgagatgagataattaaagaaattttaaacaattagagccatgatgggaaagcttggcttatttgaataagaatattgctctaatgttggaagttacggtaacaaaagaagtatagcattaactcaagaattattgattgatggaaagaacatttc

SEQ ID NO: 30446 - DNA, 1048 bp, Homo sapiens
tgctgggattacaggtgtgagccactgcacccggcctgtccacgtctcttttggtcacctccctgctccctttcatgaagcttgacagaagctgttcttctgagccacccatgctcatctgaagcagaactgacttgcattggaaagcaaatggagctcctttcttggttgagtactttgttctttgttctaccatgttctttgcatggtctcggtccagcagagctctgtggatcctcttctatttcaatttaaagtttatgtgtttaagggattttgtgtgaccctttccaagaccaaatttctgccttgtagcttagacactagggacagtagaatagtggactttcagagcttccagagacttggtctattctcctgattttatagatgagaaaactgagggctgttcaaaggttcagtttggcttccttcacaggatggtatagcagaaaccgggaatcagatcctgactgtgccacttaactggttgcaatcttagagagacatctaacctccgagtgagttttgattgtatggcctgtacaagaataatgagaaggatgagaatgatacctgcctgtcactgagaattacacagaatgcatatgaatcacctaggctggtcaccactaactggtgctaaaaagattaaacaagtatttattgacttgccagactgtggtgggaacatgggccctgtctttgaggaggtggccatggtctagcagtcatctctttagcaacttcatggggattctagtcttttatttcacacatgaaattcagaccttgaagtcagaaccctgagaacaaggacttgtgacccattttatctgcaactttattctttctcccattattgctctcagcaggcctctcctgatctccaccaaggtgtacactgtggaaactggataatagcctcagtctgaattgggagatgacagaatcactgtttcacagaggaatattactgcctatattgtcaagcatggagtctgggttttcaatttgggcttcagacatgccagagcgacacagtgcc

SEQ ID NO: 30447 - DNA, 1073 bp, Homo sapiens
tcttctttacctctactgccacgtactctgggaatctctcaaatcatctcaaatgtcttccagtaaagtcttttctaaacacattacttccagaattaatcattttacccccctgtatagaaatggatacatgaggttaagcgaggttaagtaacttatccaaggtcacagatccagtaagtgtcagagttggggtgggcaatgagacacataatgaaaaaaaaaatgcaaaagcatagttggaaataggaagtcattgttaaatttagggacaaaaaataggctttgtgagaaatgaaccactgggctatagcctgagaaaaggttgtatacacaggatcttggaaagggaaggtccttgaacctgaaattggtgacactttttctgggggacctgaaatcttgtcactaggaaggtgtgtggtgtggtcaaaagtgctatgtgaagtcttgttgtacctggaagaggaagtcctcaggattgaatgcctcccctttctctgactgctgattaatatgcctagcattccattattggaatgctaagcatatgggaattatttctatcctactgctcaaggtcatcgccaagatctgattttcaaaatccaaaaaattgcaaccttcaggcataaatgggctagggggccatgtgatgaggaatatgggcagcttttgtgatcttctcatgccgtataggggctgtcctggatatggcagaccctgattataaatcaataggcatttgagtgaggtaaaaagaaagcagttttattagggttatgtactattgtaggtctccccaagtttatgctgcttcccagagggtccacatttttctgtatgcactagaatatgatgaatgacacacacctgagaagttcacattaatggcattgtgctctctgttactgacaccatcaacatcgaaataaagcatgttcttctcttgtcaagaccactgtaaggagtgagactccgtctcaaaaaaaaaaaaaaaaaaaccactgtaagagcagcctctacaaaatgagctgtcttctttccagtgcactttcttatccagaaggtct

SEQ ID NO: 30448 - DNA, 1029 bp, Homo sapiens
aagtttggttctgaaacttagtggcatgagaatcttctggaagtatgtggcttcagaagggaaagcagtggatggagaagcccatggaatgggttttggtttctctccttgttatttttgggccaggaggacctgatgtggagagaagagttcctgtggcttggtttggttctttgcttttgggatccattgagcccctgctctgctcagcaaggaaaacagcagtgattggagcagccaaaccacagtttggggcctggatgtgagtgatcggtacaggtacaggtgaaagaggccccacctggatttgaattccactggtagcgccttttctatttcagggctgccatcccatcttggaattctgtggatgtccgaggggaggaaatattgctggatctagtgtgtgggcccctcttttatgatttagcatttctctatctcttgcagccttttcctaatttcttttgttctggtgtgagtttcctctttctcccatccctttgttgcattcctgtcttcctgtgttttaatgaagaataagataaagaaaagagcacttactgtgtactgcatactaggagctggggatgcaaagctaaacattgtggaccccacctttgggactgcacattctgaaggtgagggagatgtgcccacacatgattggtgtgctgtgatggcaagagtaccaaccaccatcactgtgtaaagcatgtaaagaaaatcctgcaaggagtggaggatcctgggcacctaggctggggatgcagacagtggccagggaagatgtggggaaggaggtgctgtctggaccaggtgtccagagatgaatgggagttatcttggcaaaaaggaggtggatgagtttttaaaagcagcttcatggaacagtgttagggatagaaatcacttgttttttgttgtttgtttgtttcatgaatttgattgatcaaagacacttaaaaatacagaaaatacttagaggaaagtgtctgacacttgagaaaagaccttaatacatggtct

SEQ ID NO: 30449 - DNA, 1023 bp, Homo sapiens
tctagacatctagtctgatctaggaaaagaagtgactgtattcagtgatgttactgtccttgtgattcttaagtcaccaggctatgtgctgggctctgggtatgcaatgagcttcatgaatttacagtgtagtgagaagacattaaagcagatacatatataagtgtattacaagttgtgataagtattatgagaaagagcacaggtttcaatgtgagagaataaaagacatcactttctgtaggaattagccctctaagaagaacatacacttttagttttcgctttgtttttttttttgtcatcaaatacagtcattattagttgaatcacaaaccctatcatagtagttagcattgtttgtgcttgtagataataaaagtctgttatcaaataggaagaaatacatgagaaataggtctttattcttgagggtacatttcccttttgatgaagcagtttcgtactttacatgatcctaaaaggatttttactttaaaaacaaagaaggagagattgatttgagttttgagccagcaggactttgaaatgtgattataattataggatacaaattgcagaattttagtgagaagtaatgttgtccaaagagaattgatagggaaggtggtgtcagtgaagcagaaaagatgccagtcctgttttcccaagttctactttctgatcctggcagggacagcagtggtggactgccctggggtaaaatccctgccctctgtagggtcagaattctttttctaaatgggaagagatagactttaagggtcctccctccatggatatctcctgatgctgtgaaatgtttttggtcgcagaatataatgtgaagttgcatatctgcactcttttagcagagtattaaacatgagaacaagatatttaatgggcaaatgttttgagcttagatacctaacagagcagataaaattcttcaggaagtattaataacaagaggaagaaattgctttagaggcttactctgtgtttctggctttcattgta

SEQ ID NO: 30450 - DNA, 1071 bp, Homo sapiens
tagacggctaaggcattctcagtcacaggatgagataggaggtcagcacaaaatacaggtcataaagaccttactgataaaaacaggttacagtaaaggagccagccaaaacccaccaaaaccaaaatggccacgggagtgacctctggtcgtcctcactgctgctctcccaccatgagcgccatgacagtttacaattgccatggcaacgacaggaagttaccctatagggtctaaaaaggagaggcatgaataatccaccccttgtttagtgtattgtcaagaaataaccataaaaatgcacaaccgacagcccttggggcttctctgtctgtggagtagccattcttttattcctttacttacgtagtaataaacttgctttcactttgccctgcagactgaccctgaattcttttttgagcgagatccaagaaccctctgctggggtctggatcgggacccctttcctgtaacacaacctccagctatttctgttttttccttcataatttttgccttatctgagtagtacctgtagaaatgtttaacagaatgtttttctttacattttcttctttttttcaatttattttttaaagcaggcttttaaacactactgctgaagggaaaccagctggtcatagaagaagatacctaagagggagagtgaatccaaatggccttgctcagttctagctcttttccatgacctgcaaggctttcatcagagacctgtggtgagagggcagaggagctgggatcggagttcccgagaggctgagacattgtttttccttgtctcaattaagaggcatcaaggagaacaggaaaaggaagactttttttctctgtgaggctcagtgtcacttaatggagtgtctagcgactaccttctgtcactccccaaagcacctctaagcctaacgtcatctccactggcctctacctttgctgtggaagagtctaagtctttgcaatcttagataggacatgattagttccaagtctctcttgatgctcttttttttttttaaaaaaattgcatgtgtagaatctgaatcaaagttt

SEQ ID NO: 30451 - DNA, 1034 bp, Homo sapiens
ctttctctctctgggcttgaagtctgagtgtcagtgcaagtggaggggtaccactgactactttaggattagcgttcagaggctttactgacaaaagtgtaggccattttaggttcttctaagctaactgcaaaatagttcacactttcacattttgtgcatgctttattggagcatatttggaaacatctagaagtttcaagatgatgggctcaactgttctgttatcaacaccagccacattgtatcctcttgctcacaacccaggcaaatgctccacaagagtgagctttcgagatactcgaagcatcaaccttgtaaaatactgtgaattttgtgggacatgtgttttcaatgtgttctctacctgtctgcttacctggatggtattataacttatcacttcttttgtggccctgtctcacggcttttaacatccatgtgtgtgtgacacagtcacttggtaagggcatacagaagctgtttgcttctaggtcagatgtttccatactgcttggattttgagatcttgagtctgtttttttttttttgtttgttttttttttttttttttttgagacagagtctcactgtgtcgcccaggctggaggcgcgatctcggctcactgcaacctccacctcctgggctcaagcaattctcctgcctcagcttctcaagtagctgggattacaggtacctaccaccatgcccggctaatttttgtacttttactagagagggggttaccgcatgttggccaggctggtctcgaactcctgacctcgagtgatctgcctgcgttagccttccaaagtgctgggattacaggcatgagctaccgcgcccggccttgagtctgatttttaaacatttttctgtctcttttttccttgtcagccattggtggcttcctgctgctgcttgccgccatttttaattttactgcatctaagtgtgttgtgacttgggaagtcatataaacaagattgttggaatggtgttcaaactaataaagtgtttgtgttctctgctc

SEQ ID NO: 30452 - DNA, 1108 bp, Homo sapiens
gttgttccaagttctccctatatgagagccaaccgtgggaggcagtgattctgggaagtttccttgtttcaatcaagctgttttatgctggaaaatcttgtctcttcctctaccctgtcttaataatattttacacttgtgtggaatcctttgggaaatttttgtatgtatattctcaccagattcacacactgaggtacagactaaaggttttattatttgtgttcatcagattagaaaaccaggactcagagaagttaagacttgcccagagtcagtgagtaggaagacctggattcaaactcttgtctttgatttctgagacctgttctgactctactgtaacaaaatgtaccccaaacttcttgaggcctaagactcagttatctatttattggggttcagtttttggtgatgttcttgttacctaataggttctcaacaagtacttgctaaactaaacagaagtgacagaaaagtgatacaaccaggaatggaaactctctgcaggacagacttccttaccagtaccaacaccttgttatgttgactgtgacttatctggggcagatgtccctgtcttccttggctagttgggcaataccttcaatactctgccatggtgagttctagtcaacaccttctgagtaagccctggaaacgtataattaagggctggaacagaattttattcaccacaatcagaggccttggtgataggaaatttcctttcattttggagaacaaatggtcatccttcaggtcagcggtccccaacctttttggcatcagggatcggtttcatgaaagacagtttttgcatgggggagtgagggatagctttgggatgaggctgttccacctcagataatcaggcattagttagattctcttaaggagcgtgcagcctggatcccttgcatgcgcagttcacaatagagttcatgctcctatgagaatctaatgctgatgatctcacaggaggctgagctcaggcagtgatgctcgcaggccctccactcacctcctgctgtgcagcccagttcctaacaggccaccgaccagtactggtccatgctgggggttggggactcatgcctcagatgat

SEQ ID NO: 30453 - DNA, 1085 bp, Homo sapiens
tgtcaggtcacatataagggaaatcatcgttagaatgtcagtgaatttcttaagagaaacgttgcaagccaggagagaaagggatgaaaattttaaagtactgaaaggaaaaagaatgtcagccaagaatactatacccattaaaggtgtccttcaggaataaaggagaaacaaaagtctttcctaggcaagcaaacgttgagagaatttatcaccactaaacccgtcttagaagaaatacttaagagagttcttcaagtagaaacaaaaggatgtgaattactaatgtaacaacatatgaaagtataaaattcaatggtaaaggtcaagtccagaatacttcattgttgatatgatactctgtaaatcgtatatatctctagtataaaggtcaaaagtcaaaacagtcaaaaataatgatagctaccattaattaagaaatgcttaatataaaaagacgtaaattctgacatcaaaaatataaattgttgggagagggcaaaagtcaagagtgtttgtatgagaatgaaattaagttgttatcagtgtaaaatatcctattataactgtatgatgttttgcataaaccatatggcactacaaagcaaaacctatagcatatataccaatgataaagagaaaagaataaaaacttagcactacagaaacttactagattacaaagataaaaaacaagagagggagaagggaacaaaggatctgtgaaacaaccagaatacagttaataaaatggcagtaataattctttacctatcaataattacgatgaatgtaaatggattaaattctccaaccaaaagacatagagtggctaaattgattaaaaaaacaaggtccaactatatgctacccacaagaaacccactttagccttaaggacacacataggctgaaagtaaaggaatggaagaagatattgcatgcaaatggcaaccaaaaaaaagagcagggctggctatacttatatctaataaaatagattttaagtatgaaactgtcacaaaagacaaatagggtcactatttaatgataaagggctcaattcatcaagaggacataatgtc

SEQ ID NO: 30454 - DNA, 1087 bp, Homo sapiens
catcaataatattttagcaactcaaattcaagaacaaatcaagaagattatacatcatgatcgagagagatgtatccctggccatgtaagactagcatatacaaattaatcaatgtgatactttcattaacagacaaaaaccacacgatcatataaactgatgcagaaaaagcattcaacaaagttcaacatcctttcttgatgaaaactcttaacagtttaggtatagatggaaggtttctcagcataataaagttcatttatgaaaaaccgacagctggcatcataatcaatgaggagaaactgaaagcttttcttttaagatctgctgtaaggtaagaatgcccacacttgccactactattcaacatagtactggaagtattagcaagagcagttagacaaaaaagaaataaaaagctttcagatgggaacaaaagaagtaaaattatcacgaattacagatgacatgatcctttatgtagaaaaccccaaagactccaccaaaaagctgttagatctcaataaagttgcaggatgtaaaataaagatacaaaaatttcttgtatttctatatacaaataacaacctagatgaaaaattcaagaaaataatctcatttctaatagcatcaaaaataaaacaagatgaaatacttaagaataaattttaccaagaaagtaaaagacatacactgaaaactataaaacattgatgaaacaaattgaagagtacactgaaaactataaaacattgatgaaagaaattgaagaggacacaaatagaaagatatttcatgctcatgaattggaagaattaatattgttaaaatgtctatactatactatactaaaatgtctatactatactatactatactgtactgtactatactatactaaaaagcaatatgtatagatccaatgcaatccctatcaaaatcccaatggcattcttcacataaatgtaaaaaccctaaaatttatgtggaaccacattaaaccctgaatagccaaaatactactcagtaaaaaaaaaaaaaaaaaaaaaagttggaggcttcacatttcctgttaaaattatatta

SEQ ID NO: 30455 - DNA, 1042 bp, Homo sapiens
cactttctgagttccaccatagtatgaattaatcatatttaatgctaattatgtccttgctgcgcaactactttctatgtaaattgtgggaaaatgtgaaaacatttacaagccccaagcaagttttacaatgagcttatatatgcggatttgttatttatttgctaggtgtctctttcaatccaaattattctgtgcagatttatcaaaatgttgtgttgctattttttactttcaaaaacattactgatatgttccctccccttcaatcaaagtgttaaaaatattgaggttgggtcagtaatacagctttcattgagttgttgagcttgttcagaattctctatgcggatattatgaagattgcccatggattatttggcttttgtgatttataactctttgtctccagaactgacagttggaatttataccatcaagtaaccagttttatatctttgattaaagttttcaactcaacacatgcagaaattggcttaatcctggacgtgatttggttgcttgatgggttttgggtattctggatcctttggatatgtctagggtctcccctgcactaagctccaaaccacttgtatccatgagtctcttccagacctgcaatgactttgacttttagactacagttaatgccttaaatatatgaagattctgtcattggagggttcctctacattttttgattattaaggaaatttgcttgacaactaattctttagtgcaataactgataacagttgacccttaaacaacacaggggcttaggggcgctgactcctgcacagtaaataatttgagtataatttttgactccccaaaaacttaactactactagtctccttttgaccagaagccttaccaataaacataaacagtcgattaacacatattttgtgtgttatatgtagtatataccatattcttagaatagattagctagagaaaagaaaatgtactaagaaaaatcataaggggcctggtgcggtggctcacggctgtaatcccagcactttgggaggc

SEQ ID NO: 30456 - DNA, 1050 bp, Homo sapiens
gggcacagtaatgaggcaaaattcactttaggcagcgtcttagattgtggtacatttgttgcaaaacttatgattggcaggttgcagtttctgtatatttggatccccatgtaaaattgctccttgtccatagctgttaattcttttgggcttcttcactaggaagaattagagagttggcagggggacagggcctcctggattgggtatgctttcttcctctcacctgacatgtccaccaagtgttttcctggtggagcagacagatccttggccgacgaccctggcatttgctctgcttcccatctgcagacatgccggtggggatttggcattccttcctcactgggtcggctacattgtgttcagccttcacattcgtctcttgccatgtcttgtcttgaatgcagatagaaaaacttgggaaggaaaacaagtttcacggtttcttcctttgatttgagtcatcggtcatagatcaaagtgaccgcaaagtcatctttgctttgtagagttctattgcaaaacatgctgctgttttgttttgttgggaagggcatggggaggatttggcttttatttactctgattctctttgcttctggacttcctcattgtgttgctcaacatttgcagcgaacttgaaagcaccaggggatggccactatatcccagcaaggcaaggaaggagtggagacccgggccacattttgtttatcaaaggcaatgggtatgacaccgcatttcccccttatctatttccttcttcttttcagcacttcccagtgaatttccttggttgaaaatattaaccaaggtgcccagctgtctcctagccagaggggacctgtgatccaaacctggcctgttagagtctcccaggaatttaatttgaggaaaatgtcccagacacctttttttctagcatcttccttaccacattaatgagcaattcctgcttacttggaaattcagggtggccctagtcccttatttctcaagtcttggttctccagccttgttgattctgtgaggtcccctgtgtgtttt

SEQ ID NO: 30457 - DNA, 1044 bp, Homo sapiens
gaatcatgcttgtaatgattcctagacagaatcttcagagatagtcagattttttgagccgttggatgtagctaatgatattcaaagtcatcctcagcagccctcctgggatctgcccatcacctctgcccagtccattgtcacccagccaggctgtggggcatggaccagggtcagccaggtgttctgtcttgtctcagccaggcagtgaatcactgcccaagggcagaggagaggcagggacttcaggcaaattcctgtctccactctacctaattcaaaacagcccctaacagccttttttttttgttttccttttcaagctgcaggaatatattttatgtttagaaggccctccagctcagatctagttattgatgacgtactcaaaacaaatgctcagagattggtcactggctgtgctgtttttgggttggaaatcttacccccagcgaagaaaaccaatacaaggtcattctctcctagctgcttggacttctgtgggcatataccaaagtggtttgatacttgcctaggagcttctgtgatctatgttctggggtataatttttagttctagatgaaactagctggtaaactctacctgctttctacaatctgctttctgcctccgtgggcgggcctggcaactgggctgctcagccgggtttgtgctttcctctctggctgaggtgcctttctcttgagcactgaaagagactgcagcttcaaagttggtgatgtgggcaagctgtgcccatgggaactcaaagaggcatattcattgagtgtttagaaatgcatctcagggccctcaggttgcctgatgcagcagcttttttcatgaaactccttcagcagatgtttgctgagtggctgctctggcatccccagcttgtgagtcttactatttcggagactttgaagatgaatggctgatacctttagagccgtaaatgactccatatcctctatgagtaaagcaagaggcaggatgcttttgcaagaactgctgatgatctggcagagaattcagataaagct

SEQ ID NO: 30458 - DNA, 1080 bp, Homo sapiens
taaaaatctagtctgaaaaatctctgcctcttggattatttaattaattcacatttattattaagtctgatgttagcatagcatatattcatatagcacatgtgtggtatagtatatagtatactaaagaaagatgtagtacgtcatatgtatatacatataatggcatatatgttttagttcataaggtatatatttatagcttcattatattaaccttatttaaaatgtatttctggatatttttatttattcctgtggatttcagttaccgtctggatttcttagccgcatatatctctgcactcaaccacttccttcatgccgtttttggcaaatatattacctctctatatgttatagacccaaccatacattgcataatattgccgtatacaattgttatttagtcaattaagaaaggtgaagacatgggcattcattttgtctttcatagttacatattcacctttttggtgatcttgatttttgtcttgtgactttgaattaccatcttgggttatttgctctaagcatgcagaacttcttttagcatttcctgtaagccaggtctgctagcactaaattctctcagtttttctttatctgttaatatctttattctatattcatttttaaaaaatagctatgctggatataggatttttggttgacagttttgttctttgacactttgaatatattatttcattgttttgatggcctttattgtttctactaagaagtcagcttttaatgttatgcagtttcacttgtaatattcttgtaatgagtcatttttttcttgtctgctttcaatattttttccttgtctttggccttcagcttttttttttctatgatgtgtctttttgcatatctgtttgcgtttatatgaattggagttcattgagcttcctggatgtgcaggttattatttttcaataattttagaaagtttatattcattcaatatccttcaatatctttttctgtttcttctctttgttctctccttcttatattcccatcacccatatgttggtgaatgtaatggtgtctcacatctgagctctgttc

SEQ ID NO: 30459 - DNA, 1076 bp, Homo sapiens
cagcttctttccctggccttgtgggctgtaatgctcctctgacaacacaagggggatttgaggatccaggcaagcagagagagagaggatgccaagcttctgggcattcacaggggctacctcaagggaaggccggctttctcctaacagacttagcccgtgttctgagggattcactgtcctcccatgctgccttgtcttcattgcctttggccctggtgcaaagatgcggagaattatgggggtgctccataatttctgtacaaggtgcatccatgtgcatgagtgacccctggcccatttctcttaagggggcgggaccagaagagtccatactatatgtatgaatttgtcttagttttgaactttggaaatgtggccccagtaatttacttattctctctttacgttggtttctgtcaataaaatgtggtcaagaggacttttctcgtggctctgctgctaactgtgtgaccttggacatgttacttggtggcttacgttcacttttgccgtctgtaaaatgagaattacattagtactcaccctagagttgttttgattcaatgtgttgtcatccatagctgtcttaggatagctccttgacacatcctgaatgctcagttgtgtcggccgtgttcatgttccactagctcctagtagggtcacctagggcaaattacttaagccttctatggcttcagtttcctcatttgtaagtgtgcataataggacctttatcatagaggcttaagtgagccacagcatgaaagtgtttagctgagcaaatggagagtgctgtatacatgaccagtgttatttttttagggagatgtgttattgaaagtgcccctatttctccttctcctgtgttacttcttattcaaatgcagcctagtgaacagttaatggtgccttgcccaggaccatcagtatcctgttgcattttgaaggggtgtgtgtgtgttgtatgtgctaaatgttttcttttgctttgtgacatttgtgtggtgtgtaccctatttccatgtgaaggtgtgcgtctctttgccttccgctacttttgctttcctgac

SEQ ID NO: 30460 - DNA, 1043 bp, Homo sapiens
tgagatgtgtcagaaagtattctctgcgccagccagtttgtggccgggtattttaggaccagttttgcaaagctgctgacgagcaggccctgcttctgggttggaagagaggaaccgccatccattttccctaaaagaagaaaaataggtgagcctggaaagtctgtgggtaggagtgaaataatcaccaactcaatttgcagccgtcttggaagagataagctgttgtttcttcccaagtgaatttctgcaaagaacagatcctaccaagtgagcctcatctcctctaatcaagtggtggccgggctattgaacatgatgattgtcctcagcatccctttcacttggcctgtgaggcagagctggagtcttggcagtttatggaaataatgatttcctgcaagaacttccaattcagcggcatcctcaaacccagatgcctccctggataacagcgtttctcccctggctaacagactgatgactggtaaatgttgacctcaagtaagaaacaatagtgaactgcgaagctgctgctaagctttttaaaaataattgaagtaccaaatataaagctaaatataatttgccgttatcttccccaagataccatgggcattttgaatttgatattatttttcagaaataaaataatcattttcatctgctaatgttgtctcatgttaaggtaacgtgggaaatcgtcagacaggactcacaacccagtcattgttccatagtatgcattggtcgggtatatataaaatggtcgggtaaataggtagtggttggattctggtgaggactcttttcctagtttgcagttggctgttttcttcctgtgtcctcagatggcagtaaacaagcaagagaggaagcgagctctcttatgtctcttttttttaaaggcactaatttcatcatgagtgttccctctcatgatttaattaccacccaaagaccccatctcctagtaccatcacactggggattggggattattgtaggtatccccacaatctatgaattctgtggggacataa

SEQ ID NO: 30461 - DNA, 1069 bp, Homo sapiens
ttttaaaacaatttcagctaaaatttctaagtagttctgtccttgaagatacttggagcttaacttccatttctgaaggcctgtccttgtcatatatcatttttgtagcagctggcttgttccactcttggtgtacttcctgttaaatatgtatggcttgcttggttttattttagtagcagtaacattttcccctttttcattgttatttgcagcatgtaatctgctggacttgcaacattatttcccacgaagcacttctttcttttttttctttacatcccaagagatctgtgtcttgcattaaactttccttgctggtgactgatacagttccttttatctgccatgcagttttagaatgccaacaaatttcttgtacaacaatatggtatggaagtgcttcacttggggaatgatcctgaccaatttaaatcccttaactgaattagtgacttggttaaatcctaggttccttgggttgtatgacctctgagatgactctgtgggtgtttgtgacaatactggaaacttggaagagatgtttatgtttggtgaccttatcttcttcttccctgtggtctttattctggcaccttgaatttcgttcaggaacccatctttcaggactgctgggcttgcattcagatccaaggcttaataggtttaagcaggttggcatgctccatcaccctcctgtgctgactagttgagggatgggcatacaatggtcaccgtccatgcagtcagaagacatctgaagatcccctattctgcctcggtagggttaggaaaagatgtgatgactgtaagtgctatggcaattttgtggccctataaggggaaaggctggaactaccggacaacaggggtcgggggaagggcctggatgtgtgaaaggaagaacctgagcatggaggcagccctgcaggatgcagaaaagaaataaagacagaaaccaggtcactggtgaagccacgggcaatgtctggatcattttctccacaaaaccatttttacccctcatttttgtagttccttgggctaatattttgaaaggtattttgag

SEQ ID NO: 30462 - DNA, 1069 bp, Homo sapiens
ctgtctccctcatagtgattgtttcacaataaatctgtcttatcaaatgcactgccctttcattgaggcccttggagcccccatgtgtagaatatttattaagagcacaaagaaaatcatggcactaaaataattacattgaattcaaaggcttgctagttctgaaacaattgcattcacttattgtccttgtgctctaataaacacaatgctatggtgtgcttgatgcttacgttgacactcttgaaagaatatggctcttgctaagatttcaaagaaaattgaacccacttgttatttcccttgtccttctcacgattgattaaatggtcactggggtaactgttggggtaacttgtctgctattaaaggtaagcttttcaaggataggaatgctgtctgctcactactgtatcctcaatgtgccaagcattgcctgttccattaatattgtggaacaaaaggacgatacgttaaaggagaatcttacacaatgggatagaggtttcccctccagttttggagtatcctaggaaaatttctaaagtagacttctgtaaaataaatcctgtttccctttagccacctttaaatttgtcagtacagctaccgcaaccaccactataccacccctgcagggccagttgacagtttcacttgaaggtatagctgtggctgcagccatgtcacagcttctgggactcacagctgccattgcccatgttgattttctgtacctgacacacagagctgctcttcccctggagagcagacctgcatgaggtagctgggggcaatggccaaggcaggcttttgtgaggcacattctatatgctggagagaatcccctggctcgtattgtgttggtgctatcttagatgcaggtagtagaagcacttaatttaggtatgtttgaggaagtgagcaacagaggattgggagaaattcattccagttggaacacaaagtataaagtgaaaaatacactagagttaatatctgggcttcagtttgaggggaaagaagcagcatgataagcttcatatttaggagggaggaaccaagtaca

SEQ ID NO: 30463 - DNA, 1055 bp, Homo sapiens
ttaaacatatggatactgtatgactttacctatgacccagcaatcccattcctggatatttaccaaaaggaatgaaaaattatgtttatacaaagacttgcacatgaatgctcctagcagttttcattgtaaccacccaaactggaaacaacccaagtttccttcagcacgggaatgaataaacagactatggtacattcatacagaagaactgctaagttaaaaaaagccagtctcaaaaagttacatactgtatgattccatttatatgacattctcaaaataaaattatagtgatagaaaatgatcagtggtttccagggactaggagtggaggggagtatagggcgataaagggttattgcaagggagtttctttatggtgatagaacagttctgaatcctgattgtggtggttgtgacacaagtctattcttgtgataaaatttcataaaattgtacacacaacaaaaaaatgaatgtgaaaactggtgaaatccaaatgaagtctgtagttaggttaacagtgttataccactgtcagtttcctgggtttgaatattatactacaataaagatgttatcattgggggaagctgggtgaagggcacaggaactttctgatactagctttgcaacttttatgtcagtctataattattttttaaaaggctttaaacattcccctaatagcagctaataattcctgaatatttgctagtttccagccctttgctcatctcatttgaccttcccaacagccttgtctggtgcattctgttttgcccattttatggaggaagagatgttacgaaaatcacacacacaataaagagtagtatggctaggttttgcatgcacgtggcctggctccagaatttgtgtgtttaaccaccgtaaggtttttcctcccttgccaagctttgagataacaaagactggtgtagaccatgctgtgtgtagaccactttgctggaaatctcagtggtagtgctcaaagatgtggcttcatccttgctgcttgctatgatgaacatgactcttgcagatttaaa

SEQ ID NO: 30464 - DNA, 1050 bp, Homo sapiens
taaaccacgtttttctaagacaaaagatcagtcttattttgtgacatgtgattcagggtgactgggggattacctggtagtacgaggggaacttggacctgtattgtcaacctcgcatggttggaagtactttgtgctatcaaattcctctgtctggctcgtcacctggggcagcagaatcctttcaagactctgcccaggtggatggctgctgaattctagtggaacatttgagggcagttctctggctctagcggtcgattttcctcctgtcagaagagccattcatgaactctgttgaccaaaaagttaattccttcatgtttttagcagaagcagctcattccagcttaaattcccaaagatcaggtcttctcatgttaattactcatctatattctggctggcacagtataactggtacatgaacactgttttaaaactctgctgattggatcatttatgagacattcatgtaaaaaggaccctaccttgaactattttttttcaaatataatgttggaaccctaggacctcaggattagaagaaaacaaagagtgaactgtatgaattggttttcaagactaacttatgacacctgcgggccagttttgttttgtgcatgttggatccataatctgtaaccaccctccaaggcagaggctggaaggaggtggcaagaagaaggtcagatgccatttgtagtggatgcatctgcttgccatggttagataaagaggttttcattttattcctgttccatcagagacaatatccctaccatcactcaagccagggtattgaaccttgaaaactgatgcattgcctgtcatcacacagaccactttctgctgagttaaagaaaagacacagtctagtttgttggaaaatggtgatgaatatttggaccagatattaaaagagtcaaaataaggtcaggtgccgtggctcacgcctgtaatcctagcattttgggaaactgagctaagggaattgcttgagcccaggacttcaagatcaacctgtgtaacatagggagacccagtccc

SEQ ID NO: 30465 - DNA, 1043 bp, Homo sapiens
aataattttttttaaaaagccaggcatggtggtgcatgcctgttctcccagctacttgagaggctaaagcaggaggatcacctgagcctgggaggtcaaggctgcagtgagccgtaattacgtgactgcactccagcctgggcgacagaatgagacccccatctcaaaaaaaaaaaaaagtcaaaatagatatttttatattagaattttatatcaacatgaaatggcaagcagaattgagaaaaagaattttcttattccgaaattcagaaggctatttattataaccttgctgtgtttaagaaaaactattttaagagcaaatatcatcagtaggccttgggatacaagactaaaataaaaaagcaaatcctctgagcatgggagagaatgccttaaatattagtaagaagttagacctaattttaaaaattgggttaatcagacatacagtgccttgagttttttctcttttctccaccctgagtcattagtgtgtctgagagggaaaagacctgagccttcattctccatttgtacaataacatttaatcaagtgcaaacagccctgcagagttcaggagtgctgctggagctaggatgatgggtctaatactctagggaccaagaacaatgaagctgacatgtgggttcacctccgccattgttcaaggaagcatccgtggccttttgctgtgtttaattacagtggcaaaatctcagtcactgtttacacaggcttattgctcaggtgtggaaatgcactctaggctcacttttggcatttgctttgtatcggggagttcttagtctcttgaattaaaaatacattcatccattccttctggtgttacaaatgtaaatatcttcaccaaccctgcagggattgccgtagtggtagatgggtttgttacttcagccacttcacacaggagacagggaacctgtgggaaccagtcaattctgtggtttctgcaagtgttccttcaagatggcagtggtcatgcagcctggaaggccgtacagtgtccaggcatctagtc

SEQ ID NO: 30466 - DNA, 1025 bp, Homo sapiens
ctttgctgttgggaaggcagaggagaaagtaagtgagggagtacatgatttatcaaaagtgacaaggagaacagagctcctctatcagccctcagctaccctcctatttatataacacctttccttccagtgtttcccccagcagatggccaggtgaggttcgtggtctctgcacggaaatacagctgctccagggcaggaatgggggatcttttgggctctctcccagcagaattatgcaatagtccatggagggaggggacaaagtcattccctagctgaagcagccctggaaatgtagacttaaagccaagtgctgcttgcaaattgggaggttgccaagacctagcaccctaagactcaggggttaaagtaaaatcctggaggagttaagtaattgaccacaagtgggtctgcccccatctgcccctgcataatgagaaagtcagtgagacttgatggggtcacaaaagcacagcaatgtgttgactgagatgactgtgctctgccaagggaaagagtctgcccttcaaagggattctccaggtgtactctgaaagtttccccattgtcctgttttatcaagatccaagaaccaaaggaggtccttgtcctgcttgagatttttgctctggggttgagcatgtgagtatcaggagacctcatttggtacaggatgttgaacacacacagctgcttttttaaggtttccatttgcaactggttgagccgtaacaggtaattagcacctttgctgttggaccaagcggtgcttttattggttggagtttcttaattaggctggctgctttgcagttttggggaagagaatttagagggaaagcaggaatgctgtgtgtctcagaggatgaggccaagctgagaaaacagccagagggtctgagttcagtgccccagcccttcagtgccatattctaatcctaccctgcaagttctaacctcccgttggcctttttctgagatcatgggtagacctcagaaatggttcttgtatccacacttct

SEQ ID NO: 30467 - DNA, 1030 bp, Homo sapiens
tagtgaccacaggagtaaagtttgattgattaagctgtgggaggaggagagagagtaattttagtcttaaaaatagatactcatcagagacaaagaaagggcaatagaccacagtatttaggagggaaagttgagttacctttagagtcctgagggacacatgtgtgatgagagagagaaatgaagcaagaggtgaaaaattcacagaacaaaaatgtcgattattttaaaaaggcacaaggaaaagacggagggagtggtagatgggtcttgtttttggagacttcttttgaatagaatgatctgaatctaaggggtctggaaaaagttccaggagcttagatccctgggaagggagggaatatctaggcagtaggtttgccctctattttagacagacctttctgtaataatttagcttgatgtttccaagagagaagtagtggtgtggttatggagaagttaaagtgccttctgcattaagagttggtgattgtatgatttgaggtctgctgtttacatagaagaagctgacaagaagagggactgcaaattgaagacaagagagagtttaataggaaagattgggcgtagaggaaatcctgaaattctaaccacacctgagggaaaagagcacaataaaaaagtagatgactggccgggcgcggtggctcacgcctgtaatcccagcattttgggaggccaaggagggcggatcatgaggtcaggagtttgaggccagcctggccaatatggtgacaccccatctctactaaaaatacaaaaattagccgggcatggtggtgcgcgcctgtagtcccagccacttgggaggctgaggcagaagaatcgcttgaagccgggaggtggaggttgtaatgagccgagatcgtgcaattgcatcccagcctgggtgacagagtgagactcggtctcaaaaaaaaaaaaaaaaaaaaaaaaaaaaagttgatgatcaagttaattaattgcataaacatttctttgtttggtaaaatttgcttttttctca

SEQ ID NO: 30468 - DNA, 1041 bp, Homo sapiens
ggctggtttcaaacttttggcctcaagtgatccgcctgcctccacctctcaaagtgctgggattacaggcgttgagtcaccatgcccagcccctgatgcaagcttttaattggtgaacaacttaggttcagagaaaataagtgacctgcccaaaaacaaatatgggggggatttggaatttgaatcatgtgtgcgtgattgcaaagtgtgatgtttatactgcattctggctgcctccttttgtgtctcatttatgcaaaacagaacagcacacacacacacacacacacacacacacacaccacaaaaccctagtaatgtcatgataacaaaagtatttaaatataaatatgagaaggaaacagaggcataattatatgcagacttaaagttcttctttatgttgtatatcattagaacgttgagaatgaaatcaataaggaatagaattagcccgggcgtggtggctcacgcctgtaatcccagcactttgggaggtcaaggcgagtggatcatttgagccaggagtttgagaccagcctggccaacatgacgaaaccctgtctctactaaaaatataaaaattagccaggtatggtggtgcaggcctataatctcagctacttgggaggctgaggcacaagaatcgcttgagctgcagtgagctgagatggtgccactgcactccagcctgggtgacagagtaaaactctgactcaaaaaagaaaaaagaaattaataaggaatagaattaaagaattacaagttcaaaaagtgagtatagtgaatgccttcagaatggcctttaaatatactctattttataaatacatctggaaagctacatctggaaaggaagattaaaatctaatcttcccacaaggtcatcagtgtgattcccaagcagtaggcttgggctgagcactgcttggagagatcaagtggagacttggtgtgttcttaccatcccaccacccactgccttctctgaagtcgagtcagtcttgatgacgtctctgaagctgagctattaattttaac

SEQ ID NO: 30469 - DNA, 1761 bp, Homo sapiens
gtacaaagaggagctagtaccattccttctgaaactattccaatcaatagaaaaagagggaatcctccctaactcattttatgaggccagcatcatcctgataccaaaacctagcagagacacaacaaaaaatgaaaatttgaggtcaatattgctcattaacattgatgcaaaaatcttcaataaaaaactggcaaaccaaatctagcagcatatcaaaaagcttatccaccacaatcaagtcagcctcatacctgggatgcaaggttggttcaacatatgcaaatcaagaaatgggatccatcacaaaataaaaccaatcacaaaaaccacatgattatctcaatagatgcagaaaaggcctttgacaaaattcaacaccccttcatgcccaaagctcttaataaactgggtatcaatagaatgtatctcaaaataacgagagctatttatgacagacccacgtccaatatcatactgaatgggcaaaaactggaagcattcccttggacaaccagcacaagacaagggtgccttctctcaccactcctattcaacatagtattgggaattctggctagggcaatcaggcaagggaaagaaataaagggtattcatataggaagagaggaagtcaaatggtctctgtttgcagatgacatgattgtgtatttagaaaaccacatcgtctcagtggagtctccttaggctgataagcaacttcagcaaagtctcaggatacaaaatcaatgtgcagaaatcacaagcattcctatacaccaataatagacaaacagagagccaaatcatgagtgaactcccattcacaattgctactaagagaataaaatactcaggaatacaacttacaagggatgtgaaggacctcttcaagcagaactaaaaaccagcgctcaaggaaatcagagaggacacaaacaaatggaaaaatattccatgctcatggttaggaagaatcaatatggtgaaaatggccatgctgcccaaagtaatttatacattcagtgctatccccatcaagctaccactgactttattcacagaattggaaaaaactactttaaacttcatatgcaaccaaaaaagagcctacatagccaagacaatcctgggcaagaagagcaaggctggaggcatcacactacctgacttcaaactatactacaagactacagtaaccaaaacagcatggtgtactggtaccaaaacagagatatagaccaatggagcagaacagaggcctcggaaataacaccacacatctacaacaatctgatctttgagaaacctgacacaaacaagtaatggggaaaagattacctatttaataaatgttgttggtaaaactggctagccatatgcagaaaactgaaactggacccctcccttacaccttatacaaaaatcaactcaaggtggatcaaagacttaaacgtaaaacctagaaccataaaaatcctgtaaggaaacgtgggtaataccattcaggacatagacatgggcaaaggcttcatgtctaaaacaccaaaagcaatggcaacaaaagccaaaattgacaaatgggagctaattaaactaaagagcttctgcaaagcaaaagaaactatcgtcagagtgaacaggcaacctacagaatgggagaagatttttgcaatctatccagctgacaaagggctaatatccagaatctacaaagaactgaaatgtataagagaaaaacaaccccatcaaaaagtgggc

SEQ ID NO: 30470 - DNA, 1055 bp, Homo sapiens
tttataaaccttaatttatttgcctttcagcatttatattaagcctatgatagataggcctgtttgagtcacagccaaacgttgagagatgagacagacctatgacttaatggcctcaatctcacagagtgaggagaaatcaatccaaaaggaaattgatcctgggaagaccgagaagtaccagagtcctgcacaaaacttgttggtagaatccgaaaccaatccacgcctaagatcatgtaccacatcagcagggtattaattatgataccatactgttaagctatggagccctttagttaaatgtctttgtggaccctttcatataaagcatatagaagcagaggtcctctggtaggtattgggaaatggagacacgaagcccagttgcttggccacatcccagggagactctgaagcattgttttcatctttccttgcactgcagagcctaggtagtattctaagtaatcaggtgtcaacctctgagaatagtcgtataggattctctgctgtggattctctgttgtaccctttagtttacaacagagtgctgggttgagtccagttaggaaagatggctatggggattggcaggttgtgtctgtattcaaaaatcaaattgagaaagttagtatagtaatatgactattttatcatatttcggccttatttttcttcatcacttctgatgatcaaacactggctcattgtacttctgtcacctcttagaaagcattggctgtaggcaagagaacccactcaagctgtgagaaatttactggatggctcaggggcagccccaggagggataaggaccatcaaggagcaagaagccaccaagagcaaatgaccactctttttgttctttcttccttcttcctttgttcttttttcttgtccctcctacttgccatccccagtcatcggtgaaacacagtttcctggtctcctcccagtcctggctttacataatgccccagttgagatccaaaaaggatgaaatcagtgtgtgttgtgtatctgagtttacatttctgagcaaattatataca

SEQ ID NO: 30471 - DNA, 1049 bp, Homo sapiens
tagataagaatggcatcttctccaacatttcactcagcatgtagcatccttgctcaaggccatcttcattaggcatgtgatgagtggatgcatcttcaccatgagactgggcttctctctcaggtacccagcaccaccaatccaacaaagattttgccacattcatcaaaaagatctgaattcatgtgtccacggtttgaggagctaagataatggcattctgacatatcagctgtgtcattgttaagataaaattgatattacttttgcccaccgttatgatgttacttttgcccactgttacaacagaagggcttttttttttgagacagagtctccttctgttgcccaggctggagtgcagtggcacaacctcagctcactgcaacctccacctcccaggctcaagtgattctcctgcctcagcctcccaagtagttgggactacaaggtgtgtgccactacgcccagctaatttgtgtatttttagtagagacgaggtttcaccatgttgaacaggctggtcttgaactcctcaccttaggtgatccacccaccttggcctcccgaagtgctgagattacaggtgtgagctaccactcctggcccagaatggaatttttaaacaagattttggcaagattggaatcaaatctggctgtcaagtaatgggcattcaggaaatccttgaaaataatcccttacagttgtacttgtaatgtgcttttttctgtatttcccccaagttcttaccatggtcaatagtgcctcaccatcgctggccattctccctcactctcagaacatcagctgtgctggtcaccttttagttgcctgaacaacccaaactttctccctcccctgggcttttgaacattcttctccttctgaactggaaagactcccctgctgctctgcttctctactggggaagaggctctttcccatgttctttgtctcagctaaaatgtgtccattgcctttccatctcaggtcccctataggttttcttcatagagattatgatcatttagaattatcttaattag

SEQ ID NO: 30472 - DNA, 1029 bp, Homo sapiens
ccactctgttcccagtacctaacacagtaccatacaaatggtaatatggatgaatgaatggtaaaatagtgtccacttgggagaacctgattttactcttgttatagttgaatctatttacctaatgcttctgcagtcctttaagtctctttttaagtactgcctcttctggagtcccctccctgcactggctccatgggccagttattatacaatacagtatggttatctttatttactcctgtgtctcttcactttgtaagcatcccaggactgaatcatgcccaagtctctcatgtccacagtcttccttggcctaggctttatagatatttggtaggtaaataaatagcaaataactatattattagtcctgataagtttaaatcttaaaaaactgtgaatgtaatgcacttatcacttagctataacctagttgataaacagtatgtaatttcacacccatctgatttatccatggttaaaaaaacacacaactgattttacatatggaatgttgaaactgggagcacatacggtgacacctcagagagcctgcatcttacatatctttgcatgtggctcacatgcccaatactcctataaatgtttgttgtgtgagtgaatgagtccatgaatgtatgacttcaacttgctatcacttttggtattagattttcaaatttcccaacatggagatatggaagccattgttatttgaaataactctgtgtttgttactcattttagttagcaacaaaaagatgaaaacgatcaaattttaccattcccacatgtttcagagcttttcccttcttgtggttgtttcctgaacacacatatttgagggaatattcagtactcataacgcgtttaaagacaattgccttgagttttggagcaattgaattctgaaatagctcatttgtattagttataggtaagaagctatccagataacaatacagtctgattctgttggtgtaaaccaccttatcagttgaaattcattgcttcataaaatcattt

SEQ ID NO: 30473 - DNA, 1057 bp, Homo sapiens
tgtattctgtgacttcatattttcttttatcttttaactgagtaatctcatctgtcagtcatgatattactgtgggtcataagggtttgaaaaccttttaccttttttgtaccagtgttggacatggtaatcttaaggaaggctgttcctcaatatagcctgttgaggtgaacatgtttggctgattttcttaactggttttgtctaatattccttgcctgattgttcaagatgtctcaccaccagtccgtgactaagtgtgggggaagatctgtcagggcacccagacaccttagagccccaagtctctagatgtcttctttgtggtaattaccttcctcttagtatccattcaaggagccagtcggaggtgtccaaaaaatcacttttgaaactctccaaatgaggagtggaaagcctggggatactgaggaactgacctttgtccctttcaacttggtgctatcagtgaccacaccccagaatttctgaggctccttgacaactcaatggacattgacgaaagaagtttgaagactgaggctccagcctgtgctctgccatgtgcccttatataaatcacttcctttttctgggtccaagtttctctacttcattgggtcaggtgctataaaatttatattgtataacaaagttaaagtgctgatactgtgaatatttaaaatattcatgtgaagataatcattgcagtaatgactcagtgggttgaatttgcctactctaagtattcttaggtattcatttctaaaatatttctccagaaattcttagtacctggtatgtaggagacatttaataagttttgttgagtgaaaagaaaaccttacctttccctgggttcatgcattgttgattgagcggccaaaaataatgataaaaattacagctgcatttattgaatgctcacagttggccaggcacagttcaaagagattaacacataactatatgtcaagaatatttctaaataaatgtaacattaatattttatttaaatataagcatatcattaagtataaatatataacagtcttat

SEQ ID NO: 30474 - DNA, 1029 bp, Homo sapiens
acctctggagcctgatcatgcttgagcctgagcccctagtgactcactgagctggtgctgtcactgtgtgccctcctacagtccaccatccagaaggggcttttctttcttggccatgctcagggctgtcactattgctaggcagtgtcagtcaaggtgaaaaggattgtggagtttcaggttgagtttgccctgaaaagcaccatctccacagtcagaaattctcacttctgtggtgtctcctgctgtgcactattaaccagcccattggcctatcggtacttcatttccctgtctgattttggcaccttctttgtatttttttttttaactttctgttatgggtagtctatggatgttcctccaagaagagtttctttctctgagctctgctcactcagcagaatgcctccacatgacagatgcctgggaaacatgtcctaatcaattgattccatcttaggtccatcaccaggaatttgctaacatccgtgtgcatatgacattatatgaggactgatacagatgtgggttacacccatttattattatttctcaatgttcagtaggaatataaagggttcccagagggtgtaagaaccaccttagaccctgagaaacaagggcagatgtattcagagcagatgcaaagacagaaatatggagggaaaataacaaggaagagaaatgcaagctaagttcatatgtgattagacattttccatttttagcctcatggcttacatttgcataattcttttaaaaagaaaaattaattatttatgactctagcttttaaccaaaccgtgcatttaaagtaatcactctgggtaatttaaataaaatcttttctgtaaatagtttatgctcattagaatgagaaaactgttggtttattcaattaaaaggacattattgccagtttggattctctctctttttttccacttcaaaacagagggcagtcacattgagacagatgggacttaattaagttgtctcaaaagtaaccagattttgctttaaaaa

SEQ ID NO: 30475 - DNA, 1049 bp, Homo sapiens
gtggacggtgtggtgctctttgtagacctgtagcagagctagccacttggccattcaggaattttgaagtttaatattctctatgcctttaactcattcagaccctgggaaaggcttatccagataatctgtattttaaaattactggaatatcttttttttttttttttcttagacagagtcttactctgtcacccaggctggagtgcagtggtatgatctcagctcactgtaacctctgcttcccaggctcaacagattctaacgcctcagcctcctgagtagctgggactataggcacccagcaccacgcctggctaatttttgtattttttattagagatggggtttcaccatgttggccaggctggtgtcaaactcctgacctcaagtgatctgcccattttggcctcccaaagtgctgggattacaggggtgagccatcatgcccggcctggaatatctttaaaaatgaaggtgttggcttggcgggggtggtacaatgaacatcagaaagagagaaccttgctcagagtgtaacttgggacaacttttcttgagagtatttggactgaaatgtgcaataccctttaaccagtaattcaccttcttgaaaagttgagagggtgcctaacaatttgactacaaggatgtccattaccgtgtcattcatgttagtgacagcctagatctctaataataagaaatttaataagtaacttattacatattcaaataatttaaatatcataaagtgatttaacatgaagttaattgagatcagcggtggatattagcatcatagggagctttaaatgtctttttttggcctatcttttatatctaattttctacaaaaaaccggcattacttgtgtgatttttaaaaagaaacacttaggaaagtatatgtgttgccaagaagggtctttctgttcatcttttccttgcttttaaacataccattggaagaaaaaaaaaattgaagtcccatccataccccaaactagagattgagaaatcactattaaattatgtatgtcctggtaa

SEQ ID NO: 30476 - DNA, 1034 bp, Homo sapiens
ttggggtagagataataacacctgccagaagaggtgccatcagagctgagatctgacgcatgggtagggaatcagtgaggcagggaagtggggtagtcagagaattgacgtgaagttgtcggggcagagcattaaccaaccagaggaaagagccccacaaaggctttaaggcaagtgaaatttgaagcacaggctgccaagtaccaggcttatactttcagatcattctgggtgccatgtaaaggaaggattggattggagggctggagtgaacctggagagaccagatgagcagcagtggtggcatggtgtggggtggcagaagtggaaggatgtgagacaacctgcactgccaaatcttagctcatcagagaccccttggcataggttttagagtttgagccatttaacagaactttctttgctctatagtagagtgcggatctttatccacattgcttaatgaagaagaatggaagattatacatgcaagcatccacagggaaaaaaatgaacacacagaacctcagcagcaagcagggattgatcattcattcatgaggcccgaggcaaagggccagttttacaaatggaataaagatatgtaggccaggctttttttgttttacacagttggcaggaaaatactttgtttcttatttggtctttacatatttcacagtgaaatgtgttgttttgatcaatagatctttaattggagttttatgtttgaaaaagggtccactcaagtttggaacttcgttgagctagagcactagatgtcccttcaatcacccccatgggtctgtgtgaaactctgaggtagaaatgaagtgaattaggagaattaaaacaaaaacatgtccctctgctcggtgggtatttttctttttgaaatacctttatcagggcctcagatctcttcctcacatctcctttgtgcctcacctattgttcctcacaggttgcctgcgctggtcccatctcatcacatgggctctccctggtgggatgtccccgattgagtcctgggc

SEQ ID NO: 30477 - DNA, 1028 bp, Homo sapiens
ctttgttctcgtaagttatttcttgaggaaaatatatgttttgtggggaggatgagggcagtcttaaactgaggacatcaccacaaaggcctggtctgtcattttccttcccaggatttcttcccatatgcttaaatggatgagtcaaaaagaggtgtttcctgctcaacaaagataaaatagagagagagagaaaggacagctctcctgtcagagaggcctgcaaagtccagcagtttgtgcagggcttcactttggtatttattttgcagtccatcaaacatttgtcatactcatggccccttgctttcacaggacatagctgcgattcgacacaaacactttcctaagaaaatatacatttttcattccacaatgttcatgtatccaaggtttgtttcctgttgtgtgaaaagatgtttaatatttgagaagcttttttaaaagtgattcctcattttaaactcagtttctcatctcgtggtctatttttttctgaactcttgaaaagcactggaggagcttatgagcttcctttctgaatagttccagccataagtaggaggaacaaatcaggaaaacatcctcatatttccgtcttcttaaattgggagacccgtataagataaaagtgttggaaattgagtgttggagaagttggagtctgcttttcatagacattctcaataccattttggagacatctctgagatccaaaacatcttgtttgttcggttctactctttgtgggctccatccacaggggcaggggtttagggcaagtttaagagagccctggtcttcttttatcagaagagaaagcattcttcccagagtaaaaagaatgggaaagtctgatgattcaagtggagaccttaagatgtctcatttagttgctttgcattttctagcacttctgatgtcataagctctagagagacagagagaaagtctactgtcacaattcccaagtgtttggggtctttatttatgtgtgaattgagttgaattagtatgttctaaagtca

SEQ ID NO: 30478 - DNA, 1029 bp, Homo sapiens
tacttggtttgccactgaagggggagactgaggccagcacatggatctggggagcagcagcacagaggtggtcactgcagcttattgagggagaggagagctaaggcagacagtaggtactggggacagaatcttagggaaaatgagtacttgaggaatgggcaaaggacaaagatcctgtgaaaaggagaaagcccaggagtatgggacctggaaactgagggaatagtgtcgaggaagaggaagcaatgggctaagaaaagtaggaagatttgagggagaaaatcctgtaaggtttggcaatgaagaggcccctggcaaccgtagagaaagggatttccatggcatatttggtggtggagggagggcaaaggcagaatgcagtgggttgaggcataaaggggcaataaggaaacagagatggcacttggttaatgaatacaggacattgggatgggaagatgagctcagcgtctgcattctgggggaggaagcagagagtttagctaagctgtgtagaatctgcactaaatgcagtttcttctattgtttccctacttccacctttttctctttcttctttcccttctcatctctctattccaaccaccccgccatatattgttaaccgcacgataggacctttgccctcatgaaacttacattctggtaggggaggcaggcatgaaataatcaaaagtcctgattacttatactcaaccccacagataattgattattataattttgataagtactataagagtacaggcattaagaggagtcctgccttcttttgaggattgcttctcacaagcaaaagaagaagaaccaaagtaatgtacattagaaggtgctgaatacatgagctgactataaaatattatttgttttgtttaattttgagtttgaattcccaaatacaatttttgcctttaatggaaaaagccaaactctcaagatttttttttgacccctccagtccatctgaaactaaaacataataatggtaattaatgcagcgttgac

SEQ ID NO: 30479 - DNA, 1098 bp, Homo sapiens
cagaccagcatgcatccagaaacatttttaaaaagacatatcactgtaattgagaatcacacacacacaaaatcaaaactgagtattttgctggatcacctatccggtcgagaagacggaccaatgatggacaagaaccagctcagtttggtagtcggaacatggctggggcttagagcatatgtgtacaaagtggtcacatacatatttatactgtaaagcacagtatcctcagagggttgcagaagaagggccaccccatttgagaaaggagagagactcagctggaaggatctgggaaatttctttcatggaaaaggtggccacaaagatggagcccttcatgtcttttcttccttcataagtatcttcaacaatttttagcaggaaaagcaaaacaaaataaagctattaaaccaagcatctccctaaataaaattacacacacacacacacacacacacacgcacacacacgcacacgtgatgaaggctcagcattctgacgttggttgttggttgatgctattacaggcataaatcaggtaatggcagttggcttggaagaaagaatttctttccctcttgcctgcatccctttattaacttcacttgcaaattcattgccagcttcctgccctgcttgtcgtttagcataaaaacctgaagttgaaggctctctctgttcctcagccatctcagagatggtgagactagagtccactgcccagggactaagttaaggagaggcattggaaatggggtgacaggatatgagtcaatgggcccgaactacttaccacaggaggaaaaccaacaagagagaactccctcttccgtggtggttagccgtggcatctttcgaaagttaacattttgtagtgttgatggatactactttgagattttacttgagtgaataaaggaagtcaatgtttttgcagtttcaaaactagaatcaattagttgtccctaattgtacctcatattcaaaacggtctgacggctccacatacccaaaagtcttttgatatggtcaactgctcaaaggaataatgtcaaagaaagttctgtaaattttttaaaaagttacctgcca

SEQ ID NO: 30480 - DNA, 1021 bp, Homo sapiens
ttcctacattataaacaccccacaaccagcatgaaaggcctcaagacacaagaatgtccagacacaagaacgtccggtcgataaaatggtaggcttgcagggtgactaacaccagtgatttaggggagaaaactaaaaccacttccccagttattcatgcactcatcagcttttccggagaaatgccctaacagccattacatctggctatgattcccaataccctcatctactccaggtaaaggagccatgcttagttcagtactgctgtggccagtgtgacagcgaatagatggttctgtgtgtctgcaaaatgccaccagtatgctgagcccagccccagctctggagatcagtgcttttgcttcctagctaaggagtacgggtaggtttgagacaaaaggtagaggagagagaattataaagtatagggggatatgactagattctttggtaaatgtaagtaagaagccctttctcgtatcacggactgagttttagcagctttgggatacacacacacacacacacacacacacacacacacacacacacacacacaccattcaatgggaagacaaatccaactgctaactagtctgctatgatttacagaatttacattgtttacatgtataccatataggtggagacacacacacacacacacacacacacacacacacacacacaccccccattcaaggaggggacagattttcctttgcatctggtgttttggaaaccaagaagtctacaaggtaaattcatatcaagcaaagagttaacttttctactcccaacttggagccaatgtttagaggcatctgaccttggctttcctgtcattaaaagtccctaggactgtcaccctgctgggcttctcaccctcatcggtccactcccaagccctgtccatgaaacaggacttgggaaggtaaagattgccctggctgatgacttcacggacttttgtttttcttttctttttcttcttccccttgctagtacgaagaaggaa

SEQ ID NO: 30481 - DNA, 1055 bp, Homo sapiens
tctctctactttgcagtcttgggggagcttgggatctgggccaggttaggttgtgagtaggatggagaagtgagagctcagtttcatagggtgttagatataaccctgtggttttatttctgaagtggagggtggagggctgtggggaaggccgtggtagttgatatcaaagactaggatgagaactgctttagcagcttattattatttctttaccattattactttaagtagactattaaagattaaaaagaaaaggaagaaccattccttttcccttatattttcatgtgttacatgattcatttctctccacttttctgttcttccttagttcattccctcattgtatcttcccttctatcctgtttctctccatttttctattcaatagttcattccctcattgtatcttcccttccatcctgacattcattctgttctcattttcattcattcactcatcaagtcttgactgtgtgtctgttatgtgccagactctgagcgaggtgttggggaaatggagagaaaccacacagatagagcccttaacatcatggcacctgtggtatatagtgtgctgtattattaagaatcataactgctttgaaggaaaagtaaagacacataaagtgtaacagatctaaagtggaggaggaagatgggaactagttcaaggtttgggcagcattccaggaacagcatgtacaaaggccttgagatgagaaagcatttgacacattggaggaatttaaagaaggtggacacagctgacatatagaggatagcctggaagatgtcagaggatgaggctgcagaggggccgcatggctcaggaccttgggagtcaggttaaggattttggattttatactcagagcagtggaagatcactgaaggattttaagaaggggaagaaaatgatcagattttcattttacaaaaagatctctctattgctgtgtggagaacagagggtgatggggtaagaacaatagtaaaggttcgtacagttttcccagggattcatgacttggacccgggcagtgggcaca

SEQ ID NO: 30482 - DNA, 1035 bp, Homo sapiens
ttcgtcagttctcccaagagtctacagagtgaccttttacattgtaatcagatcctattgttcccttgactaaaactcttcaagagctttccatctcacttaaagtccaagcatcttggccttctctgcacacttctgcatgatctgacccccaagtactggtgttgtcttgtctgtgtctactcactcccttcctctgcactggccactgtcttgtccctctttttgtcctgcagccaagccaagttttccccctcatcaagccctttgcgttcactattccttcccccagttatctcatggctcattcctcctcagtctttgggttctgctcagccatgtcacctccttggagacatcttcccatccatcctatcaaaaatgagacccacattctatcactctccccttcccctgcctcattgtttcttagcactaactgctattctaaacatgtatctttatttatcatcttatttaacatctgtttctactaccagaatggaatctctgtgatggttaggcactgccatcttctcagtgcctggcatacaaaaggcactcaaatatagaaatgaatgaatcatgctgagagctaggaagagtgaagcactgtgaagtggaggaaagaatgtcgggtcaagacccaaaagccatgccttctgttctcacctgggcttctgctctgtgatcttgggcaagtcactgaacctctctgggactctgttgcccattgacaacaggggttggcaaacttttctgtaaagggccagatagacaatacagcccctgtcacaactactctgcttttatagtgcaaagcaaccactcactcattatataatgaatgggcatggctgtgttccaataaaactttatttacagaaacgggagatgggctgtggccctggggctgtagtttgctaaccctgggtggtttccagagtccctcatctttaatagtctgagatctcttgctttgctgttgtcatcatgttaaagaaattgtgagtaactttagagagaggccctgtt

SEQ ID NO: 30483 - DNA, 1024 bp, Homo sapiens
gttgtccctcggtatatgagggggattggttccagcaatctgtgcttgcaccagtcctgcaactggccctgtggaacccacatgtaggaaaagtcaaccttccaagtatccaggtttcacattccataaattatgtattttccaatctgtgtattagtggacctgtgcagttcaaactcgtgttgtgcaagggtcaactgtatatgaaaaagtacagccattaaaagtgcaaggaaaaagaggtacatggttccataagagaatgcagtctggcaattcagcctgagaggtgagggcaggcatcccaatggatgttatagccaggctgaaatctgaagtactagccagaatttaccacagagaggggaagagacgagggccattccaggtaaaggcatggcatgtgttacgctgagaggccagtgagatggcacagcatcttagggactagcagaaggcgggcatgatcacagcacagagggtgaggaaggagcttgggcaagcaggtgctggagaaggggtgagaggctggttgctgtccccgacctcatctcccggtcactttattattaatattgaaaaccattggttttcaccatctgaccataaccagagaaaagccccttgctgtccctcagtatgcttctcagaggaggtaaagaggatgttgatttcacaagcattatgaaatccccgtacacgtttctcagatcctgagctttgatgtggagttggcagttgtgggcaaatcctttctgcatgtgtctgaggggcagcagaatggcagagttgcattctcaccacatcagtgcctgggtccagtgcagtcaaggaagaaccagccctgctggggctccagtactgcctggatgggacgtaacatttcctcctgtgagtttgtgtatatgttagtgcagatgcaaacactgcagcagaccagaagtggcaaatgagtgtttacgtcctgcaactacctgctttgtggcctcatggcaaccttgctcagcagcccctggggccatcc

SEQ ID NO: 30484 - DNA, 1034 bp, Homo sapiens
gggtaaaagtagataagaaggaagttagacagttgggaaaagaggaagtctggaaggaagatactttgttgaagtttcgatatctgtagttaagccctcttagagtattgagaggagttgtgagaacagtcacacagatagttcaaaagagaggtcagtgcttcagattcctgaatatttcacatgaaaggattctgggctctttgagatggcaattcttataacaataattttgctgtcttggtttccaaagaccatcccagtatcttggggtcgctgtcctaggaggctcaccccatattggcacatggggaaggatcctatgggataatattttctggatcggttgtgttcctgggtggtgagtaagatatcaccagatgcagttgtgtaaagggactttgtctctatccatgtgatgaagattcccagcagggagggagccctgggacatctgtaatcaaattgaagtaaggagcactgtgacctccggggaaatatgttgatgattttctggactgtctaaaacattacaaaccccaggaatggtgatttttttttttctgtaactctccttgggacttgagtttcacaaaagcatttgctgtctttgttttccttattaaattagcaagactgacttaaatcaatatactgttactgcttgaaatgttgctgaaagaacaaaatagacgggcttgacaaatgtctcaggttccatttaggttatgtgggggctgaagggagagagtgggactcactgaagtagtcgtgttttctctgataaaggtcaagaaaagaaaaatgtggaccaaaactaaggaaaatagtgaaaggaagctacacttctgtttgtggcttgtggcaggtgatatttgtttttctgaatagagttggccataggattcccttaagcatttttgtttatttgcttgtttgttgggggagagggttattcttatttttttttttgttgccttgttttttgcactttaaatcattttcacgctcaagaaataatgagctcaatcccg

SEQ ID NO: 30485 - DNA, 1031 bp, Homo sapiens
tgttgtttgtatttctgctgtgcttggtgcaacacgcttgagcttttacctgtccaaggccattcatattttccctatgggatctggcaaatgtccttgtcgctgcaccccacaagtgttcattaacatggctggcttgtgtggaattccctgtggcagcttctgctatttaaatcacctttctaaaaggtgacacatccaggtagaatccaagatctgtatcatttctactcctgtctctgtgtggtgggacttgggagctttccctgtctttggtaatcacattacacttcagcgagtgccctggccttggagtgtagagagtgttaaaggagaattctgttatgtttggatggctgctcgcctttaatgccgactgccccgctgatgtctaatactcaacaactcatgtaatgagtgtaatggcttcgtggcttcctgctgacctgaccatgtcctcagaattatgctttgtcagaggtggcattgaagggaacaaggagacagattggtttggacaagtatatttctgggccaaactttctggaaggcagagacatggagcttccaatgaaccactctttaaaatccaaaagctgctgcttgagcatccccagttacagcaataacagtaactgccctcatcttcatcatcatgcagtctgtctcacttattaaatactaactataggcaaggcattattccaggcagttaacatgcattaccttaattaattcccatcacaattccatgaagtaactactattattatttccatttgacaaacaagggactagaagtggaggctcccagcaacttgtcaagctctctcacaggcatgagtgagaagacagaatttgaactcatgtctctcagattccagagcatgttctcctgataaccattcatgtcttctccatagttggagcagactagcatatcttctgcagagtttttctttttacattcatatttgctctgccttaagagatagagaaagaaagtctttctttttatttatttatttatt

SEQ ID NO: 30486 - DNA, 1094 bp, Homo sapiens
gtaaggaagtctaaaaatactaatttgggaccctcacgttacagacccaggaccacaactttttcttctacctttctccaagatggcttttaagttcaaggttacctcatgattcaatgtagctgctgagccccagccatcatatctgcaattcaggcttgcaaaagaagagttcagggagttccaaaagctccaaaaggccaagtttcaaattactttttaataaatgctttaaataagatttttaatgtattaagcagcctcccatacaatacttgtgcttaatcacttggccttacctcactacaaaggaacctgggaaatgtgcatattaaaaagtcagagttctgctcaccagaagaggagaatagttattgtgaaactactgatagtttctaccacatccagcatgccccagtttgcttcaaactatatgagtcctctggcttcctctgataacccctttggaactccttgagtgatggggctgtattcataactcttctcctagtcttccctccccacagcatgcccaatgcggtcctgaacacagattgtcatagccaccttctaaccacctgtccgtgtgcctgcctgaccccagacaatggaagtaggaacattcaataacacctgttgggttttatgaataataatcataacagcagcaataccaacactcagaggtactaacatttattaagcctcaatgacatgccccacactgccaagtgcagtacaggcatcattgtggtgcagttgctatgaaatatggacctggcttcacgaatgtggcagagcccaaggacgcttccccagaatcagctctcctgcttcaaatgggttttgcattaactcattcccaaagcagaattcagctttttccttctaaggagacaaaagaaatttaatattttctatattgaattaattgtgattccattttccccttcagtttcataagtgaagctaatttccatgggaggggctgcgtgaatgggcaaaccagctggcagctaggtgcatttactgggcacccatgaatttgatcacttgccccaggagcaaagcaaatgcggttggtagagcaacat

SEQ ID NO: 30487 - DNA, 1141 bp, Homo sapiens
ttatgtcccatgataggtctctatgtctaatgcctcccttgtcctgtttttagggctgtatttgcagacattaagctgtttcaagattgtttttaggccagttgtttagccaaagtgagctaatttgatgaatcattacaggaaaattacctggcctcacggtacatagtaggtgtttaataaatgttgagccccacagttgctaaccacccctaaattagccagcctaaattagctgagcttatgctgttaaaatgcagcctgctaattcttagagcaaatatttttcttggtcaggatttttgtctagttggaaaagaaagaacagtatcagcaaaatggctttaaacatgtcttaatgtcatgagtttgtcatccaaggctctacccagcatgggtgcagggctaccaggctttgtttgtattgctttgagttgtttcttcagaggccgtatctgccttctgtcaaagtttaaagtttcaaagttccaccatccatgtgggcacacagcgatgctaatgataaggttggttggagtagcctggtggtgatgtcatggggattaaggcatgttatctgtaataagaatacacccccactgctgagtgcagctgcacacagcaccagtcttgggctgggcatgattctcagagctgattttagagtcaaatgaaagcaggcaattatcatgttctttaactgtaatcagccgaacaggatacaggtagccgcaaaatggagttatttaaaacagtaacaaagtcacttcaaaaagggtaataatctggaagtctcctgctgcaatatctagttaaagctgtccaagtgtggagaagacagggaaggcttattttgtaacctcgtcaatggcaatagtatcaggaaagcctccttttgaaatagaggagtggggaacaaggggagggagagtgttaggacaaatatctaattcacatggggcttaaaacctagatgatgggttgataggtacaggaaaccaccatggcacatgtattcctatggaacaaacctgcttgttctgcgcatgtatactataacttaaagtaatatttaaaaataaataaataaataaaaggaaccttggcctgggggctgccccagagcaatttagtttagccc

SEQ ID NO: 30488 - DNA, 1035 bp, Homo sapiens
tgattgggtttttctattcctttttttttttccatactctatgtaaagtacacactattcctttagtagttgccctttgcctttttacgatgtttcaattggtgaggatctcctctctcctccagaacaaacaaaaacttacattttgttaagttggattacctcacatctctttcatataatattttctaaccttctagttctactgtgtttttaacccatgaaataactattactattgctgctgcctatagtaaataacatgtttacctgcattttttatatgtttatagttactctttaatttaaaaaaagcattgctttttgttttacagtacttcagaagtttttccaagaatgatctgagagtgataaattctcattctttgtctaaaatcccaaatttagtatgtactcaacagtgatggtttatctccataacctcaaaattaaaatattttgaagatattccattgtcttctcacttttagccttgtacctttgtaggtagtctgacctctcccccgtttcggatggcttttacagtgttcagtctctctcgaatgttctgaggtttcactgaagtgattccagatataaattcatttctatttttatgtgctttattctggataatttctttaaactcatattccagttcactaatttccttttgatcctgtctggtctgctgcttaaacaatctattgagcttttcatttctagacatttcatttgcttctcttaaaaatatatgttttcttttatacagtcttattcttcggttctctgtaccaaattataaaaaccttttaagattgttctaatagtttaaattttaggagtatcaatcctcttttttcttctatctgtgtttttccatgttagattattggctcatgtattttgtcatttttaactgtgaattgatctctactattaaatattatttctctgggaacagaatagaatttgagtttctcttcacaatatatttgcattttggcttctatcatgtatcctattagtaacgac

SEQ ID NO: 30489 - DNA, 1029 bp, Homo sapiens
ttgctagaactaagtaaatcatgtcaggtggttctacccatatagcagaagtcttttcagtcttcagaagtctttgaagaacaaagttgagctgcgtcctactccatttctgtgtcctgtttccagaatcattagatggtttcgtatggaaaatacatcaagaggtgactcagttgctctaaatagaaaccttcaaattggcaactccaaaagtggacatttgtatgtctatagcatagacagatctgttataacatacagggacagtatgtagtgtttttaaagggattttcaaaaatatagggtttattaagaatgcaggagcctaaaagaaaataagaatttacataagaatgtcattagggttggtggtttggctgctctaaccaataatttttgtcatccaataccccactgattattaaattaatctgttattcaaacagcaatcgaaaacaactcagcccatattttctgggcatttgtgactgtcaacaagttggacaaaattggaatctaaaaaggatgtaatgttttactattttccagtatgtttctttccttcttgattacccagccccctttgccaagaaagagattcacaaagacttgcttagaatcaattgcaaaataaatagttagaaccagttaagaaaaataattaatcaaaaataaaactttaaacacatgtaacattttcatttcaacatttcagtgttggcaaaatattaatttctaaggtaaattaggtttttgtttttgttttttagtgtgtgcttttttagttagtatcactcatcacttctcataaaaattatattgccgtcggtttcactttgagatctgtacacaagctttgctcatcttcctggaagccccaaaagctgtggctacagttttcttctctcatcgcttctccccacgcacctttcatttatctgctaagctgaaagaaagtaattggtctcgaagctgtgttgacatgtttcgtgggctacagttcagaaaaccatagttcagggattccat

SEQ ID NO: 30490 - DNA, 1085 bp, Homo sapiens
gcttgtaatagagtgatatttaaatgatattttagaaaaagctgtttcctcaaacttctgcagatttccttctagccaaataaaatcagattacaacactgcttactactgtcagtattcagactcataacatttaatgttccagtatattgcgtgttcattatatccatatagcaaatatcctcattgcctgatgaataatacaagtaaaatttatgtaattatgttctttgcatgtaaagaatgtatcatttgagaaaagtttatagtaagaccaccgtaaaatgctaaagtcacttttagtattcgtttttaaactcagtgtactttggtaccttctccttcgcatttttttttctgtttatagttttaccttggaaagataaaaaacaaaaataaaatagaagtaaatccttgaactggattagaaaaaaatactcagtcaagatctaaagtttatgctttcgaggataatgttgctagcttaaaatcttataacaatattaattacagttttcttgcattaccaccttagtatgcttttggtggatagtttagtaatttcttttttcttttgtagaacataaatcaaaaatttctgtgaaggtaagccgtataactttgacctgacctgttttcaaatgtaaaatgcagttttatttatagtggttagaaaataattcctgggaaatgtcaagtgttctaaggggtttggaattatagtgaggagttattattttcttgctttcagattggtcctttcacagaaattgaatcattttaggtttagcccaatagaacctctttctctagataagtgctattcagtaaagcatctgtgttaatggaagtgttcattaataaaatcagtattattgaatatggaagccactagtcatgtatagttattgaacccttaaaatgtaactagtatgactgagcaactgaatttctaatttcctttaatttttaatggaatttaatggataatggattgtactggacaatgcactccagagatctttaaaaatagatattcagactttaaacagaaatgttttttcttttcatactcaaattccatt

SEQ ID NO: 30491 - DNA, 1046 bp, Homo sapiens
ctaggactacaggcacgtgccaccacacctacctaatttttgtaatttttgtagagacgaggttttgtcatgttgcccaggctgatctcgaactcctgagcttaagcaatctgcccacgtcagccttccaaagttctgggactacaggtgtgagccaccactccctgcttcctttttttctttttgacaggaagggaaacttaatggctacctcaaggattgttttgagagttaatttaagtaacgtgtaagacatgtaagaactgtatagcactatgccaagtattataacagatgtaatttagtgttaattttaaaacatgtattttacctcctaggtcaatatagtctatatttaaacagtatttctaatcagccaaaggatgagaacattatgggattattcaaaaaaactgaaatggtttcatctgtcccagctgaaaataaatctgtcttaaatgaacatcaggagacatctaaacagtgtgagcaaaaaattgccatgtatgtaactcctatctgttgttattgtgtggtcatcttcagaatatggttttgcttttcctttacttgcatgtgaaatagttactctgaatacttagagctatttaaaagcttattacttaatatttatggagtcagttgtgtagaaatgtatgatacagtttctgttatcttttgtgttttaccttagagagaatgaatggaaaccagctgatatattcagtactctgggggaaagggaatgtgatagaagttcgttggaagcaaaaaaagcccagtggaggaaagagctaggtaggtaacttttatacctttattatagttttattggcttaaagaatatgtattgaagccgggcacggtggctcacacctgtaataccagcactttgggaagccgaggtgggtggatcaggagggcaagagatcaagaccatcctggccaacatggtgaaatcccatctctactaaaaatataaaaattagctgggcgtggtggtgcacgcctgtaatcccagctactcgggaggctgaggcaggaga

SEQ ID NO: 30492 - DNA, 1719 bp, Homo sapiens
tggaaggccaagatgggaggattgcttgaggccaggggttcaacatcagcctgctggagcaacagagtgagaccctatctctacaaaaaaacagagagaagcagcagaaataaggagtgaattgatgctggaagtcaagtgtgttagtctgttttgtgttgctataaaggaatacctgagactgaataattgataaaagaggtttatttggcccacagttttgcagactgtacaagcatggtaccagcatctcctcggcttctggtgaggcctcaggaagcttttactcacggtggaaggcaaagggggagcaggcattttacatggcaagagagatgccaggctcttttacacaaccagctctcatgtgaactgacagagggagaactcaagcatcatcccaaggggatggcaccaagccattcatgagggattcatctcctgtgacccaaacacctccccttaggccccacctccaacactggggaatcacatttcaacatgagatttgaaggggacaaatatccaaactgtatcatcaaggtaaaagaagaatgaagagattaaacttatgttagcagtatcagaaggtttggcggtcttgatgtgtgtttatatcacaatttcatctttaaatattttctttcagcacattccacatcaaaatgcaataccaaatgtctgaaataatatggaactacttggaaatgaccagaatattttgtgctttaatcatttttgttgttgttgttgttttgagacggagtttcattcttgttgcccaagctggagtgcaatggcaccatctcagctcactgcaacctctgcttgctgggttcaagtgattctcctgcctcagcctcctgagtagctgggattacaggcacctgccaccatgcccaacttactttttgtatctttagtagagacagggtttcaccatgttggccaggctggtctcaaactcctaacctcaggtgatccgcctgccttggcctcccgaagtgctgtgattacagttgtgagccaccacacctggccttatgctttaattattttaaaaatcagtttactgtttttttaacttgtctcagtaaagtgcctctatttaagtcatgcttccagtaacattcttggaatttaaatttatacaacattgaattttgtatttaaagaactactgttgattggggggttagttttgactatatctctcagacacaggcttttatgttttttacttgtcagcaattaagaaataatagctaacattcattgaatatttactttgtgccaagccctatattgagataggcactattattatccccattttatagaagaaaccaaggcttagaaagcttaccagcagttggccaactgcggtgggctcatgcctgtaatcctaccacgttgggaggccgaggcaggtggatcacaaggtcaggaaatagagaccatcctagccaacatggtgaaaccacatctccactaaaatacaaaaattagccgggcgtggtggtgctgcctgtagccccagctactcaggaggctgaggcaggggaatcgcttgaacctgggaggcggagattgcagtgagctgagatagcgccattgcactccaggctgctgacagaatgagactctatattaaaaaaaaaaaaagcttaccagcagtttgctaacagtcacgtagctgggaagttgttgaacttgaat

SEQ ID NO: 30493 - DNA, 1049 bp, Homo sapiens
tttcagtgtacaagtcttactcctccttggttaagtttttctttttaattttttaaattttttttgtttttttatatatttttctttttattgttttggttaagtttattcctaagtattttttctttttgatgccattgtacatgggatttttaaaaaaaattttatgccattgtacatggaatttttttttttattattatactttaagttctggggtaaatgtgcacaacatgcaggtttgttacatatgtatacatgtgtcatgttggtgtgctgcacccattaactcgtcatttacattagatatacctcctaatgctatccctcctccctccccccaccccacgacaagccccgatgtgtgatgttccccaccctgtgtccaagtgttctcattgtttagttcccacctataagtgagaacatgcaatgtttggttttctctccttgcaatagtttgcttagaatgatggtttccagcttcatccatgtccctacaaaggacatgaactcatcttttttatggctgcagagtattgcatggtgtatatgtgcatagtattccatggtgtatgtgtattaatccagtctatcattgatggacatttgggttggttccaagtctttgctattgtgaatagtgccgcagtaaacatacgtatgcatgtgtcttcatagcagcatgatttataatcctttgggtatatacccagtaatgggatggctgggtcaaatagtatttctagttctagatccttgaggaattgccacactgtcttctacaatggctgaactagcatgtagtcccactaacagtgtaaaagtgttcctatttctccacatcctctctagcacctgttgttccctgattttttaatgatcactattctaactgctgtgagatggtatctcattgtggttttgatttgcatttctctgatggccagtgatgatgagcatttttttcatgtgtctgttggctgcataaatgtcttcttttgagaagtgtctgttcatatcctttgcccactttttgatggagttgt

SEQ ID NO: 30494 - DNA, 1043 bp, Homo sapiens
cctttatcattttttattgcatctatttgattcttctctcttttcttctttattagtcttgctagtggtctatcaattttgttgatcttttcaaaaaaccagctcctggattcattgattttttttgaagggttttttgtgtctctatctccttcagttctgctttgatcttagttatttcttgccttctgctagcttttgaatgtgtttgctcttgcttctctagttcttttaattgtgatattagggtgtcaattttagatctttcctgctttctcttgtggacattaagtgctataaatttccctctacacactgctttgaatgtgtcccagagattctggtatgttgtgtctttgttctcatggtttcaaagaacatgttaatttctgccttcatttcgttatgtacccagtagtcattcaggagcaggttgatcagtttccatgtagttgagtggttttgagtgaatttcttaatcctgagttctagtttgattgcactgtagtctgagagatagtttgttaaaatttctgttcttttacatttgctgaggagtgctttacttccagcttcgtggtcaattttggaataagtgtgatgtggtactgagaagaatgtttattctgttgatttggggtggagagttctgtagatgtctgttaggtctgcttggtgcagagctgagttcaattcctcgatatccttgttaactttctgtctcgttgatctgtctaatgttgacagtggggtgttaaagtctcccattattattgtgtgggagtctaagtctctttgtaggtctctaaggacttgctttatgaatctgggtgctcctgtattggttgcatatatatttaggatagttagctcttcttgttgaattgatccctttaccagtatgtaatggccttctttgtctcttttgatctttgttggtttaaagtctgttttatcagagactaggattgcaacccctgcttttttttgttttccatttgcttggtagatcttcctccatccctttattttgagcctgtgtg

SEQ ID NO: 30495 - DNA, 1026 bp, Homo sapiens
acactgcaagaagaaaaacggtcttgggcaacagatgaaataaactaacactgtgatagctgataaacttaaaaaaaattgcaaaacactttcataatgttttaaggaagtttacaaatttgtgttgggccacattcaaagctgtcttgggccacaggttggacaatgctcgtttttcttttcccattttgacctctaaaacatttcttgaggtataaaaattgttaaatcttttacctaaagataatgttccttttgaagtgattgttttagacttaaataagttggatggtttttaatctggttagaatgtaggaggacctgagatagaaggatctttactttttgtataaatatttcttctgatcaaaacagtgagttgtaaactatgagctttgtgatcttttctggtaaaaacaagggaagaaagtaacattgtgaggtatatcgtcattgtaggattctgtcaaacagtttttcttaattatgtcttgtagttatttcatgtaatgaaatgttttgttgtttgcctgttgcatttcagaagaatttgagtagaatatatttttttccttttttaaaagagtatcctaaactcatcaattaaagtggcagcaaacttttatgctactgttttcattttttactttttccttaagattcaaagactcgttctggacacagtatatttttgttattgaaacatcataggctgtgatagagctgtagtagcagaaacctagaagacagaggttctcctagagagagacatgattcaatagggaaagtctcttgctctcacacatctttctatattctccttgttcttggtccaaagacaatattccaaatgttgtattccaaagccaaatgtaaaacaatattcatctgttttaaattaataactctttcagcctctaaaagagacttagaattttgaaaaacaatatttttgagacagggtctcactctgttgcccatgctggagtgcagtggcatgatttcagctcactacaacctccacct

SEQ ID NO: 30496 - DNA, 1034 bp, Homo sapiens
taccacattttgtttatctatttgttcatcaatggacactcagattgtaaatagtgctacagttagcacaagagtgcaggtttccttttgatatacagatttcatgttctttcgataaatatccagtactgggaatgctggatcatatggtagttccatttttagttttttgagacgtctccatactgttttccatagtgactgtatttatttacattcccactaacaatgtataaggattcccttttctccgcttccttggcagtatctgttagtttttgtcttttggtatgtttgtttgtttgcttgtttttgagacagggtcttgctctgctgcgcagtctggtatgcagtggcataatcatggctcactgtagcctcatacccctgggctcaagcaatcctgctgcccgagcctccccagtagctgatattacaagcatgcgccaccatgtcaggctaatgttaatttttttcttttatagagacacagtctcactatgttgaccagactggtttcgagctccttgcctcaaacagtcctccaacctcagcctcccagagtgctgggattacaggcatgagccaccgggcccagcatttttgtctttttagtaatagccattctaactgaggcgatatgatatctcattatgggtttgatttgcatttctgtgattagtaatgttgagcattttttcatgtacctgtttgccatttatatgtcttctttagaaaaatgtttattaatgttctttgcccactttttaatggaattatttggatttttggtgtgtgtgtgtgtttagtttgagtttcttaggcattctggatagtagccctttgttggatgaatagtttgcagatattcaaactactgaatatgcaagctattgaatattcaaactactgaatattcaaactgggggacagactgtctctttcactctggttattgtttcctttcccgtgcagaagatttttagttcaatgtagccctattcgtatgtttttggtccctgtgtttttgaggt

SEQ ID NO: 30497 - DNA, 1050 bp, Homo sapiens
aatttcagacctggttattggtatcttcagggattcgtcttcttcttggtttagacttgggagggtgtatgtgtccaggaatttatccatttcttctagattttctagtttatttgtgtagaggtgtttatagtattctttgatggtagtttgtatttctgtgggaacagcggtgatatcccctttatcattttttttttttttttttgagacagagtgttgctctgtcacccaggctggagtgcagtggcatgatctcggctcactgcaagctctgcctcccaggttcacgccattctcctgcctcagcctcctgagtagctgggactacaggcgcccaccatcacacccagctaattttttgtattttttagtagagacggggtttcaccgtgttagccaggatggtctcaatctcccaacctcgtgatccacccacctcggcctcccaaagtactgggattacaggtgtgaggcacggcacccggccccctttatcattttttattgcgtctgtttgattcttctctcttttcttcttattagtctggctagtggtctgtctattttgttgatcttttcaaaaagccagctcctggattcattgattttttttgaagggtttcgtgtctgtatctcctacagttctgctctaatcttagttatttcttgtcttctggtagcttttgaatttgtttgctcttgtttctctagttcttttagttgtgatgttagggtgtcaattttagatctttcctgctttctcctgtgggcatttagtgctataaatttccctgtaaacactgctttaaatgtgtcccatagattttggtacgttgtctctttgttctcattggtttcaaataacatctttatttctgtcttaatttcgttatttacccagtagtcattcaggagcaggttggtcattttccacgtagttgagcggttttgagtgagtttcttaatcctgagttctaatttgattgcactgtggtctgagagactgtgtttttatatctagttttttttgcatttgctgaggagtgt

SEQ ID NO: 30498 - DNA, 1049 bp, Homo sapiens
ggtaccaattacctgaatgtctggtagaatgctgctgttaatccatctggtcctggactttttttgttggtaatttttaaattaccatttcaatctcactgcttgctattggtctgttcagggtatctaattctgatttaagctaggagggttgtatttttccgggtctttatccatttcttctaggttttctagtttatgtgtgtaaaggtgttcatagtagccttgaatgatcttttgtatttcagtggtgtcagttgtaatatctcctgttttgtttcttagtgaggtgtttggattttctctgttcttttcttggttaatcttgctaatctatccattttatttatcttttcaaagaaccagctttttgtttcatttgtcgtttgtttcaatttcatttagttctgctctgatgttggttgtttcctttcttctgctaggtttggtttgttcttgtttctccatttccttgaggtgtgaccttagattgtctgtctgtgctctttcagacttttttgatgtaggtgttttagggctatgaactttcctcttagcactgtcttaactgtatcccaaaggttttgataggttgtgtcattactgtcgttcagttcaaagaatttttaaattttcatcttgatttcatttttggcccagtgctcattcaggagcaatttatttaatttccatgtatttgtgtggttttgaaggttccttttggagttgatttccacttttattccactgtggtctgagagagtgcttgatataatttcagttttcttaaatttattgaggcttgttttatggcctgtcatatagtctattttggagaaagttccacgtgcttttgaatagaatgtgtattctgtggttgttagactaaatgttctgtatatatctgttaggtccatttgttccagggtatagtttaaatccattgtttctttgttgactttctgtcttgatgacctgtctagtcagtggagtattgaagtcctccactattatggtgttgctatctcatttcttaggtctattagtaa

SEQ ID NO: 30499 - DNA, 1075 bp, Homo sapiens
atgattggcctatcattatccacttaggaacatacatttgcagaataattggctgggattgatgatacaatttgtgactgttagagatctctgtgttaaatggcctttttaaaaagtagatacctagttggctaggagaaccctaagtggtgcagacaagataggtatgtatggtggtggtaccatatttgagctaacctaacaaaaatactcacttgctaaagttttaaagtgtagagcactttaaacattttcttgccttttgctgcagttttcccacttggcaaccttcactccaaaattggctggtaaagggacacatggtctgggttccagtttcattgagttgataggctgagccagttacccctaggtaacatgaggaaatcagtaaagtatcatttgaaccgcaagaaatggtcataaatcttgtgtttaccttttaaaatctatttttaaatgtaataaaagtttttaaaactttgaaaacttttagtataaatttgaaatgggtaaaaagagttatatttgtgattgaatacagctgtagaaaaagatgttaaaatgtaagctccaaaagggcaggaactttgccttgttgactgttgtacccttagtgtctaaacaagtgcctgatacataggagaagcttagaaaatgtttactgagaggaaatagtcaagtctttgtatgtttaatagatgaatttagtaacacatcaatattgacaggaaatcatgactctcaagacaaatgagctattccagacaatgcagcgagcacaggaactggcacagagactaaaacaagaacaaagaatccgagaattggcgcaaaagggacatgacacttctagactgattaaaaatcttggtggtaagggcctaaccagaactttatttataatatttttagaagatgattttaaataattcctttttatctttgtttggagacaaggactcattctgttgcacaggctagagtgcagtggtgccatcacagctcactgcaacctcatattttttgtagacatggaatctcgctttgttgcccaggctggtcttgctgcctt

SEQ ID NO: 30500 - DNA, 1072 bp, Homo sapiens
ttctggagcatttcgagtttgtgaatcacaattgtggtatgacaaaatttcaaccagatgtttcttctgatagacattcagaagcgtcaacagacttagagctttagcattcaatctgtgaaattaagcagttcagtttctggatctgtacttctaaaatttagtatggaaatttctgctttagattaaaattcaatttctccactgaggcaactaatgacaactgcactgctttagctctctgcctgatgtagggggtgtgcttctttggaaagaaagaaagaagggataagtccaggggtttcttggtcgcgaggcctcagggccagctatacagcttaggctaaaatctcagctgattattctacttactaaataataaattatgattacctttattaattttgaactttaatgaaggacttaaagggacaaaaacagtataaatccttccttcaaaaaacacaatatatggaccaggcctggtggctcacacctgtaatcccaaaactttgggaggccaaagcagttggatcacctgagatcaggagttcgagaccagcctggccaacatggtgaaaccccatctctactcaaaattcacaattagccggatgaggtggctcatgcctgtaatccgaactacttgggaggctgaggcagaagaatcacttgaacccaggaggcagaggttgcagtgagctgagactgctctattacactccagtctgggcaacaagaacgaaactctgtcttaaaaaataaaattaaatacactattatggctctaagctatttcttttttttttttgagacagagtctcactctgtcgccgattctcctgcctcagcttcccgagtagctgggactacaggtgtatgccaccacacccagctaatttttgtatttttagtacagatggggtttcaccatgttggacaggatactctcaatctcctgaccttgtgatccacccgcctcagcctcccaatgtgctgggattacaggcgtaagccaccgtgcccggccagctctaagctgtttctatattgcaagggacaaggcaacaag

SEQ ID NO: 30501 - DNA, 1938 bp, Homo sapiens
agagtctcactgtcacgtaggttggattgcagtggcacagccatagctctgaaacctcaaactcctgggcacacgccaccaagctcagctaattttattttattttatttttattttttggagatggagtttcgctcttgtcgcctaggctagagtgcagtggcatgatcttggctcactgcaacctccacctcccgggttcaagtgattctgcttcctcagcctcccaagtagcccaactaatctaaaaattttttgtagaagactgggcgtggtggctcatgcctgtaatctcagcactttgggaggacgaggcaggtgaatcacgaggtcaggagtttgagaccgacctggccaacatagtgaaaccccgtctctcctaaaaatacaaaaaattagccgggcgtggtggtggacgtctgtaatcccagctactcgggaagctgaggcaggagaatcacttgaacccgggaggcgggggttgcagtgagccgaaattgtaccgttgcactccagcccgggcaaccgtgcgagactccgtctcaaaaaaaaaaaaaaaaaaaaagaaaattttttttttgtaaagacaggttttcactatgttggccaggctagtcttgaactcctggccttagtgctgggattacagatgtgagccactgtaccaggccctaaaagttttttgtttgattagtttttaattttttttagatcatttagatctaatcaaaagtggcctgccagttgctacctaaaaaagagccttggcctggcacagtggctcatgcttgtaaacacttgagggtgggggttcaagaccaccctgggccaaatagcaagacctcatctctacaaaaaataaaattagctgggcgtggtggcatgcacctgtagtcccagctattcaggaggctagggcaggaggatcgattgagtccaggagtctgtggctgcagtgagctatgatcacaccactgcactccagcctgggtaacagaacgaggctttggctcttaaaaaaaaaaaaaaaaagagcctgggagtgatggaagactatcctgaattacagttacccttcttttagttttgatttatagtaactacgtattaaattagggagaatttgcaagtccaaaatccagctgatcaaacaagcatcttttaagaatactgcctggaacctaggtggggaaaaagcatgtttggaattaccttgcccaaaccagacagttctgcaaaagatcatccattgagccagaaaatcttaagcttatagtagatgccttgtccatatttatatgttgttttgaaaatcaaaatcaaaataaaccttgttaattactaagaacagataatgatctttagaaaattaattgattttatatgtagatatgtatcttagtgattcatctatgatagaacagtgaagacaaaccccagtcccaaatgggatcttctgtttttgcataatatgaattaatcatgagatgtgcctttcctcccaacattttgatgtctctgattgggattcctcttagagttgatggtatattaacaattgctatcagccaggtagcagtagtaatgtatttcacattgcctgcaaatgtacatacttggttgtttctcctagtagcatactggccaagtgtagtctctcagtgttcaactaacagatcaattttgccaccatttgagaaaggaatatcagtcctggttgttgtccgaaaaccttcttttgacacctggtgagatgtcaaatgacatcatcaaaatttgctgaatgagtatcagtttcttggaagaaaatattagggacaaaaatggagtacttctaagaaatacttacctcctcatggcacagagaatgataatgtataggaaaacatgcatattgatgactctcgagttgaaaagtggttcatgggcccggtgcgg

SEQ ID NO: 30502 - DNA, 1023 bp, Homo sapiens
ttatatagatcctttgcccgtttttaaattggttgtctttttattagttgtaaaagttctctttctagatacaagttacttatcagatacataattggcaaatattttctcccattctgagttgttttttttttttttcactttcttgatggtgcgctttcatgcatagaagttttaaattttgatgatgtccattatatattttctcttgttccttgtgcttttagtgtcatatgcaagaaagtgttaccaaatccaaggtcattctgtgttttctaagagtttagtaaatggaattttttgactatatagtattttgtactatatcacataatttttagtgttttcctatataaaatatatcagaaccatttttactagattatgtttaatttacataacactggttaaatgtctgtgtatagttatttggcctttttggtctttctttttctagcttagctcttgtcatgcagtgctttcaactcaacttgctgatgccatgatgttccccattacccagtttaaagaaagagatctgaaaggtattgaagtcaagcttatgtttactttcattggctgtgagatcaacacttgtaaaatgcatattactctgtacttacaccatttctggatgacagcctatgccactcttactttgctcagttaccaaacatttataggagctcctgctagatgtcaaactagatattgagaaataccgatatggataagatatcccctcttttgagaaattctagagaaggaagtgggcacatgcataattacaacacttatgtctcttataattagggaatgagcaaggtgctggcggggctgttaggagggggtcagcaaggctttacccaaggatgtgacatgagcattgaacagtgaagaggaatttgccaggagaacagtcattgttctgttagagggactagagtgcacaagatatggcttttagaaatacacagcctatttgacagtagcaagaaactcagtgtggctgcaatgctgtat

SEQ ID NO: 30503 - DNA, 1057 bp, Homo sapiens
atggagaggaaggagtacttttgggagatatttttttaagtagaattgacaagacttgtggtaataggaggaataaaaaatgagtcctagatttcttggatgtctggatggatcctgtagtaattaagaaaggtaagaaacaaagcagaagaacaggttttgtgtacaaaactatcttcagttttgtacatttttagcacataaacacacataaagaacccagctggagatgtgtttactctgtcacttgggaaggtgagagggaggagataaaatttgtgagtcattgagtcattggtgtattggaatattagaatattcttcgtacttgaggattctaaggaaagcaggaaggcagaagaacctaatgcctattacataataggtattcaataaatatttgttgtctgaataaaagaactctagggagcacacgtatttcaagtatgggtgaaggaagacaagcaagtgcaagagaggaagactgatagggagagaaccaggaggggagaatggtatgctgtgaactgatcaaagtcaaagactaatgactaagctaataacaaacaattgtctgccattcctccttgtcgtaagctttctctgccatgcttagtttagttattgtaccattcttagttacgtacagaattctgttttcaatatgcagttttttttttttttgagacagtctctctctgtcacccaggctggagtacagtggtgtgatcttggctcactgcaacctccccctcccagggtgaagctattctcatgcctcggcctccccagtagctggaattataggtgtgtaccactgcacctggctaatttttttttccatttttaatagagtcggtttcaccatgttggccaggctgttcttaaactcctgacctcaagtgatcgtcccgcctcggcctcccaaagtgctgggattacaggcatgagccaccacgcctgggctcaatgtgcattttgtaaattatgtggttggaagttaaacaggaaaatttgcttaaccagtatgttgaaggatttctaaaagatcagaaaa

SEQ ID NO: 30504 - DNA, 1047 bp, Homo sapiens
ttcagttcttattgcaatccttgttgtagatatggttccagagccatgtcaagttagaatccaaagactggcatcaatcatggatctggcctgtgagatctgaagttcttaaatctgcatgtggccaggcggggtggctcatgcctgtaatcccagcactctgggaggccgaggcaggtggatcatttgaagccaggagttcgagaccagcctggccaacatggtgaaaccccgtctctattaaaaatacaaaaattagctgggcgtggtgactgcatgcctgtaatctcagctactcgtgagactgaggcaggagaatcgcttgaacccaggaggcagaggttgcagtgagctgtgattgcaccactgcactccagcctggttgacacagactctgtctcaaaaaaaaaaaaaaaaaatctgtgtgttttagccccctcagggacagggtagaaactgaagattaccacccaaagggaaataacatgaaataaattattaatttgtcttacgtgctactttgaaagaatttgctttgaagaaggtcattttgataccctctacagacatggctcttagctttttctcatccttgtttttattgccatatgatattagcttttcattccggtgtccatggtgttgtttccatgatttaggtggattgggatgaaagtattacctatctatataataagtagttacctaacagattttgtctccttggaaaaggtaataaatacaaattaagtgtagttagtaacatttttaaagataggaatagtatttttctggtttaagtcaagcttttaaccagaagagaagggtgttctaattctaaaacaaccaaataagaatacaattagtacttttgtaaaaagtcattctatgagaaggatacttacttaagataaaatgtatttctgaccagatcccctgtttttggagcacagctttcaactttgaacagatccgaacttgatcaacataatcaagcatcactcgaacaacctttccagagagatgttgcagccatgacaaagttat

SEQ ID NO: 30505 - DNA, 1105 bp, Homo sapiens
agtctgtctctgtcgcccagactggagtgcagtggtgcgatctcagctcactgcagagtagctgggactacaggtgcccaccatcacggccggctaattttttgtatttttagtagagatggggttttactgtgttagccaggatgatctcgatctcctgacctcgtgatctgctcgcctcggcctcccaaagtgcggggattacaggcatgagccaccacacccggccaccttccactctaattatttaacgaacccaggttgaggagaataaattccctcggacactctgtcctgtttacaatttggtcaattacattatcttaaacatttaaacctgcattcatagatttagtattgtgttagttttctatagctgctgtaagaagtaaccacacacttagtggcttaaaacaacaataataaaacaaatttattatcttacagtttagtagttcagaaatccaaaacagtcctcaccggactgaaatcaagatgtcagcagggctctgttccttctggaggctcttggggagactctatctctgccttttctagcttctagaagccacccacatttcttggctggtggactctctgcctccatcttcaaagccagcattgttgggcttagtccttttaacactgccatctcccaagttgtctctcctggctccccctctttcacacttaaagatcctgtgttacactgggaccacctgggtaatccagagtacaccccctatctaaaagtcagctgattagcagccataattccatctgtagccttacttctcctttgccatgtaaggttccagaaattaggacatctttggatgggaccattactccacatgtcacaagtatgttctagttttctaattccttcaagtacctgactaaatcagcaagcctgcctaagtatcatacacttcctgcaaatctaatcaagtaaatgcataaccacagtcaatttcagtttctctgaaacatttcaatactctccttagcccaactctcttatacctttcaacctaaaattgtaagttcaaagtcagttactcaattatgcaatttaaggttttaatcataaggttaatataac

SEQ ID NO: 30506 - DNA, 1029 bp, Homo sapiens
agctgttgaatacaacacttaatactatattgccgatgagaaaaccattacctctcatccttaggtgcatgttgtgctgttcctggcttataaatatcctgcaaactctgttgaatgatgagctgggtgtcaaagtcttcatctatgtcttcatcgctggtgtaattatccatgtgaaacgtggacaggtttactttaaagtcagagtgaattaaaagtatttttccagttgtgaagagatcaactgcttaaaattacaaatgaaattcagaaatctagaaaattggtaggattaacaatgaaaaatatacaaaatttaggaaacaaaatattcactaaaaaatttctataaacttaaaaaagttttgtggactgccacagattcaacaaaaattagaagtttccatgagtagccattgacttaaagcttattcaggaaaaaccacctttcaaataagacttcggttagtgccactctaacactgacaacactctgatctgttcaacttggctgtgagtctttcacagtgattgtagcactcatccaaaataatatctttcctacacacagtgtgatgctgaaaataatattttacttaatatacattaaaaataaacatgttataggaacaaatgtattctcataattacaacatggatacagcagtagtaaaaacaaatgtatcttactaggcaatatctaaatggttttaaaagaaaaatgtcagttttagcatagaatacatttggtcacatttcaaagactttttaccttttgttttatcctctaggacagcagtgaagttttcactgttaaggactaacacatgtaagcctcagaattttcatttatatttaggctctcctctcccctgtagtgaccattccattaatagctttactataaatacttcatcataagacagtttggcacattctccttgttttttacatgtggtttagctctttttggaaacatgatctcttttcttcagtgctacattcatcaaatttaaaggattaaatatt

SEQ ID NO: 30507 - DNA, 1026 bp, Homo sapiens
gtggagtctttgagccgagagtctaggaaaaccaaaccttaggacagaattccagagaggagagagcagcacagaaagagagagagctgcagaagtttccttagaatattcagcagagtaattattagcacatgaatctgagcaaactacccaaaaccaaggggaaaatcaacagataaggttagaggaaacattgtccagggttggttgggaacaatgcctggttctatcaatcagccagattgaaaaaaactcataacctgtgggacagtgggtagagtactcaaaaaggtcttgcctcactgatgaagaataattaattctaaattgagtactactctggacctacctaaaaaattataaaaaacctgaaaagatcaaattatttcccagtcatttaactacatcctagaacaaaccgcacaaggatttaaagtaaaacgaaaatacacaatatcaaacaaggtaaaattctggcatctaatacaaaattattgggcatgcaaagaggaaggaatacatgaccatcatgagagtaattgatcaattgaaaccaacacagaactgacagagatgttattttaaataagtaaagacatgtaagatatttttaaaagacttgagcatctagaaataaaaacaatgtctgagatgaaaagtacactagatggaattaacagtagattaaactacacagaagaaaagattaataaacttaaactcatagaaataggaactattcaaaatgaaacagaaaagagtcaaaaaggaaaaatgaagagcattagtgagctgtgaaatagcctcaagtagcctaatacatgggtaactgaagtccctaaaagaagggaagagggacagaaaaaaatatgttaagaaataatgaccaatgacccacattttcccaaatttggttaaaccacacgtatagatgctttactaagtccaagcacaagaaacatggagaaaattatatcaaagtgtattgctatcaaataagttgaaaccagtgataaagaggaaatc

SEQ ID NO: 30508 - DNA, 1030 bp, Homo sapiens
cccgacttggccactgcccgcgccccgccggcctccacgcctcgcgcggagaacctcagccaccgccgtctcggatcgtgccaggccggggaccgcgtcccccttcccggggcggcctccgctcagcaggggcgatgcagactgtcccgccggccgtctagagcccctccgtctccgtcacctctcgccccttcactccgggcgaggactggcggtggctgcccagaggtgcccagccacaccttccttcggcccaaaaggactttcctggccgcgccgaaccgacccttcattcatgctgcagtgctgcaacgtttccgccaccaagggggaaaagcggccgcgatctcaaaccaaacacaagaattggcgtgtgactcatctgcttggatacctccagtccccaaactgtgttccaggagttttcttggccgaagctgcccgatgtttgagccttttcttcccagagaagaagatggactgaaagctgccagttggggactttttgtgatcacggcgttgcagcgttttaaaggaggtgatggggcttgcgctggcttgtcttcccacccaagtgaagagttgatgttcactggttatgcttagacaatgtgcagtttgtgttaatttaaaattttgggtgggataggggcataggcttgtgaagggcagtccggatccggaggaactcctctttgtccctggtaggagagacacccccagtctatcctcgatgccgtcagccttggccatcttcacttgccgcccgaactcgcacccgtttcaggagcgtcatgtctacctggacgagcccatcaaaatcggccgctcagtggcccgctgtcgaccagcgcagaataatgccacttttgattgcaaagtgctatcaaggaaccacgctctcgtctggtttgatcacaagacgggcaaggtaatgtcaccacattgtccagcggcattgtttaacaaactttttttccccttttgccctccctgagaggactaatgtatgcaggatcccagggtttgc

SEQ ID NO: 30509 - DNA, 1033 bp, Homo sapiens
atgctttacttgttaacttatttaatcttcaagtaactctttgaggtgcttgttttttctgcattgacctgtgaggaaattgaggcacagagagatcttggtcaagttcacctagctattaaatggtagaattgagatttaaactcaagctcataaccactgtgctattctaaaggctttataacactttagatatgatgtgattttgtgagggcatagaccaggttaacagtaggaatgaaaatgattaaatgccagaaaatgaaaaaagataagagtattaaattaacttgcacattaggacttcggcaaagcgcaaggtcctgtgtgaactgaagactttagggaaagtttaatggatgaaacagtttcatggatgaaatccaatttaaactagaccttaggacttttaaaaagaggaagaatggccaggaacagtggcaaatgcctgtaatatcagctacttgggaggctgagtctggaagattgcttgaggccaggagtttgaggctgtagtatgccaaaattgcacctgtgaaaatccactgcactgcagcctttgcatcatagcaataatttgtctctaaaaaacaaaaagttcaaaaacttgtatttgccaggggtgcatcaggtctgtagccccacctatttgggaggatgaaacaggaggatcacttaggccaggagttcaaggctatagtgcactatgattgctctagcctgggtgacatagtgagacccatcttaaaaaaaaatatggggttaagggatagattgtagttagggtcagtcagggaaaggagttttgggtgggaggaagaagcagggatgatacggcatgttccaaggacattgtaaggaagacattgtgaagagcctgctgaatttgacaaccaagattgtttcttcttttttcctccacacatctaaacatgaccacaaagatcctagcctcagcttttgggagaatggcaggtcatacattcttttactttttatttgtttgtatgtttgttttaacagatacttaagt

SEQ ID NO: 30510 - DNA, 1032 bp, Homo sapiens
aggttttttatatcatttaaaatactgcagtaagctcatttaaatactatttctgatattgccagaagtatagatttaatactttgaataaaacaatgaaagaagttaaaaggattatgatgaaaatattgtatgtaattgtccaagcaaaaggtaggtattaaatgatagaaactgcttcagaacttcagtatgaaatatattttaaaacataacacctatgtagtagtactagtcttaccattttaaactgatactctaaactgaggtttatttataattgccagttgtgtggaggcagagttttaagatgagcagcagttaagtttgttggttttaatagtttttttacccacttccctgatttgagaactgtattaaaattttatcctttattttagctgcagctattttgaaagctgatataaaaataggtaaactttttgaataatgtgtgaaaaaatgattaaaaagtacttcaaacattaggtgttagtattattatgaaaattagttgttattactgtctcctttcactaatctttattattattgctttgtcatagtggtatgtagtcttaggcacaagagaaattagactttaatagacaattattattattattattattattattattattgagacgaagtcttactctgtcccccaggctggagtgcagtggcatgatcttggctcactgcaacctctgcttcctgggttcaagcaattcttctgcctcagcctcccatgtagcgggcattacaggcatgcatcaccacacccggctaatttttgcgtttttagtagagactgggctttcatcatgttggccaggctggtcttgaactcctgaccttgtgatccacccgcctcagcctcccaaaatgctgggattacaggtgtgagccattgcgcccggccaacagacaattatttttaacatggctgccttgttgtaggtctgatgattgtgcttcatatatttaagcattaatatgtattcatatatatacttaaatgcaaagtta

SEQ ID NO: 30511 - DNA, 1044 bp, Homo sapiens
ccctaaaacttaaagtataataataataaaattttaaaaaaagaaatttgacttttttaaaaaaacctcttagaagaagatataggataacatccttatgaccttgaattcagggaggctataataatttacaggaagcatacattgagggaaaagattaatacattcaaatacattaaaaattaattttattcattggaagatagaatagccaggcgcagtggcacttgctttgtagtcccagctacttgggggctaagacgggaggactgcttgagcccaggagtttgaggctgtaatgtgctttgatggtgcctgtgaatcaccactgtattccagcctaggcagcttaaaaaaaaaagaataagaaaagttcagaagaaaaaaattggcaaatatatttgtaaaacatatatcacttgcaaaaggttagtattcagaaaatagaaataagttgtttaaataaaagacaacccaacagaaaagaaacagtcaaaagacacacataagaatttcaccgaataaataagatgcagcaataaacaaatgctcaactttcaacataagtaaggaagtgtaaacttaaaccatgagatgccgtttctactcaattaaaaacttggataatatcaagtgtgagtgataccgtagagcagtagcaactctcatactttgttgttgatatggtgaatttcattgattgatttttgaatgttaagccaagtttgcattcctgagataaactacacttggttgtgatgtattatcccttttatatattgctggatttgatttgcttatattttgttaaggatttttgtatctctgttcatgaagtattcgtcttaaatgcttgtgagaatttaccaaaggaagccatctggacctatttatgttctgtggaatgttgtaaactataagttcaatttctttaatagaaacagagcttttctagtcatctattttttcttgagttaactttgatattttgtatctttcaggaaatttgtctgtttcatctaagttcttgactttattataaaa

SEQ ID NO: 30512 - DNA, 1045 bp, Homo sapiens
ggcttgagggctggctgttcagtagagtgatgaatgtggaagctcgccggcagttggttaagaaggcagtgagttagggagtgtgacagggagtgtgacagttctgtacatgcattactataagtggatccggagagtaattaagttatttccataagaaaggtagtgtttgtatacttcagtgatgatcatttgtttttctccagttttaattgttgctgctcccaaggagcctgtggtgattctgcccttgtatgtcgggggaaatgtggcattaaaaaagcagtacaggtcaggcactctctgtccagattaatttctcaatagagttatgtgtaaattgaaatcttactgagttgaataagtttgtgcaaatgggatgttggtaaggaaaaaattattcaatgacacttgttaaagcatggtaaggaagatttattcaggaccattgagataggtatagaaaccactgcagtggggtgtggggattgcggggcgagggtagagagagactgggctcactctgaatacagcatgggcaattgggaatctatagccaaggatcagtgtgagggtaagtggttggaaaattactaagaggaaacatcaggggtaagggggattctggctaaatcgacctaacaggattcttggtggagtcaggccagggtgttcagacatcacctgagggatggtagataatgaggaacctgatcatacatcaaggatgatcagatgtcgaggttgagggggttctggctaaactgacttagcaaggttctttggctaaaactggattttacaaggaagtacacagatgagcctagaagagagttcataagcctgagtaaagtttggccaagcaaagaatctttgtcaacatgagtcacattgttaaaaatatatggaaatgttaaaactctgtaattcaacacaaattagaaattcagcagctatagatgatattcccatagatattttgatgttctgagttctttttttctttatcaagtccaaaatgtcatgttctgagttatttttgttt

SEQ ID NO: 30513 - DNA, 1023 bp, Homo sapiens
caacctccgcctcctgggttcaagcgattctcctgcctcagcctcccaagtagctgggattataggtgcccgccaccactcccaactaatttttttatttttagtagagacggggtttcaccatgttggccacgctggtcttgaacccctgaccttaggtgatccacctgcctcagcctcccaaagtgctgggattacaggcatgagccaccatgcccagccaatcatgttctgagttcttaaagccagaaacttatctttgcatttctgatgatagcaaaaattaattctatgaaaagtttgtgtgtgtatatgtgtaaatatgtatgtggatagctaagtatacattcagctcttactatgtccaaagcatatgaatgagaggctaaggactgcttactatggggaagaatgattcttactttacatttggccaagatcacagatcttataacaaaaggattaaatgttttagtattgatcctgatgaacacctgacttttaaagaagggttataagagcttataaaccaaggttaaggaaaaaaaaaagtggaacacggtggtaaaatattaatctttttgcagtagatatatattttgtgaattatcaaattctacctaattttatgttattttagtcacttattttctatttgtataattttgtagttttctagttttgcattcttgtttttataataggtgctaaatatgtgagtttgttaaaatgtactttcaacattaagtaaaaatgaaaccatcgagcaattattaaacacgtaagactaataattctcctgaatttataccatataaaataaggtcatgtatatggaagtattttataaactaggtagctagaaattaagtcgttatttttaagtagaagataagttattaaatattcactgtaaattttaagaacataattaagttgctttggagcaaaggggtcacataaaataatttcaattttagaaaacaatatccatgaatataaagataataaggatatactgaa

SEQ ID NO: 30514 - DNA, 1934 bp, Homo sapiens
tatgaatttagataatatatgtaccttcttaaccttgttcttttctgatgggtaaaccttcgcttattttttaaagctggtgcggtgactcatgcctgtaatcccaacactttgggaggttgaggtgggaggatcacttcagcccagaagttcaagatcagcctgggcaacaaagtgagaactatctttcttaaaaaaaaaaaaaaaaaaaatcctgctgggtgtgatggtgtattcctgtagccccagctactcaggactctgagatgggaggatcattttagctcaagaggttaggactgccgtgagatgtgttcgagttactgtattccagcctgggtaacagagagagagagaccctttcttaaaaacaaaaaaacagttttctaaagtcatcaggaaactttttagatgagtcattcagtgatttagttttggtggctgttctttttattttctccctattctgaaactcactttcctaacttctttagtgtgcattttaatagaactttccaaaattctgttcgtacgctatactctcctggttcttaattttctgacagttttggcatttctatctttgtctccatggtctgtagttaccacaaagactttgtctttatcctttggcttttactgtcctgagtctctttcaaaagtcacatacttacagtcttatattaacacttataagcacttcgtttcaaaatttatgtttttttatgaatttctcaaccattttagtttgtttttactttttaagtgtacactatagtggtctttagtatattcacaaaattgcgcatctattaccgctacctaattctagaacattttcatcactcccaaaagaaagtttgtattcattagcagtcacccccccattttctcctcccttcagaccctggcaaccactaatctgctttctgtctctctagatttgcctatctggacattttatatcgatggaatgatacaacatgtggtcttttgtgtctggcttctttcatttagcattttcaagcttcatctaagttctagtttatgtaggtattgcattgctggataaaattccattctagagatagctaccacattttatttgtccattaatcagctgatggacatttgagtttctgttttctactttcggctgttatgaataatgtcactatgaaagtttgtgtacaagcttttgtgtgaatttgtgttcagctgtcttgggtacataccttggaattgaattgttaggtaatatggtaactccgtgtttaacatcttgaggaactgccaaaatgttttccaaggtgcctataccattcccaccaggaatttctccacttcctggtcaatacttcttaatgttggtcttttttgtagccatcaggtgggtaggaaatggtatctaatgattttgatttgtatttctctaatgactaataatctgataatctaatgactaataattgagcatcatttcatgtccttatcagacatttgtatgtatcttttttggagaaatattgatttatatccttttgaaaaattggggccgtgcatggtggctcacgcctgtaatcccagcactgtgggaagctgaggcgggcggatcacgagttcaggagtttgagaccagcctggccagcgtcgtgaaaccccgtctctactaaaaatacaaaagattaactgggcatggtggcgcacacctgtagtcccagctatttgggaggctgaggcaggagaattgcttgagcctggcaggcagaggttgcagtgagctgagatcacgccactgcactccagcctgggcaacagagagagactgcgtctcagaaaaagaaaaaaagaaaagaaaaattggattatcagttgtatattcaggatataattcctgtatcagataaatgatttgtaagtattttctctcattc

SEQ ID NO: 30515 - DNA, 1068 bp, Homo sapiens
tctattctactttctgtctctaggactttgcctattctaggtgcttcaaataagtggaatcatatagtatttgtcctgatagtatcttttaaagtgtaaatatttttaattttgatgaagtccaatttatctatttttatttttataagtaatttttagtaattaaaacattttaaattcatgttgtcacttgtgcctttggtgtcatttctaagaagccattgcctaatttaaggccataaacatgtattttaaccattttgagtactctcttacttggctctcccttctatatttaaaacatccaccaatataactatcaaaggttttatgggaggagttttattaagtgttctgctcttttttgttgttgttaagatcagaatagtagttttcaaacggtagagtcttctgggatgtttagtaaaataaaagtccctcagctgttttgtgtatttgtaataaacttccaggagactttgcatgatgtggttgaaagagtgtggaattaggatagtctagcctggtaattaagagcatggatcgtggagcctgactacctgggtgtgaatcgtggctgtgtcacttcctggctgattttggacaagtcacttgttctctctggaccttcgtttcctccctcataggattgttgcaaggattagctaggatatagctataaagcacttagaatatctgcaaagcacttagaacgatttggcaacagtcaccatataagtattagctattattataccctttaagtcacagtaatgtcatttctagagacctaatctaagaacattatcagagatgttacataaagatgtgtgtataacagtttcatcacagagactgattataaaattaaccacatatagtcagtagacatatggttaaataaattaatgaaatgtcatataaccattaagtcacattgtcaaaaatacttaatgccttgggatgatatcagtgaaaatgtcaaaaatgcaactatatgtagaatatgtctctaaaattttttaaaaattcaaggcaaggggctggatatggtggctcatgtctgta

SEQ ID NO: 30516 - DNA, 1036 bp, Homo sapiens
aaatcaaattagtgctagtgctagagaggttgtgatgacattaactttgttggtctagtctgtgtgccaagcattgttgcaaagccatctagatccttgtagatgtaaaatgttgaaataactttcatttttgtttccttgaatgtaatttaaatgttttagtactgtataaataaaggaagaaataaaccaaaagataaaacagttttagattctcccatgtgttgaagtcaaatctggtcatgccttcctctccactctctttttgtctgtctgactcaaactctggaggcacaaatccaacatgggtttttttctttttgggccagagagctgcatgcttgctctgctgtgttttgaatcctgcttttctagctcgcctaaatcctgaatccagttgttctttaatccaatgactcacaccttgggagtttccctcaccccactccaagaaaatgcaattaacttttccatttcaagtaaataattctgtcacgtgctttctactctttaccgattttgctttaggtgctcatctgaaaatatgcttcctgttgactttttaaaagttccttgtagagttcttctgtatgggtgggaccaaatatctgtgaatcactcccagttagtatagcatagtacagtcatcttaagagtaagtgattttttaatttgacagattgtctgccaaaaagtgttaaagtagagccaaaagcaagaacagaaattgactcttgctctatttattttcaccttttctcatcttttttcatctaacatcaaagattatttccatttctgatacacttttattgtatttgtattatttttgtctaattactagcctaggtttctacatcatccatgcttaaatgcttttcgttgttacatagggctgtaagacatttatactgtcagtagttgagtttacttgaagtcataggtgagaaggtaatgtgtgatgattaagaagtcaggaatgataaaataaaaattttctatttgttttatcgtgcttgacaataagttttgactt

SEQ ID NO: 30517 - DNA, 1030 bp, Homo sapiens
gatagtttgctgagaatgatggtttccagcttcatccatgtccctacaaaggacatgaactcatcattttttatcgctgcatagtattccatggtgtatatgtgccacattttcttaatccagtctatcattgttggacatttgggttggttccaagtctttgctattgtgaatagtgccgcagtaaacatacgtgtgcatgtgtctttatagcagcatgatttataatcctttgggtatatacccagtaatgggatggctgggtcaagtggtatttctagttctagatccctgaggaatcgccacactgacttccacaatggttgaactagtttacagtcccagcaacagtgtaaaagtgttcctatttctccacatcctctccagcacctgttgtttcctgacattttaatgatcgccattctaactggtgtgagatggtatctcattgtggttttgatttgcatttctctgatggccagtgatgatgagcattttttcatgtgtcttttggctgcattaaaaaaaactttatcttaaatatacccacagaggtgaaggaaatcatggtcaaagaactaaaggaaatcaggaaaacaatgtatcaatgggaaacatagtacagagatgaaaattataaaaaatataattcagtagagagttcaatggcagatttgaacaggcagaagaaagaataagtaaacttgaagacaaagcaattgcaattaccctgtctgaggagcagagagaaaaatttgaagagaaatgaacataccctaagggacttatgagaagacatcaagcttaccaacatatgcattgtggtaatcctagaaggagagagagaaagggacagaaaaaatagtcagagaaataatggccgaaaagtattttatggttttagcttttatatttaactctttaatttattttgagttcatttttgtgtatggtatgaggcaggggtccaactttacttttctgcatgtgtctctccagttttcccagcatcatttattgaagagatgat

SEQ ID NO: 30518 - DNA, 1045 bp, Homo sapiens
tgttaaatgagggcctgatggcaaaagtatattttgatatatagtgtattaggtgtctttttacctttcttccttaggaagaaattcagcgaaaatgtgttactaaaataagtagggctgaagagtgtagaaaaatcgaaaaagaaaggtacgtctttttttactggtggttctcttcctagtaagtctattgtgtgtgatcccagttgtgctgaaatttttaaggatttgtaagtgataaataggtaggcttcttgtgcctcctgctatcctttctgtttttaaagagggagggttacccaagtgatgagaagcaaatttggacaaccatcaccactaattttagaatattttcatcatctcaaaaagaaaccttgtacccatcccattcctacctgccacttcagccttttgtaagcactcatgtactttttgtctgtatagctttgcctattctggatgtttcatataaaatgaatcattataatacatcagtcttttgtgactgacttcttttacttcacataatgttttaaacgttcattcatgttatagcatgttatcaatacttcacccctttattgccaaataatattcagttatatgaatgtctaccacatttgtttattcatttatcagttgatggatagttggattattttccctttttggctattatgaataatgccaacatttgtgtagaagtttttatgagaacatgtttttagttctcttggatgtatacctaggagtggaattgctgagttgtatactaactttatgtttaacattttgaggacctgacaaactctttttccaaagaggttgtaccgttttatgtagctgaattttaaatcacctagttttcagattctaatttcatatatattaaaggagaaccttagctgaaatgagtggtttgaattaataggggaaaaattcacttgcaatagttggcaaagctggaagcatttttttaaaaagtacatttggaattattactattaatatttggcccttttttgtttttgtttttttttgcagt

SEQ ID NO: 30519 - DNA, 1032 bp, Homo sapiens
actgtattatgcagaactttagagttttgtgaggtgtggttaggtgtgtaataggttggggaagggaagatttggaataagaactatattttaaatttgggaatagtcagaccttatgtttgatactggcagatggggaaaagtgtatttccccctcacaattttatttccatatattcaactgactttttattgactattattacagaattggagattaagacacttttcaaaatgattctatccttatttctaccttgaaattgtgattcgttatggacaagatgagtttctccagggtaataatgtcattaaaccactagctttattttctttctgagaaattgttacttttaagaataaactatgtttacatatgagaggtgtgaagttttatatttttaaacaattatttcatccatattatttgtttgtttcaaccagttacccatgggtgtattgtttccacaataaaactttttctaccagatggtatggaagcccggctccgctcagagtgagtataatttagtactgtgaagtttttgtgaagtttagtactgtaaagaatttagtaataatattctaggtgatggtgtactgctaatacctgcttcaggactatttaaataatattagaaaattgattagtactttttggaatataatacacttcagtttaaattgcttctttgctttagttacaattctagtaaataataatgtatcaaaggcaaagattattttgtttccaaatttaatttatattttgatggataattagttgtttttcacaatgtttcaagtatataagttactggtaagtgatagcttcattcctttttattttcatttaatataggacttcttaaactgtgatcacttctggtattaatgccagtgtcacaatcttataagaccttgaggataccaatatagttgttagcttattttggtgggaggtttttgaagatttttccaatgtcctatttactttttgtatgaaggagtgtaaaggtcatttagaggccg

SEQ ID NO: 30520 - DNA, 1028 bp, Homo sapiens
tgcagtggcgcaatcttggctcactgcaacctccacctcctgagttcaagcgattcttatgcttcagcctcctgaggagctgggactaatggtgtgcgccaccacgcccagctaatttttttatatttttagtagagacagggtttcatcatgttgaccaggctggtcttgaactccagacctcaggtgatcctcccgcctcagcctcccaaagtgctggaattacaggcatgagccaccatgcctagccgaaaatggataaagagtactccttttctgtatagaaattcgtataatcaagtaattcatcatatccctcaaaaagtagtggctcctcaaagagcatttaatacattttggatttggaatttgtttttagaactatattgatgtgtacaaggtaggtttacatatttttgttttctaagaattttatacatttatgaaggattgaaaaatagttcacctttttttaattacatgaaggcaaatgtataaactttgtggtgtaagatattctggtgctctcatactctgtttcctctattgtccggatattagataaaacttctaaattttacttttcagtgtcatccatgcaccattaccaagtcctgttgacaaagtaagttgctaatgattattttttccaaactgactcagctatgttgctttgaaaatgtttgtttttaatatgctttacctagaaatttatttctcttttataacaaaatatgtagaatgcatatagctatatagttattataatcttctgatcttcaatatctggagaatctaagatggatgtttcttcagaaaaaggctttgttatctcagttaaattattcactgtgtaaactaggagtacctgttttgtgtctagccagggataaggagtattcgctgttactttttattctgagatacaagtctgtctagaaatttgtttaagtttctacctaaatagttcactcaacatttcccaatacagggaggtaatacagaaatacaggcttacaaaaattgtt

SEQ ID NO: 30521 - DNA, 1035 bp, Homo sapiens
tatattttatgagtagtccagtaattgcccaaagtagtttattgtgttaattctgttacagttgtcagagaagaaaagtgagttttaaagcaccatattgtcaagtcacttttatacatagggaaattaggcaaataaatttggtggcatgtgtttatcatagtagaactttcattagactataccagtataaaatttaaaactagattcacagtccttttggccaattaaaacattgagttacaaaagtttgagatacttaattttagtacattctattttattaaagtaactggattcatttgacttttttaaccatgtaagaggatggtgttatttcaaatatctcgtggtttccattctgaattttgtgcacggcagatgccatatttggggaaaaaatgcatagaatatgcatcattaatattgttttggcaaacaggcattgagtttcagaacagtgaactatttttagtacatatggcaatttttttcaccttattaaagtgagatgagaacagaccttaaaatagcttttacctcaccatccaaatacctattcagattagttggttgaatagccagcactttgaagtagagccttaggaaaaaaaaaaaaaatgcttctttaattaaaatatcttgctatcttatcacttatatttaatgcattctaaattagaaaatattttcttgaaattatgttttatcattattggaaaagttttgtgcattactgatttccctttttaatttattgtttttatcttattgatacataatgtgcatattttcaggatatgttttatagtttgatacatttaatgtataaagatcaaatcagggtaattagaatatcatcactttaaatatttatctttgtatgatttccttttaaacctggctataaactgtttattggaagttttaaagaacatgccttttgatccaacaattccacttttgggtttttaacccttttttttttttccttgagacggagtttcgctcatgttgcccaggctggagtgcagt

SEQ ID NO: 30522 - DNA, 1064 bp, Homo sapiens
tttttagtagagaatgaggtttcaccatgttgaccaggctggtctcaaactcctgacctcagatgatccacccgcctcggcctcccaaagtgctgggattacaggtgtgagccaccatgtccggcctgggtttttaatcttaaagaacaaattggactaatgagcaagaatatttatttcagtgttgtttaaaagcaacaagaggaaagcattagggtccattaataagggtatttattaaataaattatggcaaataagtccatgtaaatgaatagaatatattctttaagaataatacaaatataagttttaaatactcagggatttttctatcagtagtgaacattttactagcacctttcacagttaataggcaaagatatgctaatccttgtaacaaaccagatggctgaaataagttacattttaaatcgagctataaagtgttttcttttggatttggctaaattgtctttaattggcaatgtttttggtggaattttcttgtttggactgaaaatagcagttgccataaatgaacaattaccgactgttaccagtcttacctcttctcttacctctagaagatgtatcacctaatgcaaaatgtgctttctgtttaatctctaactcaacttgcagtcattacatgtctatatatagctttggaggtagaggtagaaagaatatgtgtagataattctaccactaactagctgtacaccctcaggcaacttcagttctttaaacctcagttccctcacttgtgaagtgagattgacaaaatgtgagccaccactcatggtcttgtgtttcattcttgaatagatttgatttgcctctatgtaactatagtatcaggacacaacattgaggatccatgacttgacttgctaaaaacttgctttctggccaaccttggtgactcacacctgtaatgccagtattttgggaggccaagataagaggatcgcttgagcccaggagttcgagaccagcctgggcaacgtaacaagacactgtctcttaaaacacacacacacacacacacacacacataca

SEQ ID NO: 30523 - DNA, 1034 bp, Homo sapiens
ttgagaatttattatgttccaatttgcagaaactagtgtaggtacaatgactttgccttggcagtatgccagtaatcttctgccttctggaaggaagtccacagatcttcacatcaactgaaaaaagctatcataaagtccatgaattgtactcctttatttcattctctggcatactatccaggcttgttgtgggaatgttgttaggtaacagggagtttctttcatattttacctccctctctgtacctatatctttcttctctttttctggtgacctctgtgttgaccctaagccccatctctcctgtctaatgtttttatacatttatattccttcttaatatttatctttcttgagcatgatgatgggctcctgataagtcattccaaggtgtttacatttttcagaagcacctttataaaggtttcctttattgaagaatttctaggatataagtagagaggaactggaaactttctaccctcataagctacatttagggacaaggaggaacctttctggtatacgttacctatggtatatctattttatattcaatccttgtctatcttccttctaaaaccttcagagatggcagaatagggccgggtgcggtggctcacacctgtaatcccagcactttgggaggccgaggtgggtggatcactcaaggtcaggagttcgagaccagcctgaccaacaaggtgaaaccccatctgtactaaaaatacaaaaaaattagccaggcatggtggtgcatgcctataatcccagctacatggagggctaaggcacaagaatcccttgaacccaagaggaggaggttgcagtgagccaagatcacgccactgcactccagcctgggtgacagagtgagactcagtctaaaaaaaaaaaagagggatggcagagtggggtagtggaagtggagacaaaggcacagccagtagcagaacaatctctgttctttgactgtgagcccagtttgcgtgtaagatgctgtatctagaagtggaaccagtctagaatt

SEQ ID NO: 30524 - DNA, 1050 bp, Homo sapiens
tcggctcaccacaacctctgcctcccgggttcaagcgattcttctgcctcagcctcccaagtagctgggattacaggcatgtgcaccatgcttggctaattttgtatttttatagagatggggttccatgttggtcaggctggtcttgaactcccgacctcaggtgacccgcctgcctcagcctcccaaagtgctgggattacaggtgtgagctgccacgcctggcctgtttctttttctgctactccatgttgtgtctccaggtttcagtggtttcatatgcattcatttagcaaatacttattgagtgtctgatgttaggcaccgtgccagatcctgacaatactcagtccctatcttcatagagcttttggtatggaggtgaaatacaggcaaggaagctggcaattaaaatacaatgtaatagaagaagacactggagactatggaaccatagaagcattgagtgcatttcctctcaccttcaaccactcaaccttccaagctggggatatctggctacagagccaaaggtaagtttcccttctagatcgtctaaggaacaggtctggtttctcttgaagcacatgtcattgaaaaccattaagatctgatcttgattttctttaaaaaggcattatgactgggaagcatttttaaggctttgtgtgtactctcctggagttttcccctgttaaatggtttgaactgtaacttgcgagtaatgggtaactagtgaaggtttttggttttttgtttgtttttttgagacggagtctcactctgtctccaggctggagtgcagtggcaccatcttggctcactgcaccctccgcctcccgggttcaagggattcccctgcctcagcctcctgagtagcttggactacaggtgtgcaccaccacgactggctaattttttgtattttagtagagacaggtttcaccatcttggccaggatggtctccatctcctgacttcgtgatctgcccgcctcagccttccaaagtgctgggattacaggtgtgagtcactgcgcctggcctaagg

SEQ ID NO: 30525 - DNA, 1051 bp, Homo sapiens
acttgggaggctgaggcaggagaatcgcttgaacccgggaggtggaggttgcagtgagctgagatggcgccattgcactccagcctgagtgacaagagcgagactccatctaaaaatacataaataaataaacatgcaaatatttagtatcttacacagtttctaagggtcaggaatctaggagcagcttagctgagtggttctaggtcaaagactctcctggagttgctgtcaagctattgactaggcctggaggattttctttgctcattcagatgctattaaccggaatcttcagttcctcaccacgtgggtctcgccataaggctgctcagataaagcagctggcttccctcagagcaagtgattcaagagaaaggcagagggatggaagccaccatatctttcataacctaatctctgaagtgacataccatcactgtgcaaaattctgttggtcacacaaactaactctgatacagtgaggaaggtaataaccaagggcatggatactaacaggcagcagaagagagccaggttacagactggttcttcaactaatttcccattaggaaacttttgaattgttgataagcttcttttaatgaagtatatcaaaagagacaaactaaatgacttctataaattacatcctggctgggcgcggtggctcacccctgtaatcccaacattttgggaggctgaggcgggtggatcacaaggtcaggagatcgagaccatcctggctaacacggtgaaaccccgtctctactaaaaatacaaaaaattagccgggcgcagtggcacgtgcctgtaatcctagctactcaggaggctgaggcaggagaatcacttgaacccaggagggagaggttgcagtgagcctagatcgcgccactgcactccagcctgggcaacagagtgagactccgtctcaaaaaacaaacaaacaaaaaaaaagaattacgtccttccccaatctattgattccctaatatcagtaagtcattgatactgattctaaagttataagaagtccaaaacaagagag

SEQ ID NO: 30526 - DNA, 1036 bp, Homo sapiens
aatggtggtgtcttggttcactgcaagctctgcctcctgacttcaagctgttcttgcacctcagccttctgagtagctgggattacaggcatatgccaccatgcctggctaattttttgtatttttagtggagacgggtttcaccatgttggccaggctggtctcgaactcctgacctcaggtgatccacccacctccgcctcccaaagtactgggattacaggtgtgagccaccgtgcctggcctagtacattttagatatttaataaatatttgttgcagaaagggagtagaaccctggtctgaaggtggacttgaatcaatactttctggttgctaacagtggccattcatagatagtatgatggtgtgccctctggtctggaataaaatcacttagtggcagtaaacattgttaccacgaatgtaaatttgactgcggcaaaggaccttatttcttaccaaattttagagtttcttaaagcatacacttaatgagaaaagctgaacctagttttcaccaattactagatagaaagactgaataaacatttatttatgcctgccttgtttcagtaaagctttaaggtggccttacacagatatataaaatatggaataggctgggcacagtggctcatgcttgtaatcccagcactctgggagtctgaggcaggaggatagctgaatccctgagttcaaaaccagcctgggcaacatagcgagagcccacctctacagaaaattttaaaattagccacgcgtggtggtgcacaactgtggtcccagctactcgggagactgaggtaaggatcacttgagctcaggaggttgaggctgcatgagccaagatcatgccactgcactccagcctgggcaacatgaggagaccctgttagataaaatatagaatatcatggcttaaatcgggggttgggggggagaaaagaaagtaaaataagagaatataaaattgagccaaataagtaaaataaaattgggccacgactgaggaggaaaaattaccccatgccac

SEQ ID NO: 30527 - DNA, 1049 bp, Homo sapiens
gttatagggcttggacttcggacaagccagcagcctcagtcattgtgagtgtgattccagattggaaggttctgctaggaggaaagtggaagttttgagaattcctagttggacagaatgcctcttgatcacggccttagctaaaggagaccactctttgctggatggatcagtcagctacgtgtgaagtttggctcagtacaacattctcggcctggggcggcagcatgggaaagatttttattggaattaactttctacagagatgtactttcaaatgagaccatccttctctcactggtgagctcacccgggctcttattccacaaagcttaattgttttggacccatacatttaaactccttaattaattgactcaagacttaggacagatttgcttttctttataatgactccatggctgtaaatgctgctgattcagatgaaagaggaccctagagcacagaatgagaaggacgtggactcaggatacctgtttctttattctgactgtgctcttcgtcagctctggggctttggaccccagttttgtaaccacctaacgagttcaccttgcctgctgcctagacggagctgatttatcaagacagaggaattgcaatggagaaagagtaagtcacccagagccagctgtgtgggaggctagaattttattgttactgaaatcagtctcccgagcatttgggatcagagtttttaaagataattcggcaggtaggggctcaggaagtggggagtgctgattggtcaagttggagatggagtcacagggggtcgaagtgacgttttcttgctgtcttctgttcctgggtgggatggcagaactggttgagccagattaccgctctgggaggtgtcagctgatccatggagtgcagggtctgcaaactatctcaagcactgatgttaagttttacagtagtgatgttatctccagaagcaatttgtggaggttcagactcttgcagtttctgacccctaaaccttaatttctaatcttgtagctaatttgttagtcctacaaagg

SEQ ID NO: 30528 - DNA, 1050 bp, Homo sapiens
gagggccacctctggtcctagctctggcttttttgcaggatggggaaggccaacgcattgacatccagatgaagaaccggatggacggcacatatgcatgctcatacaccccggtgaaggccatcaagcacaccattgctgtggtctggggaggcgtgaacatcccgcacagcccctacagggtaggttgtgaggcagaatcctggctgttttatggaaatgcctggtcatacaccaggtctgggatccatgcctgacagccaaggcagacatatggaaggaacccatccctggtgggccttgaatgatggaggggcccgaagggcagagtgctccagcctgctcagaagaactatttctaacaatgttttttaatagtattttactgggtccaagtggaggagaacttgatgaccttctccatgtcttctctaggtcaacatcgggcaaggtagccatcctcagaaggtcaaagtgtttgggccaggtgtggagagaagtggtctgaaggcaaatgaacctacacacttcacggtggactgtactgaggctggggaaggtgagaaagggctttgttcaacccagtgatcattgctccgtggggaaggcagttcttttcataacgtttcaatgccttttgaactaggaagtagtccatctgaataggtaatcatctactgagcctctgagtcattccttagtgatatctttgctaatccatcatccctttccccaaatccttactctttctcaggtttcttactagaaacttcccaattgctttttgagggtgttaacctgagctggaagagattgcacaggacatgctgtttcttgtaagctggtgctaataagctggtctgttccaggtgatgtcagtgttggcattaagtgtgatgcccgggtgttaagtgaagatgaggaagacgtggattttgacattattcacaatgccaatgatacgttcacagtcaaatatgtgcctcctgctgctgggcgatacactatcaaagttctctttgcatctcaggtacgtggtggggcctggga

SEQ ID NO: 30529 - DNA, 1050 bp, Homo sapiens
ctgcagtgggagggattccctgggcgaagggattctgtgtgtcgtgttataaatgtggccccttacatccaggcttgctgctgtttgtgctttcttccccaaatttttatttttatttatttattttttagacaaaagtcttgctctgttgcccaagctggagtgcagtggcatgatctcagctcactgcaacctctgcctcccaggttcaagcgattctcctgcctcagcctcccgagcaggtgggattacaggcacatgccaccacacctggctaatttttgtatttttggtagagacggggtttcgccatgttggccaggctggtctccaactcctgggctgaggcaatcctttcacctcagcctccaaacctgcggatattacaggcatgagccactgcgcctgacctcagtatttgtctttttgtgactgatttatttttcttcctatatgtcctccatgttgtagcacgtgtcagaacttcattccttttcgaggctgcattccactgtatgtatatatgttttgcttctctcttcgtctgttttttgtttgttttttcttgagactcgctctgttcctcaagctggagtggcactgtctcggctcactgcaacctctgtctcctgggttcaagtgattgtcctgcctcagcctaccgagtagctggaagtacaggcacgtgccaccatgcccagctaatttttgtatttttagtatagatgtttcaccatgttggccaaggtttcaccatggggtttcaccatgttggccaggccggtcttgaattcctgatctcaggtgatctgcccacctcagcctccgaaagtgctgggattataggcatgagccaccgcgcccggccatcttcatttgttgaagaacatttgggttgcttccgtcttttgtctgttgtgaataatgctgggtgtacaaatatctctttgagtctctgcatttaattcttgtgattataaacccgaaatggaattgctggatcatatggaaatctctttttaattttttgagaaactactatactgtatt

SEQ ID NO: 30530 - DNA, 1092 bp, Homo sapiens
ggcttactgaggcagggctgagtgcatacccccaggacggggcctcctgtattcacctgtgagggtttctccagagtaccactagcagtgccattagtgagcatcttccttcactcgtgacccaagtgcacaagttgcaagcaaggccagctcccagttgcagagatccaaagtgagagctcactgttggcttttgtggctggagcagccagctctgagtgtgtaaacgtccactgcccaaccctgtcatgtgtccccttgtcactcctttccccaagacactgagagctttgactccagaacaggaaaagcagggtgccaattaggaaagcctcttttccggtgggaagtagcgatccgggacctccttgcctgtggttcggcagtgtccatcttgccaggccctatgttccttcagagtcaaggttctctgggttgtggcaggggccctgtgttcccagtgcttttgttttgggtaaagtcctttccctgttcttgtctaatctaacacttgggcttcctgcagccctgctttgcagagaccttttggaaaccatcacggtacagtcagttctcagcacttgcttcaatcggctcgcatttggcagctctgtgacttctgctttcttgagggggaggggtgcctataagatggagttggctgccaagaattagtaaataaaacattgacttatgagggtgtttggatatcaagttaacaccaaaagtaagtaaataagagacgacagtgtcagattacaactttctggtcagcaaagattgtggggtcaggtaaatttcactttgagtcccagcttggcaggctgctgcatatgtcaccctggacaagttacttaacctctctgagcatcagtttccccatctgtgaaagccattggttaataataaataccccataggattgtggtgaaaattaagacaataacctatttgtgcttggcatataaaatgcattcagtaaatgatagccgttattgctgtcatcactaattgattattgtgccgacacttgttgttactgaggctgagatgctgatgatacttactcagctttgctgcttgtcctctgca

SEQ ID NO: 30531 - DNA, 1083 bp, Homo sapiens
gattgttttgttttgttttgaaacaggatgtcactctgttgcccaggctggagtgcagtggtgtgatcacggctcactgcaggctcaacctcctgggctcaaatgatcctcctgcctcagccccctgagtagctggaactgcaggtgtgcaccaccacactcagctaatttttgtattttttgtagagatggggtctcgccatgttgcccaggctggtcttgaactcctggactcaagtgatctacccacctcggcctcccaaagtgctgggattataggtgtaagccactgcccccagccacattactgtgtttttaacccccttttccaaataacatagtatagcatgcagacttcgatgctagatgaaactctgaagtagagaatcatttttcacaaataggggatttgtatgcaaatatgcgtttctgtttgttgttttgagcaggtctccatgtagtggaggtgacatatgatgacgtgcctatcccaaacagtcccttcaaggtggctgtcactgaaggctgccagccatctagggtgcaagcccaaggacctggattgaaagaggcctttaccaacaagcccaatgtcttcaccgtggttaccaggtaggcaaggccctacatttggtgtcttgagtctcacttttgtggctagattctacctatgtgtcatggtttcctaacttttgataagatgaatttttatttttataacatgtatttccttctgtagagacttatgttacatagaaagaccaagcatacctaaaaaacataccaaagcacttgataatggtcatgaaactatttagcaaaccaggagtcaatcaagctctataacttgataatgtaaaaatttgtagccaaccttgtaagtatttttattaaagttggttgcaaggcatatgcctgcgttgtacttgcagtcctagccagtgcaattagataagaaaaataggctgggtgtggcggctcacacctgtaatctcagcacttcaggtggccgagacgggacaattgcttgaggccaggagtttgagaccagcctggccaacatggcaaaaccccatccctaca

SEQ ID NO: 30532 - DNA, 1031 bp, Homo sapiens
ttggtgaacctgcaagtagttttctgattgggacaggacaaaggtctttacttcagggtttgcttgataaaagcatttccaaaaggttttacatagaaaccttgttccttgttgatattaatacaaaaaaaaatgttacataagctcttcacctcttggaacaatctctaagggttttcttttctttttttaaaaaatcatgccccttaagatgaaaaactttcacccatatcccctaacacatattttatatagagataagcatattagctctatgtagaaatatgtaatttataaattacatttgtatattgctttactaatataccatgtaccatatgaagcatactatagaataattatagatacagaatatagaataagatgagatataaatattaaaactgaagttccagtattctctttccatttggtgaccatgatcttagcataacaaaagtggggtaaatgtgtttaaccctgtgtttcccaaactaatttgtgaactcttcctccccaaactacttgtatcccttggaacagaggtccccaacccttggagcgtggactggtgtgggtgcacggcatgttaggaattgggccgcacggtggtgggtgagccatcattactgcctgagccctgcctcctgtcagatcagcagctgcattagattctcataggagtgcgaaccctattgtgaactgcacatgagaaggatctagattgcacactccttgtgagaatctaactagtgcctgatgatctgaggtggaacagttttatcctgaaagcattcccccaccaggccccctggtcttctacgaaaccagtccctagtgccaaaaaggttggggaccgctgccttggaacacactcaggacaaaaccagtctgtcatatgatggttactacctcatagttgtaaatttctgctagacttaggcaccttgactaactcactgtcttatctgctgtagaaatccccttttccatcccactcttatgtgtaagaaaagtcagatgcagctggg

SEQ ID NO: 30533 - DNA, 1059 bp, Homo sapiens
ttctcacttgctctcacgagcttcccagaatggtgctggggaggtgtgtccactgtcccccagacccaggctccttaacccagggtcacgagttcttggtctccggtgttgggccgtgggctcctgaaactacagaatatgccacgtgtgtgtttctctgaagaagtggctcactgacaacttgcattactttcttgagcagtcccatgattctctctaggttaaaaactgctgtgtttagatacctcatgactgtcgggttcttgtttgcccctttttcctgccttctcttatttgacttttccagatgtgactttgacactgagtctgtcatacaggagttcctttctcccctcagcctcttttcaatggcccacttctctttggtttgatgctctatgtatccagctggtttcatggtgttctcaagtcctttctgagcttgattttgccagttgtagaaaactctttaagagttgtctgctatattttgtggaagccaaatggaactggaaaaaaaaaaaagaaaagagcaaatggtctctcccattgtgggacttgaatgttttaggcagcaacgaatgttcttgggtctggaaacctttattttgaatacatctgtgccttgggctctgcttctctggggaaggttgctggtgggcttcattgccccgtctctctgtgctccataggagaggtccacatgccttctgggaagacagccacacctgagattgtggacaacaaggacggcacggtcactgttagatatgcccccactgaggtcgggctccatgagatgcacatcaaatacatgggcagccacatccctggtaagctgagtcagcaggcccagcagggctccaccattcaggggcatccgggcagcctgcagacactcctcagccgctttgcagggagcagctctcggcagcaggctggagaatgcagcgttggtacccctgtgaaaccaaacagtctgggaccctagcaggtccagctgatttctggaagggatgatgtagctcagtgtcttgggtcacagtgcaggcctttggg

SEQ ID NO: 30534 - DNA, 1021 bp, Homo sapiens
gagcacacttttattgtgccagtgtgactctagggtgcaaagagaaagctctcagatggagtgttcgaatcatacttactgcaatagtgcatgaagtgcatgagcttagacatgcccttcagcgtcactactaggtaaattttctgctatcccttttacagatgggaaaactgaggcttggcaaggtagtggtgtagccaagttcacatataggtaaacagatccaggttatcaaattccaaagcccatgctcctcaccttgctgtgttcaggttatgctttcagtgggttataaggaagatgcacaaggcagatcctgtttccccaccgtatttagacctgtctgtgaagcagccagtagtactgtgtggaatgtggtcattgtttacctagaaatgcccacagccatgccaggcaggtatgaggtgccttcaactaacaaaaattcctatattttattttatttttgagacagagtctcactctatcacccaggctggagttttagtggcatgatctcggctcactgtgacctctacctcctgggttcaagcgattctcctgcctcagcctcctgaatagctgggattacagcacccaccaccacacccagcttatttttgtatttttaatagagatgaagtttcaccatgttggacaggctggtcttgaactcctgacctcaagtgattcgtctgcctcagcctctcaaagtgttgggattaggcacctggcccaaagattcctttaaaatgtggtccatgaggactcaagtctctaggtcctgccagcttcttgtctttgctgcaagcaggcatgaatcccatcattcttcattggttgggtctactcagtgttcaaggctcatttttttttcacttaactttgtgtaattagttcttgcgtgttcatccgtgaacagcatatggcatggcagctctgtgaagccagggtaaccacatgtaacgggagtcctttttgggggatgtttcccagatgacagcaggcggtgctcccaggt

SEQ ID NO: 30535 - DNA, 1001 bp, Homo sapiens
gggcctctgatacagctggaattctagtgccccaatggtgtgtcaggtcttagtgttggtgctggggacacccagtccttactctcatgcatcccacattctagccttcagatgtgtaagtctttaggaagacatcagaaagtacactgaaaactacctttttggcttattctcccttaactttgtattatgtatttattttttgaattggttacatatttacataacaacttaaaagttttaaaaagtgaaaaaccaagtttcctgtctattcctgacacttagctatctacttccccaccttagatcaatcactgttactggtttcttgtatccatgtgtacatgtatatttgttcattgatttctttaaaagtctgtcttttttttttttttttttaaaggttctcactccgttgcctaggctagagtgcagtggtgcaatcatagcttactacagcttcaaactcctgggctcaagtgatcctcccaccttggtctcccaaagtgctggatcacaggcatgagctaccatgcccaacctgtcctccttttttatttttatttattttttatttttattttttgagatagagtcttgttgcccaggctagagtgcaatggcacaatcttggctcactgcaacctctgcctcctgggttcaagcgattctcctgcctcagcctcccgagtagctggaattacagtcacctgccaccacgcttggctaacttttgtgtttttagtagagatggggtttcatcatgttggctaggctagtctcgaactcctgaccttaagtgatccgcccacctcagcctcccaaagtgctgggattacaggtgtgagccactgcacctgtctccttttttatttttaaatactgcaagcctacagaaagattgaaaggataatatcatgtaaccttcacctggattccccagtggttagcattttaccatatttgctttatttctctctcttttcctcccaccaacacac

SEQ ID NO: 30536 - DNA, 1207 bp, Homo sapiens
aaacacatttgtattcctttttttcctccttcatcctctctaccctcctacccttcccagcctctgataatcaccaatctactttctatcctcatgaaatctactttttgttgttgttgttgttgttgttgttgtttttctttgagatggagtcttgctttgttgcccaggctggagtgcaatggcacattcttggctcactgcagcctctgcctcccagattcaagggatcttcctgccttagcccccctggtagctgagattacaggcacacgctaccatgcccaactaatttttgtatttttactagagacagggtttcgtcatgttggccaggctggtcttgaactcctgacctcaggtgatccacgcgccttgggctcccaaagtgctggattacaggcacgagccactgtgcctggcaagatctgcttttttagctctcacatatgagtgagaacatgcaacagttgtctttctgtgcctggctggcttcacttaacaaaatggcctccagttctattcatgatgctgcaaatgacagaatttcattcttttttatggctgaataatattccattgtaatatataccacttttttttttttatccattgatgggcacttaagttctacattttgcctattgggaatacaataaatatgagagtgcatatgtccttttttttttttttccccaccttggcttcccaaagtgctgggatgacagcatgagccactatgcccagctgcacatgtctttttgaattgatttcctttctcttggatttatgctcagtagtagacttgctggattaaatggtattctatttttagtttagtttcttttgttttttgtttttgagatgaagtcttgccgtgatgcccagggtggagtgcagtggcatggtcatggctcactacagcctcaacctcccaagctcaagtgattctcccacctcagtatcccgagtagctgggaccacaggcgtgtgccaccacgccaatttttttacttgtagaggcaaggtctcactatgttgcccaggctcctggactcaagcaatcctcctgccttggcctcccaaagcactgggattacagacatgagccactgcacctgacctatttttagttttttgggaaacctccatactgctctccacagtggttgtacatttacattcctcccagtagtgtgtgagggtt

SEQ ID NO: 30537 - DNA, 1024 bp, Homo sapiens
gcctcccaaagtgctgggattacaggtgtgagccaccatgcctggccagcagtatctttaacaaactaaacgtgcatctgccatagaacccagcattagcactcctgggcatctgttccagaggactgaaaacttaagttcacacaaaagcctgtacatgaatattcatagcagctttatttttaataacaatgaaactgaaaacaccccatatatccttcaatgggtgaataaactgtggtacattcctactatggaatatactcgacagtgaaaaggaatgacctatttagacacaatatgaatgaatctccagagaattatgctgagcgaaaaaaagccaatcccaaaacatgacatactgggtgtttccatttatagaagactcttgaaatactatatataatctggagaaaggttagtggttgctggggtgaggagtaggggaggaggggtgggtgtggctgtaaagggtagaataagggagtcttatgatggtacagttctttatcattgattgtggtggtagttatatgaagctacctatgtgggaaaattacatagagccacacacaggtataaataggagtagacatacaattggtaaaatctgaataacctctggtttgtaccaataccagttttgtagttttgctactgtactgtagttacgcaagacattgacattgtgggaggctggatgaagagtgcatgaacctccctgtacatttcttttttatttatttatttatttttgaaacagagtttcgctcttcttgcccaggctggagtgcaatggcacgatcttggctcaccgcaccctccgcctcccaggttcaagcgattctcctgcctcagcctcgcaagtagctgggattacaggcatgtgccaccacacccggctaattttgtatttttagtaaaaatggggtttctccgtgttgatcaggctggtctcaaactcccaacctcaggtgatccgccctccttggcctcccaaagtgccgggattacaggcgtgagc

SEQ ID NO: 30538 - DNA, 1059 bp, Homo sapiens
ggtctattacatagtaggtacttagcaaataattgttgaatgaatgtacgaatgccctccagaaaggtggcgccaatttatactcccacctgcagtaagagaaaagagccttgtcttggtcagtccacatcacaataggagtaatgattatagctggattttggtttctgtgactctggcagagaaataatctatttgccttaaaacaaagaaatgaaagtaaaaagttgaatcctccctaaatgacatatggttttgctttaatagactgctgcttttaaacacactggcacaaaagtggaatggagggagagttctgattattttagggctgaatcatgaaggtccaggattccttcttcacatctcgctctattagatcttggcccctgggaccaatctcatggctacttgactcaacggggctgcccaccaatcccaataagcttgagatctggagaagggaccctttatgtatgatgtgggcctttcctgtgatgtcaaattttggtggtggtggtgggattaccaaggaactttgttcccttatctgaagtgtagaaatttagtggaggcaaatttaagagttaggaaccttccattctgtcaactgtaggggaaggaggaaactaatattgactttgttttgttttttttttgtttttccggagacggtcttgctctgttacccaggctggagtgaagtggcatgatcatggctcactgcggcttcaacctcctgtgctcaaaaaactctcccacctcagcctcctgagtagttgggaccacaggtgtgagccatcatgcccaggtatttttaaaatttttttgtagagacggggtctcaccatattgcccaggctaaactcctggactcaagccatccactctcctcagcctcccaaagtgctggaattacaaaggtgagccatcatgcctgaccacggtttgaggtgtttttgtttgtctgtttttttgtttgttttttgagacagagtctcactctgtcacccaggctggagtgtagtggtatgatcttggctcactgcaacctccccc

SEQ ID NO: 30539 - DNA, 1027 bp, Homo sapiens
tagagatcagtgctttagctaggtggcgaaagatgtaataggattctgtttttattgtaagggtgtgtgtgtgtgtgtgtgtgtgtgtgtgtctgtgtgtgtgtgtgtgtgtgtgtgtgtagagacagcgtctcaccatgttgtccaggctggtgtgtgtgtgtgtgtgtgtgtgtgtgtgtgtgtgtgtgtggagacagcgtctcaccatgttgtccaggctggtctggaacgcctgggctcaggccgttctcctgcctcagccccacaaagtgctggtatacagatgtgagccaccacacctggccctgcagatcttttctttaaaaaataaaataatttagggtagaaaatggcagttcttgtagggatgactgaccacaaaagacagtgactcacaggagacccatagaggcagatgtggtagagtaaaaaactgtagcattgtcttgcgtaattttttgactgttctgtgttcttgtcattttagctgtaaagtttgactgagaaatgttgcatcagccctgaagtttattgagaaaatcttacgctgatgcaaactttttggactgttagtgtcttatgagtaagtcttttttaaaacaggaactgttggaaattattttggaaagaagtagttgttaagaggggtatgtagaagagaaaggcactgttttttcttggggagattgaagttggctttccagcttggtagctgaagggagatggtgttccagaagtcagagctctactctcgctttgaaatgctgaatctctaggaagttactccttggctgtagacagaaacatacggagttagagacagacttggggttggaagaggcaagaccttaatacaggtctgagctgatacttgctagtcatgtgatataggctgggcaagtcacttaaacctttttgaagtttagttttgtcatctgtaaatgggagtaataaatgcctgccctgcctgcctcccaaggttgttaggaagatcaaatgaaatcatcttgatgaagtatttgta

SEQ ID NO: 30540 - DNA, 1050 bp, Homo sapiens
tctattgttatcggaattgtttcagaaagtattctaagcacaagttctttagctcttcgggcccaactcctttaaggatctcatcacagggactgcttccctgttcataaatacccataaacatgtctttgtgaactctcagaacctcactgacctgaagcccattcttaggctttggatcttagggtaagaatcactgccggaaaaacttttttaggccaggcacggtggctcttgcctgtaatcatagcactttgagaggctgaggtaggtggatggcttgagttcaagaccagcctaggcaacatggtgaaaccctgtctctactaaaaatacaaagattagccaggtaaggtagtgcatgcctgtagtccctgctcctcaggaagctgaggcacgagaatcgcttgaacctgggaggcagaggttgcagtgagctgagatcatgccagtgcactccagcctgggccacagagtgagactctgtctcaaaaaaaaaaaaaaaaagaaaagaaaaaaagaaagaaaaactttttaaaactgtaaacttggagtattacttattttagttggtgaaatatgtgcatctgaaaaatgtactataataccatctatatcctactttaagaaaatcctgtatttagaacaatagatgaactatgtcctcttagtttgaaaacaaattgctttgggttgcagcttgcctggcgcgtttaagtgtgtgcacagatgacttattagacagtggcatggggaagggcaaagggctctgtgccggagagcagggttctaggcacggctctgcctgctgtcgcagcacctctttataatatttaaacaaggctgctcacatttctttgatgtgctcatcagaaataggtcatttctcctcattaattcagttgaggcttttttgctggactggagggaagtgaatggagtgttggtatgggagaatcctggatctcaaaatgtctaagagccacctgtagtggtgaaaagggaaagcagtgtcgttcattcattgccttccttttgagcctgcccttc

SEQ ID NO: 30541 - DNA, 1060 bp, Homo sapiens
caaataattagccagttatggtggtgggcacctgtaatcccagctactcaggaggctgaggcaggagaatcgcttgaaccttggaggcggaggctgcagtgagtcgagattgcaccattgcactccagcctgggcaacaagagtgaaactccatctcaaaacaaaacaaaacaaaacaaaaaacaagtgggcaggccatagggctcagccatgagctcccggaggccagacctgaagggaggcagcccccagcaaatgcccatttcagctcttcccctctcagtttttgttaatccctaaaggggttccaacatcagtacatagacatttgatctcaggaacattaacagatacttaaaaagagtcttctgcgtgccaggcactgtactgcctattaagataaaaagatgaatgaagcagggagctgacatcctagtcaatatagcagccacaaaagcaaagatgaagcaaagtactaaagggcccctctgcctgggagagcagggcacaggggagaggctggtcaggtcctccctggggcttagggaactcggagtggttaacagaggagccagcattttagagaaaacgttctaaatcagtatgcctcagccttttctaacttgcaaactcctttcatagtaatagggaatggtacagactctctggaagttattttaaatataaaaatattttatttagatcagtatattactaaaaattgtttgggatctgaactatatatatttttaaattgtgttcagaggaatacaacttaaggccctgagaaacagcatcttcagacaacttgtagaattaccgtttttatgataattctcacttgtatttctcactaacttctcactaacatgtgttttgtcattggcattgcttgagcctacatttagtcagcggtttattatggatgtaaatgaaatcatatatgactaagagcaaagtcaattaaaatactgtgtaatggtaaaaactgtgataaaccaactgagttatgagcatactcatgacttccacaactcatcccatgcttcctgtgtgccca

SEQ ID NO: 30542 - DNA, 1025 bp, Homo sapiens
attgttttaatgtgaataaggacatttacttattctagataagaaaagggctgtgaaatccataaactgaatagactgaccctatctagttgattctacctgctgataaaatggaacttcggcagaatgcgttactgggtggatgctgtacggggcactcccttcctttggaagcccccagcaggctgctctgcacctctctgtctgctgtaccacttgtggcttctgtcatttgtcattacccaggagtggaggttgcgtcaggaagagatactgcagccaattgcctaagctgttgatggtgcaaagtttcaaaccaggcaggccatggggagcagtgggaggcaaggagcttttagtggcttggggaaggaggtggaccctgcaccagagtaaaagcctgtcactgggtccggtctctgagttttttgtccctcatcatcttgtttcacaaggctcacacactaagccaaatgtagattctcagacagcagtgggtcccagcctgggccaaattccaaatgtctttcgttggtccccatgagggtttctctgtgttttatcttagcaggatctggggccagctcacctctcacgtccccgtcatcgccaactccaccctctacatcaggttagtgatggagtaaagtgacatgccaccttcctgtccgccaacaggaggagcgggctgtgcctcttcctgccttggcccaacaatttcaggggttagatagcagcagctttctcaagagaaatcagtgggagtgcaaattagcagtgtcatttgggagagctgaggggctagatttccaagctcggctttcacagggaatggaccggtttcagggccactagccacccccgggctccagcttgctgtctttgctgaaaagcttcatgcagagcttctcagattggagcctgtcttggtacatgcttagctgaacaacacaaatgcgccgtggcccaggggtcccgtcctgccaggcctctctcctcagggagcccgtccatagggtcagttt

SEQ ID NO: 30543 - DNA, 1079 bp, Homo sapiens
ccaagtgggcagagctcactccttcgggcccacttggtgttgcagtcaagagactcagttccaaaaaccttcagcagaggtctcccctcctcctggtatttcactggttgctctccagaagtcctcttcagaggaatgctcatcacacatgcttattctccgttttcccacttcaacagttacttcaggtttaaagtcctttttatctctgtaacctggtgacataaagccaggaacattttcccacaatccaccttagcataaaacataacaatttcattcatcagttgttattgtgtagaaccaatgaacatgttggtcatttgtctgtatttagtctttatttgtattgctatctttgagcattccaagattgcagagcatgagcgtgtgtatttgtgtgattctttaatttcagctgccttaggtttgagtaaaagatgtaaagaaaggtaagtgattttctattgtaagactttaacccatacctgtcacacttggtgaaaaggatgtacttacctgagtattgtgttggtgattctgagccagtcgtccatacaaacttaagtagggtagctttacctgttacttatcacaactcagtagcagtgtaggggaaaccacctggcagaatgtctccctggagtagccctgggagggacagagacagcatctgacagagtctcagagagctgcaaggtcacaggagacgaggcaactaactgtggcacaggaacattctttaaggcaaggctttttctgaactcgggtgtttattctgtcctgagagaaccattcattgattctaaaatataaaattcgagttgcaaatgtccatgtgcctggaagctgagggaagttttagacacctgcccagtttccctctccttgcccactgcggtacagcacgacattctagtttctcctgatgcttcgtcaaagacatttagtgcagttatgtcctgttccttggttgggccacaatggagagaacagtacttgagaaggatttctctgtaagaataccatggcagagagacccctctgccccctgctttgcattgctaacagttattagc

SEQ ID NO: 30544 - DNA, 1082 bp, Homo sapiens
ggccagttttttttttttttttttttttgaggcggactctcgctctgtcacccaggttggagtgcagtggcgcgatctcggctcactgcatcctccgcctcccgggttcacaccattctccttcttcagcctcccaagtagctgggactacaggcgcccaccactacgcctggctactttttttgtatttttagtagagacggggtttcaccgtgttagcgaggatggtctcgatctcctgacctcgtgatccacctgcctcggcctcccaaagtgctggtattacaggcgtgagatagttatttttgtagagatggcatctctctatgttgctcaggctggtctcgaacttctaggctcaagtgatcctctcatcttgacctcctaatgtgttgggattacaggcatgatccaccacgccccactggaaattgcaaacacattcagaagtagagaggatagtgtaatgaacactcatgtacctgcccattgaccagcttcaacaactgttcactttggcttttttctcctatggattattttgaagtaaatcacagatattatttcacatatatcacttcagactgtatctaaaagataatgactctaaaacataaatatctaatttaaaattttaatgttgcatatatgccatagtaccattatcacatgatggtgctggttgcttcttgaatactgttggttatttcatagcttggatctccaactttgtaaaagtggtcttatatattcctcataggcagggttctcctgtttgtagaaagaaacgcattattaacacagtacatttctgccaggattaatgactttcactttcaaattaagtctctagcttcaaaaagtaacattacgtaagattcttaattttaaaaattatttctaagactcattttgtgtgaacatatggagaaacattttttccaaagggcatccttccttttctcatgcagattttaaattgtggatgcaggtggccaattaaaaacacagcttatcacttgcttttggaatttcatacaaataaaaggcttgactctttgaggctctctgaaactgaacat

SEQ ID NO: 30545 - DNA, 1039 bp, Homo sapiens
cttcgggcctcccaatatagttataattttggccagaccaatatttagtattgacattatgatgattgtgtgtcattaaagcattggtggtaactgggatactgtatccaatgtaatcgtttcttgatgatccccaacatcatatgagccctaccgccaatttaatgtccccctgcccccttgtggtctcacttcattccttatccagctgaaattccatgttctattactctctcaaaaatacattcaacaggccgggcgcgatggctcacacctgtaatcccagcaatttgggagaccgaggcagatggatcagctgaggtcaggagttcgagaccagcctggccaacatggcggaaccctgtctctactaaaaatacaaaaattagccaggtgtggtggtgtgtgcctgtagtctcagctactgggaaggctgaggtgggagaatcgcttgaacctgggagtcagaggttgcagtgagctgagatcgtgccgctgcactccagcttgggcaacagagcaagactcccgctcaaaaaaaaaaaaaaaaaaaaaaaaaaaaaaaatatatatatatatatatatatatatatatatatatatatatatatacacacacacacacacacacacacacacacactcaacgatttttcttgctttgtcatacctgtttagcaaaacgcatacctctttgtctttagttttccacccactttgtgccaccacctttgtaactatacatggctggaaaaaacaatcataactggtgtaataagggctcaagtgggccctgattgcagctcagcaatcgtattacattgctatatttactcattgttcatttactgtttctttttcttaggcagttatttcttaccatctctttgatcctcagattgacactatccacctttcccatctcttttgcctggatggctttacatcgtatttcactaatgaagtggaagcagtaagagaatctgtgtaagttcccacccttgcatttatacatacaatgctttctctcttcaggctc

SEQ ID NO: 30546 - DNA, 1047 bp, Homo sapiens
tggtactcttgctatgctgaggattaattctttatatgtaaggaagatatagaaataatacttaccaaggagttgctaggtgtattagtttgttctcatgctgctaataaccacacactcaagactgggtaatttataaaggaatgaggtttaatggactcgcaatcatggaggaaggcaaaagaggagcaaagccacatcttacatggcagcaggcaagacagcgtattcaggggaaatgtcctttataaaaccatcactatcaatcatgagaacagcatgggaaagaccctcccccttgattcagttacctcccactgggtccctcccatgacatgtggggattatgggagctacaattcaagatgagatgtgggtggggaaacagccaaatcgtataactaggtatgtccaccccaaacattaagtcaagaacatctttttggtcttatagtctttattcttatatagggcatctctggatataggtgttcacattcttctttgcaacctgttggttttcaagacagactgtcggcaagcaaaatgtcagaggcaagcactgagatttgacccatcagccctagggaagctgactctttggttttcccccatgcaccttgtcttcttgatatgcctgcaggggttggggggaggtgggtgggtggaaaggagtactggtttagggttgaagcaagtctaaagccagcttgctctgggtttaagatctggcctccactgctgtttctccaaagttgggagtcagtcatattcctgtttaagataatcttaagtgatctacattgaatctctcagtaggttattctctttaatccttctgaatatgccaaatggagagtttcggtttggtgctagaattaaatgcccctctaatggtggctagcctcactttttaacacagagactgaatctcactcctagttgctaaggcaagcaactatgcagagctggaaatcatcagcattgtttttctcttatgtttatttttatgcttaacttctaattacaggtagtacttgtttttct

SEQ ID NO: 30547 - DNA, 1355 bp, Homo sapiens
gacctcaagtgatcctcctacctcaacttcccaaagtgctaggattacaggcctgagccattgctcctggccaccgtttttaagtgttcttaagagatttggataggagtgtatggaaagcggacggtggaactgaaaaggacaactgtatgtatagacaactttttgaaaaattgtataaacatacgtgatgggtttttgtatctgtctttgctgttgagggtgaggaggagtagggatcagcatggggacattctatgtaagattactaacaggttacattttgaggtttaaataaatgagaaagtcctcatgaagtctgagatatcaccttgcccacattgcaaaggaggtctctgctttctcagcttaaagtgggaaaaatgctttctgtgggcttaaaatgtgtctcataagtcttccaaatccctgtgtagaaagagtcgcctagtcctgcaccctcagatgttaattcctcttctcaggctttatggacagtgtggtaatggagggaaataggttactcattactgggattcaatttggctccactgatgggaagcaaacagtagttgggtgtttgcttttattttacacttgtgtgacacttgaacacattgatgtcctgtctctatatgttcatggattcagagctacagagcatatgagagagaaccaaacactgatgcacacctcgtaccctctaatcttttcttttttttttttgcagactgaaatcagcatgatatttttctggccaaacaacaaaatgtgattttaaactactcagtttagctatttttggggagtagcaaagtgacacagttggctgctgaattctagcaactaaaaaagaaaaaaatgaaagcatagttcatggaatatgtaacacttccatgtaagaaaataggacaactggtcttatttttgggtctgtgatactgtctttctaagtgagtgaagcagggtgttgtataatgcagtggatatacttttgaggaattcatactagttacaatatacatctaagaggtatttgagttttcatagcattgctgcctcatgaatcctgcagtgcacttaaatcagatctgttcattaattgggaatgatttggataaggggacacagccataagcaattgaccaagcataaaagcatagtccagattagtgaggaaatattactgactttttaaggttgtctcgagaactttttaagaattgtcaaaaggatttatttacaaagcggtggttatttataaatgagttctacctgtttttaaaatgacacttttccagaagcgtttctcttcagtaagtgtggaggcttagctctgtctgtgggtagctaag

SEQ ID NO: 30548 - DNA, 1028 bp, Homo sapiens
ttgagacagagtcttgctctaacacccaggctggagtgcagtggcgtgatctcccctcattgcaacctccccctactgggctcaagccatcctcccatctcagcctcccgcataactggtactacagacgtgtaccaccatgcccggctgatttctgtattttttgtagagacagggttttgccatgttgcccaggccggtctcaaactcctggtctcaagtgatccactcgccttggcctctcaaagtgctgggattacagggtgtgagccactgcacctggcccttattttgttttatttattaattttttggtgctgggaatgctgagtatatcatatattcatacatgtcattatatctaaatgataaaaatcacaagagtagcaaccacatgtagccaaagtggaaagctgtccagtacattctttttcgtcctggcacaactctgagattgatgctgtttctctaggggggaatggggacagcatgagatagaacaatttatccgaagtggcgagtgcagccaggacgtagcctgataggaacccagaagcctttgcctatgtttgataagagtggaattcatgttaactttaaccatgtattctgtgtttgttgggatgctgtgaagggaaggatgaccaggctcactcttgggtccagctgttgacttctggaccttcctgtttccaggctgtagatacagaaatgaatgcctgagatgtccagtgggacgttatgatttttaactattagggagtttcctcttgtacattattgcaaggaagataatggattcaagtcaactgttagtggaaacgccatgtgttagcactttgcttcgggttttgggggttcaaaaaatgtgtgcaaaaagtccctaaagcaatgtgttgcagtgtaagactgaagctaataacatgctgaaatactgattcagatcccaagtgttcaggagcgatagaataatgagataagataccttcctacgggtatcctggctggtattttatgtacacaatgaa

SEQ ID NO: 30549 - DNA, 1033 bp, Homo sapiens
cagcatgagaggggggtgtgtgtgcctgtgtgtgtgtcctgctcacatttgaattgtgaattcacattgcattcccttgcaaggatgtgccatttttaattaagactaaagcatggtggggtattctaaattgggcctgattataattgcagatggcaattgagcttttggaagctggtttctttaactgttaaataaaaattgtcttttttagtattggtttgcagaagtttagcagtggatgtcgaggggaaaaaaacggtaacctctttctttccttgaaactaaatgtcacagcatatccatcttctgttaaaggggtttagctctgaagaaatttttcttaaggcctttttaaacaattgatcagataaaaaattttggctcataaagctgaactttccagagactttctgttgatgagagtcaatacagtaaaaaatgacagtattcattgttattataaagagtacttttgaccatcacacttttagtgatcataattagtaccttaggctgggcttggtggctcgcgcctgtaatcccagcactttgggagcccaaggcaggaggaccatttaagcccaggagttcgagaccagcctgggcagcatagtgagatcctgtctcaaaaaaaaaaaaaaaaaaaaaaaagttaaaaactaccctggtgtgttggtgcgcatctgtggtcccagctactcgggaggctgaggtgggaggattgcctgagcctgggagatcaaggctacagtgaaccgtgatcatgccactgcattccagcctgggcaaaacagtaagaccctgtctcaaaaattaaaaaaagaaaaggtaccttagcatacagagccttcttctgtttggtaggcaaacatggctttgttctgtgctccaaaaaggatgggcttgacagtctgggcttttaatgaatttctgtatggagttctatatacatacaatttctgcctattgatgagtatgtacacccacgagaccagtggtttgtaactgagggagggttaatagttttgtt

SEQ ID NO: 30550 - DNA, 1029 bp, Homo sapiens
ctataatcctaacactttgggaggctgaggtgggcagattgcttgaacccaggagttcaagaccagccttggcaacatggctaaacctcatctgtacaaaaaataccaaaaaaattagctgggtatggtggcgtgtgtctgtagtcctagctactttgcaggctgaggcaggaggatcacctgagcctggggaggtcaaggctgcagtgagccgtgattgtgccattgcactccagtctgggtgacagagtgagaccctgttacacacgcacatacacacacacacacacacaaatctatagtctagaggaagttataaggcacataggtgtaatgcttataattgataggaagtgatgagtatgaaagcaggttgacagataaagtgctctttgtttctagagaaagaaatcacttctgttctaggatattagggaaggcctcagtgaggaggatgataattttgctatatgttcagcagccattttcagatgagatcaggcacgttcagggtggcatggccatagacacagcagccattgtcagtttgcaaagagctttcaagtacatcatctgctagttatttggaaaccctgggaggaagttgtgataatttagataatgacccagagaggtagggcaacataccaagggccacccagcaagtgatgatgtaagcatgtgtttaagttgagcatttctgaccaattatttcacaaagaactagagtcattacatcactttccttcatccccttcatccccctcccctccctgcccatggcatcacattacatgtaggataaagctttcactctggaccatgttctgcaagattccacatgatccagcttctgtctttcttccaggactagccttcttgcttaccttgcatgccggctgtttccagaatttatgaaacttttttccaccccagggttcttacacatgctgttcagttacacagaaagagtcatccccaccatccttcttcttgatttggcgcattgttagaatgtcacctccttag

SEQ ID NO: 30551 - DNA, 1046 bp, Homo sapiens
aagccttgtggctagcaagggtctgagctgtctgatcagagtctaatggttgccattaagcagtcttcacccttttcatgatgcaaaatggactttcaggtttaaagaaacgaagtctaacacaaactgcagttatttaaaaggcaatgtagtaatttaatcaagatccacttgcttttggatatttcacgtttctacttctggtttcttcttggatcactttctgaatataatggatctggagtacagggccacagcctttagagtttcttttctcttccctcagtgttttaagtgggaaggtgtttgcccatcagaagagaaactgttggattgcatggtgccccttgctgtttgaggtgcctctgaggaacttggtgtggagataggaggagatcaggagaagattcttcgagcttcggctagaagatgtccaggcaggttatcttctaactacatgcaactagaggcatatttacagagaataatctgaagcttgactctttgatcatcaactccttggagtagcctgttagctcttaaatactctcagttctagtgaaacaaataaaattcctacctccccctccaccgttccttcctcctcctctctccagatttcctccccctccctccctgaaatatatatagaatacccaccatcaagcattgttcttggctctggggatgcagcagtgaatggaaacagatgaagtccctgtccttatgggatgtttctattggggaacaaagtggaaatctcgggagggcaagacgcccagcacatggttatcctgtggactgcaggaatagtgagtagtttgttaagcaataattatttttattaacttgggggagagaaagttttcacatgtgtatttctccttgccttctctccatgccacccattttactgatatgtttttaaggaagaatcaccgagttagttctgactctcatttaggtaaatgtttccaattcatttaaggttatcggcttttgtgttttgtcccactacagatgggcttgcggttctgtttaaaaga

SEQ ID NO: 30552 - DNA, 1033 bp, Homo sapiens
ctgttggttctatttttctcaagtacagtttgttattttgctctgctttgctgctcatatgcgaggacctttcttggccagcctcttgagatcttctgttctggtgatagatgcttgattcaggtttggagagcagcttagtgtcctcagataattctgggaaagcaactgaagagtgatctggttctacaagctggtgactggacccacaatacccagaagaggtctgcattttgcccctggcaccgcagagtgaaagggaggccagagttctctgcagactccacctgttctccttactgccctttgtagtgaatggacattgactcaagtttgtctatctacactctttggggagccccttaaaacccggatttgacttggaaatgaagcttttggttatggcttctgatcatgctatatgtggtagaagcttagtgtctgtatttttaaaattcagactggcttttaatactgggtaactaagtcatagatgaggggaagttgatggagtgatggaaatagacaattgccattttgcagcccatcaatgaattgatggatctgggcatgagacatcgacacttggtaatatcctccagagacaataagctgttgtttgcccctgacagtagaatactttacctccaaggaagtagtcttataaaaacaaatacagctgatctgttcaagtaacaatttacagtaactacagaggacacgaaaacatggtaaaacaatgttgttagggataccattggcctattccagactgaccaaaggtctgctttctttaacaaataaattacaagaaaggaaaaaatgatggaatggaaaacctacagattaaagaatttgagacatatccatgaaagtctgtagtctcagctacctgggcggctgaaaagggaagattgcttgaccccacaagttcatttctagcctgggaaacatagcaagaccccatctggggagagagagagagagaaagagagagagagagagacagagacagacagacagagacagacat

SEQ ID NO: 30553 - DNA, 1031 bp, Homo sapiens
cactccagcctggcgacacagtgagactccgtctcaaaaaacaaacaaaaatgaaaaaagcacaaagaatgaaattctggaaacactaaggagatgaatgtttacctacctgacagaattgttttgggagttttaatgcaggtggcagcttgctgtgacttctaaaggcagtacagaagtatcacagtgtggttaaacttctttttttgaccaggaggtaaacctgaactcaaagtctcccaaagccctctctgaacaagaaaatagaatagtggtccagagtttggatactgaggctggactgtctgggtttgagccccctctcgcctctgttcacatagttagcgagtgatatatgcatttaacttccctgagcctcagtttctcatttgttaaaggcagtacctcatggtgttggtatcaggattaaaagaccatttcagaggaagcttctagaacagcacgtggttcagtataacacggcgtctacgggttgacaatgataatgatgattggatattaaaaaaacctgactggatgcgttggctcacgcctgtaatcccagcactttgggagactaaggtgggctgatacctgaggtcgggagttcgagaccagcctggccaacatgttgaaaccccatctctactaaaaacagaaaaattagctgggcgtggtggtgcacaccttgtaatcccagctactcaggaggctgaggcatgagaatcgcttgaacctgggaggcggaggttgcagtgagcccggattgtgccacttgcactccagcctgggccatagagtgagactccatctcaaaaaacaaaaccttacacaatttaatacattaaacaggtttggacactttttccccccctaattaaaaattttttttttttctttaagagacaagagtcttgctcagttgtccaggctgagtgcagtggcatgctcctagcctactgcagcctcaaactcctgggctcaagcaatcctttcgcctcagcctcccgagtagctaggactacaagtgc

SEQ ID NO: 30554 - DNA, 1062 bp, Homo sapiens
tgtagctagcgtgttgactagcactggttagcacactaacaaatagaaaccaacactatactcaccttctaggttctaggtttatagttaattaacccaagttctcctgaagaccagatttcttcttgtcttggaaggggttagaaggtaatagtcatttgaacatatgtccacaaaatcttttttcagaaactgaggtttaattgtcctcctattgactatgagctagacttcatgtctcctgatgaacataataaggttgaagtgatagtgactttagagacaatatctctaaagagactttctgtcttggataactttgaggaaagccacctgccatgttgtgaggacactcaagcagccctgtggaggggcctgtgttgtgaggaatggaggcctcccactgatagccatataagtaagcctggaagtggatcctctatcccagattaaatattcagctgactgcagtgcagccaacacttgactgtaacctcatgagagaacctgagccagaagcaagccaactaaactgctcttacatccatgccccacagagcctatgagatgataaatgtttgttgttagaagccattacgttgtgggataatttgttacacagtaatagatcactaatgcacaataatggtgggggtcagatacacaggaacaaactgaatccataagaagatgatggtccttggcatgcccttggaatggggtccaatgatgttgcagaactaggtaaggcctttctaggggcagaaaagggaatgttttggggttagatttggtacttagcatcaacaaggaagatctgttccagtagcattttaaaaaggcctctcaactaagacttattgatggtgatggtgcatatgtctgtcggtctgcggaaatgcaggtgagcaagggaatgcagaacagatgcagagtatacacataggcgtctgatgcaggttcaagtcgagtagcttccgatatgactgttttctttagttttcacaaccattgaaaagagcaggccaggtatggtggctcacacctgtaatctcagcactt

SEQ ID NO: 30555 - DNA, 1043 bp, Homo sapiens
gggtgtttagtaacatctatcctagatgccagtagcacactcatcctctttgtaataccagagatgtctcaagagtaatttgtttctgaccactgacagaagcctacttaagaaaagctgacagctgatgtcaggtgttttctttgttcaaaaatggtgtagaacagtacttggagtgaatgggtgacttcaatttagtaattgtttttacatttagtaaagaaattatgtaatggtagtgtctcctctcccttacccccccaattcatttgaattaataatttaaaaagtacttttaaaacttagacccagccatctgttccttcctgttgccttacagcagcagtaattgctttaggatgggcttggaaacaagagcggaaatggtctccagtgaccccaaatcataacagaactcgaatcctaagaaaaaccacaagtggcttatgaataagctgaaaacttaaatgcctcctcaacaatttaaatttggattgcatagcttatggatttggtgggacattctaacctcgatgtatctttaacattttctgcttttaagatgcaaaggcgttaacatagggatggagagaaaacttccttctaagttttcctagaaagtctggcacctttgacatagctataacagaaagaaaaatatatatatgtatttgatactggttctagataatgccattaattagatttaaaatgatgcttatagcaagcatatgtacaacgtaatatgttccagctacgactctaagcacttttcccattttaattcacttgcttctcagaacagttctatgagggaggctctattaggcctgactcatgctcggcattttgtacacgaggaaactaaagcaaggcaaagtcgactgcccagaattaccggctaataaatgtcagtcttgcctggtgctgcacacctgcagtcccaggtacttaggaggctgaggtgggaggatctcttgagcccaggagtttgaatctaactgggaaacatagtgagactttgtctctttaaacaaaatttt

SEQ ID NO: 30556 - DNA, 1712 bp, Homo sapiens
gtgtccttgatggtcccaatagggatctgactacctcagggatgcagatactgagttagcagtgcaaggaattcattgggggttagtgcctgtagcagaagtaaagggaagaagcaggattggacagggagaatctcagaatgtgctgcagatctgccatagtggacagaaacaggcagaccccagtagtacccctgactccttgcagcccttggctggggaagagctttgccttgacacaaaagctgcttggaacctgaaggttctttgcagctgagtagcaagttctttgctgaagggagctccaagttgtacccctgctagggctagctagagatacctccactatctgtgttggggtccctattctgtcttacttctgtcacatgtagtttatttcctacacagcattttatcatcaactataataaaaaggtaatgaaaatgtatcctgttagtctctgcccctagagtgtggcctttgtcagtgtaattgactgctggcacattgaggagcacaggagagggcatttcctggcaacctggcatataatggtgtcagatttcttattgccgtgttctcttttgagcttggaaagattagttaccgcttgttggggtatgagtgggagcgccgtgcttctgaacatttgcaaagcatctgccaggaccctgcaccgtgaggagcacttggtgctcgttacctcattcccgtggtcttgcgtggggagggacttgtttacatttgttttagtaccgagatgcatgcatgtccacttgatgggtaaggaaactgagtgttagagaacttaaatattaaggttctctaggaccacttacctcaggagtggcagagatgggacctcagctctttctgcccactaagcctgtcaacttaatggctctgctgtcatgtgacagatagagctggagctagggaatgaatgcaaagagaatttggcccatactagccctctgatacttaccattgttctctgtgccagggttcatgttagaactggcctgtgccgtgagtagttggtgagactgggggaaatgagtggtcttagacgtcactattggggactttaaatgagcacagcttctgtgaaggcgactgggccatgtccatcacagttagatttgcctatacccttggatcaggaaactctgcccccaggtgtgtgccccacagatgtacttggccacagtgcaaaatgactcatgtcaaggttattccttgcatcagtgtttggattttgaaaggattggaaataacctgacagcccattaataggggctgttttaataaattatactatgctaaataatggcatatgtgcagatgttacaatcagagaagcattgccctatgaacagatacatatgtttgtctgtatatcgaaatctctatttccctagatagccttgttaatcaggtgggggaaaagcagggcgtacaacggtatttagttaaagctactttttttatgggacacatacaggattatctttagcatcatggtattaatggttggtgttgtcttgagaggtatggggaagaggtgagataaggagtccatgtttttatactttgactttgatttatagaatatatacatacattatcagttcagaaaattaaatttaataaagacatccccaaaaccagccaaccaaaaatgcatcaaccgttgaccactgggactagc

SEQ ID NO: 30557 - DNA, 1051 bp, Homo sapiens
tttgtcaaggccgtaaatggactttggggctgtacattaagagacctggcctgacttgatctggctaaacatggctttgggaccctcttgaagtttccagttgatattttttattcttttcaaaccaaatcactgcagtgaaaagaaaacaaaaaaaggagtttttaaatttatacaaaagtatgaaaaagaatgagaagttaggaaagtgtgaattatattttaagtaaggctttgtggctttgttgatcatggaaatctttttattaacacattagacaaattctttacatgccagtttgcattcacttaaacatttgtgggggtggtgtgtaaaatgtgcagcaatacctgctcctttttgggaaatccatttgttaaatagccctcagaatatgacagttttatagtaggattatgacttttttttgtttccatgtctgctaaaaaggctaacagaataggacaatttaatcacatgccattatgttcataggggtttgggaagctcagacatgtttctagaaaaggaatcgcgtacccagcttttccaagtttcttagcaaaattcgataattacttgatttggagatgtccccattcagccccttcttctgagggcatctggccttcctgagtgtggctgacatcactttcatgaccttggctctgttgaggtggttgtcagggaaggtgtgttgccagaactgtcctgtcactcttcgacagagagagacagagagacatttcctggactaatccatgtttccagccagatttatattatttacagggtattaggcaaggaccaggatttagccaggtgttgccctggagaattgtttcggacctcaagtcaaaaaaaggctgcatgctgactagcggaggaaacagctccccacgggccagcctagactctgtatcctggcatttgtcatcccagctggagttttttgaggcatcggagctagaataaagcaggagctcatcagaggctctcttttctcagtcgcctccatctttccagagactcagaggccaccagctgtgg

SEQ ID NO: 30558 - DNA, 1047 bp, Homo sapiens
tcctgccctgcttctcaatgcatcagggaaaatatcctaacatgtctggcgtgccctttaacttgacagagagggcagaggctgaggaagtttggtggtacgactgcacttggttaagcagccagtgctggcgaaacaggccttacttagcccaggcattctgactgccatttgaggactgtttttactgtaataatccatcactctggactttatgctctaggaatgaaaattgtatttactattggcctaagaaaaacatattgcaattcatatttgaagctgcttagcaaagatccctaacaccagccagaagtgatttggctattggaattacctgttttggagagtgattcctataactgcttccctatcatcatctgtaatggttgaagctatgtgtatacattcacacgtttacacacaaaacaagataatttctttactgggtcttagcaaaaagtctagaagaattttcaataaaactggatgcatatttatgattgtctgacttaaaatgtagactgtgtggcatgtatgaatttcactttggagggaacagagtcttgagcaagcacctcaaataaatacataggccattactctctgctatggcagctgaaactaagaaacagtgagagggctatgtggctgcttatgtgggaagatttaatttctgttgtaggatgctgaggaccttggaaattgaggcactgaagctgaagtggcaagggcaagtgtgaattgcatcagatctttttctctcagggtaatttcttcatatcccaggtaaggtagcatttggatttctagtctttatatttattggtggtgagtaattctccccaaaaatggagggggagaaactagtatgcaaatgatgacaaaatagaagaaatctatctcattttgcagtgttcttatcccatcataaaaattagttgatcagataaattgaagttttaacctgattccatttatttcctactagacgcattttggaaatctcagtttgtgttctgaagattttctagctagaaagtttta

SEQ ID NO: 30559 - DNA, 1053 bp, Homo sapiens
gtaataattaacaaagagattgctaggttacaaatgaacgataatgccgtattttaaaaatacagcattacatatctgtgcaaagtgatatatgttatgaaacattaatatccaaatgagagatttgaactgaatgatctccaaaatcctttctaatatgtcttttctggctttctaaaatatgagctctatgactattaatatattttgtgagatgtcaactgtgccatatttctgcaaacctcaaggagaggccacagcctatctttagtcttatgcaagtatattaactgaaccttgcatggtggactagaggttgctgattgtcttctattatttctccataatagaagccctgtttttctaggtgggcccatagctgcgaggaataaagaccagccttcaccctcccttgtagttagccatggtttaagtgtgcaacttctaggacatttcctcagtggaagacggtcatgtccttagtctgttcttcctccctgatagctggaatgtgaatacaatggctggatcttaagcagccatgatgggaccacgagattggtactatgtgccgaagatgggagagccacaagatagaagcagtctggcagctgtagatactcagatgtacagagtatttcttgcagaaaagtctgctactgagggaaggagttaggggctgagattcaatccaggctctttctcaagttgtgttcttagagaaaggtggggccttttactttccacaaaaggatcatatgtttgctaaaccatatacttgcagggctccttccaccaggagggctgcctttctgtcatttgttcagaggcgccacgtgagccttgatactgtgaaatgtcccaccatcccagacttccctacctctgaactgtattaatggtagagagaagttacaagttacaagaagtatcttgttttagctactcctgttttgatattttccattactggtacctgagtctaatcctgataaatatatcactgtctttttctttgcaagagtcactttggattttttgttcacaaacagc

SEQ ID NO: 30560 - DNA, 1100 bp, Homo sapiens
ttcattgcaaatgaccacagcactccctgagaaatcttccctttcatgtggcacatttaatcctgagggccagttctaacggtttggtaatgtcttatcatctgttttattcctttctggattccaattttaagtcagatcgagagaacaaggcctggcccagcaggagagttctctgatccttcggtcctatctgacttgggtatgataggtatgtggtatcaacaaagctgggtttttgcctcactggtatcaaataaggcactgctgagtgttagttggagaagagccagaagcttatgactggctgggatgagtggtagagaacaggccttccccacatatttaatctaacctctctagtttaaatatttccagtggatcatcatactctatgaccttgtgacataaatctgcacagagcggcagttcttatcttcagacttcagtcaagtttcattactgtggtttatgtgtagtggctttgttttggggcttccgcttatactgctgtctgcttgtttaccatctctttcaagcgaaagggtcttttgatttatgacttggtgggatccttttcagcattgatagagagatgtatgggttaatggttgaaaatacataggatttggttgttagagtatatctagagaaattgagctactttgagggaaatataatatcaaatctcacttgtactgataatttgtataatggaaatatactgccattaaatggataacacaaaaaaattgctaaatataattgtaagtaggcactttcctacctaggacatataagataaccacaaagccattttataatccattaaacactgctgatagaattatatcttctccaatgcatgccccctaaattgcctgtttcgatgcctgaagttttgccattaaggattattattattgtatttttgcatccctagaaattttctttgttggattgacagttcccttgagtttatgatttgttaagctgttccaacttattaagattgaattggccgggtgcggtggctcacgcctgtaatcccagcactttgggaggccgaggcgggcggatcacgaggtcaggagatccag

SEQ ID NO: 30561 - DNA, 1060 bp, Homo sapiens
gaggatccgtaaaggcattcatttgcataatttaattttctgcacagaagatattgaaaatcaatagcatgattcatagccataccatatcattgccacaccgcctttggttgtctgtctgagcttagaagagtacaaagagtattaaaattgattgaattttggtgtgctgactctgtatctttacttgggaaccacagactgtttctatttgcaaatcactgctccttgccaataaaatattaagttgcttaatatactctatatatactttttgactgctgttcaaataatagttttaaaagttggtttttaaaaaaaatcacagcatcgtcgattaaaatgcatttgaggagaggacttaaagtgttgtcttattttaaattatgtgagtgccagtaataatgataattagtcctcagacgcttttgttgtgcgaacatcatagagtgtacttaacaaacttagatggaatagccagcccactgcacacctagaccatatggtgtagcctaatgctgctaggctacaaacctgtacaatgtgttaccgtcctggatactgtaggtaattgtagcacagtggtaagtatctgtgtatctaaacatatccgaacacataaaaggtacagtaaaaaatactttattataatctcatgggaccagcatcatatatgcagtttttcattgactgaaattttatcatgtggcacattacttgattatgctcttacagataggggagggggagaggtcacacattactgacagagatggaacaaaagggaaaactaaatatagtcacctttaatgagtagtttatctagttaaaaaataaaatgtggtgctgaggttaaaagtcctgccctgttcatttctgaacaattgccttcctaaagaattgcttattggttactcagggccattttctttttgcttcatgtattaaatgcttgctgtttgtgataggtgggcagtggctagagagtcagtgaggttctgggtggtggttttgcctgtggcttatgtaaacaggtacataacatgcatagatacacaca

SEQ ID NO: 30562 - DNA, 1088 bp, Homo sapiens
ttttgagacagggtctcactctgttgcccaggctggagtggagtggcacaatcacggctcacttgagcctccctggctcacgctatcgtcccacctcagccagccaagtagctgggactacaggcgtgtgccaccacacactctaattttttttttttttttttttttttttttgagacagaatctcgctgtgtctcccaggctggagtgccgtggcgccatctcggctcactgcaagccccgcctcccaggttcacgccattctcctgcctcagctggggctacaggtgccgccacttcacccgtctaattttgtttttgtatttttagtagagacaggatttcaccgtgttagccaggatggcacacgcgctaatttttttattttttgtagagatagggtttcgccttgttacccaggctggcagagtttaaattttgtcaacagaattgattttttggtccccctggctttggttctaattttaaggtcctctgttaatcccttacttggtcctcaaccaccccccgaggcttccactttgtctaataccttcaggaaggaagaagaatctctctgactggccagtgtgcccatacctgaatgcatcactggggccacgagaatggttaaaagtgattgactggcttgaaccaaacaaggctcactcctagagctaacattggtggtggcgggttagctgtccaatgcgtgatacacagctagctggagtggggatatggttattacaaaacagatcctctacagcaaatttccactatgttgtcggacactaaaaagcactagggctgggtgcagtggctcacacctgccatcccaacactttgggaggaccaggtgagaagattgcatgagcccaggagtttaagatcagctacaaaaataaaaaatcagctgagcatagtggcatgcgctgatggtcccagctactcaagaggctaagttgggaggactgcttgaacccaggggttaaggttgcagtgaaccatgatcttgctactgcactccagcctgttcgacagagcaagaccctgtttcaaaaaaaaaacaaaaccaaaagcagtgt

SEQ ID NO: 30563 - DNA, 1050 bp, Homo sapiens
gatttggtgcatgtttttcaagtggacaagtggatacacggataaattaactcaagccagagtctgtccttgggaatttactaaggggagtcctgccatgaaattcagataaattagtgggtgatttgcaaaaggtttcactgttggatccctttaaataacaagctcccctggtgaacttaagatataattaaattcctaaaattacattttcatgtctatttttaagaatgtctgtacaggataaagcaaaatatacgtgcctgcagaattcagcttttgtcattagaagaatggaaggcactgtaggacctcaaatttaatgttaatattgttgtgttatttgcctctctcctaaagcctcctccaaaatctcttaagggaatcatttccttagagacattctcttcctaatagagacctccttcttcttcttctttttttttttcttttgagatggagtcttaccctgttgcccagatctcagctcactgcaacctccgcctgtcgccctgatctcagctcactgcaacctccgcctcctgggttcaagctattctcctgcctgcacctcctgagtgtctgggattacaggcatgtgccaccacgcccgactaatttttgtatttttagtagagttggggtttcgccctgttagcaaggctggtctcgaactcctgacctcaagtgatctgcctgtcttggcctcccaaagtgctggggttacaggcatgagccactgcgcccagccctaatagagaccttctgatcggaaggaaccacaccactgaggaggaatcagccttgagagtcttcctccatgtctcagctcaaaggctccctgtgccttggtgcttagcctgacccatttctgcctaaactcctcagtctcccctttatttatttttaaaattaatgtttatcttttctacatatccctattaatcttacagttttaaagtagaatttctttacttatttgtttaccacacttactaattgtctactgtgtgccaggtgttgtgctaaatgtgaagggccagagaagct

SEQ ID NO: 30564 - DNA, 1039 bp, Homo sapiens
ttacctgaacatccaccaaaatggaggaggttgaactacaggatgtattaaaataatatgggtaatatggtcccattaatgaataaagctgaagaatccagagactacacccaaaagttaattgcggttatcattgagaaatgagggatactaccttttaatacttatatttctataatattttaatattttatagaagcatatctagaatatttcaatttcttctaccagtagattcataattttttttaatgacctttttattttagagtagatggctaaatggtatcaaattcaggcagttttctttgtaacaattttgagggggagaaaaagaaaaaaacctaaaagggaagccagaaggaaagcaaaaacctttttgtctctttaattggctgtatctaaattttttaggtgaaacattgtcagtggcatttcatttttttataaaatgctgatatgaaccttgcagaaattaatgaactgatattgacttagtttgaaatgaacatcaagatttattgagcaaagcagtaaatattgacccagccaaagataaggtcaatatttactttgacatagcataaatcctaatattcattaatgtataaatttattgtgtcaacacaaggcatacagaagttgtatataaatatttttttcatatctgcgatgaatcagagtcaaacatcttttttcttggttataaatttaaaaggacaatgttctcttctttgaaactaccttctttggggagaggggtgtgcgcgtgggtggaaggacatgattaatttaaaggttcaaaggaaaaatatacctagctgaatacatgtgttataattagagcacagtgatttgcatgtgctctgtgatttacttaagggctaccagttttcctttctaacctaacaaaacgttctctttcattacatctgatttgattcataaagcccacccacttcttttttctttctttttttccattttttgagacaaggtctcactctgtcacccaggctgaagtgcctggtactgacta

SEQ ID NO: 30565 - DNA, 1755 bp, Homo sapiens
aactacttacgtagaattttgtttggtaaataacatattgttggtgtatatcatactttataatactttattggctgaaatttcccatgttgaaattatcttagtttattattattatttttgagccagagtttcactgtgttgcccaggctggagtgaagtggcacaatcttagttcactgcaacctctgcctcctgggttcaaacaattctcttgtctcagcctcctgagtagctgggactacaggcgtgcaccaccacgtctagctaatttttgtatattttagtagagacggggtttcaccatattggccaggctggtctcgaactcccgacctcaggtgatccgcccacctcagcctcccaaagtgccaccacgctcggcttcatgttgaaattatcaatttgagttgaactctcattctttatcttgtgccttctcttggtggggtggtcttggtagcagtaagaagaacgtaaggaggacccatttcactggattgtgaacttttagaattgccaatatgtagttggaataagtgtctaatatatgcttaaagactgaattttctcgctgttcatttaagcgaagaaagtaactcagtcacaagcttaagtataatcttgtccctatgcaatagtcttatatgatcctgttgtgctcagtccacctggcatgttctttgagtgtaaagtggtggtgttagtttcagtgtttggctgatcttgaaatgaccatcacttctctctctcagctggtaatctcctatgaccctgtttgagatcagctacctgaagggtggttatcttcttggttgtctttcttgctattaaaacttaactgtcctatgtttcgtttactttaaggcccattttctgttatgtaactgataacttgtgtaggttaaaaacttatcagtggtgtgtatataacatagaactttgccttcttgagaaatgctttctaataacttcaggaattctcacttttcattcatgtcactatagtatataataatgttttccactgcgtgtagtggctcacacctgtaatctcaacactttggaaggctgaggtgggaggatcacttgagccgaggagttcgagaccagcttgggaaacaaagtgaggacctgtctctacaaaaaaattaaaaaattagctgggcatggtagctcacgcctgtaagtcccagctactcggaaggctgaggtgggaggatcgcctgaacccagtcaaggctggagtgaaccctgatcacaccactgcattcccagcctgcgtggcagagtgagaccctgtctcaaaaataataataataagaatactaacaatgtattccttgagtgtagtattcattggcatttttatgtcatgtgaaaaatgactctatgactctcctgtgatacaaatatttgactttcacataataaagtcatttcttcttgaggttttttttttttaaatcaaggagaaagtgagttttgtactaataggtctttaacatctctctgtcacttgctcatacctctttttatcaagaagagataggactgacctcagtctgctgggagagtatcttagaatttgatctcgtggatttcattataccctggtacccttcatgtctggcaagccatgttagttttccgttttgatgtgttacatttcctattaagtcatatttgagattttataaaaagtgggccagtttaaagaaaaattttatctaagcagtagtacagctggctttc

SEQ ID NO: 30566 - DNA, 1033 bp, Homo sapiens
ttgcactccagcctgggcaacagagtgagactccgcctcaaaacaaagaaacaaacaaacaaacaaacaaaccgtcatcctgactggcatggcgtggtatctcactgtagttttgatttctgcaacccatttcttgaattgagttgatcttgagagtttccttggacacgggaagccacttaatccagatttcctatttctgttgatccacattcttccagcttgaaagcctttttctgggggaggaaaacaaccttcttcttaaagctgcatgaaattttgctgctcccaaaggcatcatttagtagctctgccccaattattgttggccacttttcctcctggaaactgtttttctctgtcccacccttccccctagttccaaatgttaggctgatgttcttctttttagcagagtgtgcatgccattagtacactgagtattgattggtcattgagagattttagcaggaaaatgaaatatgaagctcttcttggctgttggactagcacctgcaaagatgagcgaaggcatttttagtgtgtttctggctctggggctcactgtgataatgggaggtattttcttctcgctgttgataagtacatggtccacactctcctcttggggagtgattttgacactttttgatggtcctatggcttttacattcttataccatttcctaatgagttatcttttctctcaccatctactagggtgtgaaaagggagtttcaacactcaaggccaattgagctgcatacctgctgtgccagaaagaacgagttaagatttgcttctggctgggcatggcggctcatgcactttgggaggctgaggcgggtggatcacctgaggtcaatagttcgagaccagcctggccaacgtggtgaaacccgtctctactaaaaatacaaaaagtagccgggtgtagtggtgggtgcctgtaatcccagctacttgggaggctgaggcaggagagacgcttgaacccaggaggtggaggttgaagtgagccgagatcatgccc

SEQ ID NO: 30567 - DNA, 1046 bp, Homo sapiens
caggtagacctccctgttccttttggaggtcttgagaagttgacctagggtatattttctgagccttgtttttaccaaggttctgaatctttggagaaatacagtgagtggagcgtagaagtgaggaggcatgagggcatcctcataccagtcttcattcattgagtcattcagtaaaagtgtttatcaagcacaagccaggtggcaaactcagttcgagattagggctaactacaacagagaacaaaacatacacagttctattcctacctggtggaggtggacagagcagcatatacaaagtaacatgtagtatcatcacatcattctgtgaaataaagtgtaaagtgaggtggtgcctagagagggatttaggggagagagttgttattttagcctgggaagacctctctgatcaggtgatacttgagcagacatctgaacacagagggactgagccttgtggctatgtgaggtaagcattgcaggtagagggaagcgggggagataatagcacttggaaaggttcaatgttataccttaaactactctgtgaattttaattaggcctccttctagaaccttctggccctgtattcttgcttaggataaattttgcattgttctagagaagtagttctcaagtggggactctttcctttttgtggaatatctgacacagtctgcagacattttttggttgtgacaattggagatggttgggtggccaactggcatttagtgggtagaggaacaagatgctgttgaacatcctacaatgtacagaacagcccccacaataaagaattatctggacccaaatgccaatagtgccaagattgacgaaccctaaactgaaggctcaccagaatccatcgtttttacacagttggtctccatgctgctgtgaggttctacctttctagccagtccttaattgaatgagtacgtggcacaaacacagcaaggtgtgttgtgcacagtggctaaggtattagagaataaagtgagtgtcatggtgttcaatcatctttggagattaaaga

SEQ ID NO: 30568 - DNA, 1046 bp, Homo sapiens
agtgtagatagaccatatgttattcaaacatttccttcatgatggacattcactttgtatcaagctttttcacactaccaaagcactgcagtatctatcctcatgtgctggtgcgtttatttttgtaggagagatggtcaaaaatagggttgctagatcagagaatatgctgtaactttttcccgtgtccttcagtatggggattttcagatttgattatttctaccacaacgaatgggagaaatgagtggaactccataataatatagactgaaaataagtgaattgatcaacaatgaaggaattgcttttagaggcaacatttgaaaagcaagaaagacaagataacatttgaaacattagatgttggtttgctgaacttaaaacaaaacatgcaggtgtctatcttaggaaatatgtgtgttatcggctggtgtagggtagggtggtggtaggtttgcagaggggttgaatgtatgcaataaattatttggaagagtgtgttattgatgcagtcaggtggaaattgttcagaaaaaaagtgacaaagaccatacaatgatagttaattactaattagaaatttagaagatgaaattttaccaggtagaatatttgagaaataaaagtgatctgttgcttgagctgaagaggaagaggaaagataaacgcctaactacagaccattggtagcaatgtaataataataaaagattccaatttgatagaaagaagtggtgaaaactttcagggatgctgtggatttggaagatcgatacatgtggccaaaataaaagacttttgggattggacatggttattggataaataataatgtattgagcatttcttttgtgtaaaagtgttttaggttagtaatgtcttttaattcctcctatcagtcctaagaggagagtatgattactgctgttattatatagctgtgaaaattgaggttcataaagaacttgtccaaagctcactgctgtatcctgagatctcaaaaaagagcctaggatgctgtgtatgcttagggaaaaaaaatt

SEQ ID NO: 30569 - DNA, 1022 bp, Homo sapiens
cttgcctcaagcaatcctcctgcctcagcctcctaaaatactgggattacaggcatgagccagcacacccagctcagtttggttgagtattccatttgtaattcactttttaaaatatatttcaacatggcaagaccctgtctccactaaaaataaaaattagttggacatggtagcatgtgcctatagtcctagctaattgggaggctgcggtgggaggattgcttgagcccaggaggttgaggcagcaatgagctgtgtttgcaccactgcactccaacctgggtgacagagtgagacccgtgtcaaaagaaaaaagtgtatttattgattatctgcttcatgccaagcattcctaggaactaaaatacttaaagagtgttcattgtatttagggttgagtagatatagatgccagttcacacagtatcaccatgtgataactacaataatgcagaaatgcattggttgctataggaaccagctataatgtgtcctagggtgtggcttggtggacagggaagatgtctgtgtgtctgggtgatatgtgtgctgtggttgaggagggttgagatggtgtgtgctgcgggttgagattgacgttgagttggggtgggagtggggagctggcagcagcatgtttggtgcagtagagaaagtatgaacaaggggtggaagccaggactagcatagctcatgctgggtggagggccacagtgaggtcctaagccctggaaggaatgtgaaggcaggcactggagacagatgaacttgggttgcatatcggggccttgtcgtggagagccttcatgccaagttttggactctaaagtggagacatgacagggatctgtgcagtgattgactgagttaattggaggtgctagctggatgtactgttggaaaagttcatctggccattgggcatttgaacctgagcatgggatggggtcagaggtttgggattagcttagatgactgaaggaaaattatagagcaatatcccctgagaaacaccaata

SEQ ID NO: 30570 - DNA, 1121 bp, Homo sapiens
atatcgtctccagtggtgtctttttttcttgaagatggctcccgctatctcagacaaacttgtgagtttgtctgaggaaaataaaggatttgtagcagtattcaaaatgttcccagtttgacagtagctcccagttagagaggctcctgctgcttgtgtctacctgtcctcaaaggacacacggccaacttctttccttttcccagtttaaaagtgatttactcccatggttgagactggttttcagcatcaacgtgtgctgcatggcgtcttctaagtatcaaagcagagattcacttttcatttctgggtatttggaagatgatcaggtgcctaggactattagatgtataataaatatgtttcacttctcaaccagagtacacagggttacagagggaactaattttattgagttatcaaaatattaaaatttgtgattggcaatgcgtgaacattttattaacacattacaagatctactagcacgtataacaactatcataatattaaagttgtcatgaatgcctgtgacattttgagatacctgcagcaactgtaatgtgagtgatttctcacaatgacaaattctcaaatattgctaatagtactgtggattttcctacattggtaaattgaaggaattgctaaatgctgaattcagcaaccagtttgagattgttgaaaataaagattgtttctttttcaatgcaagttcacagatcactggagttctagctacagtttgttctagaccagaggttgcagatatttttgtcctataaagagacacatggttaatatttttggctttgtgagttgtatagttttcgttgtagctgttcagctctgctacatgaaagcaaccatagaccataccttaacaagtggtcacttttgagtaccaataaaactttatttagaaataacagagggctggatttggtcctagtttgctgaacccttttctagatgaaggctcctcttgccaagactggctccctaccttggctgacaaattctcactttgggacttagtcattgttgctgctctctgttattttgcatgtcttttctcatgtttaggtgctgtgtcttaatacttttttcttacatttaat

SEQ ID NO: 30571 - DNA, 1055 bp, Homo sapiens
taagcacagagtacttcgggaacaccatcttgtcttcatcactatcttgggcatctatttattacaaacttggaattgaacaaaaatgttttagtccagtggtttggattaaaatcaaagttcataacaaaactcagaccatgttctattttactgaaaacatcaatagtgagtgtactagagcttttggagttagaaaaagaaccatggaaagcagagttgctgctgatgtgttttgcttcttggctaagtttgtgtataagtttatagatgtatactttccctatgtatacacatgaggaagtactaaagcagaactttatagctatttactttacccttggtttcacaaatagcttcactgaaacattacaagagaaattctcagtctcagaatccctttcatttcagaaattctttgacttctgtgatttttttttttttttggtttggtaatttttcctgaaattcagttattcactttgtgatttaattatttcatctaggaaaatatgtcgaataagtcattcatctctgacataggtaggtacaaggattgatttgttgatacttttttgaatatcaataagattaaagtatatataaaatctgagtttttgatctgttgtatgttagcaaggatatttgtaattaaaatgaattatcagtcagcacctcctttttccttttactgtggttaaggtaaagatgtcggttaacagtttaaaacaatagtctaatcaatggttgccgtgttgctaaattattaatgaaacagggaagaagtatggtataatttttattatttgacttgacttctgcacctgtttttatgtataattgatcctaagctattagagctgaagctttgagaatagttttgagaagcaagaaactgtcctttcttagtgggctggaaaaacaaagtcagcatttatctcaggtatttacaatgtattgtttcttagatttgtcatttaggcttactcccacagagtctgggaaataagtttctgttgcaacggtttcttgaggcatgctgttccagcctttga

SEQ ID NO: 30572 - DNA, 1022 bp, Homo sapiens
tagaggccaaggatgctgctgaacattctacaatgcactggactgtccccacaaaagaatgttctgtcctgaattgttgatagtgccaaggttaagaaaccctcccataagggatgttttctaggcttaaacagtggcctgtatgtgtctttctccttatttctttatttcaagaaaagaaaaacgctgccaaagcaaaagccatgcagtatgttcataataaattaccttttaaaacaaatcccaggcctactcttcccgaaaatgggaaagacaaaaaaaaaaaaaaaaaaaaatcaaagtgccccatggcacaagttatccactgatgacatttccctctgaggactgttttctgggttagggtaattaccacaacccagaaggtcatggagtctaagttaaagggcgtcactgattcagctctcagatgagccaccccactgggatgtatgatggtataaactgcaattaaatcttgtgctgtatttactgtgtgattggaaggacagaagggagatttccctttagtcattcttacctagagcaaaactcatgtttttttagtgtaatgtgatttcttgagaatggtagatgttagtgaagtggggcagggagatggatttacaaatcttggagtttgcaaaatatgacttgaccttttgttcttatgttgtgggctgtgttttctattaagctctcgatcatattctctctttgccatttaagaaaaatacagcacaaacctctgtcagattttagtatatggtgacctaatttggtgggatgattgctaaagttctggaacaggccctttgtagctgatttttgttgaattgataagcatcgaatatactaaatataattttttgtgcctaggtctcttccaaaacttgcataccatttttagcctgaactcagtgttatcattttggtcttttaaagtggagggagggggagagggagaatccaattatagcaagcctgacttgattgaatgatcttagaatgaaccttgtggg

SEQ ID NO: 30573 - DNA, 1050 bp, Homo sapiens
agaaaataatatagttattctgtattaatatgaaggggaatagaaagacataaacttgaaacataaatgtggaccagataattaaggcatttgaatcctgaactaaggagcttagattttattcacttgacagttgagagccacggaagctttttgagcgggtgcacagctattgaagctctgtgctctcttgatttcaaggtgattaagcagaacagttttcccccagctcctgtatcagggaggcagagctttcccagaagtcccattgcatacttcacctcaggtgtgttcttggaattgtggccatgcccaccttatagctgcaatggggggctgggaaactgtttagcctgttgagcctctgtagctggaagtgggctgtgcctgcacagcctaaatggcttttggtctgtggccaggaagccagtgatacttgcaactgtgagcataatagcatgttggaggccaaagtgtactctacagggagtgcaggataaaataagaacaatacgactggtacagagaatagaggaaagggtagaggtttgtatgaaagctggcaaattcagttctagaccaaaaatgagtttagggtgcaggtaggatatccaggaagaagtgatgcatgggcaggagtaatttaggattagagtgcaggactgaaagtattgatcagtgaatcattgatttggaagatgacagtaaaaccctaagaatctgaggtaaggaaggatgagagaggaatggacaagaaccagataacaagcttaaaggaatgatttctttttaggtgccctgtataagcaacgacagtgcgaagggataccttatttagcattgtttaaacctctttatctgctccataggcatatgacctcaataaaggcagcagtgtgtttatgatgcagacccagctagaagacaagttcccaggtctggctacccacccctactcttggccacccaactcctacctcttttggacagatttctcttctcagctctgtctgtgtaatgcaattgtccctacaatggcctttgacagag

SEQ ID NO: 30574 - DNA, 1056 bp, Homo sapiens
gtctacattttgcagtattctcctcagcatagatttctccttttaatggctacttcttcagctttatgagtttaactttttcaataataaaaacagcacaaaacatattaatcatattagttatgatcagttctcatttgtctgctcttcttgttttctttttttttttgagaccgagtctggctctgttgcccaggctggagtgcagtggcgtgatcttggctcactgcaagctccgccgcctgggttcatgcccttctcctgcctcagcctcccctgtagctgggactacaggcgcctgccacctcgcctggctacttttttgtatttttagtagagacggggttttaccgtgttagccaggatggtctctatctcctgacctcgtgatccacccgcctcggcctcccaaagtgttgggattacaggcgtgagccaccgcgcactgccgtctgctcttcttaagttgacagaaaaggagttttacagtttttacatttcttaatcctttatgggaaatagtatttctttcgttttgcatgccagagaactgaggcttaaatgataagtaatgtgctgtgacttataaagctaataaaggaaggctaggatgaccctaagcatagaagacagaggcaaaagaagaggggaaatatgaaagttaaagagatataaacagtagagggtaaggggtcgtgaggtgagtgtatgaatagcagtatgagcgatgacaatactgaatatgataatgattgagaacatccgcccaagatgcatgctaagcgctttactagtattatatcactggatttcacagcacctttatgtggtagtcacagttattttctccattttacagatgagtaaacagagctgttagaatattatgtaatgtgcactgggcaggctctgccaagtgcgtgcagaagcataagctagcaatttaactgcctctcaaatgcatcatagtaatctatcttcctccttcatcatcagggattaagtaactgcaccatggacaatgtaagtaacttgcctaagtaattagtttcagtc

SEQ ID NO: 30575 - DNA, 1033 bp, Homo sapiens
tatttttagctctccatctccaggcgtatggtagccttacttatcccgccctcttctaagttgagcatgactctcaaactcaatcaggcaactagaatgagaatatcgatatgaatgaggatatagacgtttgttgcctttagttggaatctttcagagtaagggcatgctttgctgtgttcttctatcctctatagtcagggaagtgtgaaggtggagctaccctctcagcctgggtaccccagtaagggagatgttgggcctagtcccctaagtggtgcatttgcagcatgagcaagaaaacatcttgctgttgtaagattctatttggaggactggtttgcggcataacgtagttcacccagagaagtatgtggtaaatatagggctttgatttttagtctttcatgtaatcagatgcactttcggagaagggtttcaatctcacttccaacctttgtataccttgttcctaatcacaccccatcatactataggaaaggtggaaggtggacagaatctgggatcccagcctcactcatggatccaaggtcagaaatcatctcatgtctttctgccagtgaatgtccttctcgtgacctcatgatattttgtgacatccctgatctgtccttcagtccatggaaatgcccctggctgtagtcatatttctctgtctatctaaccatgtgtctatctatattttcatatttatctggttggaagcatatatatatatctttcaaatactgggaaggcccaatattttgcctcattaggttatacatacatgataaacagcatgatatacattttaatatcaagtagataaaatacaagcttttctaagctataggtcatcactggtgaccctatcctgatacagttactttagagatctaaagagattagatattatattttcttattatatagtaccttaaatatgtctataacagataataaaatagtgcattagctcatatatactacctaaagagagacacttaatcttactgtatttatttggaaa

SEQ ID NO: 30576 - DNA, 1028 bp, Homo sapiens
cattcattctgttgaggacagcatccatctggtatcttcttactttgttaattcagttattctatctacaattgtttctcacattgatgacttaggaatttcaggaatggatgagttaggaaaatgccaatgaccatggaaatagagaaaaaggtataccaaattttgggtgctttttgagttttctgtcttatgggtaaatgatatttttgtgcctttttctccattgcaaaaaggaaatagtttttcataagaattgctggttcaaactgtatatagataaacacacacataggatagatattgatgggtggtaaaagttttctaattggttcagatgagaagatttaaaaattacttaaaagagaataaacaacatcttgtctataactattctaggtggtttgtttttctaaaaataatgtaatattttaaaaatgtttctagatgatttcatttatacatggatttatacatttgtatcttataaatatcccagaaagagtcaatcaaaaaattatatctgccaaaataagtgtaatcatgttgttcagcctaacaagaagggggtgctttgcatgcacaattccatgcaaatgaattcacatttccatttagctgtaatgggcacattctccccacagctgtgcttttcgttgtgacatggagatagaagctccactttcaaaattattggatttggaaatggagttagaatattgaatttggtgcctaaaataataactatctctttttaaaaacattattatatgctcaaaaccccttccctggactaagtcatttaattctcataaccctatgagataggtactgtgatcatcttcagaacagagttttggagcatagagagtgggtaagcatctggggcagggtcatacaactgggaagaaactgacctggacttgaacccaggctttctggctttggaactagctctgttaagtgctgtgtgtacagccttcagggtatcaggtccttatctgacattatctcaccctcttccccca

SEQ ID NO: 30577 - DNA, 1035 bp, Homo sapiens
ccctgcctcccagaacctgcggccctcctccatggccaaggagcaattgcatgtggagccataccagcagcccccattgagctgacttggttgcctgaagtgagaatggttaaatgggtaattgatggaagcaaaaagccaagggaaggaggtacccgctgggtaactggttagtgtaagaggctatgtgtgtgtagctgaagttgatcaccattccaaggcgagtcttttcccctctcttctttccctcctttttatttaacaataataataactttattgattcattgctttttttgaggcatgcattaagcccttcacatttattaacttgaaaaaataggggagttgagggcccagaaaggtaaaatgaagtacccaaagtcacacattttagtgagtggcaaaaatgggatctcagggcatggttcctatctcttgacaatctaagctcttcaccctgtacctcttttccatctctgcagccctctctccctctcttctttatagatactctgagcgtttatcttgcatccagttagcaatgcagtttcagagatagaggacataggacgtcccttacggaactcaaaattgagtttgcagagacaaccttaacctttgtaaggtgagggaagcctagagtctcatgtggtgtgtggggcccagggatgcgtttgtaaagcttgggtgcagtggtctttcttccacagggagtctgagaccttggtctgcttacctttctctagggcacccagggcatgagaaggtggtggtgttccttataaccttggccatccagtagataaagttcaacaagtaggattggttcagtctgatacctgtagtcccctattttacataagcccctccccacattctcccttaaacacatgaagaagtgcagaggagaagggagagggcatgtcttgagacccagttatgtgaaggctgtggattgagagtttacagtgttagtgatctcttgtcatcctcacaacagctctatgcagtggaccctgttagatcttatat

SEQ ID NO: 30578 - DNA, 1044 bp, Homo sapiens
attttctatttctgttctaggaaaatgggttgttttttttgtttgtttgtttgttgtttttgagaggggctcttcctctgtcgcccaggctggagtgcagtggtgcaatctaggctcactgcaagctccacctcccgggttcacgccattttcctgcctcagcctcccgagtagctgggactggcccctgccactatgcgcggctaatttttttgtatttttagtagagacggggtttcaccgtgttagccaggatggtctcgatctcctgaccttgcgatccgcccgccttggcctctcaaagtgctgggattacacgcttgagccacagtacccagccaaaaaaaggtattttcttacataacaaaagtatagttatctgaattgaggagttcagtgttggtatgattttattctctcaatccttattctaagtttcaatctcagcctttgtctctttgttcctattataggagatttcttcccaagccagatcatacattgcattttgttgtcatgtctttttagtctctcttaatctggaactgttcctgagtctgtctttgaatcttatgaaattgacattttgaagagtatatggcagttattttgcagaatgtctctcaaattaggtttccctgatacttctttgtgatttgatttgggtcatgcaggaataattattagtgatattgtgtttttctcagtgcatatcaggaggcagtggatgccagtttataaaatttctcaactgtaaagctaataatgttttctcaagttaaagtgacttgtaagatgatactttgaatctgtgtaaataccatatttttcatcgaacctttacccattaacttgaatatactttgataattgttgctattactattatggttgccaagtggtggttttctaactctgtgatttctatatatgtatttctgtacctttgttgtcattctactggaaagaagcactttatttcctcctctagttatttattcgtttgactttatcattggggctcatgtattcttgccttattcg

SEQ ID NO: 30579 - DNA, 1004 bp, Homo sapiens
cagaaaattcaaagatcagctactgagaattttagatttcctgttgtaagaggtcaaacaaatggtacaagttacataagcgtttcttcgatgataaaggagctgttttctctagataggtgtacccttttcagctagctaatatgaatctgtgtcaacacaggttttaattttttaatttttatgtattcattttttgagatagggtctcactctgtttcccaggttagagtgcaatgctgtgatcatggctcactgcagccttaacttcttggggccaagcaatcctcccacgtcagtcccccagttagccaggaccacaggtgcaccaccacacctgactaatttttaaaaatttttttgtagcaatacagtctcactgtgtttcctaggctcgtcttgagctcctgggctcaagcagttctcttgcctcagcctcccaaaatgctcaagcagttatcttgcctcagcctcccaaaatgctgggtttacagttatgagccatggcatctgacctcaactgaagttttaaaatctgtaggactatacagtttaaacctcaagggtagcaaagtaataatataaaaactacaatacatgaggtttgttagagaaatcgaattgctaatattgctgccatggtatttgtatacaataatataccaagtgagatttttatcgctgataaatattaaagtctgttccaaaatcatttaaacacttttttaaaatttggacatcaggttcagagagtttagtgatcatactcttcatggcatactgtcctccttggtttgtgaaggggctccttgtggtttgttttgctttacttcatttttctctttcactcatattccattcttttttccccaaagatgctgattagtagtatttttaattcacttatttttgtgtgatatatctcattatgctgttatgcattttaaatcaatgccaattttcaaagtctgttcacatgccttacgtacctcttcattgctttt

SEQ ID NO: 30580 - DNA, 1044 bp, Homo sapiens
tacgtgacatgactgtccccctagaaaggtattgctcattaatcttgtctttatgaataactagtcatacaatttgtgagttatttggagccaacatgcaaggtaaatcttacttgttagccttgaactagaactcaagttgccagtcaccttgcccagtgctctttgtactctgttgtatgacctttttaatccttggatgattgtttctattatgtctcgatggaaagtcaggattctaaaagaacatattagtcaaaatgttgactatttgggggtgtacctaactttaaggttgaaaacttcaggtctggaacgaactcatctccattttataaacacttaagatgtttggcattggctagtaagaattgtgataactttgttagtatctcagatacttgttgaagccagtttcctgttgtatctatgagaagcaggaataaagctggtacaactttaagtcagcctagttaggtttggggtgaataaatgatcccaattattggtagaaatttttaatgaatgtttggatgtggggtggattcaacttgaaagatataacttttaaatcccagatacacctaaacatgcataggtcaaagacttttaagtctttaaaggaccttcagaatcttgcagtgtgtggatggcatgcatattcatggtttgcactctaataatgtcatattatacacccatgcgggcatcactaatcagtcaactccttttgagcctttactcagcctagaggtctgtggctcagaactaaaaggtagccattattgccatctttactctttttaataccctccttttccagaacagtaaaacaggctccagagaagctttttaccatcaggattagagtctgggacctccagtttaggcattggtactgaatgaaattttacctgaaatagttttaacatccagtcctaaaatagacaccctgggaaattagacagataatggtattaaaaaatgaacaaagtagttagtttctatttctggtgttattgtctgatattacttctggtatta

SEQ ID NO: 30581 - DNA, 1052 bp, Homo sapiens
ttaaaaagaaaaatcttgctctctagatgattttgaccatcaagcagttttaggagacactgattcagagcgactttttctgtcattgtttccatttttttttttaaatctgttaaatggataagtaattctgagatcattctctggaaagtatcatgatttagggccaactggtgctctgagagcattctgcagctagaatgaactaatttattcaggcgggtgtgttcaacatattttttcataggtacatgaggacataattcatatcatggtaatggtgaactttattagaagtaacagaaaaactccatttggttttgaaactcactttgttttcctctcttctcatttgtttcacacagtcgccatccttctgaaagacgactattttgtcagtggagctggtctacctggcagattcaaagctgagaaggtggaatttcactggggccacagcaatggctcagcgggctctgaacacagcatcaatggcaggaggtttcctgttgaggtgagagaaagtcaagatctcaacgtgtagctgtgcttcggtctttatgttaatcagatgctgtgcccttaccctcagtcattttgcaaatcacagctgtacagtacctaacttcctctctctggaaaccctttatccatagtatggcaggtgggtatccatccttgtttctcacctttgtttaactggagaaacacagaagccacaggcatcatggtttgagtagactcactactggttgatgatgttcatcatgtgtttcatttgacacagtttcttttcactgtctgttcccatttttgaaaggtgacattttgtacgaaactgggttgacttcattttcacccttaagaaaatagaaaagttggcaacatgaagaggagtctctctcagaaccttctcttggtagcaaagttttaagttttttttgctctcactggctgttgaaaaagaggctgtggtggtatgagtcactgttaattttgttaggattgatggtgacattttgcttctgctgtgtcagtcttctcagtgatcc

SEQ ID NO: 30582 - DNA, 1031 bp, Homo sapiens
gtattgtatgcagtattcaggatttttgctaaacgtgtggattatctctgctcttgcagcagggcttgggtagctatgggaaatgatgggtatattaatatgtttcactataatcatcattttactatctagattatgtacctcataatgttgtataccttaaaataaaatttgttttaaaaatacacatatagtagttcagttttatattggaatctgatttatttattgaaaaggcttcacttagatgctgtacaggtttttttttttcttcttctttataagctttaacttttttcctcttattcttttttgcaacatttgttcctggagctttgaacactattcttctcagaatccacttccaagctcgggaactcaaataaagctggctggggagacctttgtgcactgaaggtagagacttcaggccgccagatcagatgtattgtaagttcaggtcaagaggatttatgggcctgtgtatcagcaacaccaccaactgcctttttctcttgtcctgtcaaaatttgagcgggaaggtttcaagccatcttaaatctaaagcctttagcaagttctttagtgccaccgtcactcagaagggacagtcagaaagatttataaggaatagaagggagtcaagtttgaaagaaagtctatttcctctcttccctttaaatccctggcatagaatttcattgcaccccccctttaatggaatgggaagaaagtttcaaaagcttctcagtccggattgtttggcctggcgctgtattgagcacggatactgctctggatacgtttactgtgatggatggagaccagctgggcaaatttaccaaaaccctatcttatttaaaaatataaatttcatctcttgagtgttggaggatgtcttagcaagacagggtactttaaaactcaggttagtatgtggaagatatttaggttaatagtaaaataacttctaaatcccagctattaccacacagatagagcttcaactcctgaatctccctattaaaacc

SEQ ID NO: 30583 - DNA, 1078 bp, Homo sapiens
ttggggtgtgggagtgggtgttcagtgcacttccacaattcctgattactgcacaggtctcttctatacattgactgttcatcgtattttataaagagctttctttttttcctatataaccaaagcattgaaaatattaggctattaacataccaagaaatgcaatcaatcagctgattatcatctaatgttttaatgatcacatttttaatccaattatccatgtttgaatctttcagattttctttaattaaaaattgcctccttgcactgctatcagaagtaagaaattgaacagaatcagccagatataatttaatgttgaaaggaaactgcaaggataactgggccgcgctgggcttaatggttgaccatgacttgaaagcccttatacaaaatttcctaattgataagaaaaatttaatcatcttcagatataaaccctttgcattcaaataaggtatttctttttccaaataaatctcccctaactggttattcatattgtcattcaaaatgcttaaaaatgaaagaaagcgttgggtgaaatgtagactacttaatacagtgtgtatttaatataaaagtcatacattattcatttttgcaatttgaataactttgaatttagcatcgctgttcctcatctttttctttgatgaacaattaattattaaaatataatattgtctgcatacagcacccgggatccttgaaggtggaatacgagatgcatttcttttcaattcttttatctagtaatgcacagtacctgcttattatggtataatggaatgaatggtggtataaatagtttttcaaatatttttctcaactagtaagtggctgggacaggaatgttttgaattcaaatgactaattatgataaaagttggaggcagaatgcactgatcaggatgggcatggagtcacactgcccttttatagcaagacttatttaacaagcactatgcatgcttactgtgtcaagcgctctcctaagctctcacctgatgttaactcatttgagtcatactcagaacctccttgtaatgtcagtgttattatcccattttac

SEQ ID NO: 30584 - DNA, 1045 bp, Homo sapiens
aggagccggacaacacatggagatggttgcaggcaacatattcatgatcagtcatagaagatgattagctttcagtccagttaactaggatttgttttcttctagaatagtgcttctcagatgatggttctttgcccataggcaactaacccaacccttcctttccaggactgtttgcatcttgtaggttaaaataaggcactacctatgattttccccagcttgaattttacttaagtgcttgtagggggtgctatcaaaaaggcaataaataagtctgactgcatctactttgtttacctttagatgtgtgattttttttttttttttttttttttctgacagtaagctggagtggacagaaaaggtttaattgcatgaccctttttaaccaaaggtatctgtgagaaacagtagagcagctctttgaaattaagactgtgtgctttggaggcaaactgcctgggttccatttatggctttgttcttcggccaaattactcaagtactctactatttggtgcctcggttttctcctctgtaacatcatgatgataatactcccctcatggagtcacaataaagattaaatggtggaatatgtataaaatgcttagactagaatatgtataaagtgcacatcacaggaagtgctttggagatattaggcgttgttgttgttgttggttttgttgttgttgcaggtattaaatgatcaccagcctttaaagcaggactgtctggtagaagtaaaatcacatcatttaaaatgttgtagtaatcatgttaaaaaatgtaaagagaaacaagtgagattaattttagtagtataatttatttaatcaaatgtatccacaatattatcactgcaaatgtagggctagccatatttctaatggaatagccacgtgtggctactggctgtcacagctgtaaggtttatctcaaggccacgacaactggtgagtcacttaattcagaacgtttctatttcaacacatgacgtgcagtgcatgtgaatgaaggaggttttttaatgatgggg

SEQ ID NO: 30585 - DNA, 1073 bp, Homo sapiens
ccttcacttcttgggttaaagtgatcttccaccttagcctcctgagtagctgggactataggtgtgcgccaccacacctggctaatttttgtgtttttttctagagccggggtttcaccatgttgtccaggttgctctcgaactcctggcctcgagcgatccacccaccatggcctcccaaagtgttaggattacaggcgtgagccaccacgcctgtccttgaagccggatctttaagggggctggggtgggggctggccagagatgcgtccatgaagaggaagatggcaagccatgaggctgacgatgtggaaggggaacatgtcacacaggacctgtggaccacgggaaagactaaggctgttactccatatacaaccaactttctgttcattcagcaagtattgattgagagcccactacgtgccaggcactgtcttagatgcaaggtaatgaaccagacaagacagaaaaggcgccagccttgtggagcttccacctagtgggggagatagataattacagatcgtcaatgaagtcaataatacaactccacgtactagtaagtgctgggaagaatctaagctctgtgaaggagcaggcctgtcagcctgtgcagaggggcagaattcagtgccaagaatacagtgcagttgataattgtgtttcaaaaaaaggcttggcctctccttactgtcgcaatctgggatcagcactgatccacgggccgaaacttactccccaccaccttttgtgtaaccatgagctaagaatggtttctatatttttaaacagttggagaaaaatcaaaagaatattttgcaacacatgaaaatcctatgaaattgaacttgtgtccatagatatttctgctggagcacagccacactcattcatgtttacatactatctgtgctgctttgtgcttcaaaggtggaatcagtagtggttacgagagaccatgtggcctgcaaagccgaaaatatttactatctggccctttacagaaaaaatgtttgccatcctctattctaggccctcctagtactctgcaaatgcctcctccaaatttg

SEQ ID NO: 30586 - DNA, 1023 bp, Homo sapiens
ccatatgatttagcagttctacttctgggtatacacttgacccttgaaaaacagtcttgaactgcttatatccacttatacacgagttttcttctgtctctgctacccctgagagagcaagaccaaccccttttcattctcccctcatcaacctactgaaagatgatgagaatgaagacctttatgatgacccacttccacttaatgaatagtaaatataaatatgttttcttccttaggattttctttataacatttttttctagcttactttattgtaagaatatagcatataatacaaataatatacaaatatgtgttaactatttatgttattggtgaggcttccggtcatcagtaggctattagcaggaaagcttttggagactcaaaagttatacatgaatttctgactattcagggattagcacccctaatgcctatgttgttggtgggttaactgtatgcccaaaggattgaaagcaggatctcaaagaggtatttgtagacccatgttcatggcaacattattgacaatagccaagaggtggaagcaacccaagtgttcatcaatgagtgaatggataaacaaaatgtggcatatagtacatacaatgaaataactgtttagcctgtaaaaggaacgaaatcctctcacatgctacaacatggatgaaccctgaggacattatgctaagtgcaatgagccagtcacaaaaagacaagtaatacatgattccacctatatctagcatagtcaaactcaaagaaacaaagtagaatggtggttgccagaggctgatgaaaggggaaatggggagttgtttaatggatatagagtttctgttttgcaagatgaaaaagttctggagatcagttgcgcatcagttgcacaacaatgtgaataactaaacatcactgaatgggacacttagaaatggttaagatggtaaattttgtgttatgtgtttttccactatttttttttaaagcagccaccttaattcacagatgtgggaggtt

SEQ ID NO: 30587 - DNA, 1029 bp, Homo sapiens
gcaagatcagaaagaaacactactgtgtctagagactgtaacacgggcctatagtcacatagcctggatttggagccacactccaccacactgtttatctgtgcagctgtggagcatgtgttcctaccagcagtgctgtcatctctaaggtgtgaatttgttttggggagatttttataaacttattttgtgtataaagcacagatttacatatacataaatagcattgtgcattcgtggtattaaaattggcactgggcaattgggggggcggagtctaaaagggcccctcagaggaggtgccaatgaaaaacaggttgagaaacactgctttagacaaagacttctccaccaacttcggtttcctcatctgcaaaatatagttaagaaatgggccacaagttcacgtgaggattcggtgcaagctatggaaaatgcttgtcctggtgcctggcacatggtgaatgtgaggtagtgttataccagatctgactttagggaaaaatggaaaatgtaactctgggtcctggtatgcctcaaatgaagtttttttttaataaggaaaatcaaatgtacagagctaaatgaattttgtcctttaaatgtcatcacattgtatagctgtacagagtttccaatatgtccattgcatacaacatgcttgaaaataacttttggaatttctttctagagttcattcttttgaaggatctcagttgtgcaaagtatttatcctagaaatagataaaactcatctgtttagagctaaatatagcataaatgtaggttaaccaactgagcagaaccactttgggccaaaaaaggaaaggggtgactataatgttaatgaaattggtttgggtgatgctcctaataggccttaaagtcaattccagaggaggacatccctaaataactgggttaaagacatgaccccactcccacccgcaaccccaggaaacaactctgaagcccagtggccagcctcattaattccaggttggctgtattagagtaagcttcattgat

SEQ ID NO: 30588 - DNA, 1065 bp, Homo sapiens
atgtcagtagtgctcaggttgagaagccctgctttagaggatagtattctctggttatcttcattaaccagatattaaccagatattggttatcttcattaaccaataatgattgttcattaacaatcagcactgagaattggttccaagctaacagagatcaaaaggacatgaagaaggtataggtcttgactataataaattcaaatgattttttttttagtttttttagataacatttatgctattgctgtttctctagtgtgtttttcacaattaccattttaattggtatttccaccttatgtgaaatcactaaactgttctttggctcaaactgtcttcctcttgtttttcaggaacaataccagttcatctataaagcaatgcttagcttggtcagcactaaagaaaatggaaatggtcccatgacagtagacaaaaatggtgctgttcttattgcagatgaatcagaccctgctgagagcatggagtccctagtgtgactggaatcctgaaagggcacttaatttgtaaacttctgaagactgagaacttttttgaggccttttttgccagactctaggttatacaataacccagttacttttttacactgataaaagttttgatatttattttttgccattttatgtcttaatggtatcctactgagcatttgcacctctgttcatttcacacagtgaaacgcaattttacctagtttgcactatatgatcagtgttactgcctataatcttatacaacagcaaaccctgatgtgacattccatgacgacatacatgctacttttttttagttcaatacagtgaaggtctttgttatgacagtgaatattgcttttattattattattgctgaagtggttgcattctactagcaggcaatgctgtacttttcttcagtcctcctctcctttttattttaggcactgttcaatactgtatgccttctgtattttaatggagtggatagcattgttttcttttacagactagcaggctactgggacctaaaaaggtctgttaatgtcatggccttgaa

SEQ ID NO: 30589 - DNA, 1035 bp, Homo sapiens
aacgttgccttgtgtgtagttgtttggagcacactgcaaattatattggcatctctttccaaaagtcactttgattcaacttcgatagctttctcgtaaatggcacgtttaggtggtgagaggtggatgaggaaacaggcaccagtgcagctgatttgacctccagtgggatagatacgattagcaccaggatcgtgtctcattttgaacccaggtttgttattttattcagccataccgttgttttccaattttcctgtcccccaagtagatcttgcatcttcatatccgggatgaagaagttgtgtaggataaacttggttgtttcactttccttactaaatttaggtacattctccctgttttcccccagttctttcaaagaggagaagttgcagatgcaaatgtattaaagtgaagtgtgtttaacctctagcaagaaatatgtacaattttagtcatattatgtgagaccagtgacttcaataataccattacagtgctctcaagaattagtgctcaagaacttgacttttgtcacaaagacaaaaattactttacatgaagattctgagatgtgacttgctctcccctaaggtatgaagtttccgactttgaaaaaatactgacctaaacgctggctgtaggtgggcatcatcagaccctgttcatttccttggttttaggagacagggcactctaagagaagaattgttttaaatcttaagtactacagattgtaaactgaaattgtcaattgattggggttcacaataccaagttgcattttggtggggatagttattgtttagaaagtaattgtcggccgggcgcggtggctcacgcctgtaatcccagcactttgggaggccgaggcgggaggatcacgaggtcaagagatcgagaccatcccggctaaaacggtgaaaccccgtctctactaaaaaaaaatacaaaaaattagccgggcgtagtggcgggcgcctgtagtcccagctacttgggaggctgaggcaggagaatggcgtgaacccg

SEQ ID NO: 30590 - DNA, 1030 bp, Homo sapiens
cggcatgttccatgatgcctggctaagttttttatttttatttttgtagagacatgatctcactatgttgcccaggctggtctcaaactgctgggctcaagcgatcctcccgcctcagcctcccaaagtgctgggattatgggtttgagccactgtgtccagcctgaaagttcttgactcaagtggtgggaaacacataatttgagcctttatgaactctaaaatctattttgtcagctacatgattttacttgcaattgcattgacacagatctattcattgaacatttaagaattgtcttttcatcatatcgtatatctcatatatatgagagaacatcttttagtaaactttacaagtggtcttctttttacatattaacatgttgatgaatgttaaagtagcaaagactcaagcccttaccatactaatgtttcttcttttcaagacagatctttatgggcagaaacacagaaatggaagtagcagattttaagaaaactgattcagactttgaacttgtatgaccttatatttattgatttatttgagtcataagatttctgggtttttttttttttgagaatatgaaagactagttaagaaaatttgtgtgtttatttgatatttgctttctgaaaatataaaaaattatgagagagctagctatatatggtctttattctgggtctgtgaaataatgtaaggaattttgtactatgcttttagagcaagagttatcctgggggtctgtgaccctccaagggttggtttcaagggattcctgaactccctgtagttgtgaccagaactttttgtgtatgtgtatttttctggaagagggtctgtagttgttttagaaaagagatccaggacttaaaaaaattagagacacatctttttattgaataaaatggaagttagaattcttttcttttctttcttcttttttcctttttcttttgaaacagggtctcactttgttgcccagtctggaatgcaattgcatgaaactggctcactgcatcc

SEQ ID NO: 30591 - DNA, 1032 bp, Homo sapiens
actgaacagaaaggcatttttagtgttctggctcatagctcctcttagctgctctaagaggagatatttaaggctcaattctctgtgtcctccactccgtaccctgtttattattattgtggtagttataactataaatcatttgcagatcgaagttagaaaagagaccatttgtcattacattaagacagtttaaaggaatcgcttgttcaaatttactagcttcctgaagctagtaaagatgtttatggtttccaagattccctgttaatatatttcaacactacaagacagtgaataacacatgttcagctattatagattatgaggaaagctagctcctagaaaagatttttcagtactataaatggcactaaactgaaaaatcagttgtcataataaacagcggtcctgatctgagagtaggcaggtttcttggtgtgtctgtgcttttagctaatggccagcaatgagtagctctcttttccataaatctggtatcaagtattaatcagctgtagactggaaagtttttatttgctagcatttgtagtggaggaaacaccagtctgttttatctgtctcttagccatataactgcatatgatatcatctgcatggcgttcttacagagagaaatagttgtattctttttcatttgtagtcggagtacttcagaatattaaaatagtgaactttgaccttgaagcatctaaattgtctcagttaagattgtgatgtataccagaaaaaatttacaccttaaattcaatttagcattcttgttttgcacattttgaatggtttttttaatttaagagcaaagtccatagaatgattgtactattgaaaaatcttaaatctcaaaagctaagaaaggtaatttagattttaagtttcaagaattacataaatttgggtcttaaggaaaaactgaaattcctgaatgcttacagaggtttttgtttaattttttttcgtgattacagaaatcataagtgtttgtagaaaactcagaaaattccacagata

SEQ ID NO: 30592 - DNA, 1044 bp, Homo sapiens
cctcagcatcacctcgtgcttgttgaacattaatgcacatgtaaggagcagtcaggtgatttggttacagatcgcccacacttaagaaacacctccatagatgagaatcagcgtggccgtgacagtgggcattgtccttgctgacagctcctgtgcgtgtctccttccttgtaagctcttcactaacgcgtaggtgcaggaacccccagagacccagaaagaccctcctgtagcagggacttttccccagttgcagcgtgtgggccaaatcttgcctgcatggtttttgcattgcattggttggaataaaaactcaaaagatttcatgacatgtgaaaattatatgagacttcagtgtcagtgtccataactaaattttattgaaacgtagtgacgggcattcatttacttgtctgtggctgcttgctgcatacagtgaacagcagagttgactacacacaacagagaccatatgacccaccaatcccaaaacacttactattggttctttacaggaaaagtttgctgaccactgttctgatgaattccttggttgataaaaggaaacccaatctgcagaatcgcagaatacagtcttattattcttgaactgtctattttgaaggggagaatcttcaaaataataaaatccgttagtcttaaaccaagagttcattcaatattaaagaaacatgttgagttagaaggaaataatggagagtagaaatggtttcacataagaaggttgctgtctttgtccacttttatcattcactatctttttttttaattattatactttaagttttagggtacatgtgcacaatgtgcaggtttgttacatatgtatacatgcgccatgttggtgtgctgcacccattaactcgtcatttagcattaggtatatctcctaatgctatccctcccccctccccccaccccacaacagtcccaggtgtgtgacttttttatggcatacacctggttgggagcagttcacatacagagcacgaatagcgctgttattgccccagcttccaagag

SEQ ID NO: 30593 - DNA, 1034 bp, Homo sapiens
gacagatgtggtgttgcaatgaacaaaagaaggaatggtattcttaactgagtcatgagattataatcataaccacaataataataatagtaacaaaataaacactgttctttatcgagcccttatgtgtacactctgcttactgtgtttagacagatatagaccgcaactttttacatgaattatctcattccgtccaacagtccattaaagttgatactatcattttcaaatgtagaaactgtatgcctagatgtgcctagaggttaagtacattgctggagattacaaaaccaagctaagtggtagactcttagagcccgtatcctactctagactacatgcttgtccaaatggtagggatgcagacaagatttataaggtttttggtaggcacttccagatttgggacacatggcattgaaagcttgttttctgacttgagaggtcaggatttgctgacagtattttgaggagtagcttaaggaacccgtgagacaaacctgtcgtgtgtactgccatgttggtcactgttgtagccccacctgccattcctaacgcaggttcctcaggattttgatatttgcctactctattctatccccagcattttatctcaatttcagtacaagcaatgacaatgtaaacactgtaactcttacctgttaggggtcactattgataatattggccatttgtaattagtgagtaattaatattaggaatattttcatctttctagctccttggtcgtctggtgcaggggtccccagtctctgggcagtggaccagcaccagtctgtcagtggcctgttagcagtcaggctatggggtggggggtttgggagagagagaggaatgagcattaccgcctgaactctgcctcttgtcagatcagcggtggcattagattctcacagcagtgtgaaccctattgtgaactgcacgtgcaaggtatctaggttgtgtgctcctagaatctaactaatgtctgattatatgcggtggaacagtttcatcctgaaaccattctc

SEQ ID NO: 30594 - DNA, 1003 bp, Homo sapiens
ttccttgctaaaagttgtaggttgcccttggcttgcagtattggccctctgctgctggagccccagcatgcctcccctacctctcccttgcatggccttcagggaggagtgtgtggccagcagtaggagcacaagaccacttgagagttaagctcacattgtgaaatagtcagttgctaattggtgtatatagttgttcccccgtatctgcgggggatactttccaagatccccagtagatgcctgaaactgagggtagtactgaatcctatatatactgttttttcctgtacatacataactatgttaaagcttaacttataagtcagacacagaagagattcacaacaataattaataataaaataataataattataacagtatgccagcatttttattcttgtgctttggggccattattaagtaataagtattacttgaacacaagtactacaatagcaggagttgatctgataactactaagtgactaatggacaggtagtgtagacagtgtagatatactggacaaagggatgatacatgtcctgggcaggatggagtgggatggtgcgagatttcatcctgctgttcggaatggcttgcagtttaaaacttagaagttatttctggaattttcattttaatattttcagaccacaggtaactcacacctcagaaagcaaaaccatgaataagcggggattactgtagaccagacttctgttaattagtaagagccggggaccttgagacaaacatttctaatgtggatcaattttgtgagttatgtttttttttgttttttgttagtttttggtttttgttttttgtttgtttgtttgtttgagacagaatcttgctctgtcacccaggctgaagtgcagtggcgcagtctcagctcactgcaacctttgcctcccaggttcaagcaatcctcctgcctcagcttcccaggtagctgcaattacaagtgtaaaccaccacacccaactaattttt

SEQ ID NO: 30595 - DNA, 1014 bp, Homo sapiens
tctgtagtcttaatttttttcttagggaaaaagaaatatgaccatgtccccagacctagacaattaacgtctgagccatcattgggatatttaatatcaaaataaactttatttggataggatatcgagaaacggtttgaagaaaattgtgataatgctttacaagcagaacaaagcagtatttgcttaaacattttattcagggcattaagggggcacatgtgagtgtttaaaattttaatctgagctttgttctcaatttctgtgtatgtgtacaaaattaatattttcctggcatacacgaccattcatcccttttctgatgtaggtcttaaaaataagttaaaattcgtttttctcttgtttatttgtgaacttaaatatagacgtttgtttgtagcatttaagaacatttgctaaaattcaccctggttttttacagggttgcagaacgacttgattcttagaactgtcttggattggctgactctcataacgatatttttccccactgtatttcgtacaatcactgtgtacgaaagggaatattagaaaggcaagcatttgtgctaggaaggccagcaaggactctggtgttctgtcatacaagtacagtgatagggaagtgagatttagctccagaaagatcctcctaccctgttcttttctgctattgatggcattaaggagattccttggctacccctgcagggagggcaggtgaagtagggtgaacaatactaagacctgtggcaatcaggttttacagccatggaattttttttttctagcttaagaaaagcttcagtgaattaacttaaaattcttattttcgcttatgagcttttaaaaagatttgggagatgtatcctcatcctgtgcttctaaggcttgctgatggctcttcccttgcgttcttctagtgtcttctaagggcttccatagttttggattgtatgaacgttactgtaaggaatctgggggaaaaaaagtgggtttcagaaaaccccctgg

SEQ ID NO: 30596 - DNA, 1071 bp, Homo sapiens
gcaactcttctagccagttggctagaagtgaatctttgcaatgattgtgcccagtagtagtgaaggcatttgaaagctaagaacaaaatctatagctgactgttcctggtgtcactcagtcaatggagactttagtagcgtgcagcctttggaatattcttgtttagaatcaatagagtgcagtgtacaaacgcttacttaccatttcattatttccccaccccctcttttttgaaagccaaaggcacgtccctgacagctgaaaatagcacggggaggaataatgcggacacttttgaggacaagttacacctccactcagcactctggactccacgatgcctttgagtctgttttcccaacctcctgtgggcctcaagggtagaaacctgccgggctgttgttttaacgaggatttccctgaagctatgtctctagcagtgagtactcataaaggacactggatcaagttcagccaccgaattgcttttatcagtgttaaagtggtctgaactgcttgctaccaatctgtgagaagtttttgtttttgttttgttttttaacttgcagtatatcacagagccactcttcaagtagattggctgggcaaaagaatgttttggcaagagcgttactgtagacctttctccctccttccttttactaccatttttttttaacactgtcatctgtaggtcactctccagcagttaggcaccttaactggagaccagaaaccttccagagaacacagggctgcatcccgagcaaccctctgaagaagggaattaggctttagattttgatagcaatgttccaggaatgaaatatagatgttagcccaagacaccatgacaaaatagcccagccttttgagagtaatttgggaaaagaagctgtcagaagtttctaacttacaaactggtttgaaatttttgatgcccagacagcaagtataaatcattttggaggcttacttttcatgatacaaaagcaattctgtgtgatttttttttttaagaagaaagaaaatgcaagctagttttgagaaaggaaggccaaattgggtcg

SEQ ID NO: 30597 - DNA, 1029 bp, Homo sapiens
ccatgtttaggagccttagtccctattttgaagggaatgtagagaaagcatagctttttttttttttaaagagccagaaggaactataggcatcagctagcccagcccctattctttgctttaacttgttcagcccccaacttggaacctgactgtactgacatttgcagttagtagaggccttcttggatgccacctggagggtggagggaggtttggaacttatattcttaaagaaccttttatgttacaaaagaagccataaagtcagatgaagttgaggtggttaaccatgaaatggaggaagttttaccactgtctctctcccttttcttgggggttaggagggtaggatgtagagtggcagaacttaacagctgaatgcaattagaggtattatagctgcacatttattaagtgggctgaagtgggaaaaatcacatgaagaaacacaaatgggaatagacttgtgttaaccaggtaaaactacctgaactggtcattattcattcatggacagagtgcctcttcatttagcctagtgtatatttgttagcacgtgaagatcctttacaagcttttgttgactttggagaactgattttcaccatcaagctgttttccttagtgtttcagagttagtgacatgttcagatgcccttcagaagatgaatttgtcattcctttatctcttgtgccttatcttttatccaactgataaacattttttggttaacagtacatagaaagttttaaagccgtcatatgcagctatgattagttcattgtgataggggtagctttttagaggtttttagagattttaattaaatggctgattgttttcttgatgtaaaagtgaattcatgcagtaaaaaatagccatgattattttgagtaaccagtaataaaacattatagaatagacattttctttaaagtatgtttgcaattttaacctgtttattcatcaatgtagttgattgttttatggccatccataatgatattttggatcacagaaattca

SEQ ID NO: 30598 - DNA, 1050 bp, Homo sapiens
ggggcaggtttactttaacggtacatatgctataacattctaatggtagtgattttcttttcttcaaaggttttaagatttgacgtgttgtatcttatcctacttttgtctttattcatattgtcagaaatgaaaaaaacattgaaatttcttcacccttgaaagcagcaacactgtgaatgtaatgtatgttcataggtgacatgtacatgtcctcatacacttagatgctggtagagtgtccttttcaagtgtcctttatggtcctgttctgacttgggattgaaaaagctaggaaataaatgatatcatgttttgtaaatgtttttctgacagcctctaacagtacttccccaagaaggcccgatgagcatctccccatacttcaccatcagttgcgtaggtagctagttacaaatggggatttttggagatgacactagggttcctgtattttaaacacaatctctagatgattgtgcaactcaccaatatttaatgccactgatctaggcacataaaacatctgaacttacaccccagtagtaaatatttttactgaattggctcagtaattccctacataatattttagtaggtgcacaacactgggtgtggtgtaccacttgtagatcaaatgtgttattctttctgttctcctcaaaatgacatattttagacctaaaaaggctagtttaataaactggttatttttgagtgtgacaatgaactcagacatgtagatttggatttaactggagttagaatgaggttttctccaaggcccatgctgtcatagagcctcgtaggcaaaggcagcttgttttatggtttagctcctttagtaactgacaaggccgttggaccccctttgtaccacagtccattccagggtctcctttggtatcagcatatggggcaaacatgttcttattcagctttcccactggttaaaggattggacgcatagatgctgtgtggtgtttttcagctccagagcatggtgcacattttactgagtttttccctagttgtggcttaagctgtttt

SEQ ID NO: 30599 - DNA, 1068 bp, Homo sapiens
cagcttttgctttgaatacgatgaagctttgagtggctctgttcagtgtattgttaaatttctgttgaattggttatagagttgcctgttgaaacatgaagcattagctgaaattaaaccttgaacctctaagtgcattagatgtgtgtaagtatgacatctttattgaaaaataattctggagatgatagtcagaacacttgggtttcacccatgcttcctgagctaagtagctctctgaccttcagcaacttctatgatctcagattgatttatatataaaatggtgacataattagcttctaatatcagaggaatatttgcaggtagttgatggagtttcttggagaaaaatcttaaatcagaattttttttgtgaactatgttgaaatagttgcgaagaagatgtaatgttaataaaaggtattattggggatacttagggactttgaagagcatttccagaactagaggacagggtgcagttgtaaaaccctggtggtgatgtgttgaaggaagggaacttggctgtggcaatgaaagaaccaggggttttagcagcatccatctctcttttcctccactcagtacctaaagtgaggccgaagttcactggaattttttccctttcaaatgtttagttttatgatttgtagtcttgcatcttgggtttttgtttttgtttaaagagacaggatctcataggtggcctaggctggctccaaacttgtgacctcaagttatcctcctgtcttcacctccctgagtagcaggggcagcatgcatgtgcacctggttcttggtgtttcatttaataaatatcaaaaggaaacattcagtccttagctgcagcagtcaattaaaaacaacagaaaatattttatttatgccaaaggaagaaaaatcttggtagcagcatcatgatttaatcaacattttaatctaaggtttcatattttggcatatttaaggaggccagcattgcattttgattttgataaagtatggagggagcatgttttttttttttttcctttatggaaaaccttagtagttcttgtttttaga

SEQ ID NO: 30600 - DNA, 1054 bp, Homo sapiens
gttaaaaccacactattccttgaccctgtggccctcttaactctgaatccatctcctaacacctagccatcttcacacgacggtagtgtacacttgctcatctccctcaatcccttatgaattgaccgtaatggatctcccaccccagccactctatggaagcaataccggtgaactctgtaaaccttcatatgtgcgctgctcgagactcttgatgcgttgctctgccagtctccatttgaggcttctggcccccttgcacatcaagtagggtgcttggttgcttgccatcaacattgatcctggctaacttatggaatgaagaatattttttggaagattggcagacactgttgccttccacttctcctttgcccacagaatactgatttggtttgtgtctcatgttcctaacgctttgctagatctagatatcctccacctccctaacaaggggtggccatgtcacacaactctggccaacacatgcaaggagatgtctgcgggggaaatctgagaaaagggaggaggcctgttctccttgccttcaactctgttgtgtgatagggtggtgctggaggacgtaagagctgtcttttatctgagagtcaggatgcccaggatgagaggccaggaagctgggtggctgggtagaaggataggaagagcctggcatcttgttcactttgaagttctggactaaaatttgaactgcctgtcaccaaataacttaagtgacttaatgtcatttgtagtcatggtcctggcacttgcatctaaaaaagcaattatttctgtaaatgaatgttcagctctcccgcttgctccaaacagcactgttcaatggagatataatgtaagatgcaggtgaaattttatattttctaatagccacattaaaaaaggtgaaaacatctgctgggatgaattttaataacatattttattaaaccacacacatccatggtatttagatttcactgtataattaatgtaaaataattattaattgggcatggtggcaccacctactcaggaggccaaggtgggagaa

SEQ ID NO: 30601 - DNA, 1005 bp, Homo sapiens
ggctagggtttttttgttttgtttttttttttttttttggtgttatactggaatttagccattaccaatattacttgaagtgagcaggccattgactgcagtttgggagaccttttgtaatggtcagattttagttatagtgacattggcaatatgatttgaactttattcttttccaaaggaaataattgaattagccacaagtaaaatttcttgttctttgcatatatttcaaattaccttttcctatttgtcttaaacaattttgaacaattaaaatcttaaaagtactttcttaaagagtcctttggtggtggtgtcgctgatgctcgttttttgtttttaagatccataacagaataaggatttatatacatcctcctagggataatgtcatggtttctgcatatttgcatagcattttgagagagactttttcctttttgcttcatgaaaaaaagtttgagcagtataattttctagaaagaaggaaatataaatattttagactgtagcatatactaaagggaggtggactagtactgatatttttagtgctttcttcaaaatgattgctaacacgtgtattatattttagtatcttgttgcattcacttgttaatctgtatttatgcttctgtatatgcagagttttttgttttttccaacacaatttaaaattctacttaaaaattacttgtttggatttctaagcagatttgggaattacggcattgaaaatactttgttgctttttatgtctcaataaagtctatgcatttttataatattggaccagtgtttgacctgccagaataaaatgatgatagaactcattgtgtcctcaaataattggattctgaaatggaagatagggttcatgaagaataaaaaatagtagatctcatgtaaaggtgaaaatttacttttctttttagtattcaactcaaaattgccagtttccctgaatttattatagcaatttctcttgttttaaaatgaagt

SEQ ID NO: 30602 - DNA, 1033 bp, Homo sapiens
taaagtcatctatattaaaagatctttaaagtctctcagcattcaagaaataacttaggcatctttttagaagtattatacattcttaatcaataaagcctgtgtgtcttgaacatttcctagttagcagtaaaacacttagtttctctttataagatttttcttttaataaaattacttgcattttgacttatgcccttaagtttctatttgttgtctaaatggcaccatttaaagtgttttaagaaatttaatatttctttattggattaggagaacatatctttaaggaaaaattaccctcttagcaggtgatttacagtattattttctcctggccaacctttttaaaaatccaaaatatgtgccacctagctttttaaaagtttcattagaattagttatgtattatgacgtatttgtgaagtatgtaaagtgcttcagacagcacgtggcacattgtgatcactaagggtttgccattattattcttaccttgattttaaagacgtgaaatatggatatgtgacttttttggtttttacattggaatttcatattaagtcggtggccctttcagtaaaataagagcttactgtaaagttctctgcaaaagattttccattttcatatttaatttgcatgcataccataatttttatttctctcctcttggagtctctctgtaaatttctttttaatgtgtcatacttaaggacctcttcattttcttaaaattctgcatccttctgttaaccaaacacatttagaaagtcattcaaattttatgcttgtaagtggtactgaattggaaaaccaaaggattgtttaccccaggagcaagttggagtgtgtgcctgcttaataatgaaaaacattgtgatcagtttgcttttaactagttctcccttttttttccctatttccttacccctaagaatgaatataagtgttagacaacgttgagatcagtttccattagagttttaaaagaaatttttctattataaaggaattggatatttattacatt

SEQ ID NO: 30603 - DNA, 1024 bp, Homo sapiens
agaccaggctgggcaacagagcaagaccctgtctctatagaaaatttaaaaattagccaagcatggtggtgcgcagctgtagtcccagctactcaggaggaggctaaggtggagagatcacttgagcctaggagggtgaggctgcagtgagttatgatcacaccactgcactccagtcttggtgagacacagtgagaccctgtcttttcaaaaaaaaaaaaaaaaaacaaaaacaaaaaaaaaaaacaaaagacagtggcctatagaaagtcatgaaccctttgagaaccattaggagcagtgtgtctcacatattgagagtgggcatctggccacatacatgtatgtcatgtgtacacattcatcatgtatgtaaacatacacactcattagtttgctagttaatgaaagagcaagataaattgtggagccttgtatttttcacctgagtgggtagagcattttcttctctcatgcagttctgtatcgctgcaaaagaaatgaagcgtgtggataaagattgtgcatgtgtgcatcctgttcttcaatcagccaggtgtacataatgacgaagtgatttgggcagagtcaggaattctaaaaattacaaaattatacagtaaacaggatctcacttgggtgttgggtattatttgtacaggtggatttgccgctgcagtcaccacccctctagacgtggcaaagacaagaattacgctggcaaaggtaagtggtgaaataatgtaatggagatacttcagatgctcatatctgttagcactaggactacaggtgtataaagtgaacacaaatggctaccatttacctgtaatagcatcttatgctgcctgtgcaacctctaacaaaactgccattgatggaacaatgtccccagtgtctacataatattgtaccatttcacagtcattttcacatagggctggtagagccactgcctggcagtaccatcttcaaataaactctgtttttactggtgacaaacctaagggtcagagaggttgac

SEQ ID NO: 30604 - DNA, 1024 bp, Homo sapiens
gcatgcctctgattccttctcccaccaatctgtgccccacacttatcaaattaatctaccccaataccattctcttcatttctttgtcttatttaaaatcttctgattatccctatttcctacagtgatatttcccaaaacatgttctccaagctgttaatattctatgtaaatgaaagaaaaaggaagaaagaaaaagaaaggaagaaaagaaggaggaagaaaaagaagggagggagaaaaaaggaaagaaaaagaaaagacaaactcgtgagtttggaaagcactttcattacagaaagatttatctgactattatgttaatatccatgtgacagtaataaagaaatcatctattggagataaatatagaatagtttcaaaacttgctttctctaaatcagagtgtctgggtttaagtgacctttcccaatgttctatgttctttgtcaaatgacttcgtctctctgattttagttccctgatctgcaaaataagataatgattatgacctctgaaatggcctgcaattatcctctcacactgtgttcacacacttggtagtctcttcccccatgagaaaggaccgacttttatagcccataggatgttgcagagttgtattcaaagctgagtcatgaaagacactgtatctcttccttgctctctcttggataacttgttctggaggaagccaactgccatgtcatgaggatcctcaaagagcccattagaatgcctacgtagagaaaaagccttcaactaataaccagcaccaacatggcagccatgtgagcaagccaactgggaagtgcaccctgaggacataatcaagctctcagagtacttcagctaaggctgatgacttgactgcaactaactgagacatgttgagcctgaactcccagtcaagatgctaccaaactcttggcccatagaaaaggtgagagaataaatgttcaaagttgttttaagccagtttttagggtaatttgttacacaacaataaataataaatacaatg

SEQ ID NO: 30605 - DNA, 1025 bp, Homo sapiens
ttaaggatggcacatgctatttacaagcatggtgttacttttgttgccagaacaatttttgtctttatcaacatgtttcctttcatcataattatagactatagctaagtggagaaataaataatgagatacactaattggggttacacaataccaaggctgtgtagcactgctgtctcaacacagaaatctcgaattcctaactgtcatgtttcggccttggccatagtgacttcctaccttatcttttcccacttgacttggcagcctgtttatatagttatctttatccaatataagccataaggccctgtattcttgagcctcaaaatctttgtatcttttacccttctgggttttttttttttttttttttttttttttttttttttttgggaatagcagtatatagccactttagagactaggatataagttttcaagggttttttctttccccgacacgaatatgatagtttgcttttcttgattgtcacacaatttctctcccgaaaactgtggcttaactggtcactagcaagcataaaggggaaaaaaaaagcagaaaggggggttagtccaaatagtatccatctttctcaggggagagatttcgattatattacacatgtatgtggataccttcatcagttacagtttagtcattgactaacttggacaactgggtgcctacctcattgaatagttgtgaatattcaataaggtgatgagatgctacctgtagtaagggtgcagtagataccagctgctgctgctcaccttactgctgctcctcctcctgtactatgattattgctctctgcctactgctgttttgtgctactactggtgtcattgctactagaacttagaagtttgcataagaatggaagaaatggttaatcacagaaacatttctctgtgcaggtggtattgactctctcattgccttatcactgttgagtaaataagcaacagtttggttctctatcgctgaaaaaactctaaccacatagtcaattctc

SEQ ID NO: 30606 - DNA, 1048 bp, Homo sapiens
aggttagacagtcttacgcaagattacatagcttgggtgtatcagagccaggcctgcttggtaggtctttgaatgccttctccaatccttttctgtttcctctgagagcaatgctatgagactatcatattcttaataactagtgttttaaagaccaatatttattgagaggaaagggaaaaggggagttgtttaatgggtatggagcttcggatttgcaagatgaaaaattctggagatctgtttgataacaatgtgaacatacataacactactgaaccatacacttaaaattggttaagacggcaaattttatcctatgtgttttttaccataatgaaattttttaaaggtatgactaacttccagtagtaaattcccttggccaaaggacaaaataacacttacttaggtacaccagaatcctcagaaaattgagtcttatagttagcattttcttttcttttttttttaaatccatcttgatccaattcttcaagttcacttccttgaactcatgtggggtgaggacttcccttgaaacctcaagcttcttttatgatatttagagtttgtctactttctacccatttaaacccaccccctgattttggaagaaccaggtgttctactattgtgatgaaagtttccatgccatactctccgaacctcttggaatccttggttggcttctgtggaaccttcctgcttacaagttgttgcatcctatgaggccaaactacacttatctagcactcagaatcctaggacaaacatgagtaaaacacttgggggagcatgccctggggaatttataaatatacccaaagacatgggtatatttacatttcactgctctagcagcattaattagcaatggcccagtcatctcaaaagaactttgctgtgagagtggtcattttgctagtggtgtcaaatgggtccctgggcacactcaagtgaactgtagaattgacatgattctgtaaaatcattgactttttttgtaatggcaaagacctttgatatcatttggtctaacctagta

SEQ ID NO: 30607 - DNA, 1049 bp, Homo sapiens
agacaatgtgtacaaactgggtgggcaacactaggcacgtggcaaacactcgtgaatggcagctataattaatgtatgattattttatttttaaaattgaatgcttttaaaaatgatacaatggactttggggacttgcggggaagggagggagggggtgggatgggggtgagggataaaagcctacacgttgggtacagtgtacacggcttgggtggtgggtgtaccaaaatcgcaaaaatcaccactaaagaacttatccatgtaaccaagcaccacctgttcccccaaaactattgaaataaaaaaaaattttaaaaagttcaaaaagaaatggagtgctttgaatattgaattttcattgagcctcaaatcctaaaaatatctgttttcctccattttcatcgcagagacatgcgctggaacaagggaaccatcttaaaagcatccgtggactatatccgaaagttgcaacgagaacagcaacgcgcaaaagaacttgaaaaccgacagaagaaactggagcacgccaaccggcatttgttgctcagaatacaggtacgcagcctgagttgtgtaaagtttactgctttttaccgacttcaagacagtagaaacagggatataatgagccataggggagttgacttacgtgatcctaacacagtcaatccttattatttgtggattctgtgtgtgtgaatttgcctacttgtaaccccaaagtcagtatctgtggcacttccacagtcattcttggacatgtgcagagtggcacgtttgagctgcccatggcacgcatttccaggtgaggtcgaatgaccctgcctgaggttgactgtctgctgtcttgtttcagctctcatcctctaaacaagtgctcctttcgtggtctgttgagtactttctacatttttgtggtttctgttggtgatttcgctgtttaaaatgacccccaagcataatgctaaagcactgtctagagttcctgagggcaagaaggccgtgatgtgcttacagagaaaatacatgtgttggataagcttcgt

SEQ ID NO: 30608 - DNA, 1049 bp, Homo sapiens
cccgtacgctaggcgttggggtgggagaaaaagtaaacggttggtgggggcgggggtagggggtagcatcgcaacttttaagttgtctcagtatgcctttttcagggcttttgaagtcatctttccgcgccctaatttcgaggtggttgccttcactgttcttgattgcacgccttccacgcaacaggcttgagaacagtggcttacaaacttcgagtagagagatttcagcgttttgagaattattctttgacattcagaatcatttggggacggcaacttggggtagttggtgcttcttagaaaggcagatttatggacttagatgaacaattggtgggagtcggggcctggggatttttattttcactggattcccagcttaatataatgctggtgttcccccggaccacacttcgagaagcactgcgttaaaaatggtttgtgaagttgagtgccccctttaggaggattcttgttatctgtaaagagggtgacatgttggaagtagaacttggaggattgaggtggtaatttggttgagaggccttatttttttaattttgtatttaattgatttttaataaggtaaaggactaggaggaaagtttgtttttagagcgcttttgagaaaactgataacgtttttttttcttccttcatctagattttgagaagagggggaaaaaggaagtttgtcctgtcctggatcagtttctttgtcatgtagccaagactggagaaacaatgtgagttgaaaacatgcatttgtcgttatagaccagtgcattattaagaattgctcaggaaagggaaaaaagtatattttgggataattaaataattcattctaaattgtagaagtcctggtcatttaaataatttatatatttacatttaaagaacgtatacgcttacttactttatacatggtctgtaacggattttaaaaacctgtgtatgttaaaattttctttatagctaggctttggcacgcttagagaatgtattagtcttaacgagccagagaaaggaagaatgcctattcc

SEQ ID NO: 30609 - DNA, 1026 bp, Homo sapiens
aacaaataggcttattcctagaattttgtggctttgattctgtttcagagtcttggtggtattttctcatattgtcgtgtgtccagcctttttttggtcatatttgcatatgtaggtgtttaaagtgtcacttctatttatcgtctggaggactctgttattatctgacaaattccagatgctacagttttgacttgtagactttctaagatagctgacttgttacatatgctcagcattttattcagctcgtttccaaatgttctgaatctgaaacttacgctataaagttagggctgtgttcagaaggaacattccaggtcattgttttgcagtttgtgtggtagacacaatctggctaagtttatttgtagacaacagtgcatctttgatgacttctttttgtagtctttgggtgggggctggggcagcaggaaaggggtaggtttctatggtttcaatgttaataagtgggttatctgcccagtatgagtgtagctttcagcaagaattgtataatttctctggctttattattagcaagtgttcatttctcacaagatttgcttatttgtagtctagccttttaacaactagcctaattttagaaagaaaaaaacctttgctgcctcagtgcttgatttaatggtcatgcctgcaagctgagtctccttagtattctattaaaatacaccagtcattttgagaacgtcagtgtgatgtgttcaatgttgtatttctatttattacattaaaaaatgggaccctctgggcgggggaagtcatttttaccttcgcattagggtttcatatagaacatcttgatttagaacaatgtaaaactgttaatttgtgcttatatagataagcctaaaaatgaccacatgccatctttcaaaaataaattaatccctaaaacataaatgcttagactgccactattcctcttgaattgctagtcggcacagacttagccctgtcaacaatgtcaagccaaatagcattttacttttggctgttttttga

SEQ ID NO: 30610 - DNA, 1212 bp, Homo sapiens
tgccagtgaatgtatggaatcataatgtttatggactattactgtatatgacattactggatacctgtcaaaaacttcatgttgcttcaaaacatcattagtaagcttcagatctcattagtaagaagataaggaatttatagtccacagagcaccttgctttctctctgcttgtagactaaaggtcttttccctttttgatgtagaagtttgttattcaggatccatagcaaaaaactgaatcgctgactaaaactaacagtgtagataattgagagtgtttactgtttaattacatgtgcctatggaaaacattatatgttgagaaatgtattttagatcttcattttcaccagctctctgatgtgttcgtttgcttgtcttctctctggtttcacccatgagcagtcctgttgatgtgtcaggctgcccaggttttgcattgcttgtaatacatgtgtgtggaaatctacatgtaaccacttgcacattccatccctatcggataccttgggtaacctattacctgaatattaaatatttttgagaactcacaccattgactataaagtgaataatagctaattcaagtctcaaattagtaatgatatgaaacagtagtaataatgcccttagtggtattttttaaaatgtggcatggaagtagggctttttcgttatcagttaaccacttaacgcaaaaaaatagaaaacttttttgttttgttttttttgagacaaggtcttgctctgtcatccaggctggagtacagtggtgccatcatggcccactgcagccttgacctcccgggcttaaatgatcctcctgcctcagcccccgcccgcagtagctgccagaggcatgtgccaccatgcctggctagaaaaataaaaagctttattgagaggctctgtagagtgaagagccatttgcagctataagtgtcatagtatctctcttgtctctatgcttgtaatttgtttgaccgttgcttagaagacagtcatggttaaaactctacttctttcagtataatttacttgtctctctcgctctcttttttttttttaagacagagtctcactctgtctcccaggctggagtgcagtggtgcagtctcagctcactgcagcctctgcctcccggtttcgagcgattctcttgcctcagcctcctaagtagctgggattacaggcgcccatcaccgctaa

SEQ ID NO: 30611 - DNA, 2503 bp, Homo sapiens
gtgcagtggcgccatctcggctcactgcaagctccaccccctgggttcatgccattgtcctgccttatcctcctgagtagctgggactacaggctcccgccaccatgcccgattaatttttttgtgtgtttagtagagacggggtttcaccatgttagccaggacggtctcgatctcctgacctcgtgatctacctgctttggcctcccaaagtgctgggattacagacgtgaactactgcacccgccctgtttttttgagtagagacagggtttcaccatgttatccaggctggtctcgaactcctgacctcaagtatctgcctgcttcggcctcccaaagtgctgggaatacaggtgtgagccaccatgcctggcctctactatctgaaacatagttttaaatgacatattttaatctaaatataaataaaacatttaatttgaccaatgctgtttaattaagctaataataacccttgacaataaattagatctgaaattatttgaagatgtgtgagattctttgagatgtgggagttttttttccacattttcctttaattctataatattctcgttcacttttttttttcaatgccttatagcagtggttctaaaccagggctgacaatgtctagagatgtttttggttgctacagtttgggggcatgctgccggcatctagtggggtagagggcagggatgcctccaaacatcctatattgcttaggacactccccagcaatgaagaattgtctggccccaaatgtcagtagtgtcaaggttgagagactgctttataggagaaagcatacctgaagattttaaaagtgtcttgaagttttcttctaggacctctgaaatttaaaaaaatggtaagaccaccaattaaggtctttaaccaagtcttagttttacctatcagaattctatttgagacggtaaagtataattttgagaaataaataatatgaatgtcctagatgtttttgtgtttatttaaatatggtgtctgttaactagctttattggttcattgtttatttttattattttttttttttaatacagagtctcactctgtcacccattctgttaactggctttactggttcattgtttcttttttttttttttttttttttaaatacagagtctcactctgtcgcccaggctggagttcagtggctcactgaaacctccacctcccactgaaacctccacctcccgggttcaagagattttcatgcttcagccacccgagtagctgggattacaggcatgtgtcaccacatctagctaatttttgtatttttagtacagatagggttttgtcatgttgcccaggctggtcctgaactcctgagctcaagtgatctgcttgctttggcctcccagtgctgggattaatagagaatgggatatggcctatgttgcttaggctggtcccaagctctgggcacaagctatttaccacctcagcctcacaaagtgctgggattacagacatcagccactgtgcccagccaggtcattcttcatatctgtggggagagagccttcaattcctcactttcttgatggattagtagcctcatggcttcattaaccacaggtaaccatagaggtatacctaacctttagtttcccataaattctgcctgttgtagcctggaagctgtgtgtattttacagtccaggtcacaggccactgctgatacaccaaccagtcttcagtgacagcagtgctgaccacttcccccacccccaattagcacccaaaggagctagctgccctagccactggtgggtcccctgcatgctgtccttgaaagggaagagttagatatattgagtctagaaagagtgagagagaaagagattggttatttctgtcatctttcagaattaagtgtatgttaaagtgaggactctgttccttatgtatgcatcatatatatgcattttggaaactcttgacaaagttggaagaactttggaagaagctggaagtgtggagaagtctactaaatccataccagctttttttttttgagatggagtcttgctctgtcgcccaggctggagtgtagtggctcagtcttggcttactataacctccacctcctgggttctagcaattctccctgcttcagccttccgtgtagctgggattacaggcgaccaccaccacacccggctaatttttgtatttttagtagagacagggtttcaccatgttggccaggctcataccagcatgttttaatgcaactattaacaatattttgttactgtatggtagagatggtaaactggctgggacactgggcgtgcagatacagaccaggttggttttggggaaactaggaggtatggtcactctattttgtttctttgatgtcctttgtacatcattcctagttaatatatttcttatatttttatcctatctttcttatacttttagccaggcagatatacacttgacccttacacaa

SEQ ID NO: 30612 - DNA, 1037 bp, Homo sapiens
aaaggggaagctctgtttatcacagtatttgtgtaattcctgattttacattgtttgctcacattccttctcatgtttattaaggtatcacttaagtcaacaaatatttattgagtatatattctgttccaagtactgcgctaggtattgcgggtgctgtggtgagcaaaccacagtatctggtagtaattttaaaaattactttaacagtgaagtattacatttctatatgtgtgtgtgtgtgtgtgtgtgtgtgtgtgtgtatatatgcatatatatatattttttttttttttttgaaacaatctcgctctgttgttcaggttggagtgcagtggcacagtcttggctcactgtagcctccgcttcccaggttcaagtgattctcctgccttaggttcccaagtagctgggtctagaggtgcctgccaccacttctgggtagtttttgtatttttggtggagatggagtttcaccatgttggccaggctggtctcgaactcctgacttcaagtggtttgctctccttggcctcctaaagtgctgtgattacaggcacgaaccactgcgcccagcctgtttcttttaatattttgcttattgcttttatcagcattggcctgtacaaaatacattaacttcattttaaaaattaggcctggaggaaatcttttataaatgtagccctttaagagagtaatttttttcagttgatttttaaataagcttaggttaggggcctaagactgatgaggtatatagaaggtcaacaaacaattattacttttgttatgcattgaaaagttttagttacaaggtgaaagttacagtgtcaagtgatagaagcctcataatgtgtgaagtgcttagttcataatgtgagagagcttggttagattagatgggaataaaattgaaatttaaattttttcctttagaattttttctgttacatatgtaaattccaaagattttgacacaattacaaacttcagtaaaatgaagtttaatcctataatatctttgctaccaagtt

SEQ ID NO: 30613 - DNA, 1033 bp, Homo sapiens
agcatgatctcggctcattgcaacctccaactccctggttcaagcgattctcctgcctcagcctcctgagtagctgagattacaggcaggcaccaccatgcccagctaatttttgtatttttagtagaggcggggttttaccatgttggccaggatggtcttgatttcctgaccttgtgatctgcccgccctggcctcccaaagtgctgggattacaggcgtgagccaccgtgcccagcctaccttcctatttctaaggtacagtctttttactagttactttttctcttaattttacagtctagttactttttcccttaatgtctgatttcttagtaatgaaagttaagatttagtttcttttacgtactccttctccaagcatgcacacaaacttcccactttaactgctcattttttccagtataattacattgaaattttggtcacattagcattcaatatatacgttgtctctgttaatgctatttttttcatttaattttctgtatgcttatgactaattcaaccccaaattttagttgtttatatatcaatttcatgttttaaaaaaaatctcttgttgagccttcttaactgctccattctggactggttgctctctagacctgcctgaatcctaccaagttatgatgaaaatggaaattctaccatcttacggtgggagacccatttttatcatcctgtaattaactttttgtgttggagtctcagtattctagataccatatcatgctctttcttggtttacatcattgttttggtggaatgagaggaggcacaataacaattttttttgttttgtacttttagtgtctgaaaatgtgtttattctacctacttatttgatagtctggttattctaggttgaaaattattgtctctctgaattttgaaggaattttttcattgctttctttgacacctgttgataaatctggagccctctttgtatgtgacctggtttatgtccctggagttttgtagaatcttctctttgattccagaatta

SEQ ID NO: 30614 - DNA, 1050 bp, Homo sapiens
cagtgcccattggtcccagtttctccatatcctcaccagtgcttgttatttttcattttagaaaatgtttttgatttaaaataatcattggtttcttctccacttttctgtgtgtgggtgtgtgtatttttttctttttaaactggtcatttagactttgaacctcttgtactactattacagttttctgattacttccctcctttttataaatgtctttaaacaatgcacctttaaaaaagagtgttaaatggtgccatcattgagttagtagttttgttttattttaactcctcctcttccctccaaatctatagtttttgtgtgtgtagaattttccaggtaacgcagaacacttgctgactattattactcaggctatggagattcctaccagttagtggacacatattttcctccaatttcttagtcttcaagaatcctagctccatttgataactatgagtagtgctttttgaataacttcttttggagggatgagactgcagcaagctatagttttgttttgttttttagagactgttcctcttttgcccaggctgcagtgcagtggcacagtcatagctcactgcagccttgaacttctgggttcaagcaatcctcctacctcagcctcccaggtagctaggattataggtacatgccaccatgcctggataatttttaaattttttgtagagatgggatctcgctatgttgcccaggctggactcaaactcctgggctcaagcagtcttcctgcctcagccttccaaagtgttggggttacaggcattggctactctgcctggccctagttttgttcttaaaaaaaaaaaaacatttccaacagttcagatcattggtctgggcaaaggtaggtgagacctcaaaagcacagggaacgaaagcaaaaacagatgaatgggattacatcaagctaaaaagcttccgcacaagggaagagtcagtagagtgaagaaaatgaaatgggagaaaatatttgccaactatctttctgacaagggattaataactagaatatgtaag

SEQ ID NO: 30615 - DNA, 1076 bp, Homo sapiens
atttatcttattataggtctaatataaatgggcctgggacacccaggccacttaatcgaccaaaggtttctttgtcagcccccatgacaacaaatgggttgcctgagagcacagacagcaaagaggcaaatttgcagcaaaatgaggagaaaaatcacaggtttgtatgttttatatttaaaaacagtgtttttattaaaagttaaagttaacatttaatcagtacttatcacttactatttataagttctgagggacagaacaaggttttcatgcggtttataggagcactggcttctctttgcagctgtagcaaatgttgaaggtggacatagacaagacttaaaactgctaatttgtggagactgtttatgtagggtctaaaagtaacgtagatatgatgatccatttcatttgttgtttctgaaagttacttgaaaagaaatgatctttataaataagttgatttttgtgagtcgtttctcattgtagttcataaaaggacaccttttgtttatatcttcaaattttctgtatcacattaagggaaggaagactaaatgagggagaggacttaagagagtatgtccgtatggaagacttgcgggtttattgtaggagaatatttaacttactggagaattgcacagaaaggtcatatagcttttctgagtcctactgggaattattcatcaaacagtttagtttaccttgaaattattctcttgtgtttttctttgttcaggtgttataatttaactttgacactgaaatacaatttaaaacattatttaaccttaaaaatggggatgtagaagatggggaaaataatcttattaatgacactttaaaaaaacatttacagtgactcttcgacctctgaatcagaagtttcctcagtgagccctttgaaaaataaacatccagatgaagatgctgtggaagctgaggggcatgaggtaaaaagactcaggtttgacaaagaaggtgaagtcagagaaacagccagtcaaacgacttccagcgaaatttcttcagttatggtaggagaaacagaagcatcatcttcatctcag

SEQ ID NO: 30616 - DNA, 1034 bp, Homo sapiens
cagccctgtttcttacatggtgacaaagtgttccagcaggacttgacagttgtggttctttgccaggcaagtcatgctgattgtcaacaaaatccagatttaaataagtctccactggtataatttggcactagcttacatgtatatatttacaatatttgtgttaatcattttaaaggctgggcgcagtggctcacgcctgtaatcccagcacttgaggccaaggcaggtagatctcttgaggccagaagttcgagaccagcctggccaacatgatgaaaccccgtctctactaaaaataacaaaaattagccaggtgtggtggtgggcacctgtaatcccggctactcaggaggctgaggcaggagaattgcttgaacctgggaggcagaggttgcagtgagccgagatcacaccactgcactccagcctgggcgacagatcgagagtccgtctttaaaaataaaaaaaatcatttttgaaatcccaccttcaggcaactacatggtaagaagtgtagaattacctgaagtggagaggagggttctgttttcaactgtgggtctcctttcctatgcttctttttgtttttgtttttgggacggaatcttcctccgttgcccaggctggagtgcagtggtatgatctcggtctcggctcactggaacctctgcctcccgggttcaaacaattctcctgcctcagcctcctgagtagctaggactacaggcatgcaccaccatgcccgtctcatttttgtatatatatgtttttcgtagagatggggtttcacagtgttggccagggtggtcttgaactcctgacatcaggtgatctgcccgcctcagcctcccacagtgctgggattacagacatgagccaccatgactggccctctaggcatattatcgcacagtagctacagtagagggtaagatctgtggctctgaactaaggagagtactagtcggtgtgtttctaaccttaagaatgtcttagttttcagcttctcatatttgatctcttacccccac

SEQ ID NO: 30617 - DNA, 1046 bp, Homo sapiens
ccatgtttgcgtggaccgctctccgccaacaggtgtcttccacagacccctctcgctttagccctcagtctctttcaattctgtcttttctctcggtccataaaaacaaggaagtcgaccccagtggagcctagtctccccacgaggaggcggccccgggggtggagtcaaccctggaggccacgctctgtgggaaagcacggggcatgcaaactcgaaatgaaagcccgggaacgccggaacaagcacaggtgtaagatttcccttttaaaacgtggagaataagaaatcagcccgagtgtgtaatggcgtcaatagtggtgtggacgagacaaaggcaatgaggcaaggagcgaggctggggctctcaccgcgactttaatatggatgagagtgggacggtgacggcgggggcgaaagcaacggtaacgcttcttgacctttgggctaagatcaagtctagtaactgttcttatcagtttaatatctgatatgttctctatccgaggacaatatattaaatgggtttttggagcagggagatggaataggagcttgctctctccactccacacatcgacctggtattgcagtagctccacgaactgtgcacccctttagaagggaagaacactgcagagtagcttgcacacctagtatctgtgatatgctggttttcctattccttgaactaccttgaagttcctggtctgcggacataaggtggacttttcggcactcccattttcgctgtgtctacagcactttgggaagactagaacccaaaacgagactacccgtttctgtatctgcatgcagagagagcgtgttcaatgtttcttggaggtccttagatctcagcttggcagtcgagtggtggtgaccttttaaaggaacggggtccaccagtgtggcccagcctggacttgaacttcttcctcttttttttttttttcaagttctagatacatgtgcagaacgtgcaggtttgttacataggtatgcatgtgtcttggtggtttgctgcatctaccaaccagtcatct

SEQ ID NO: 30618 - DNA, 1129 bp, Homo sapiens
tgggtatatacctggattggggtgctggattatatgtacttatatttttaatcttttaaagaactgacgtactgctttctacagtggctgtatcattttacatcctcaccaacagtgcacaagtgttacagtttcccacattcttgccaacaattgttattttctgtttttttttaatagtaactatcatcatgtgtacgaggtgttatgttcttgtagttttgatttgcatttctctaatgattcattatgttgaggctccttttatgtacttattgaccatttctattaattctttggagaaatgtctttggagaaaagttctttgcccatttttgaatcaggctatttgttttattttgttgatgagttttaaaaattccctatctattctggatctcagtcccttgtcaaacatcatttgcaaatttttttttcattctctgggttgccgttttattctgatgatagtattttttggcagttttttaaaaaaagtttatcaagtacagtttttaatttttttctcttgttgcctgtgcctttgatgtcacatctcagaaatcattgccaactctaatgttgtgaagcttttgttctattatttcttctcagagttttatagtattttttgtattacatttaggtctttgattaattttgagtcaatttttctgcatagtgttatacgagggtccaacttcattattttatatgtgattcttctgttgtttcaccaccatcccaccatctttttttatttttatttttttttaagattgttctttcccacattcaatggtcttggacccatggtcaaaaatcatttcaccatacatgtgaagattcatttctgggatctcaattttacttcattggcctataagtctgtctttatgcctgtggcaccctgttttgattactgaaggtttgtaataaattttgaaaccagggagtgtgagttctgcagctttgttctttttcaagattgttttggctatttggtgtcccttgatttttcatatacattttagaatagattatttctttctataaaaattgttgaagttttgaaaggcatagtatttaatgttaagattgctttgggtagtattaacatcttaaaaat

SEQ ID NO: 30619 - DNA, 1044 bp, Homo sapiens
gggatccagtttcagctttctacatatggctagccagttttcccagcaacatttattaaataggaaatcctttccccatttcttgtatttgtcaggtttgtcaaagatcagatggttgtagatgtgtgatgttatttctgaggcctctgttctgttccattgttctatgtatctgttttggtaccagtaccatgctgttttggttactgtagccttatagtatagtttgaagtcaggtagcgtgatgcctccagctttgttgtttttgcttaggattgtcttggcaatacaggctcttttttggttccatatgaactttaaagtagttttttccaattctgtgaagaaagtcattggtagcttgatggggatggcactgaatctataaattaccttggggagtatggccattttcacaatattgattcttcctattcgtgagcatggaatgttcttccatttgtttgtgtcctcttttatttcgttgagcagtggtttatagttctctctgaagaggtccttcacatcccttgtgaattggattcttaggtattttattctcttcatagcagttgtgaatgggagttccctcatgatttggctctctgtttgttattggtgtataggagtgcttgtgatttttgcacattgattttgtatcctgagactttgctgaagttacttatcagcttaaggagattttgggctgagatgatggggttttctaaatataaatcatgtcatatgcaaacagggacaatttgaattcctcttttcctaattgaataccctttatttctttctcttgcctgattgccctggccagaacttccaacactatgttgaataggagtggtgagagaaggcatccctgtcttgtgccagttttcaaagggaatgcctacagtttttgcccagtcagtaagatattggctgtgggtttgtcataaatagctcttattattttgagataggtcccatcaataccgaatttattaagagtttttagcatgaagggctgttgaattttgtcaaaggcctttt

SEQ ID NO: 30620 - DNA, 1035 bp, Homo sapiens
cagtgaaaaattcaggggtttttaagatgattacactaccttggaaagattagatagaaaagttcacgagagcacaacaagtacagactaatcaaataccaaaaggatttcaaggtgctctgaaggtggataaaataaacagagatttgagagaagattctcattgccaatgacaagataactatttagaaattcctttgtcagctgagccagttccagattggattattattggggagtagcggaggaattgagatttgagtatatttgattacattttttcaatgtactctgctttctattatatataaaaagagaatcagcaattatgaccactgaaagtaaattacgccactaaattgcaactagtcttcaaacattctggaaatattatgatgtttaaccatcttctcaattttattttaaaacaaatagacatattttccaggcagacaaatatgtattttaagggtaatgacaccaacatactgattttcttttcagcaactgttgactttttggttgaatttctactttctggacaaatatatattgtggttatttcagtgtcatgattcacagcttgaaaagtcacacttgattgagaacacagataaaaaatctgaattggatgattgaaaatgccatattaaagatatccgaaaaactggcagataaagggaaatatttgtcctgtttttctatgtgaacagtgccattaacccaatagtaccgaagaagtgtccctttgtaaaaagatcacaggtaatacattaaaaataaatgtcaaaattagaatgttgctgttttgcaatccccaatgaactaataaaaaataggcctaaatattgatggcttcgatatcactaaaagaaagacaatttaacattatgtgcctactgatgaaagaacacaacgccaactatattctcagaaaagagactgaacctcaatctgatcctgttgatggatccaggttccaatctgccagatatgcagagaaccgtgagaatgcaaatcagcaaaatagactat

SEQ ID NO: 30621 - DNA, 1027 bp, Homo sapiens
tgacaccttgattttgaacttctaccctctagagttgtgagggaataaatttctgttgttttaagccactgagtttgtggtactttgctacggaagccctaagaaattaataaagggcctcaaacccccatgctatctaacctgttttgttttagattaccttttatgatttattttccttcaaactctattgcacctaaagtcctagcatgcatcagtctgttttggtgatagtggtttccttttctgcagtcaaggaccaagctttccatgttcacactcatatctccaactttctgcctagtatacaggcaatcatcaatgcattatttgctataaacatgaaataaagatacagtgttggagaagtcaaggaaaaggaatagctcagtaaaaagtgagggttatgaatgtcaaatgctgcaatggaatcataagcaaaaaaaggttattgtatcttgtaatccgtggaagcagttggtgacctttgagggatcagtttcaggcaagtggatatggtagaaaacacatcataggaataaacactgagtcagcagtgaagaaatgtgggaggcaggtgtaggttgctctttccagaaagttggcagtgaaatgaggatgtatagtaaaacaaagcctcaaattttctttgcatctctatctaactaaaatgggaaatgagtactcaaatatgaaggctatgtttctggtttattaattatagtagagacaagcagagattctagatttgaagagaaagtattcaacacaatgggaaaaaaaggtgtttttatgaattaagtgaagaatttaggagaaaccaaaatcattaatgaggataaagagtagatgcctttggaaagtttcttcctcaagaataaaaataaacccagataatgatagaaatacagaaagtatcatagacagcatcacatagtggcttctattttgctttttgtttctgtttgctttttcaaacatatgttccctattagattttaaacatttttcagatccaagattctct

SEQ ID NO: 30622 - DNA, 1104 bp, Homo sapiens
ctttaggttaagataaatattcttgctttctctagtcatttcttaggccctggcagccttttgatgtctcaacctcaataaaaatcaagcagttttcgtaaacaacctcaatcttaaaacatgtgtatttacttatcctgtaggaatctttacttatctagcaatatagaatagctatccttgagaagcttttaaaagagtgaatttctaaatttcttgtcacccaattcccatttagcattaataaggagaggcagcattatgacagagtttctgaaggatatgcagttcactttttcgtcaagaaatgctaaaatgaagaatgctgagatgtactcttggcttctgtatccctgaaacagttttttacaaggccatcgagcccgtgtttggggttatttttaaataagaaacagctctatgaaagttgattatgtttgttttgagaatgttgagaaaatttttcattttattacatggggtcttctctatgaaaatcttatgaagaggttcctttcttgtcttaggatcgttcttctgagcaactgctttactttaatcttatggaccctgaaattcgtaataactacttctcactttttgcactgacaattaaaaagcctagaaccaaataaatgaccctaccattctaattgcagtggcttcatttggttccaatttcatatccttatccttatttttccattactgtatgttttcacctttaaaaaatatagatgtataggtctctttgggtattttatttagatactttcaattatattcagaataagctagcgtacacatataggaaaatcatttaggattttttaccttggcaataaaaccaatccttaatgctattcctacttctggggtcagagattctattctgttgagaagcttgcctctttcacctttaattatcctaaggagattctggtctttccctgatgtttatggtatttttgatcgttcctttagagtacagagcactccagggagtgtgactcctataaaaaaaatctgagataaacttaatcatcttaaccttccaagggcatctcccattgtcttatttcagtgtatatttaatagatacaa

SEQ ID NO: 30623 - DNA, 1078 bp, Homo sapiens
ggcactattcacaatagcaaagacttggaaccaacccaaatgtccaacaatgatagactggattaagaaaatgtggcacatatacagcatggaatactatgcagccataaaaaatgatgagttcatgtcctttgtagggacatggatgaaattggaaatcatcattttcagtaaactatcgcaaggagaaaaaaccaaacactgcatgttctcactcataggtgggaattgaacaatgagaacacatggacacaggaaggggaacatcacactctggggactgttgtggggtggggggaggagggagggatagcattaggagatatacctaatgctaaatgacaagttaatgggtgcagcacaccagcatggcacatgtatacatatgtaactaacctgcacattgtgcacatataccctaaaacttaaagtataataataataaaagaaaagaaaaagaaaaaattcaagctgtatgtattagttacgatcttcccctggcaattttaccacctaaccttaccaattcaatacgtaccctcttccattttcacacactgttgcacctctaggcagtatacactaaactaatataaattatagtttttagtatattttaaactaaatatactagtagtatattctaaactaaatatactaatagtttagtatattctaaactaaatatactattaagtttagtatattctattggtttagtatattctattagtttagcatatgctattagtttagtatattctattagtttagcatattctattactttagtatattctgttagtttaatatattgcctagaggtgcaactgagtatgaagatggaagaaggtacatatttgatggtaagactgggtgcaaaacttaccatgtaggacaataatctattatcatcataattgactttgaagttaactaaattacacacaaataatacttgacatggttttgaacatacaactctgtagagtgttttgtttatataagcatgtagtatatacaataatattcagtccatattaggcacgcaagcataatataattttataacattgaa

SEQ ID NO: 30624 - DNA, 1050 bp, Homo sapiens
aagttagaggtggtgtttgcataatgtttttatagaaaataataggaatacaagcacctaaatccttttctctcacttcccatggcttgttcatttataacttgtttcagaattgccctgtgctgtttctctctgaccttctgttctacaataataaacacttggattaactatctgtgttctaaaatgccagctatttccagtttgagatgtttaaataagtgatttccttaatttgcagctatagttcttttttaacccaattttaaagtgagtttctttatataccttctcgccttcttcctccctgactttctactgctcagcaatctttaaaattaaacaaagcattcaggtgaaagggaaaaaatgaagtcatgttatttgtttctatattttgaagtctattttaactttatatttgttattttattctcaaatgtatatttcctttttttccccaactatcacaaaaagaaactggaatatagtacatctcctttcaaaacaaaactggatattggaacttatcattatttcttacacgcctgcaaggtattttttttttttgtactaataaaaggactcaggtatgttgaattcatccattcaaatgtgtacacattgcttttgctctctattgtgtacatttgcatataaagcctaagcatatctttgctcctttattaacaacagataaaaatatgtattgagcatttattctgtgtctggcactgtgttatttgttattaatacagtgggagaggaacagttattgtctttaatattgttgaactctagaaagaaaaccactgaatggataacccactctctgtcaaacgttcattcccttctcattctcagtgaacaaaatttgtccaactgtcacttatagaaaacctaaactgttttcaaaggaacatgtatggtctctcgattcttcacttatgtctcattttctcccagcttcacttacaagttttatatattggctgatgacatgtggtaccgagagcagcaaggcattagagaaagtgaaaagtcaaaaat

SEQ ID NO: 30625 - DNA, 1037 bp, Homo sapiens
ttctgcctttttgaatgaattcagttattccatctggaatgctataagcttcataacatgtgtgcttctctacctgtctagaattccatgtctagagaggaataacagtctctgtcagtaacattctcgtataagtggtcactggcacacttagcaatcagtttgtttttattttgttaaatatgaatttgcttgatagtttcctgtcaaaattaaatatacatatatattaaaggggcatatgcagcatgtcttacaaattgcaccgaaagtcttagtgcaggtaataattaacagttgtttacagaaagaaaagagaatttcaactggccttagacatcaatgatagtctgtcagcagtaaaataaaattgattgtataaaagccatggcttaataatacattgattatatgagtagatactaagttctgtgggttgtcttatctacttgaataccttactatatcctaatgatgacattactaaataaatagttcattggtctgaatgttaagcatgaagaagatagggcagatagaaattgctgtgtgtctatagcacaaataaagaacattttaaataatcccagagatatacagtttttggacttaagaagcagtatgtggataattgtgcattcgaagtaacataagtcagctaaaaagattttctttgtattaaacattatgctttaatgttcaattaataaatcataaccttaagacagccaagtggtgatcttatgtgtgaatatctttggatatcagttcttctcagaataaggcatcataaatttaattttatatgaaaatcaccttttttacctcatttctcacctagagtaaaaaaagcaatactcaatgaaacttttattttgcaaatttagtagatgtgtccctattggcctaacttattttgcttaattatattttctaatttaatttatatggaacattttaatagaaatatttaataattagatctggaccaacctactctagttaattgttattgtagttatgctactcaaatgcca

SEQ ID NO: 30626 - DNA, 1032 bp, Homo sapiens
ttgagtgcgttttaacatttacgttgtcatttgaacagcatggctcacacaatacttctcaggaaatataatttcaaagcatagatatgaaaattccagtcatttattctcataggttgctgttttgtaatttgaaaatcacatataatgtttccttgcttagcaacacaacattgagatatgggagaggagattctaaagtaatgctaacagtcatacaagatttatgagaatattaaaacataagtatataaatatttcatttagaaaatacatctttttgaaaaatatttaaaataatctataatcagtacataaacttttgtgcagatatttaaaggcctacccatacatatttgtatttttaaaataatttaaattactgctataatttaaatagtatagtaaatgctatactattttttaatctagaagccttaatttaagaacacttcagaagtctgttatggttgattcagaaactgattttacacagtattttttatgtagcatgtactgaaaacaagtgaataaactatggtttctgccctcaaggagttcacaaagatagattttatataatttgtgattaagatggtctatgaataagtgaccctaaaaacattacttcaacaaaaaaaagcttatttttatttttttcgaatacgtatccacaggtagaaatcttagtgagggccagccagcttctagctttctgctttgccatcactacgctgtggacttctttgtgggctaagataatttcagaacccacatttacatatcaagcagaaaaatgaagagcaaggacaaagggaggattctagccatattttaagaaagagtccccagaactaccacataaaacttctacttatgaacttggccagaacttcatgtcctagtgacacttagctataagtcatactagacaatatctttattttggaagaaagtgtacccatttcaatgaaaacaaagtcctatttactttggaagaaagggaaaacagattttgagggatcttaccat

SEQ ID NO: 30627 - DNA, 1080 bp, Homo sapiens
ggttcatagacggcatcctcacaaggtgaaaggcactaatcccatttagaagagctctgtctcatgacctaatcatcttccaaacgctccaccttcagtgacatcaccttcagggataagatttcaacatgtgaattttggggggatataaacgttctgaccacagctctggcctttggagagacttcaagcaagggttgtaagagaggcaggtgtttggatgcaatgacagacagggcctggaaattgagcttaaattaacacccaagtagagaaaaggctgttctttctcaccgatattggcagccctacacatttgtcggttcctcatctgaggagttaaccaactgcgaattaaaaataatttttaaaaactaacaaaaatataccaacaagaaatattacaaatcatgtggtatagcatctatttgcatatcatttacatagtattaggtattataagtaatcaagagatgatttaatatatacaggaagatgtgtagctatatgtaaatactatgccattttataaaatggacttgagcatccaattcaggggtcttgagaccagtctcctctggataccaaggaacgaatgtgcctctttctgagagccaggccgtttcctagtaatgcaactataaaggcaagcatcacattttttgtgtgtgattatctaacatttaagtctgaaccaagattttggaataaacgttacagtatctatatatggaaatgaaatgtaactattttttccataacatgaggtatatttgatataaaccattttatataaatctgcctgcctcattttctttcttcttgctttctttgcttattcaaattgaacaagtacattatacatatatatgtgtgtgtgtgcatataaacatacatatatttttttcttaacatgaggtatatttgatataaaccattttatataaatccacctacctcattttccttcttgctttctttacttattcatattgaatgagtatattatacatatatgtgtgtatccatgtttatatatacatatgtatacacatatgcatatatatgtatacacatatg

SEQ ID NO: 30628 - DNA, 1027 bp, Homo sapiens
ggctcaggtgattcttccacttcagcctcctgaagagctgggattacaggcatgtgccaccatatccggctaatttttttttttttgtatttttagtagagaaggggtttcgctatgttgcccaggctgctgttggcctcctggaatccggcaatcttcttgcgttggcctctcagagtgctgggatttacaagcgtgagccaccacacccagccgcaatatcttaatacaccaatgttgactgtagaatgtttctgccctttcttctcactcacctgaagaatcttgaagcagttggttttattttaatcattttccatcactgtacatcattcaatagtgcttgatattttaacatcagtaaacaaacaaacaaacgaacaaaaaacaggaaagtaatatattctgtcagagcagaattattcaattgcttaaagttttcatataaactttccatgtagcatgttgaatgtttgtttctataattaaaaatacctaagattattgactgggtatctgaaagggattttatacagcacagtacatagagtagcaataataaagatatattttttaccagcttttgcctttgtgagtattttgggtttgggacatggttgtacatatttcctgtttatatattctacacataatgtggtattacagaatgacgaattatagaaagatctggaatattattcttaactaaggaggcagtaagataattaaggagacattgaaagtagacttcagagttcttttcataaaataatagatttatttctcttgattaaggtttttatttggcctaagtctgacttaagatttttataaattagcttcatcattaaataccaatgtactattttttatggtatactaaattgttgctccatttgagaatattctaatagtattagggaaagttagtcttgttaattcatatcttttcctatatatgaataagaaagggcataaaatatgctttttttttttttttttttttttttttaagaaatagggtttt

SEQ ID NO: 30629 - DNA, 1047 bp, Homo sapiens
gttagcaacagtggacagttggaggcaggaagtgtgtgaaatggataatcatttagaagctattgcaaccgtgtgggtgagaaaccaggaagcctaaatcaggaaggtgactggaaaggagatacatttgtgagaatggtttaggtagcatttacaggattggccaagctgggatagtcatagatcaaggcaagcagggagagaggtgactccaagattttaaatcataacttagaagataaggagctgctatctgaacactgatcaaatcagcctgaatatttattaataatttgggaaatatctgccttggtacatgttgactttgatatattaatggaaatttcagataacgttttggaaacgtcattctgtaagtagggagaaaaatcagagacagaagtataattttggaagtatctagccaaaggaagttgaaaccatttgagtagatggaataatgaaagaatgaagtatggaagctgaggtggagaaagcctgaaaaattagtctgtggtaggacctccattaaatcagcaaatagcaggaacagaaagaatgagctgggtaagaagagctccaaaagattgagggagaactagaataaggaagaatcataaacaataaaaggaaagggaattctaagaagcaagagagggtcaaaattcatttacttcagagctaattgagaaaaaaaaggtgtttaattcatccaaaatctctaaagaaaaccttctgttggccattattacagataacctttaacaatgataaatgtacagtaactacttacatatgaatgagtcagtgaaaatactcggacggatttttccctttcggtgcattcagggtctgtgtggaagaattaatgctttcagaatatttgtttgtaaacacaccatctctaaagaaaattttagggtttctattgattttttgatcaggtgttcacatatgtttaaaattataatggaagtcaatagataaacgtgacttggtgtacaatatttacctatacatggcattctagaagcatatatcattaga

SEQ ID NO: 30630 - DNA, 1032 bp, Homo sapiens
gaattatgagtgagtggaaaaatatatgatccagaagtgatgcagacagaatgtgaagaggtcaaaggatcacttctgtttatgggaaccaaataatgacttctggaaagttggtgattgattttagcatgcctaaaacagaggatggggtttgggtttgcacatcagggagatagaagagagaaaatttcaggatggtgggacaatgtgagcaaaaggtaagaaaatatatgtattttcaatccttatctggatttaaagaaaacattgaaataagtttgcttaacattagttaatccttcagtgttagctttaagaaattataggaagtaaaaatacatctactgtttctgagtatgggtttcacatgaaaatgtgctgcgtcttttatgtatacaatgaattatgaagaaaagctttggataatatttcaggacctataattggacaagtaagactgagatgatataatgcttatttttgcatcctcagattctagcatcatagatggcatgtagtagcttacagaacttcttgatgaattcgttgtaatttcagcttgaaatagctaagtagccatagaaatagagtataatgcatggagcagatatctgaaaacagatttggcaaaatttgacaagtctctgggttcagcgctgccataaacagaattgtcaaatatgattttaaggcttgaagctgggatgagaggtagaatgatagttccatcaaaaatgaggacaggagtcagtttattgaaagataatgacttcatttggtgatctgctgttggaaatataggatagtggataggcatcttagattcagatatagataaagtggagaattatctctttggaatggttgttacagacagattactgaaggggaaagtatagagagtcaaaggtgatgctgaagagcaggtttttagtgaatgagtatttttgaaggagagaagaaacggaagcatagaaggaaagaaggcagtagtcagacaaatagaaggtacatcaaaacgtcagtaacaaa

SEQ ID NO: 30631 - DNA, 1051 bp, Homo sapiens
ccccaaaagttcagtcttttcaagaataaaaaagtgtattatgtttaaaatgaatgtatagaagtataattagtatatttgtattttctttcatcatagaccattgaaataagtagcagaaaatgactttgcttttttactttaaaactcagtaagggatgaaagttggtaggtaataaaacatattaaatgtaatcaagaatactgactgtctaaatgtacgctataaataaaattatttccaacctctctattaccataaactattagaatagtattttcaaagaaggtgaatgagtaagaccataatttttgtaacattaaacataagaagtcctagatctattatgtcttgcttatgtatcaattatctttgatattatgtggattcttcttctgaattatcagtgttactaaaaaaaagaaagagacagaaagatttgaaatgaagtaggcttatttacttatatattatttgctctgaagggtaaaagccaactaaatggacttacaaacatacggaaaaattaatgtataggatatttttccaaccaaaggattaaataatatgaaagagaaacactaatattagtcaaacagagctacctttaccctagagagttattaaagtctagatgtgttttatatgcaaaatggcctgtcaggattatggaaaaaaattctgacacctgcttctcatcagtgccccagaaacaaaggtgaagaaatgggtttctgagcatgggactgcattgcttcctgggtttgtcttaaaaatacatgtgtttttatgtggcattttcatacttatgtatgagtctttcattcgtttaaggcagaaaaagtgccagtaaaagtaaatgtctagtgctaaaacaaaatacacccttttcaggataaaactggcaacaagcattttattatgttgtaagagaacatttttactgttttctcatatactgttacatctctctacattctgtgttcaccaaaaatttaaaaatcactagtcctgaaattatgaaaatcggccactagaatatttgactaa

SEQ ID NO: 30632 - DNA, 1063 bp, Homo sapiens
taatgttctacacaggaaaccactatcttctaaaatattttatggaatcatgaaaaaatatttctgctgggtgggaaggcttccgtgtgatttctcttgaagaaagtcttcaatcccattttgaaatctcaattcctccaaattccaaagctgaaatttcacacctttcatgtttgcaagttttaatgagaattatatgtatacttaggtatcaactgcttctagtgttggatgagcttaggtggaaagcttcattaatgagcaatagacaacctcactgaatctacttcgcaatgaatattcagtctggagttcatcttaactgggtccatgaggcacactgccaaaaagcaacttgctattaagcatcaggtaggagcagaaaagagactgggtaaaataattacgttctttaaaaaacaagtttgattatggaatctatttaggtcctgttggttctagtgaagttgagtcagggctagtaagaaaatgtctggaaaaagaggaactgatttgaacactgctgacctttatgcttctgccatcagaaagggggtgagacttcaacagccaatgcaaaggaagctgagaaaaaatcaatttagctttctctgctagacagaataaaggtctctaaagatatccatgttctaattcccagaaaccgtgaactgttattttatggctcaaaagggattgtacagatttgatttaattagggccttgaaatgggaggttatctcaggttatctgggtgtggccagtctagttacatgcacctagaatgtggagaaccttccccttttgtattcaaagggagatgtaattatggaaggcaggtcagagagatacaacattgctctctttgaagatgggggtgagggggaatgagctaagtctatttgtgtatttgtactccaggccctagctagaatgccagcttcacaggggccagaattttgtcctattcacatttgtatcactggcacccagtacagtgcctgacacatagtaggtgcttcataaatatttgattgaataagtgaactagtgaacaaatgaa

SEQ ID NO: 30633 - DNA, 1043 bp, Homo sapiens
cattttaattagaatagtatcatgagactcatgtaagcatatgatattacacatcggtattttccctatagtctggaacattactggaatgaaaatttagagatgcatttttacttctccagcacatgcaagaaataatacaacatgaatccttttttattttaggaatgttatacccacaaaacattgaagtatgttttaagttaagcaaacaacaagttttgaccaagaaaattagaaaattaaggttttcttagaaaacaaacaaaattatggcaagaaattactgtcctagtaaaataagatgaccctatatggaccgttgtacgtgaatatttatgtccttttttttttcagtttcacgtatattctttaatgaacacgagaatacagttttagttttcatttgatggcagttttcttcactctccatttcttcaccacctcctcctattttcttccccttttttctgctattcctccactcttcattacacctacatggcttagagttgctggtagattttggtgcccatgctaaaatttgaacagaaggaacagtataaagatgagctgaagtaaatcttgaacacctactattttgccttcttatatcatctcaattgacaaagtcaagattgcagactgccttgacttatgatggggttatgtcctgataaactcaaggtaagctggaaatattgtaagtcaaaaaggcatttaatatacctaacctacccaacatcatagcttagtctatcttaaacatgctcagaacacttccattagcctgcagttgggcaaaatcatctcacacaaagcctacaataaagtgttaaatatctcataaaatttaccaaatactgtactggaaagtgaaaaccagaacggttgtacaggtgctcaaatacagttgctactgaatatgtattacttttgcaccattgtgaagtcaaaaaatcataagtcggtgactgtgctcggttaaaaagtagtggttgctgaccaacttcatttttctttaacagcttcaattgtgatgt

SEQ ID NO: 30634 - DNA, 1021 bp, Homo sapiens
gacaaaaagataggaaaacgtttagcatgcgcaaagtcaaagtcagggatccataaatatcattgggtgtgtaatgaattgttagtagttggatgggggatgctaaaatataaagtgagagatccttcatatattttcgtttcctacccttagttccagatattgatagagatattttagaaaatcccaacttaaggccaggcgcggtggctcatgcctgtaatcccagcagtttgggaggccgaggtgggaggatcacaaggtcaggagatcgagaccatcctggccaatatggtgaaaccccatctctactaaaatacagaaaattagccagatgtggtggtgcgcacctgcagtcccagctactcgggaggctgaggcaggggaatcgcttgaacctgggaggcggagcttgcagtgagccgagatcctgccattgcactccagcctgggtgacagagtgaaacttagtctcaaaaaaaaaaaaaagaaaaaaagaaagaaaagaaaagaaaatcccaactgaagtatatgtgaacaaatgaacagctttttttttttatcaaaaaagcaaaggtctttgaaataattttattcagattttgctcacaaatattatatttccatttttatttaaaattatgaggatgatggctaaaagtaaaatgaaccaagttttgtgcatgctgcattttaacaagttgggtgtctcattggaatgcactgccttcttgttccacatttatttttggaatttaataaggcgcctgtcatatctgcctcaaggctaaaaaacatcatgggggagaaatccaaagtactgtcatgtttgagtgacatggagccaattttattttatttccttttcatggggggtggctcaaattagccaggctcacttctgaaaacgcattgctacatcatctgttctaaaggccttgtgctggttaacgggtaatgacattgcccagtgacatttgttaggtagatttgactcagaaaaccaggggaggattttcat

SEQ ID NO: 30635 - DNA, 1026 bp, Homo sapiens
attcatgagggcggagtcttcatgacttaatctcttctgaaagatcctacttcccaacagtgttgtagtggagattaagtttctataacataaactttgggggtcattcaaacatttcacccctggctctccagggttgcagtctcatgtctgcagctttctcaggctgcagttgcaatctagtggccctgcagttccaggagctcaggggctgctccactctcaaggcttcactaggcattgccttagtagggaatctctgtgatgaacccacccctgtggcaagtctctgcctgggcccccaggctgtctgatacgtccttggaaatcttagtggagattgtggccattaaaccgtggccccacagctcttccattttagggacctgcagatttaatatgatgtggacatcgccaaggttttcagcttgtatcttctagagccatgggtcaagccacacacacctggactcgcttgaattacaagtgtggtggccaaagggtgctgttttggaattcagggagcagagttctagggcagtgcagggcagtgaatgctgtggtcttgcaggcacctctctcaaaacgttgctctcaacgccctagcttgcttagaagatctcagaattgcctgataagatacggtcattatctctttatcctgatgaagagaatctggctttcttctgtccatgttaattactttaggaaagggttgcttagccacacccttagtgatatggatttgttgcgtcccgacccgaatctcaccttgaattgtagctcccataattgttgttaggagggacctagggggagatgattgaatcacgggggcggtctcccccatactgttcttgtgttagtgaataagtctcacgagatctgatggttttacaaggggtttccactttcacttgactctctgtctgtctgccaccatgtaagatgtgctttcgccgtccaccctgattgtgcgggctccccagctgagtggaactgcgagtccgttaaacctttttcttt

SEQ ID NO: 30636 - DNA, 1040 bp, Homo sapiens
gagtgcacacacacactcgcactccaaaaatatatgccaaaaaaagcttcccagaaaaaaataatttaaaaaaatccctgaaagctactggaaagtcatacatatgttaaatttggtcatttagcatcataaattgaagttggaatatcatgaaataggcagatctgatcctcccacattccccagcatttacaggaagtctgagacagcagaggttggatggcgatgatggtgatgatggtgatgagtatgatgaatgtgatgatgaaggtgacagctaacctttattgagttttgctataaactaaatgccactctaaatactttaattcataaaattctcacaacagtttattttacatctgagaacactgagacacaatgcttagattgtctgagtaacacagtaactaaatgcaagattctgttttctacgttgtagtgaaataccatcgatctcagtggaacaagttgcaaagtaatttgtagaaccattaagtcaattagggaatttaaaattctgaactatggtggtagaaaaaaagccacatttcaaatagacatgacttcagagaggcaaagctaaaatttaagccatttacttgccagtttttatttttattttaatatttttaagttttattttaagttcagggaaaatgtgcaggtttgttacataggtaaacttgtgtcatgagagtttgttgtacagattatttcatcacccaaatattaggcctagtacccattagtaatttttcctgatcctcttcttcctcccaccgtccattatctgataggcctcagtgtgtgttcttcccctccatgtgtccatgggtccatatcatttagctcccacttaggagtgagaacatgtggtatttggttttctgttcctgtgttagtttgctaatgataagagcctccagctccatccatgtccctacaaaggatataatcgcgttcttttatggctgcatagtattccatggtgtatatgcaccccattttctttatctagtctatcactgatgggcatt

SEQ ID NO: 30637 - DNA, 1032 bp, Homo sapiens
cctgctgggtgtccccacagggttgcttgtatgtccttaaaatatggtgtctggctttttctgaagcaatccaagagaaggtagaaacatggcagacttggaaatcacacacccttaccacacatgattgtattggtcatagatgtcagccccattcaaggtgagaggggtctacatgaggacatgaataccaggagatggagataattggtggacatattgaaggctagctgccacagggagaaacagtatatttggtattaaacaaataatcttgacatcatgctcactgaattgatgccccctccccaaaataaatccctcattaatttgttgttttcaactcataactcacacaactatctttaaacctctgtatctatatttagtttgtagggtacacacttatataatgatgtctttcttctgattaggcacttaaattagctgtatttaatggaataatgatattaaataactttgtaaatcaaaaggtgaaaatatatgcctagaataaattatcaagactttgtccagtataatgagtggtgattattttccagtatactcttcaatttattactgtaataatcttttaaacccattaacagtcaatttgctctgtgatattaaaatgttagccacattatttgcctgttaatgtaggttaaatgttaattatgctgttgtatggcggctaagatggtacatccagaaattacacataatattggttggttctttggccgtcatacactaatgtgcttcattattattgtgctaattttagtaattttagtacaaactacataatactctgtgttactaaaacagaactacccatgatatattgcttgcaaccaaacattaggcaattttggccccatcatttaggagtagtttacatgactaaacaagtaatgattctgtaactctcaaacttgcatttagtgtatttagaatgaattgcttagtatattttaaatatttgtagatcaaaatgtaatcccttttaaaacaaatgtaagtcat

SEQ ID NO: 30638 - DNA, 1097 bp, Homo sapiens
tctctacccttagtacagaatattgcagaattttttctcctggtctcactgcagtttcatttcattgttcctttgttaattttcctttgccttgatgcacttgttgacttaattttatttcgcggcatgaatttgcatcatgaatttgcatctaaagtctggaaaaagagtgtaaacaaccaaattgcctttataatgtgagtgagaccaaggcacctctgggaaaccaaaggcctagtcttagatgaagaatttggggaaagattgtcaactgaaatgtccatattttcatgaagtctctcagtgtggaagttcagtagaattaaggtgttatctgaatcagaatccctggaaacaacacctgagcataggtatttttttgaattataacatgtaaaattaaaagatggcatttctggcatggaaaagagcaagttcaaatgacctgaaaagggaaaaagcttggcatggtttggaaagagtgaaaagtcacacatggctgggacagaacgagtgaaagggaaaggtttgggagataaagttgagaagtagacaggccagatgtcaggcagagccttacaaaccataataagacgttgcatcccatttcaaacacgctagaaataccgaaggtttctttgttaagtcaagtttgttgaagtagaattgatatacagtaaaatttacttttttagcataaagttctgtgggttttgataagcacatggagtcaggtaagcatctctacaaccaaaacacaaaacatttctctcactccaaagagttctatcacatacctttatgatcaacccttcctcccatccccataccctaggagctctatcacatacctttatgatcaacccttcctcccatccccttaccccaggagctctatcacatacctttatgatcaacccttcttcccatctgcataccctaggagtttggctctgctttctcttgtatagttttgccttttccagaatatcttataaattagatcatacaatctgtagccctctgagtctggcttcttgcacttagcaaaatgcatttgctattcattcatgctagtgtgtgtacaccaagagttt

SEQ ID NO: 30639 - DNA, 1033 bp, Homo sapiens
tagtaccattcatatctatcttcatattctaattatgattaagttttaaatagcagttatgtctttaaagtgaatgtgtgttatgttctgccctaaatataacttaacattgcaggtagaactctagtgtttgaaaatgtttagaagtcagaattgcaattactgagtgtgggataaatattagctataaatataattatgtataaatataatgaatataaatattagttataaaaagtataagcctcttccaactcttaatgtttataagtctactaaaaaattaaagatttctaatagtttaggagttgggagggaaaaaggaaaaaccacaaacaatgatgttggaatgcaagaaatataatttgatagtgcagaggtgagcaaaaaggtctgttgggccaaattcagcaaaattcaatgcagaaaatatttactatctgacccattgaagaaaatgtttgctgatccctgtatgtcatgaaaagataaacgtgaatttgatttgaatggcaaaaagtagaggtatgaagtaaaatgcatatagtccaaaatgtatatagtctccacagagccataaagatactccctgagactgcacaatttataaagaaaggaggtttaattgactcacagttctgcatggctgtggaggcctcaggaaacttacagtcatggcagaaggtgaagggaaagcaaggcacagccttacatggctgcaggcaagagaggaagcgaaggggaagagcttcttcaaaagcactttaaaagcatcagctctcctgagaactcactcactcactgtcatgagacgagcatgggggaaaccacccccataatccggtcacctcccagcatgtcccttccttgatatatgggattataattcgagatgagatttgggtggggacacagagtcaaaccatatcatagggatttctccagaatatttgtgttgtgatgctatcttacgtacttatttttaccttttaaataaaaattggagtgaaaatggcagagtcagaaattaatg

SEQ ID NO: 30640 - DNA, 1046 bp, Homo sapiens
caaaagatgaattcaactaaaatgaaaatgattttggagtagttcataatattagtatatcattgatgtgacctcctatttttggacaagatttcgaaataccatataataggattttttatctattgaatgatattctactgcactatacaagaaagttaatatgggaaattaatatttaatttccaaaaaaccatataatctttgatattgctaattcttttatggtataaattttaatatgtatttgagatatatcagctaaactgacaatctataatgtcagtatcatatagcacaaatggaaagaaacaccctttactggacaaaaatatatacctattgtaatgacttatgaatgaaattttcctggcccaaagatccttacctgtaaaatgaggaggttgtagtagacacactctaactttcaaccatgacatatacattgtatggctgatgactttgtgcatttctaatttattccatgaccccacttgtttaatttgtttggattaactatatgctatttgtttgtactgagattttgttttatttttttaattacaggttatttgtaaaagactatagtgtattatggcatgtcacaggctaccaagcatcaaagccataaagagttaaactttttacatcattagggtaacattttctaaattacttttcctcaggagatggaaccctttcagtctgaaaatgttaatgctccctcttcccttcaaaatgggtcatttgctcttcttgcctattggtagaattagctatattatagaatccagaaaattttaaacatctgttatgaatttaaacaggtttaataatataggagaactttttgaataaccttatatgtcatttagactgccatttatttataataagtctcacaattgttctgaataattaaaaagtaatttatcctgggcttcctttttatttcattaaagatatgcaaagtcacatgcagtatgtaaaaataaatctatatactataatccatggattacttaagacttttaaaaatctttctt

SEQ ID NO: 30641 - DNA, 1020 bp, Homo sapiens
cgtcctccagcccccagaatgttagatccactgacagcttgcactgtgctgctggaaaagccacagacactcaatgccagctagtgaaagcagccaggaggggggctatatcctgcaaagccataggcagagctgtccaagaccatgacaacccacctcttgcatcagcatgacctggatgtgggacattgagtcaaaggaaatcactttggagcttaaatatttggctgccccactggattttggacttgcatgtggcctgcagccccttcattttggccaatgtcttccatttggaacggctgtatttacctaatgcctgtacccccattgtatctaggaagcaactaacttgcttttgattttacaaccccaaaggtggaaggtacttgctttgtctgataagacttcagactatggacttttgaattaatggtgaaatgagttaagattttgggggactgtttgaaaggcatgattggttttgaacgtgaggacatgagatttgagaggggctggtggtggaatgatattgtttggctgtgtccccacccaaatctcatcttgacttcccacatgttgtgggaggggccaggtgagaggtaagtcaatcatgggggcaggtctttcctgtgctgttctcatgatagtaagtctcaagagatctgatggttattataagggggaatttccccgcacaatctcttttctcttgtctgccaccatgtgagatatgtctttcaccttctgccataattgtgaggccactgcagacacatggaactgtaagtccaataaacctctttcttttttaaattgcccagtctcaggtatgtctttatcagcagcgtgaaaatggactaatacagttgagtatggtgaaatagctcatcccttgtatcacctaataatggagactcagacagctaagacccactctgtaacttgggaaccagaggctaaaagggccttttaccctttaaaacaagccttgcttgtggcacctgctcttagtctttt

SEQ ID NO: 30642 - DNA, 1670 bp, Homo sapiens
gtactgtgaaaataagtgtgcatatataatgtcataacaaaacatgtacaggttgttaatatgtatttctacaactagagtttattgacatcaaccagtatgttttggttactctaaagttgaaatattataaatactcttcccagtgatttgatgtgtgtatgttaatgtttttaatatctggaagctattattggaatgctttatatatgtatatgctgtatatatgtatataactcattttgaatgctttccatgaatcagggattgtgataagttgtttacctgttttagctcatttaatccactaccctacaagctatgtgccattattctcatttttataggtcaggaaactaagaccagaagagatggcttgaccaagtcctgtacctagtatgtgataatcagactgtaacctagccagtttgacagccaaaagccagcccgtgcacttagcctctgcagtgcaatacaatacattgtattgtatctaggaataagcatttggtatctattgtaccatctatgcatatatatttgatatatactgtagcttactaaagcagttttgattgagtggaagcagtggaatggacactgttaaaaagactcaaggcagcagaaactaaagatgttcataaatgtgaaacagaagaaaaaaatcaaattcaatctagcagaagttccccatcagaagtgattctcaggccaggcgccgtggcttacacctgtaatcccagtactttgggaggccgaggcaggtagattacctgagtccaggagctcaagaccagcctggccaacatggtgaaaccccatctctactaaaaatacaaaaattagtcgggcatggtggtgcatgcctgtattcccagttacttgggaggctgaggcaggagaatcacttgaactctggaggcggaggttgcagtgagtctagatggcgccgctgcacttcagcctgggtgacaaagtgagactctgtttcaaaaaaaaagaaagtgattctcaactcttagtccaccccccaacccacttgaatgggatatgcttagatgagatagtaacaatggctcagttataacttttcttcatagcacttatcgaagttataactacacaaaacaggacaatgtttgcttaccacactatatccccagtgccttatataattggcaagcttcaacattcacatcaggacttttctgctacttagatggagagtctttcagttatttttgtattcaccactgctttggaaagttgacattatagagtgttaatgtactggacttcagtatctcgtgtaatatattacacaaattatagcagttctcaaaataccaaagttatggtgactgcaaaccagtagaagttattttatgtttattatcttgtgttttgaaagcaggagagtatgggatgtgttttaaatgtttatcctaaatgattaaagtttgtcagtctctccatatttagatttaaccttgaatatctggaaatcctaccagtcccaaatacaatggatgtgtttttttggcctttatctgtcgtactgtcatttgacaaatctctcaaattatagaatttatttttaaagtctaaaatttacatatattccatgctcatgagagtatgaagatctctttttcagctgatgggagtac

SEQ ID NO: 30643 - DNA, 1133 bp, Homo sapiens
gtgtttatatttctacatgagtgtgtagtcatgtcataggtctttacattcattcaccattcactcactgacacacctataacaacatcattcttgcaagctccattcatggtaagtgccctgtacacataaacagcttttatcttttacaccaggggtgtccaatcttatggcttccctggccacattggaagaatagggattgtcttggcccatacataaaatacagtaacactgacgacatctgataagctaagaaaaaaaaattgcaaaaagattacgtaatgttttaagaaagtttacgaatttgtgttgggcctcattcaaagccatcttgggctgcatgcaggctgcgagttggacaagcttgttttatgctatatttttacttacttttgtctgtttagatacacaaatactattgttacagttgcctatggtattcagtacagtagcatgctatacaggtttgtagcccaggtgtgtagtagactataccatttagctttgtgtatgtacattaagtgatgttcacacaaggacaaaatcacctaatgatgcatttctcagaacatatccctgtcgttaagcaacataatgactgtactatgttagctgccccatcagaaccacagaagtgttggagagaggagcaatttccttaaagaactggctacgtagacaaaaataataaaaaataataaataatcacactacaaggaaaatgtttacattattttgcagattaccaaaactgtttcagttattctctactgatttttgaggaaaatatgtattaaaataaattattcgtaaggaagaagtattgctgtttcagtgcctattggaattttttccctctttcatctatataatctttgttaactttagtgttatgtgaaaattcttatacaactttcaaaagttctttggtttaaaatgtcatttattgacttctcttgcattgcctgctagctgatatggtttcactgtgtccccacccaaatctcatcttgaattgtagcttccataatctccacgtgtcatggaagggacccaatgggaggtaattgaatcatggggtcgggtttttcctgtgctgttctcatgatagtgaataagtctcatgagat

SEQ ID NO: 30644 - DNA, 1028 bp, Homo sapiens
gcactggcaaagactaaatggtgtattggcaagctgtctaagagaaaagaccaaagggtcttgtcttcatggagctaagtgggtataatcagtctcttattttgagtggctagatattcttggactagactacacatgtaatgttagatcactgatcctttctgattatgttgctaaattgtactgtatttcatacagcatttatgcctagcctaacttcagtctctactctataatcaagttttacttgattgcatttataatttaagtctaggctttcaactaatttaggaaatgacttggaaataaaggaagaaaggctaattataaaggtacatttgttttttgcgggggctgggccccacaaaaggtgtttgtattgtaggtcccaatgagtattgcccatctccacagcatctagtactcttactcctgactctttatattgacgaacaattattcaacaccttaaccaattttgtatctattgtctttactaatcatttgtgacatgtgaacttagtcatttgagagaaaaatctaggtcgtctagcgttctatttctttgtcttctctgaggaagagataatattcttttttttttttgaggcagttggtggtcttaattcttttctcttactaaacttcatgagatggttttgttcttccctattacactagagtattttgtttataggatttgttgtagctaaagtcaatattaaaaaactcttagtgcatttgtttgtattggccatcgttagaaacttagtattgcatttggtcttagttgtgactagcatcttttccccggtaattttggtctttattgctccttttattgattttggagtaaagtggttgggactatagttgttttatgagcaaagagatagattactaattggtatatttctgttggtagggatggaaagtgatcaggggaaaagaaataccctgttcccacctacattagtatttatatcagaatctagagggctgtagatgtgtagttttggaaaatggta

SEQ ID NO: 30645 - DNA, 1057 bp, Homo sapiens
ccatagggagacataaaaaatgagacactgtcacctgtaatttaggaattcacagttggggggtgaggacatacacatacacagatatttataaaacaaaattgaaatgtttttaaagataagttattcttggtggaaagaatggggaattttaactgtacctcagggcagagaccaggataagtggggagaaaaaccttcagattagaactgattctcaaagaatgaataggaggatcagtaggaatttactagctggataaagtgaaaatcggatgtgccaagttaaagtctgcctgtgggaactgtaagtagttcttcagggttacacagcatgtaaaggactaagaaaacgtgaggctggcaaggtagtattcctccctgtaatctatactataccatatgtaggcagtatgatatatatacatatatatgatgttaaagacattattatggtgtctcctccaatcaaaataagcctttagattattccaaaccactagagacactattataactaagatgggtcgacaatagattcccaagtaaaagctgatgcaattatccttgagtcatcagtgaatgtttcaaagcttgagtactgttcagataacttccagggggctcattattctgaggcttatataccttattagatttggaaagattataactgccttctttatgtgtgccacatttccccccttatttggataaataacattacttaataagcaaaataagtaatattttttcatatagcactataataaaagttcccataagcagtttttttaagcctagtttatttcttgatgtggaaaattgataaatctgttaaaatacacataattttgacccttctctcaaagaatatgagatttgtacctacaataataaatgggggtctagaagaaatcttaatcaccataagtttatgaatcaccataagtccattttgtattatggatagtgggcttgtcaaatgtgaaaattaaataaattagaagctaaaatgctatctattccagattattttcaagtttaagaaaaagag

SEQ ID NO: 30646 - DNA, 1026 bp, Homo sapiens
ttgtcaaaggcaatttgaagattctcaacattttatagaccaccttaatagacatagctatccaaatgtgtatttttgtttgcattttaattgcaacgagtcgtttaagctgccgttccagcttgcccagcacacaaaaagtcacaggatatttcaggctcagtgtagttttccagaatgccatgagctttttgaagatcttcctctgctgtatgaacatgaagctcaacactatttaagtaaaacaccagagtcatctgcacaaccaagtgaaacaattctttgggatgttcagacagactcaaatcctaatcaggaaaaagactcatctagtaatgagaaacaaactattagtctgccagtttctactagcaaatcaaggaaagagtctacagaaccaaagacatgtatagaaagtatggaaaagaaaacagacagtttagttcagaatggaaacgaacgttctgatgacactgtttcaaatataagcttgatagaccaaaagatgcctgacatagagccaaattctgaaaataattgtagtagtagtgatatagtcaatggacacagtgaaatagagcaaacacctttagtttcatcagatcctgctttgaaaattgatacaaacagaatcaggacagaaaatggttccattttgcccagtgttgtaccacaagaacacaacaccttgccagtatctcaggcaccttccaaaccaaatctgacaagtgaacatacttcatatggcttaattttaacaaaaccatacgtcagaccattgcctcccagttaccttgatgaacggtatcttagtatgccaaaacgcagaaaatttctgactgatagagtagatgcctgttctgatcaagataacgtgtataaaaaatcagtgaaaagattaagatgtggcaaatgcctgaccacctactgtaatgcagaagcacttgaggctcatcttgcacaaaagaaatgtcagacactctttggatttgattcagatgatgaaagtaagtcttctgtcttctt

SEQ ID NO: 30647 - DNA, 1108 bp, Homo sapiens
tgtattcaaagctttatatattcctagacctttgcttatctgttaaaaacaagacctagcatataacatatattagatgctcagtaaatatgtttaatgaataaaaccaaagttatcttctggaatcataatacatgagttctaatacaccctggtagatagaattatctagttcttatacttttatttgttgttgagatggagtttcactcttgttgcccaggctggagtgcagtgacacgacctcagctcactcctgggttcaagtgattctcctgcctcagcctcccgagtagctgggattacaggcgcccaccacaacgcccggctaattttttgtatttttagtagagatggggtttcaacatattggccaggctggtcttgaactcctgatctcaggtgtttcacccgcctcggcctcccaaagtgctgggatcacaggcgtgagccaccacgcctgtcctagttcttatactttttttttttttttttgagaccaagtcacgctctgtcacccaggctggagtgcagtagtgtgatctcggctcactgcaagctctgcctcccaggtccgcgccattctcctgcctcagccttccgagtagctgggactacaggcgcctgccaccatgcccggctaattttttctattttttagtagagatggggtttcgccatcttagccaggatggtctcgatctcctgacctcgtgatctgcccgctcagcttcccaaagtgctaggatcacaggcctgagccaccacgcctggcccctagttcttatacttttatgaaagacaaagaaggtgaagtgctcccctgaccccccaaccccgaaaaaagcttagtaacatgctgaaggtcacatagttttgttgtggtgacctggcctgttttgtttttaacagcaaagcccatgtgtttttcttgcactttgtttaccgtctgactactgccatttccttaatttcaaagattttcaacttgaatcctcaatttcttcacatgaaaaaatggaccatctagattagatggtttctaaggtctgctgtgattttaaagttatgtagcattgtggctgtatgtcttcacagcagttcaaga

SEQ ID NO: 30648 - DNA, 1032 bp, Homo sapiens
gtagttcatctcaacctctaaatacagcactgtgtataattcatgattaatataactgttgatatttttaaaatattggattttacaataaacacacaggaagagaaaagacgcgtttccctggcaacttgggaaatctattcctggaaatttgtcataggaatttatttccaagtcatcaaatttatctcatgtattcttggaatttagtttgaaccacatgtagtatcttcaatatttacaaatacttgtacagtatttatatatctggaatccattgctcatgataaaagagatgatactaaaacccaaaaactaaataaacaatgaattaagtgataggaaaatgggaatacagaattggaaagtccctgtcatgcagttactagaatataaggttgtctgggaaatgactattaactgttcctagagtgttactaggatcagactgtgatgaattttgtgtgccaccctaaaatgctcacatcaatcaaagacaacattttaagcaggtgatcagggaggatagtgtaattgaagaacaaataggaatcagaaagggcactgtaaaagttcccattataggttaatgggacctagaatgagccttttattctttggttatatatcttgaggatttagcatcaagtagaacttttattattttgttaagactccaggaagggctattcttaaaaatcaaatcttcattattttcttttcttttatgttaatcagattatagtatttattataaaggcacaaaacaaagagaagtcatatgtggaaaactgagtaacttgtaggacctatagaggactcagtgaacatgaaaattatctagtaaactaaggaaagcaaaagaaacaaacaaaagagtgtgtgttgggggacagaaaagtactctcgcagtagaagttattatatttcccttctgtataacagtcaatattcttttgggcctaaggttaagaataagctaattttttaaaaaatgtaaatggctacctcccttctcaatgtaaagtgaca

SEQ ID NO: 30649 - DNA, 1022 bp, Homo sapiens
ctgagaggggcttttagaaagatcttgaattgggctgagattgcaaggcctttttattcctgcaaaatcactggatgtgccacccttgggaaggacctgaactctaggacggccactccatgcagcaaagacaatatctgaaagggttgaaagctgcagggtgtctgctgacagcatcccagcagccggggctgcagtccttcaatgaagaggtattcaggtggcaaattgcagtgtcagcctcttgtatcaacatagtcgcacaacaaacatgattcatactaagatataaatgattaaagtttatatttaccaggatatttcattttagcatgagcaaaataaatgagccaaattacaggagtgattatagctttaggatcattcacacctaaacttgaaccctgccattgcctcttattcactgtaagcttcagtttcttcttctataatatagggatgatgatacctattttggaggatagtgtacagattagaggttatattttaagtaaaggacttaagcgcctagtacatagtgagcatttagcaatgatgacttatttttaatgagtaatcataaaattgatattaacttgattaacttttagtttgatactaaatactttgctatgattttgaggggtcgggggagaagggaacaataaggaaataagaaagctttcccagaacatctcatttatgttgctgctgatgctttatactaacctttttatcatattttttaatattattgattttattacattataatagcaatacctcatattcatatgatataaaaataatgtgtagatgttttgtgagttcccttaatatccaatgtatacttctattgaaatgtgggaatgaaactttgtaaataaactaaatgaatactagttgtgagtatcttaactacacacctgggaaatcgaggactcttgtccgatttcccaatcagacaagattgtgagctgtgggtctctgctgtagctgggtggcaggtataaatggaacac

SEQ ID NO: 30650 - DNA, 1022 bp, Homo sapiens
tccttgtcctactcctaaaatatttctctcattcaaaaattagttcatttatttgcttattcaatgagtggattatgtggaactgtcctgggtgttgggtatcagtaatgagcaaaatgaacaagtcctcattacctgtcccttagataaccacagtaactctcagatccatctgcctccattcctcatctagcccatcctaaacactcttgccaaagcaatgtacttaaatctaattgttgcttaaatctcacgagtgatgagaaaaacttccattatattccaaaccatctacatggtcattccccactgttctaattttctactattgtctttatagcacccagagtgattctaggaaaaagtaaaacttgtcagtcttctgctcagatcccaggattgggctaaactcttcaacccttccccttcctccttctcccagtcattctctttacctctctcctctgaggacatacaagatactgtctaccttgggattctttactgctgtttcctttgccttgaatgatgtttcctgatgtatccatattcttttattcaaatagttcaccatgaagtcttcctctgacttgtctcatcctttgaggttttatttaagtatcacattttcagtgaagacttcccaggccattcattttgaaatcttcccctcctctcaacatacacaactgtgtcctctctctggcttccgtcattgcttctcctgaaaacataacactatgtaagaaaacacattttaacacttaattttgttttgttgtatatctctcccactggtatggaagctccctgaggagagatttcaagtcatagatttcaagtcatcattttcactgctgtaatagcaccttatagagtcactagtgcataacaggtgtttgataaatatgtgttgagttagtcaatgaaagatcaacttcatctctcactgcagctgcccagtgatgtccaaactcagttggaattttgggggttttatgcctttttccatatcatttcac

SEQ ID NO: 30651 - DNA, 1050 bp, Homo sapiens
gaccaatcacggacatttacttctgactccaagggtgggagtgattgtgttccttaagctattcacttgtttttgctttttggatattgattcacgtaatggtcatcgtatcttgtttgcattccctatagaagagcagaaaattacgtgtcttcctgtatctgaaaaacatacatagatacgctctcttaacatgccttctaaatagtaaactcactgttttatttattctctttatgtaccctttttggtctactcttcaccttctaaaatgtattttattgtaatctattccatcttgaattgtgggaatgctttctcaaatacgaaaagccatacatacatttaaattactatttattgattgcctactatgtacccagtgaggaatataccatttgatcctcaccaaagccttacgaggtaaatcttattatcgttattttatcagaacaggtctaagaaaatttactaatttgaccagtgtcacaatgccagaatgtaaattcaggtctggctgactctgaaacctgatgcttttcataatataatatgtcaataattttcatctgaaatgcttctgcaagtcaccataatgagaaaatttgcaagttcctgctgccaaggggatggttggagaaattggttataagagttgagaaaaaaaagattggcaatggtggtataaaaaggcaaaaacctcatattaattagcataacatctctttctttaacataggattaggtaagcctctaacacgcaaatcttttcacagggcatctctggcctttattttctaggcatgtggaactgagccacacctctaattgcttctgcttctgtttccattgctcctgctgttgctgaggacatgattgataggagatgatggctagtggagaaccagggctcagaaagacacttgctatgtgcccaatgtgtatgcttgcacaatatgcttcattattagcttgacagatctccaagtggcagattgggaatgaattttggacctggctagcatttctgttacagacattgggttttta

SEQ ID NO: 30652 - DNA, 1166 bp, Homo sapiens
agacacggtggctcatacctgtaatctcagcactttgggaggccaaggcaggcacatcacttgaggtcaggagttcgggactagcctggcaatcatggtgaaacactatctctactaaaaatacaaaaattagctgggagtggtgtcatgcatctgtaatcccagctactcgggaggctgaggcaggaaaattgcttgaatcctggaggcggaggttgcagtgagacaagatcatgtcgctgcactccagcctggtcaacagagcaagactctgtctcaaaataataataataataatgataataaataataataaaaaaataaaaagcatacactttctaaatactctttgatgctgaaaaatatagacgggaaaggttaaagagtggctgtgattagtgagattagctttccagtttaaataaaaatttagcaatcaaattcagttaaaaagaaatggattactttaaggatgtaaaaatgtgaaagttatttggaaattatcaagttatttacaagtgaaattatccatcttggaatagctatgttaagatctaaagacgtgaaggtagtaatttgtaatcacattttatttgctattatttattcactggtcagtcatggctatgattatgtgctactgcttcgatgcctgtaatgatcagaaaaaaaatgcctttataatccagtggattctatgactggaaaagtcagtgaaaatattctatgaatcctcggaaaatactctttacttactccaaaagattttggtgtgttcgaaacaattttctaaaattacactagatacgaaagtaaaccttgtggaacctttacattttcaaccaactgtaccatgttatacatctcagcctgttgcatattgctacatttctcttagcttaatagctattgtgttctctaagatggtgccagtttataaagtttggtcatagtagcctaatgtattttcaaagaaagttgcattttttccccaaataattttacagaaaacgtctttggtaaaattgctaagtgaggaacacaggcttacaaatacatcccctaggtatgccataagttcatagtgaagttctttacactttcaggaacactgaggctgcagtcagagcctaccctattttaggtacatagttttaatatgctga

SEQ ID NO: 30653 - DNA, 1048 bp, Homo sapiens
atgaataaaaggtggtatgttaatacaatgaattactacactacaatcaagattaataacaaatgacattaaaactgtgtacgaaatttagcaatatagtattaagtaaaacaatcaagattaataacaaatgacattaaaactgtgtacgaaatttagcaatatagtattaagtaaagagtaagtccttatgagaacacatggacacaggaaggggaacatcacactctggggactgttgtggggtggggggaggggggagggatagcattgggagatatacctaatgctagaggacgagttagtgggtgcagcgcaccagcatggcacatgtatacatatgtaactaacctgcgcattgtgcacatgtaccctaaaacttaaagtataattgaaaaaaaagagtaagtccttaaattcacatctataatagtaatttttttaaataaaattaaagaaagctacatttttttatatctaaaagcaaaattaccatgtaaacgtgacttagaatatcaatagcccagtgtgtagggagacagggatgaagtgaggaagacaatatgattagatgcatgtagttgttatcaagtgtacattctgcatgatagatttacagatacttattgcagtactgaatgaatgtaattatgaatcaatgaatcaatgcatggatcgaatggataaatgaatgcatggattgataattgaacaaatatgtaaacaaatacataaatataagccagacatggtgactcatgcctgtaatcccagcactttgggaggccaaggcggttggatcacttgaggccacgagttcaagaccagcctggccaacaggccaacagggcaaaaccctgtctctactaaaaatacacaaaaatcaacctggtgtgatggtgcgtgcctgtaatcccaggtgctcaggaggctgaggcatgagaatcgctcgaaccaagaggcagaggctgcaatgagccgagatggtgccactgcacctcagcctgggtgacaaagcgagattctgactcaaaacaaaacaaaacat

SEQ ID NO: 30654 - DNA, 1030 bp, Homo sapiens
ttcttctgaacagagagaataaggaagtcttgttcttacatgaaattaagtactttttaatcctatgtgtcagtcctcatgtggcagagattttaatctgcaccaaaaatctatttgcaatctccttttcccagtatcccttgcagttatatttgggtccagagggtagttcttaccaatgagctgtgagtaaaagtgactaatgccacttttgggtggaagaagttaagaattgtgttgcttcttcatttgcctattgcctttgccatggagagcttttgttcttgaaacaatcttcctcattcattaattcttcaaaggccctggttttgtctccttcctcattattttataagagcacatgggatatgagtggtcctggcattgagaagctttgacatctcacttcctcttgtttcctgtttgggctttaatttctttacatattgaacggcggtgacattttaatttttgctaaattcatggtttctttgttagtacagtttcattcatcgttattagcttctgatcaagcagttgtttagatttattttttattttttattagtattagtagtgattttgagacagggtctggctctggcacccaggcttgaatgcagtggcacaatctctgctcactgcaacctccacctcctgggctcgagcaattcccccgcctcagcctccctagtagctgggactacagtcgtatgccaccatgccctgctaatttttgtattttttgtagagacgaggtttcaccacattgccctcactggcctcaaactcctgagtacaagcaatctgcctgcctcagcctcccgaagttctgggattacaggcagttgtagcctttaaactaagcatttcttatagtgataagtttttgctgtttctatatctcaggataataacatctgttttgacataattcaaataaaaaataattgtttcctggccaacatgttgccatttcttactataacaaccacaagattcacccaacattcactctaatgctacaatt

SEQ ID NO: 30655 - DNA, 1061 bp, Homo sapiens
gtattttttcttcattttataggtagcggtgcttgtgtatgatatagatggtttgggatgggatggtttagcagaaatgcttcttgatttttgtgtagaaaagtgacacaatcaggcctatgacttagaaaaataaatgaagatgcaaggaaaacaaaccagttgacacactaatgatagcccaaatgagagattataaaggtctgaaataaacctggggaaatgagggagatgacctttcagagattaaaaccagaataattaaaaccatgaccagttctgtgtcatgcatttgggaaaaaaacagaaccaatacattcatcagtttaagggaatatttacacatattgagttccttttggttccagaaccaactcagcatcaacaataccaacaggcagaggggaatagaggataaattgaccagaattgaataaaggagcaaggggggagttgtagctcactcaaacatgagaataatttaaacacatgtggaagaaaggatgataataccattgatcaagatcaaaaacatgaacgcataataagataatatacagcattttagaattgatgaaattaaggcaaaaaacaggtattctatgcgggtggttgtacaaagtaagcaattgaccactaagatctgattcttgagaaagatcttaaatataatttgtatatttgaaagccatgaaagttgaagagaaaaagtgtagataatagagcatggaatttaattttaaaatagcatcaaggaaaagatcttgagaacagcaatggatacctgctgagtatagacggagtcagctttggaatcaaagcccagactttaactgggaaacagttatctacaaagtcatttatgaaatcttactctgtttttgccctctcacttagtcctcctcaaggaatataagcctaatgagggtggggaattgttgttcactttgttcattagtatgtattttgttcattttgttcattagatgtgtttcctcagcaactaaaatgtattggatatttttaaaaattctatcaaatgaagatgtagccagttagca

SEQ ID NO: 30656 - DNA, 1047 bp, Homo sapiens
aatttcaactatttcccttctttacctgttcatttctcatctctcaaaagtcagttcttgagtcacttcctgcaggatgtttcccatttcttcactagagtgagctggcctcccgtgtacccacataggaatcagtttctagctctgtcactgctcttataggtgaagtgactcctcaaaggcagggacctagctttatccatgtttgctgaactcttgataaaatcattgtcagattaatcacattagcatatagtttcaatcacataacttagctcctttaaatagtggcttccattacagaggagaaaaaaacaaaaacaaaaaaaaacttcttagcctcgaaattaagattcctcttatgtggcatcacacaaatttccaatcataatttcctttactccttgttacaaagatagatatatctccttcctattctccaggatattttgaaaatttggtaaccttcacctaaaatacaattattctatatgcatgtgtttaaaattttttaattctgcaagactcagactaagtgccagcactttgttaatttttctctaattcttctcagctggaaatagttgtccttttatcacaactcccatagggctacagaatcgtttatctgtatttctcttatggtgctcctctgttctaatttgtattagaatgctacttcatatgcatttaatctttcttactgcactctaggttccttgagggcgtgaccaaggcatggctcacatttgtctccttcatagtggctaacttgggccttatccaataggcatttttatatacattttaagtgagagagctgtaagaagaagaagagctgagcagaagatttcagtcctagtggtttcatataattagatcagaatactaaagtgtgtgctgttggtagttgtggaggtatggggttttttaaaaaaattattattttaagagaaaactgagtgaaatttgggggcagaatttagatcataagtgttagagtacattatttaaagcaatcttcattaattaaaaaaagacaaagca

SEQ ID NO: 30657 - DNA, 1032 bp, Homo sapiens
ataatactacagagagcaagaaaactgctctctgtagtgaatgtgtattgtttatggagaacatagtttcatgtgagttaatactccttatcttcagctttataatctattcagtttttcataagcttatgatttgaaataatggttcgggtttactatttttatttgttgcaattgatatgacaggcactactgctactacttttactagtgtagaacataaagagtttgaaactacaatgaagaatttaaagagtttatgagaatgtatgtatctatcttttcttaaattccataataattttgctcgtttgaaatttcacctgtagtttgatttttttttttacttcaaattaaatgtgtacaatgttggtttattattcttttatttttaaagccagagcaatttgatattatttgcttgccatagaataagataatttttaaaaatttctttttatctgatttagtattaattgctaaatttgaattgtactttgtagttaacagtgagctttcccttgtagcatcttttaataaatttgttatattgacagtaaatgtaacaattaaagggaattgaaaggaaggaacaggcataacatttattgaatgctctattaaggagcagacactttttaaatggctttatatatattataaattcatgacaaatgacaaaattttctaaataataatatataattctcaatcatctttattctcttcctgtttccctcaatgatggatggcatcatttacaatatggttagatagaaaagagataagagtcttgaatctgtgattatttcattattggagctaaactaatccgtctaataagctacctattagcagataatggaaattctctaatgaaaaggctaaatgtttcatgaatattgaatacattctgggctaaacagctaactcttggccaggtgcgatggctcacacctgtgtaacaccagcactttggtaggtggaggtgggaaaatgacttgaggccaagagttagagactagcctgacc

SEQ ID NO: 30658 - DNA, 1044 bp, Homo sapiens
tctctcaaatctgttatcccaatcattgttgcctctccgtttattataaactgtatgctcacaacttagtgtaatataccagcttgtatgcaatggattttcaaccagataacatacctttcctgctctggtgcttagagactatcaactccctcctttagtgaaggagccgtgttagagcttccgagaatagctccactggagagaagtggaatcctatatagaatgctgcactaattgacaacacagcctataggccaatgcatgagtaaaaaaaaaaacaattactggctcactggctttgaaaagtcacttactattgttgctgaaacttgctgagctgtttatagagaatgatgataacagaacttttcctctgtatcactggtgtttaggtgaattaattaaacattgtgatcattagtaccaggtattattatctttaagagtcttccacttcaatgcacatggtgcagttttggtgtgtaacttagaaggattgaacttctttgaatttactggacataacattttcagaatagttggtcatctagcaaccgcctcaaaatgtgtaagcaggagagaaatttctcatcacagggatttagacttactattacataaaggctaactatgagcttgctcattaattttgaaaagatgtacctggtggatatctagctagtaatatattctgaagcaacattttagctctattgatactctttctaatgctgatatgatcttgagtataagaaatgcatatgtcactagaatggataaaataatgctgcaaacttaatgttcttatgcaaaatggaacgctaatgaaacacagcttacaatcgcaaatcaaaactcacaagtgctcatctgttgtagatttagtgtaataagacttagattgtgctccttcggatatgattgtttctcaaatcttggcaatattccttagtcaaatcaggctactagaattctgtattggatatataagagcatgaaatttttaaaaatacacttgtgattataaaattaatcacaaat

SEQ ID NO: 30659 - DNA, 1033 bp, Homo sapiens
gagtgttcaatttaattcatcattcttagtctttccttttcttagcagcttttgtatatatactctctggaatgatttgtttaaagagaagagttcagagaaaggagaatgtattgatttccaagtagaacagataattgaattttcttaataaagcattattaaaatttagctgcataacccagagtgtattttcttctttaataagcaccatctagatttgtcctgtccagtagggtaacaacgagctacacgtggctgttgagcacttgaaatgtggctagtctgaattaagatgctgtaagtgtatgtttaatacatagtgggctttgaaaaaagatttattatgcaaaaaagtcagcatcttatcagtcttttaaaagtatgattacatgttgaaatgataacttttgcatatgctaggttaaataatatattagaattaacttttttttactttttaaaaaatgagattactagagaatttcaatgtatatgttgcttatgttaacatttctgttggatcttactgctctggatcatagcctaatataaaggacataggtaaacatctcaatttggataactgtcaaagaatttgaacacaagttggattacccctgtcttctaagtccccttgttcaatgcctgatttataatagtggctgaataaatatttgccaaatattgtatgtagttcgatttttcttagtaataatcatcctgaagtaaataacattagcaagtagttccatttattttactggaataaatgagaggtgagcaagctaattttaaaaacaaaattttgtgcttttatggtgttctctattttttcaacagaaattgcctgtttgattattatgtatatatttgttttctgtagaatttcttattaagattcctcttcatgtttatattttatgaagatgaaatgtgaggagtgaatttgtaaaagagatgatgatggttattaatatactatatttgagattactttgcagatttgtttaatacattctgtaccccagta

SEQ ID NO: 30660 - DNA, 1034 bp, Homo sapiens
tctgaactctattaaattattctgaattatttattttgttaagttgctttattccttattaatttggtacagatactgtgcactgcattactttatattcttagtatatttgtgactcttgtggcgaataggctctgtcttaatgggaccagactattatgtttcagatttgaatacatgcagagatgcagaggctccttgatgcctttgatctgctaagagggaatagtatctgtattctagacaataggaaggaaaatttaaaaagatgagctgcccctgcttttaagaatacccatcttctacttacattttcctggccagaagttagtcacatgcctatgcttagatgaaagagaggtatagttagccagcatagttctctttgaatctcttgatgctttttttcaatataagtaatttttataattaaatctatatcattaaacggctttatatcatacgtactgcatctcattgaatattgaatatatatcatacatattacatctcattgagtgtatctcattgaatgctggctagtcttctttttttttttttaatttttaatttattaggtctttttttggtagagatggggtctccctatgttgcccaagctggtctggaatgcctagcctcaagctattcttctgccttggcctccaagagtgctgggattacaggcatgagccaccacgcccagcccggccaggtaatcttaatttaatgctttgtgctacaatatagcagtatctatgctagtgactttgttgggcacctagaatgtatcaccagtcaggcatctaaagtgagtccccaaccccggggccgtggaccaatatctgtctgtgggctggttcttaggaaccagcccacaaagcaggaggtaagcagcaggccagtgaacgaagcttcatctgtatttacatcctctccccattactcacattactgcctgaacattgccccctgtcagatcagtggtggcattagattcttaggaccatgaaccctatgtgaactgcacatgc

SEQ ID NO: 30661 - DNA, 1047 bp, Homo sapiens
aaatatttaacaacacatcactggctagcctcccctcatggccaccccttgctgccgtagtagttggggattatggtctgttgtaagcagtcatgagcctaggtaaaaaaaaatctaggattctcttgactatcagatagtgtttcctaatagggaactattgttatttttggtgcgaaaattctttgcgtggactggtccctagcattgttgggtattaacatgtcttcattatattgtagttatttgtgatttgtgaagaggaaaaaaaaaacaaaaaaattatagttactcatatatatatttatgtttcatatgtagttatttgtgtatgtgtgtgtgtgtgtgtgtatatgtatatatatatatttccccaatagactaagagctctatgggatcagaagatggattttattaatctttgtatttctagaaccatgcatagtacttagcttataagaaatgctcaaaaatttattgattgtatatttgcattttatcttggactttctagagatgatgtcttaccacatatactctactgaaattctcaattggagaccatgtatctttgtattcctggttcttgtatgatttatcatctataatgggccctaaatacatgtacgaggatagatggataaatacatgaaaggaaaaaagaaagggtggatgtatgggacaggagcttcagttatctcagtggtttggtggtgtagtattgagccctatatactttgtgctgaatgctaaggatacaaagacatagtcccatgtgttgggaaggtataggctattgtgaagatcagtagaggacagaatattatgatagaggtaaaggtgatagtagaagtaggaggaatcatcaaaaaaggatttatggggaaagttgtacctgaacatttagtcttaagttgtgaaacacaaatgctgaataggaaccagaggaaagaatagaaggtgttccatatatcaaaagaaacaggctttggaagtcctgaagacctctgtttgaggcctgtctctgcctgctatataaccttgaa

SEQ ID NO: 30662 - DNA, 1124 bp, Homo sapiens
aaaatatagttctcccttctctgttacaattatgtagcttttatgtgttcactcacaatgaagtcttcatttcaagattttatttcttctctgaaagcctttctagaccataacttgcccctccctttttcaccttccttcccttgaattcctacacactatcgtctctagcttattttttttaaagaacatacaaattctgtgttattcctattaatattccacttctctatattacattgtactttgaggacagcaatcatatcttactcatctttgcacccttgatgcctaacaaagtcctggtaccaaggaggtgtttgatacatgttagttcccttattcctacttcagcatagttgatttgttttcactgatgattgcctggggttcctctctattcatactgaaagacagctgcctattttatccacacaaactacttctggttaagcttagatcacatttttaaatgcctagtataatcctatttctggaaaatcattctgcttatatgtctaactttacctttttctttttctaggtaatgaaagtattagcaaaagtatgacttgtagtggctcttaactttctcaggtgctgtgtaaacttcactaaggtgcttaccaagagattggtgtgttgcaagtctgtttctcagtcacacctaagtttagtgaatgcctttcaaattaatctttgtaatagcaaatgttttgctaaatgtggaaataagaccctctaaacaccggtgttgttcagtagaactttctgcaatgatggaaatgttctatattggctctgtccagtagggtggaccactagccacatgtgacttttttttttaaactctagatgttacccagactagtctcaaattcctggcctcaggtgatccttccgcctcagcctaccaaagtgctgagatttcaggcctgagccactgtacccagccaccacatatggcttttgaacacttgaaatgtaactgatgcaactgagaactgaattttaaattttattttagtttatttaaatttaaaaagcctcgtgtggcttgtggcttttgttttgaccatgcagctctgaacaatgttttctgtgggataatatttatagtggat

SEQ ID NO: 30663 - DNA, 1033 bp, Homo sapiens
ttcatatcccaattcactatgtgcagtttctgtgacctggaacaggttagttaattttgttgcacctcagtgttcatattggtaaaattgtaaaaatagtgtctacttcatactttatctactctgaaataattggaacaatgagtaggacattgcgaatactttattcctctttgatattactgttgttgctgccaccatcaccacctcctcttccatcctagtccaagccaccatcatttcttcctactgcattaactttctaattgttttctatacctatgtgcttgtcttctactcacctctcccaaatccattctaacccattcttcatatggtagatagaatgatctttttcaagtgtaaattatataatattactattaggtctagaaaaatctgagatccttgtgttgattacacttgtgtgaacttcagacttctttccatggcttacaaaaccttacatctagcccttgctgacctttcttaacctcatctcatatctcactgctcttttctgactatgccccagctggattgttatttttctttgcacagagttagtcagaccctcctcagggtctttgtactatttgtttcctatgcctggaattataccctcccttgtactcattcagatcttcaagtaaatttcacctttcagaaaggtcttcgctgactacccaatctaaagaagcaccccttgacagtctctgtctcatttcattgcccttttaagtctctgcccagaacttaacattatctaatatttgtatttatctgctttctccattagaatgtgagttgcaaaactctattcccgtgttgtgtgaatttagactgtatctctagcttatagtatagtatagcattatcttaaagtcatggcaaaatattcaagaatacagttgcctttaatttgactttatctgccagtctgtaatacattgccctgtatggacccaagttcaagaaagcaataccttaactcatcttcttattccttaagctagattcagctcccagttac

SEQ ID NO: 30664 - DNA, 2086 bp, Homo sapiens
tgaatgatactaaacctggaacaattatgaaaggaagattagtcaggaggaatattagacgatactatagaaagaattgccagttttaggtgttaaaaagttgtttttgtctttcgtgtttaatattattatatatatatatatataattttttttttgagacagggtctcgctctgttacccaggctggagtgcagtgtcatgatctcagctcactgcaatctccacctcctgggttcgaagcgattctcctgcgtcagcctcccgagttcctgagactacaggtgcccatcaccatgcccagataatttttgtatttctggtagagacaaggtttcaccatgttggccaggctcatcttgaactcctgacctcaagtgatctgcccgcctcagcctcccaaagtgctgggattacaggtacaaaccaccatgcctggccaaatattgtataaaatatttgatgcttatccaggtatagatacttaaagacatgtaaaactattgggaagtaatgtggaaactttttaccatgtggcaactttgtgaaagcagaattatcacccatgttttattatatacatctgataagaactagtcttcttttcagtatagagaaaatttgatgttaaagtaggttggcttagtaatttatcttgtatagcttcctagtgttcattttgtggtttagtggtatttatgactccctaatctataagctctttctagtattactatattgatgctgaaaataaattattccccaaagtgttgaagataccatgtcgcatttaatatagccataagctttttaaataagctttttaaaaatgttattttttccctcaaattaataatgcatgtacacaggttaacaagtcaagtcatgtcaaggcttctaaagatatatatctgacccttacctgccgtaccacatcccctttccaattctccattccttaaagacagtcataaaggcagtcattttcagctccttagctatatgttgcatctaaactcctgtttctaggtaatttgcatgtgtaggtatttttgcttcttcagttttattttattttattttttttgagacagagtttcgctgttgtcacccaggctggagtgcaatggtgtgatctcagttcactgcaacctcctcctccctggttcaagtgatttctccttgcctcagcctcctgagtagctggaattacaggcgcctgccaccacgcacagctaatttttgtatttttaatagagatggggttttaccatgttggccaggctggtcttgaactcctaacctcaagtgatccacccgcctcagcctcccaaagtgctgggattacaggtgtgagccaccgcacccggctgcttttttggttttagttattttattgaatttcttctatggaagatgtggatttaatcttctctcacacccccattcttccctcaccttcccccttttaatacagttatatcacaaattttggttaatcaatattttgtgtttacattattgtgactacccaaatattatttatatgtgagtcacctaaggtactgtagctgtatttcctttctcaaataattttttaaattatttctaagttttttcaatggatagagatagaaaatgaatatatttaagaaaacttcttattgacatatttatatatacagaaagtcccccagaacataaatgtatattatggtgatttttcacaaagtaaatacatccatgtaactaccacatagatcaagaaacatataacatttaattttaagaaaatattaattaccaaagtttttcacctgcttaattttgtacatacatcactaattcattctaaaactgaagtgaattgaacatatcctcttgacatatttaaatatagaatatatatatttttatttcattttattcatcttttgaggctcctttcctggaaactctaatgtaacctgattgtgttagaattttcttcctcttttatattctctatttttgatttccaattcctcacctttcttggtttatctccttgatttgggagtgtaccatagctccttttcaaaacata

SEQ ID NO: 30665 - DNA, 1093 bp, Homo sapiens
gcacacttaagtttgcgaacctctttcttaaggaaagaggttgtcatcctccaaaatagctgaaacagatacgccaggctcctgtgactcaccatccatagtaagaggcagtgaaaggagaaagcagtttcacgtattagccctaaattgaaattcacatggcacgcttccagtcgcaggtgttacatttcaatccacccattcctcacataggcaactccagggtgtgtagcagctggaatttatttaattgaccatagttaatgaggctcccaaataactcagctagaaaggtcggctagtaaataaattaaatatttcctgctggatcacctgtcagttgatatgagtttgtgattgttaagagatggaactcttggaccgaatgcaaatttaacagggtaaagctgctgggggaaagcctgcaccatcaatccataagtggtttttaaatcatccttggttttttatcatctgagccactcatcgcctcattaactccattactgtagagttcactgtagttagttttccataccttttatcttcatcagaagaaaacactcattccctctaacacccttttatgataatacttttccctctaatattaatagtctctaggaaattgaatattgtctctaagaaaaacacttccttgtgcaaagagtgatgggttcattttgacagacttagaggtatttaaaggcaggctgcctttttttttttttttttccaagatgtactgcagggagggactaagctgagtgtaagctgaggcatacctctctggtgcagaatttaagcctcaaaaacctcagtaatcataatgttaacagtagagggtcttgactgcaagttgtccaggttcttggagttttgaacaaagaatctgataaaacacacagcaaagcaaggaaagaatgccacaacagaagagatttattgaaactgaaagtacactccacagtgtgagaatggccacaagggccccagatacagaatattcttgggtccgaacacccattagaggttttccattggccacttggtgcttacctcatgtaaatgatgtggtggcccgcaatcagtc

SEQ ID NO: 30666 - DNA, 1042 bp, Homo sapiens
tggttttgagattaacccaatttgttttaaaaaggctttgtgttaccacatacaattttctcatttagaaattaatgtgggcagttaagttatacctgcctaattttagaaagataaattatgaatgtcgaaatgaaaggtaagcagaagaatcagccaacattggcaacattatagaaattaatttaaatttgcattaagccaggaacatattgtttgtaaattatgaggcttctatgtacttttgtacagctttaatgaaaaagaatcatacttacttgattaagcattggctttgctaattgtggaactaagaccaaaatagtcattttcatgggaggttggaagtatctgaattcaaatattgcctatatccacaataatctaacatttttattgtgtatttctctatttttaattgtttaaaaatacataacataaaatttgctatcttaaccatttttaagtgtacagttcaatagtgttaagtacattcacattgttgtactaccaatctccagaactcttttcatctttcaaaactgaaagtcgatatccattaagcactaactcttcattcccttcacttcttagcccctggcaaccaccattctactttctgtctctatgaatttgactattctagatgcctcatataagtggaatcatgtgatatttcttttttgtgactggcttatttcacttagcataatgttctcagggttaatccatgttatagcatctgtcagagttttcttccttcttgatgctgaataatatttcatcatatctatgtatctgtctacacattttgcttggcagttcatccactgatggacacttgggttgcttctatcttttggccattgtgaataatgctactatgaacatgggtacaaatatctctttaagaccctgctttcaattgtttggggaatatgaccagaagtggaattgctggagcacataataacttgatttttaagtttctgaggagccgtcatattgttttccatagtggctataccattttaataatcta

SEQ ID NO: 30667 - DNA, 1050 bp, Homo sapiens
ttttctggtagaaaattcaaaataaaaggtaaagataaattgctaaagactgcttcagcttgagttgtacctgtttcttcatgtatagatattcaacacaagtgtgggtatgtgtgagtgtcaaaatttgtcaagaagcatatatagtgtcatatttcttatttaagatattttaattagttatcacaataatccttcaaggaaggtattttaacaataagtaaatctcaaaaccttttttgatgttcttctttatgaaatggccttttaagttacattactacgttagccttatactgaaatttaagtatagaccacctcagatttaaagagtaagttgaaaacaaataaacaaataaaaaggatctttcggcagacgccattatcctctgtttctctgctgcaccgacctcgacgccttgcctgtggcccacttgttcactgactataggctactgcagcactggggtgtcagttgttggtcccacccagaacgcttcagttctgctctgcaaggatatataataactgattggtgtgcccatttaataaaagaatatgtaaactgaacagccggaagaaaccttcccgaacactgaaaccaatggtgaatttggtaaacaccctgcagaagatatggaagagtaacaagcatttaaaagatctagaaacactgatgagatggttgaattacgcattctgcttcagaccaagaatgctggggcagtgattggaaaaggaggcaagaatatcaaggctctccgtacagactacaatgccagtgtttcagtcccagacagcagtggccccgagcacatattgagtatcagtgctggtattgacacaattggagaaattctgaagaaaatcatccctaccttggaagagggcctgcagtttccatcacccactgcaaccagccagctgccgctcgaatctgttgctgtggaatgcttaagttaccaacactataaaggaagtgactttgactgcgagttgaggctgttgattcatcagagtctagcaggaggaattattggggtcgaaggt

SEQ ID NO: 30668 - DNA, 1055 bp, Homo sapiens
tgcctccatctagaagagattatgatgatatgagccctcgtcaaggaccacctccacctcctccaggacaaggtggtgagggtggtagcagagctcggaatcttcctcttcctcctccaccaccacctagagggggagacctcatggcctatgacagaagagggagacctggagactgttaccatggcatggttggtttcagtgctgatgaaacttgggactctgcaatagatacatggagcccatcagaatggcagatggcttatgaaccacagggtggctccagatatgattattcctatgcagggggtcgtggctcatatggtaatcttggtggacttattattactacacaagtaacgattcccaaagatttggctggatctattattggcaaaggtggtctgcagattaaacaaatccgtcatgagtcgggagcttcgatcaaaattgatgagcctttagaaggattggaagattggatcattaccattagagaaacacaggaccagatacagaatgcacagtatttgctgcagaacagtgtgaagcagtgtgcagatgttgaaggagtataatgcaagatatttttttcttttttatagtgtgacgcagtattctggaaagtttttctaagactagtgaagaactacgtcttttttttttttgttatctgcttctgtttaaaaagccaacacgcctctgcttcacaggtgttctgcatttgaggtgtagtgaaatctttgctgttcaccagatgtaatgttttagttccttacaaacagggttgggccagggaagggtgtgcaaaaactaacactgaaattttgaaacagcagcagagtgagtggattttattttttgttattgttggtggtttaaaaaaattccccccatgtaattattgtgaacaccttgctttgtggtcactgtaacacttgggggtgggacagggaggaaaagtaacaatagtccacatgtccctggtatctgttcagagcagtgtgcagaatgtaatgctcttttgtaagaaacgttttatgatttttaaaata

SEQ ID NO: 30669 - DNA, 1436 bp, Homo sapiens
tttattatacatttacaatataaaataagtaattgtataattagtcattattgattagcatccaaagtacaaagataaaatgtttttatgcagttccagcagtgatcatctaattgttgtttgttctggtcttgggataatactatatctaaaagaaaatttcttgcacaaaaattatacataatccttaaggaactcttcttcaaacaaaaaataacttaaatgaatatagttgaagttaatttagtattcatgactatagcacttttatatgaatttcctaagggaaaagtatatatctattggtacaggggaaattaatgattaaattacatccttttacttttttgttacttttacatcacaaaataagtattaaaaaatattagagtagaaagccttttgcttctttgtttcttcactaatcattgttagtataaatgacttaagtacaaaagatataaatttccctctaccaaccctttttccctatcacaatttcagtaactctctctctttctctctcccacctcacatacacaaatgcttctgactgcatgctccatttgttctaaatggtgaaagaatagatcccacttcacactgttcatcaaccaaatcccaacagtaatagaaattttttcattgtacccttgactcaccattttgggtttacaaacatgctggaaatcaatatatatagttaggtgatcaaaatagtttgactttgtccaacatacattgtaatcaaactaatttaatacaggatcaaattgcgtatctctacagtgttctgttcaacttgtaatttaatcagactgacatttaaacaaactgaagatacattctgttcttgcattattttattgagtattgtgttttgtaaactaaaatttggattatggatttaaaaagaaagataaggcatgtgaactcatgatatttgggtaagtaaataaaacaataaagattgtaaaaattatatatggatgaagcaacaaagacactgagaaagtaacaggagagatgtgctatttgaaatgggacagttggaaagacttgtctttgaaggtgacattgaaacctcattctcagggaagagaaagagctcattctgcagagtgggaagaagtgcgtaacatatagtggaaactgactgagcaagggtctcgaagagaaatgagcttgacacatttgaaaaactgagtccagggtggactggaacttactttgcaaggaagagagttgcagaaagtgaagtctgaaagatagtcgggaaccagagtcctcagagtagaataagattcatgttaagaaactgaatttttatattatcctagataaagcatgaatctatagggaggttttgaccagttgagtaaaataaaccaatttacattttagtagcaccatgactagtgagcaaaaacttaatt

SEQ ID NO: 30670 - DNA, 1065 bp, Homo sapiens
tcagtaaggtacttgatttgtgtctccttatatttttctttaattttttactcattcaaagctgcataatcaaataggtctggaactgaatatcagttccatcccttattaacaatgaatttattggaaaatggcgtaatatctaggctttcctttaattatctatcgaatagcaaaaaagacactatttttgttttgaagatttatagatggggtttatgagcaggtgtccggccatacaacaattataataataatggtgtaatacccaaccttaatcaaattattaccatgttttaagcaatttagtctttatttcattcagtcatcacatctgaactaagaaatagttcatgttaattcaacaacacttcaaaaactgacataatgagtttgagtaatttgctcaaggtcaaaagatagtaagttgtagatttggaaatcaaacctagttccctacctttggaattcacgaacacaatcagcatttattaaatatataactattggccctgcattggagatacaaatatgagtaaatttagtcttagtcgtctgtgaatttactgtttaatacaaagagacagttgaatgtgtagagaaaagtgttatagatgtggtgatgaaagtatgtacagcttatcaaaggcttcaaaggaagtggtggtcacatctactttcaagtttcaagaaagactttgtataggacgtgaagcttgagatacaggttgaaacatgagtgggtgctcatcagataattagtagtacaaatcattccaggcagagggagtatcaagtgcaaggggatggaaaattcatatggggcagggtgagaggtgactggcaaatagttgggaatagataaagactgtgaggggtaatgaggcaaataatgaaggaaaatacacatgcatcgttgaggataagaagagccttgaatgctatgctaagtggtttttgctttatcaagaagccaaaagttcttgaccccggctgcatatcaaaatcattatagggatttttgaaaaaacacccatatttgagtcccacccagatttatctctg

SEQ ID NO: 30671 - DNA, 1096 bp, Homo sapiens
tgcttgatacaacaactgtactgggagagctaggatggaaaacatatccattaaatggggtaagtttaaatatctgaaaaattgctgtcttttttagatttttaagatctcctaatagttgatggaacagtgaattttgggccctacttgttatgaattttgacatataacttacatcccatagaaaaggttaaaatacaattagaactggtaatcagtgggaatgatatgtaaagctccttcctctctcctaaattagtaattattctttaatactgtgtttatacatagtgacattagaatatctcccatataaatattttccttaaatataaatttctgtgtgtaagtttatatatgttacatttatgttaaatttgataacctcgatgagtatttgtgcataaataaactttaaactactgtagtataaatggattgtgcaaatattaacaatttggtttttaatacagaatacaagtctactaaaatattatgcatttttgaacttggtgaaaatatacaaggtgattaggtttttgttaactgaaatagttgtatttaaaggcttgttaaggatgtgtaatttgcaaaatatagtttttcatggaccaacattttagctatggttgtacttgactttttatatatttttatatattttgcatcattttcatattacaatatatgtctacttctcattttcacactgagctaaaataaaagggtggtttctaaagcattttgctttgatttttgtctagttaatcaaaatattgaataatagaggcagtcacatgttttcagatacacttgggttagctttcctttttttccttagaaatggtaattttcttattaatcacattcttagttgacattttcacattgcttcttctattatatcttcaaatttaaacctcaaaggagaaattgatccaaatatgttttattcttttagaatctttcacatattgctgtttgaatttgacattttacaacaacagttattcactaagtgtgtattttcaactaaaatatcctatgaagagtgaaatcttcctctctttaacagcccatttgcttctttaaattt

SEQ ID NO: 30672 - DNA, 1071 bp, Homo sapiens
gaataaaagttgaatggtgaaaaacatataaagtgaatattcacaaatattgtctatacttttactgatttatcctcaatatttaacattagttgatagcactaagtttgccatcaataaatatcacttaagtgaaaactgaataaattgattattattttgagtattagaattattgtagaaagatatatttcacgcaatatacagaacacttaatatggtgtccacattctgcctaatttaattgaaatattgtctattattaggtttaagactttgtaggattatgttttcattatttcactgaaaatcttaaaagaagataaaacacttcagagggaaactatgaatgttactgtatttctttatttcactaaagatccatttctagcattttgcctttgtttataaacgtaatttggataacatttatgaacataatgctggatacaagatcaatatatgaattcaaatttatttctatctaccataaacaaacaaaaaataaaaatgtataacatatcattttcaacacatcaaaaacacacacttttactgcatgaactcatgtgcagagtctagagaatttgatctcatagaattagtgagtagaatagcagttagtgggggatagggaaggtacaggggagggaaaaagagacattggtcaatgtggacaaagttagagttaggaggaaagagttttggtgtcctattacacagtggagtgactatggttacaataatattgcatatttcaaaagaactagaattgcttttggcagtatgattatttttatgatactggttcttcccatccatgagcatggaatgatttccgtttgtgtcatctgtgatttctttcatcagcatttcgtagttcttctcgtagaggtctttcacctcctttgttaagtatattcctaggaattttgtttcattgttgtagctattataaaagggattgggttcttgatttgattctcagcttggtcattgttggtgcatagagtgctaccaatttgtgtactcgattttgtaacctgagactttactgaattcatttatcaa

SEQ ID NO: 30673 - DNA, 1266 bp, Homo sapiens
tcccttccgcactttaagatttgactgccctgctggattcccttccacactgccttagcagaggttctccatgagagccctgcccctgcagcaaacttctgcctggacatccaggtgtttccatacatcttctgaaatctaggcagaggttcctaagtcctaattctgttttttattttatttttccgtaagttattggggtacaggtggtatttggttacatgcatgagtaagttctttagtggtgatttgtgagattttggtgcacctatcacctgagcagtatacactacaccatatttgtagtcttttatccctttcccacctctcaccactcccaccattccccccaagtccccaaaatccattgtgtcattcttatgcctttgtgtcctcatagctttgctcccatgtatcagtgagaacatacgatgtttggtttcccattcctgcattacttcacttagaataatagtctccagtctcatccaggtcactgataatgctgttaattcattcctttttaaggattcgtagtattccattgtgtgtctgtgtgtgtgtgtgtgtgtgtgtgtgtgtgtgtgtgtgtatagtcaatcatcaatctatgtgatatatatctcacagtttctttatccactcattgattgatgggtatttgggttggttctatgagtttgcagctgtgaattgtgctgctataaacatgcgtgtgcgagtatgttttttgaataatgacttattttcctctgggtagatacccagtagtgggattgctggatcaaatgatagttctacttttagttcttaaagaatctccacactgttttccatagcaattgtactagtttgtattcccaccagcagtgtagaagtgttccctgttcactgcatccatggcaacatctattgttttttgattttttgattatgaccatacttgcaggagtaaggtggtatcacattgtggttttggtttaaatttccctgatcattagtaattttgagcattttttcatatgtttgttggccatttgtatatcttcttttgagaattgtctattcatgtccttagcccactttttgatgggattgtttatcttacagatttaagtttgttgtagattctggatattagtcctttgttagatgtatagattgtgaagattttcttccagtctgtaggttgtttactctgctgactgttcccttttccatacaaaagctctttagtttaattaggtcccagctatttatctttgt

SEQ ID NO: 30674 - DNA, 1043 bp, Homo sapiens
gcatagatgaacaagaaacaaaagcaaaggaaagtgcaggaaaagaaaaaggagaacccccagaaaattcacaagtgtttagtagaagcttttgcagacctcaacaagcttcctaaaaatttggaaacatggacccccaacaccaaaaggttttcattaatagagaagaatgttcatggtgtattatctacttacaagcaaatctgtgatgaatagaagaaacaaaccaagcaaaccaccatggacaatttctgaaaagtgtgacacctcctctggaagagcctcaggcaggttcttcagaaagtattccagaaggcattgccatcatacgaaatggcagtttcatgcctgcttttgcccctgaagacctttcagtgggacaggataaggaggtggaagacagtgatattgatgatcttgaatctgtgcagacttaagctaatcttgtttttttttcttagtttttcacaaaaaattaaaaaaataaaaaataataaaggttgtagaataaagatgtaaagaaaaaagtatttttgaacagctatcccatgtttgtattttaagtaatatttttataaaagggccaacatttaaaaaattaaaagtctgtaaatcaaaaaatgttacagtaagctaaagttaatttattattggagaaagaaaaaaattaaaataaatttagtgtagcctaagtgtacagagtttataaagtctatagtaccttacaggaatgtcttaggccttcacattcactcaccacgcagtcactgactcactcagagcaacttgcagctctgcaagctcccttcatggtaattgacctatacaggtgtgctactttttatcttttatactgttttttgttgttgttgttgtaccatttctatgtttaggcacaaaaatatttactgttgtgttacaatagcccagagtattaaagcttctagtgtttgcctgtaatcctgggcatcccctggtttataggtgcatcgctctactttgatctgccatctttacatgtccatctttcctccgtgtatatc

SEQ ID NO: 30675 - DNA, 1064 bp, Homo sapiens
ctaggaccctccgagctaggtgtgggatataatctcctgctgtgctgttattttaagcccgttggaaaagcgcagtattagggtgggagtgacccgattttccaggtgccgtctgtcacccctttctttgactaggaaagggaactccctgactccttgcgcttcccgagtgaggcaatgccttgccctgcttaggctagcacacggtgcgctgcacccactgtcctgcgcccactgtctggcactccctagtgagatgaacccggtaccttagatggaaatgcagaaatcaccggtcttctgctttgctcatgctgggagctgtagaccggagctgttcctattcggccatcttggctcccgctgctcttggttttaagttcaagtttaaaagtaataagtattcatatgttcatttcctaagcctaggagaactctgggatacaaaccagggtattccaaaatgaccttgaagggactttttttttttaactgaaactaatttcgagacctaaatttcatagtcaacttactgtgcaattgcacaccagaacttattcctcctatctaactctaactttgtatccattgaccagtctctcattatccaccaccagcctctggtaactactattctcttttctacttttataagatcaactcttttagatgccacatatgtgtgagatcatgcaatatttgtctttctgttcctcacttatttcacgtcctccaggttcatccgtgttgcagcaaatgacaggatttcattctttttatgtctgaataatattcttttttgtatatatatatttttttctttatccattcatctgctacctattgtattctatatttcaaaatatctagaagggaggattttgtatgttctcaccaaaaagaaatgataaatttttgaagtaatgtatatgctaaatactctgatttgattattatacagtgtatacatatatcaaaacattatactgtgccccaaaatatatacaattatgtgtcaattaaaaacaaacaaaaacacaaagatttttaatatcctgaatttc

SEQ ID NO: 30676 - DNA, 1086 bp, Homo sapiens
tccaggaaggaagaaagataggagttaaggagttgacttactgtttctcagcaacctaggaaactatggtgtacttggtttgatataaggacagactaggtgggtatacttaatcttgacagtcaaggttcttggaaaatttaattatttctcatcactcagcctgggtacttgtcctcttgttctccattgtactaggaagagaccatcatcattcagcattcctcactacacccatccagacaagaaggtgagctacttgtggtctgacgcgtgttaaatagcttgataagcactgcctagtacagtgcctagcaccgaatagctgttttctaaacttactttctgctatagtttggatgtgtcttgttcccactgaaactcatgttgcaatgtaattgccaatgtaatggtattgtgaggtggtagggcctttaagaggtgtttggatcgtgaaggctttaccctcatgaagggtttagtgcagttctcacagggctaggttagttcttgtggtgctgagttagttcttgtgagagtaggttattataaagaggtttggccctcttcgtttctcttttgcttgtgcttcttgcctttctgccatgttataactcagtatgaaagattttaccagatgttgcttccatgctccaaaattgtgagcaaaataaagttattttcttataaattatcctgtctcaatattgttatagcaactgaaaatggactttctgttacccagtgttaacattatttgacctttgccagatgcatagtttgcaaaagttttctcccattttgtaggttgtctatttactcggttgatagtttcttttgacgggaaatcaaatactgcatgttgtcacttacaattgggagcaaaatgataagaacacatggacacatagaggggaacaacactgtagtatgccacagtgtctgtctgtggagggtgggaggagggagaggattaggaaaaacaactaaagggtattaggcttaatacctgggtgatgaaataatctgttcaacaaacccccgtgacacgagtttacctgtgtaacaaacctgcacaagtacccc

SEQ ID NO: 30677 - DNA, 1049 bp, Homo sapiens
aggcttaacaggaagcactactggaacacctcaggaaacttacaatcatggcagaaggcgaaggggaagcatgtatgccttaccctggcagcagaggagagagagagtgaaaggggaaagtgccacacactttcaaacaaccagatctcatgagaactcactatcatgagaacagcaaaaaggaagtccacccccatgattcaatcacttcccaccaggcccctcctccagaatttcaagatgagatttgggtggggacatagacacaccatatcagtgcactaaagaaaaatttatacatatgaataattatccagttaagtggagaagacaataagatctaaggataaaatgtattacacagagtaaccatgtagtgtttttggtacagacatgtaatatgtgtaataatcacatcagttttaccatattttaaattaggtagaaagccattacttggtaaaaaaaatacagttttttaaatatttgaagaattatttaatctaagaatttatgtgatttgctattactaaatatttgtatttctttatggcatttaccacagaattaaagtaaccaaccgtgatgtctagatttttttttacttaatatgcttgctgtgaaattttattcttatttatatgcctgcaaatttcttctatgatttggcaaagatagttttggacaaatgataagcagcatctgtttatctagagcttctacttgtgtgtttttatggcttgttatctttattatcctttatctgattgcagaaacatgagggagtcagtacagaacaattgttcatcaccttgtagtggatggcagaaattggaagatttaagtttgaattctatatctatggcttacaaacctcaaaatcaggtgttttttttaaatttataaagtagtggttataatcacctaaagatgaaatacatgtaaaactattaacaacaagcaaacatgcctgattctaattaaatataatgaattgctatttataaacaaaagaaatgtcagagtggatgtggagactacattatttt

SEQ ID NO: 30678 - DNA, 1045 bp, Homo sapiens
gatagtctcaatctcctgacctcctgatctgcctgcctcggcctcccaaactgctgggattacaggcatgagccactgctcctggcccccactattctttctcactctttcatttcctcattccagacatctatgccctcactttgaaatgcttcaatgtttgctgcctgccagacccaaagcacaggagccctaagtttctcattattaattaggcctgctctgccttctatttctcttcaggagtctaatgtggacactgctggagcaagatttaagcatcacttttgaaattcatgctgctgaggatgatgaaaatatatatagatatggattcatctggaactttgcttttagagatgataaacaggaaaaattacagtgaggctttagggatttttgtaatttgcttgaatgaatttgagacctcttggtcagctatgcaactaagacacaataagctgatttaaaatagaataaatctgtatctagtcatactccatatctactgaatgatgtatatttaaattgatgtatatttaaattgcatttaaataacttgttatgatattttatccaaaaagtcgtactactgaatgtttgaatttgtgattcctttttgcataatattgttaaggcttacctgtatccaaattctagaagcacaaaagagggcagtagacttttactcttgctgtatgaaccaggcttaaatagatagaaagattatattaagcatgtttgctaaaatttaaaagcaaacacgaataatttgggttgctttattatacatagtaagcagtattttagtcctctttcaaatctcagctgatatttcataacttttaattttatttcatagattcataattaagactgtcatattggacatgttgatgttacagatttaacattgttttaatttattctacttaatgtcagacttttctaaggttttgaatttaaaaataacattgatttgcaaagtattatgctaatttacatcaaatggtctttcagtttatatgtctaggactattttagc

SEQ ID NO: 30679 - DNA, 1049 bp, Homo sapiens
aattattttacacatatttaataccaagtttagtccatattttattctgttaactttaagactatattgaagtcatattcctgtagggctatagggctgtccttaatttaaaaagtcaaatttatgtaaataaatttacacacatttctatgggagcataaatttattcactatctctgtactctttccagacatgacttaccatgttacccatgtcacccactgaaatggctccttttcatgtgaattctgcctagaattttagttctaccttttaaacaagtgaaattaatatgtatatatatgcaatagttggaaacatcaatatatagtaacagtttttgtacctttcattttgtctatcattatctcctttcttttgggttcaaaagtatgtcttttggtagttcttttgataaagttctatgagcagttaagatttttatttaatggatatttaagaatagctttattttttctctccctcttcaatgattgtttatttagatgtagaatacaagatgatgatgatttttcttcaacattctgaaaatgttatttccccgtctatgagaatctattattgctaatgatctgccgacaatttaattgtcatttcttgggagattatgtataggttctgtatttttggtttttagttatatctgatgtgtctgggtgtggatttatttttttcctgcttttcattctgtgtttttaacctgagaaagagagagacagagaaagagagagagagaaagattgctttcttttattctgtatttctagaatttttattaaatatgtttgttggaaactttcaatttatcctgtctttgaaataatttaaatctcagcaataatttccaggtttagaattttcactttgactatgcctagttaagagtttacctcatctgttgagatatctttatcttcactagttttagttgttaactttttcgttcttactttttgtttcatttctgcctactttgttacataattctcttcctcttttatggttattttattctggatatatttta

SEQ ID NO: 30680 - DNA, 1790 bp, Homo sapiens
caggtatgagccaccacactggacttactatttttttgactttttaataatagcccttctgactgatttcaaatggtatctcgttattgtttttatttacatttctctcacgattagtgatgtggaacacttttcatatgtttcttggctacttgtcttttgagaagtatctgttagtatatttgcccactttactgggcttgtttatttatttatttacacttgttgaattgttttagttctttacagattctgaatattagacctttttcagatgcatagtttgcaaatatactctcccattctgtaggttgtctgtttaccctgttgataatttcttttgctgtgtagaagctctttaacttaattaggcctcacttgtcaatttttgtttttgttacaattgcttttgaggacttagtcataaattctttctcaagtccagtattcagaatggtatttcttagattttcttctacgattgttgtagtgtgaggtcttatataaatgtgcttgtttaaaaaagtgtgagttaatgatttatattctttgtgtaaaagtatacacagcatcagattataaataaaatttaaattatattttacttagaaatgataaaaaaaaagattttctgtgaaccatagactaaatttccagtaggttctcatgtttttctccctacatctatattatattctgcttttagcaatcctagatatatgtttattaaggtgtgatggaggcctaatatttactgtgtacccactacgtcctgaaaaaccatgaattgccattaattatcacagtctgtgtcaaacaatacataaatccttggaacacagtactatttataattgtgctgttgcttatatgaagggatgtacactcacatggaggccataaatgtatatacactttgtatacttagcttattatgttatgaaatatgtttaaaatggatgttctttgaaattttcccaaaattgataatcttgaataaaaactttttatgaagatatttctaaaataagtaatatatcttatctgcttaagatataaacaagaacctttgttttcaaccaaaataatagttatattcaaattatgaagcatgtttttgcataggagttttatgtttttgtttttggcatgggtcttcagtaatgcctcctgcaaacttatcattattgtatattgtcattatcttatttttgtacttctctttctctctgccctctccaccacccaatctgtcttatttttgccctttaaagaactgaatttatgctgaatggtgaatattttatcattatatttatttatatttgaactttcttatactgtgtacttgattaaactttcctgtaaaatgtgactatattttcccattttatacctcttgtcttttaagatagagataaacagatagagaaagagataaaaagagcgatagataggtcaatagatatccaactcattcattctaattcatcaaaagtaaggatttggaaaaattatttaccattaaatattaaaatgatttttcagaattttacttccttccttcctttccgtcctttctcctgccttccctccttccctcccttcctccctacctctctccctccctcccttccttcatttctccctttttctttcctctctcccttcacctccttccttctttccctcccaccttccttcttcctttcctttcctttccttctttccttcctttctgttatggcataaatatgcaaaacttatttggaggaaatggagaaaattat

SEQ ID NO: 30681 - DNA, 1026 bp, Homo sapiens
atgtgtcttaccaaagcagcttgctgtaggtatgggctgcattttttgtttgatactttgtatattcagatagttatttatatagaagttaaattccacaagtttctggtaatgactttaaacaattaatgtatcttccaacaataaaatcaacacttctgaatttgaatgaaaaaaatctgaatttttggcaatgattcaaagctttttctctgaatttcaaaagttttgacagaatctccactttaaattccctcccactctgttaaatttaactataataatgtgaacattccaatttcagaaaaaaagtaaattaaatataaaaagttctaataataaatagttatttacattataaattatgtatttactttaaaatgcatacaattcagttaaaatcaagagaccaaatgagacttatttataatagctctattaagtaataatgacataaaataaactgtattttaaagtgtgcagtttggtaagttttgacgtatgtctagagccgtgaacccatcatcacaactaagacaataagcatatctttcattcccaaatttttccttacgcacctatgtaattcctctctcctttcccttagtacagccaataactatggctctatacacttgtctctttatgttggttaacgtgttctagaattatcacaggcatctgcagtatccactcttttgcctgctctttaattcaatatgattattttgccatttgttcatgtaactggatgtatcagtactcagtattaaaagttcattacttttaatgctgagtagtagagcattgtttggatataccactagttgtttatccattcatttgctgatggacattttggtagtatcttgtttgtggctgttacaaacaaatttgttaagaacatttatagagggacagagcaagatggccaaatagaagcctccaatcatcccactaccacaaggacaccaatttaacaactatctacccaaaataagcaccttcataagaaccaaaaatcag

SEQ ID NO: 30682 - DNA, 1007 bp, Homo sapiens
ggtggggatgctcttccttacttgcagaagcccacattcttgctgtgtcatcacatggtttttcctctgtgcttgtgcacttgtctcttcttcttatcaggacaacaatcctattggtttcaggcctgagccttataaccctatttaatgttaataacctttgtaaaagccctatctcatatcacattgggggttagagtttcaacctatgcattttggggacacaatgtagtctatatcaccttgccttatcctttgccacttagatcatcacatggtcgatgccttttcattactcaggtgttatttctaatatcatttccttggagagttctccctcaactattgcttaatcacagtgtattgtaactctacaggacatgtctgaccctgttcactcatcactaaaattactatatacaaccagaattgtgcttgacacatataatgaagcattgagaaaacatttgttgaataaatgttttcttctaatactggtttatgggcataactatttctgaatgtgtcctttctcaaaggtagacacctgagctttatgatccatggtgttatcctaaaaaacagaacacaatattattatattaagtataccactgaatatagcaattggtgtcttgaggagttacaacatgtcattatttaaataggttatcatattttttccagtaatcaccccagctatattaaaatgaaacttctcccctttttctctctaggtagcatcttccttgactctttcttagacagatgctataacttttcagctacttgagttattagtttatttcattatttattgattttaaaatgccaatctcaaattatactcaaaggtttttctacatttcccatctgtgatgacagctcttatagctttaagagtactaggttgtgggtgggcttcaagacatctcttttcactcccacttctagatgccagctccatctgtgatatgacaagagcgggtaaatatcttcttacttga

SEQ ID NO: 30683 - DNA, 1013 bp, Homo sapiens
aaactgtacctgtaaccctaaaattaaaatgttaaaaaaagagtagccactagaagataagccacctccaaggaaaaaaacacctccaagggaaaaaaaggaaacagatgtactttttacaatagaatgtgttgattcttcttgaagaatactagtgtcagtaggattttagctatttttagtctgctaagaattggcatgaatagacattaacaggttaatgaagtatctgaaaataagtgaatccagttgctgtttaatgtcccaaactcaaacttttaatgctttataacagtctcagttccttttataactgcgaggaaatagtttctttcccaggggcatactgccttttaaaaaaatgtctatttttattaacatccctttgtggccgtaactactattaggaagttggagtaaattatcttactgatgacctatttctgtttctaatagttcttaatcaagaatgatatgcaattgggacacaaattttcttccttcagacttactccaaattcccgtatcctggtccccaaggtggaattgcgtgtctagaattccctttaaaactgtcaatagccgaattttcttttattactctctggcactttaaacaactttggcatcatttaagaattttgatgttttattttgaagttccaaaagtgggaaataaaagcatgcggagggtaggattaacaatacttgactggaccatctagaagtgactgaagaaactggttttgtttatatagagaggagaaacccaaagactgatttagtaactagctatatagagggcagaactaaattactgctttaatttccctggtgaatttgtagaatttaaccactttaaataacagtatccccatttgcaagatgaagataatatttctgctttatgactgtttggggaggattaaatgagacaatatagattaaatattgaatatagtagctgtaataataggagctcaataaaagtgtcttcctttcttttgtcttct

SEQ ID NO: 30684 - DNA, 1040 bp, Homo sapiens
gtgtaccactttattgaaattgcatttttaatcacaatgattgtagttaaagcattctaagtgtgtactgatagtaatcaaattattctaagttgtaaaaaacttgtagaaaataatgtagacaaaatttaacctaggaaaatttccaaactaattttagtggtataggtgagaagctggtcagtcggtcagcacgagtaaagaatgaagtaacactctgaatttatccacatatatcatggatctttaagaaaattcacatagagatattcaaaacaaattatttaaagatcactagtgagcaaacaaatgaaaacattctggttttactcataaaaagtggtagctgtatgatagtgtttggctgataagagtattagaatgctgaacatcctctatagaaaattgcacatattcttaacctagtaacaataaaagatgatgaggaatgtcaactcagatttaaaaacgaatccttacttccaaaagtgagagacaaataataaattaatgttcattctatggaaatgaaattgagattcaagtagaccatgtatttgataagagccccaaattaaagctgtatagttcaagactataaaatgctgttatgtctaatcaccccccaaattataatacctcttttgtcaagtaatgaaaacttgatatagaaaaggatacatcaggccgttgtggttttagaaatcaaacaatattttctgagaattgttctgagctaaaacaataacaaaacctcagactttggatttgaaagggtttaccttagtagtctgtttaatttattttttaaacttattgctgaccacaatctgcccatctgtgtcacattataaaatatattctaagtctacagtctaattgggaatataactttaggaacatgggaactttagggaaaaagaaactttcttgacaaggttgtatttaagcattctttactcaactgacataatcaaattattctgataaaaatgaaaatatagtaatttttggattatagtttcatgtttctatgaaaa

SEQ ID NO: 30685 - DNA, 1021 bp, Homo sapiens
cataaaagaggctccagaatgcttccttgtcccatctgccttgtgaggatacaagaaggtagccatttatgaacaaggaagcaggccctcaccaaataccgaatatgccagtgcctcgatcttgtgcttctcagcctcccgaactgtgaaatacacatttttgttgtttataagccacccagcctatgatatttttattatagctaaaacagactaccataaagggtgatttgaaagataaagtgtgaattatgtctttgattctttaaatcagtttctgtcttgttctatttttggtcaattcctattttatagaaatagtattaggccaaagagaggactaaatatgaaaatgctttcaaagatttcaaagaaaggcatataataaacaccaaatagtataataactattagtatccccattattaatgttgttattttcttcatgatgagcagagcaaaatcattattaaaaactgagctgtgagtgttttttgcattttaatctttctggcaattttcttacctagcttaaaaagatgaccctgacagctaagtcaattgtttttttctcccaacttggacgttcttctatttgagtccctttgtatacacaaagaaggattcagttcaaaggagaagagtcctagttttcaagtgacattcttgagctctattctaggcagtaccctttgctggagttttcccttgaactaatcacttaacattttacatttactttcatcaccataaaatatggttaataatcttcctagatgattgtgacaatcattaaatgaaaaggtatatgtaatgggcactttagatcctcttcctgtatttcagtactgagcaattgtacccatccctcagtgctgattgttggctgctgatagctcacagctgctcccttctctaaaagttgccattgactgggagctactaggtcagttatgtgactcgccgacccctggagaattccatggccattgatggactaatatgagaggttcaaaaggtc

SEQ ID NO: 30686 - DNA, 1050 bp, Homo sapiens
tgtgcaggggattgaagccaacttgctttcttgctgccattttgaaactggaaaatgtctgcagtgagacatttaaaggagttgtacctaacagcctaaatgggctggaaatgtttatcttattatcaacaacatagacaaaatatggcaatggatgtgctcagttagggagggcaggaaaacaagaaggcctaagactcaacatataagttggcaaactgtaaacatttaggaagaaggagactagaaagaggaagttaataaaggagagaaaatgatagtgtaggaagtatgaagggagaaaaacagtttaaacatgttcagctacatagaatgctgcaaaaaatgtgagttaaaatgaaatttgagagtggttcatcggaatttcaatttatagaattcagatgactttaaaatataatttggagagtggtagacacaagcctgttggagtagattgaagaatgaatgggaaatgaagaagtaaattagcatccatagaaaaattatgtagaagagatatagttagttggaatagattatgagagtcatggaacttttttttttaattgggagaaagtggaatattatgagtatatgtagttttgttttatttttaaaatatcttaatttggggcattttacttttagcttgtaatttcaaatattctggagaaataagatggtttttcaatgaatgtttatgtaaaatttacatgtattcggcagtaaagagtttgaaaactgacaattgtttgccacaagtttacagcttttaatcctgatgttttgttacagcaaggggacacttcgaagtaagttgttaggcagtaagtccttgtaatataattggacactgagcaaattgcagtctcaaagccagccctcgtaacctttatactactaagttcaataaaagtgcagaagacaatgaagaagaaacatgactcagaactgagaaaaataactgaacaacttaaaactggacctatcatcctgttgtttgagacatactattgactccagtaagaaaactggtagttaaattga

SEQ ID NO: 30687 - DNA, 1052 bp, Homo sapiens
aggggaaaatcctccccagtgatctaatcacctccccttaggcccctcctccaacactacaaattacaattcaacataagatttgggtagggacacaaatccaaaccatgtcagtacctgatacctcagtgagacaaaccttaatggccttggtcctagagatatgtcatagttgtccagggtataatatcaaagatctggatcccattcctgaggtagtgtgtgataatgtttgcatatttgtctccgcccaaatcttatgttgaattgtaatcctcagtgctagaactggggcctggtaggaggtgattgggtcctgggggtggatcccttattaatggcttaatgccgacttcatgatagttcttaggagatctggtcgtttaaaagtatgtggcaccctctcccactcgtgctctctccctttttcctgcttttgctgttacgtgcctgcttcccctgcaccttccactatgattttaagcttccagaggcctcatcagaagctgagcagatgcccaggctcatgcttcctgtacagcctgcagaactgttagccaattaaatttattttctttataaattacccagtctcaggtatttctttctagcaatgcaaaaatgccctcatacagtgtggttcttatctcagcccaaattattgaaattttgagcacctaactctttgaaaaggattgtacctattgctaatatttgttacacatctctatgtctcaggactctcttaggactcaatgctcggtgctcgcctccctgtagatctagccgtggttccaaccattagagaactcccctgctttcgctatagcaggcaaggttactcagcaggaggggctgtggactttttgaatctctcactaggctatgagtagaagagcatacacttagctccatccatatcagagcaagaagatcagacatactgccccatgtataaacagttcaaaataaaatcttgaccaccacctaaccactcacattctctgcagcaggcagtctagaacctgttgtggtgacttggcccagcactg

SEQ ID NO: 30688 - DNA, 1312 bp, Homo sapiens
caatctatgaaacaattaataagctatccatcactcatttgtttaacactaaatagtctcagtagtttcatctgctgacaaaacatcttgtaaacaaccactgggacatttaggatttggaaaatgtcactggagaactgcctttttctctaataaatggagcaaagaaatacttattaaatctcctccgtaaggagatatagtatgtatgtttatgtgtggcccagaatttgtggtgcttaagacttgacccctgctgtctaggaaatggctgttttgtagagaaggtaaaaatataaaaaataattacaaaaccaggcactatatgctctgtgccatatgatattcagtgttatgcagagtctcatagtcatgtcacctacatagaataacctggaatactttttaaaaatatctcttgacttgattcagtccacatccatggaaccaaaaactgtgtggaaattaggaatgtgtatttttaaaactcatttgatgttagatatgtacccccaaagttacatgataagtgttgcagtagttttcaggaggaagattgcttctagttaattctgtggttctcaatcttggcttcacacaggaattagttggaaggcttcactgatgtttaggtctcaccctcagagattctgatataattgttccagattgcagcctggacactgattattcacaaccaaacatagtagatgttatattccaaatgttatagtctgtgtataagaccattcatgatatcatacatctaatactcgatccgctagccatattgaactacttgaagactccaaagtcgtgataatgatgacaattaaaataatagtaatgtttaatatgtatttcgttatcattatgtgccaactataaatttgtttatcttcatgaaactcctttgatatgaatgctattattattaccattttatagatgaggaacagagacaaagtgacttggctatgtctacatggttaataggtgaccaaactgggatttgaacccaagcattctggctctacagtgcacactgttacattatgccactcacgcatatactctatttcccccatgcctgcctcatatgattgaactctgtcatatgtgtttatattgccttgagatatcttcctctaacctcctgtatgatgactgtttacccattttcagttcatagtttaatgtgacttccctacaggaatttttccctacttcctactctgaggagtgatgcttctgttgcagttagttgccaaagactttaatttttttttctttgtctgtccacattactgtg

SEQ ID NO: 30689 - DNA, 1306 bp, Homo sapiens
atttcattttcagatagtaggggattattgaggattttaagtaagggagtcagataatataccctgtttctaccaataacacttgataaactcaggggaccagctaggaaatcctgtgaacaagccttaaacatcccaagccatcttggatacaatgccatctctatcaggggaggcctacctccatctaactaaatacacattgtcaactatggtggtggacagaaatgagcaaaatgtgagggatgaaggagtggtgctaagcccagttccaagaggtgaggtatatataaaattagttgcaaatggcctgcaaagcatagcatattatctggccctttacagaagtgtgactgactggaagtgttaaaagcatagggattaattaagcgacttatataggatattacaatctatatgaagtaatgaaggtatgaatgaggtaataaaggtattttatcatggagccttttaaaattgaatctatcaaagttaatgccatctcggaataaacgactaggagtatagagcataaagggtgaagggttatagtaagtaagggtagaggttctgtagagagtactcacagggttagtctggtctagagaaggactagtaagttcaattcgagcagagctgtgagatcagatgtagtacatgggaacatgtgctggtactgagatagaaccaatagatgacccagaattggaaagaattaaaggaaagtataggaattcctcttctgaccacagtagacacttaaaaatgattactaaattaactagactggaactgacagaagaatcaagcgatctttaaatccaggtaaactatagagagtaaggtcctaagaaccaagaaatgttatgcaagaatgggcacatctcaaacagcctaggttcaggggagtaacctcagtcagccttaatatgagccactgagtcctatacaacttgcatttgtaagacactaaatgcactttcacatgatattttatttatatttcttacagaaatctgataatgtagtttaagcagacattatgccttccattttacatttatccgaatgagggatcatgagtatcttctcagaggcaaatttaccttatagctgaaaaagcttaaccttcagagtacctcattttcatgtgtctctttcaaagccctgtatctctatcttagagaaacgctcaaattatataatttcaggacaaacacaatcttgatcttcccttgtgtttcacctaacctagatggcattgggtgggtctgtaacatcagaaccagggttctttctgttataa

SEQ ID NO: 30690 - DNA, 1058 bp, Homo sapiens
tttcctctttaaaagactttaataagtgcatcattacagaatggcataaaatatgacaaaaaaatcactaaactgtgtaactgcttaaataaggagaggaataaatgtccactttctaagtcattatgtcattatacactgaaatgagaagaaaatctttgcatttagttttgaaaaacatcttgaatataacaatcaataataagaaagaaatatttcttataattattgcttcaaaaaggtatgctcagaaaaatgaaatccttttctaatttttacctgatactaaattttatttagcctgttttatatgtcaattatgtatttctgtatgtatttaaagattctaggtttcattgtaatggagtgattatcatgggtactttttttttctttataaacctttccaagggtaatgataccttcactttcttccattgccctctctaccatttaaaatttttgttactttcttaaaaatttcccccctttgggaaataatgaagatgattctgcttagctgtgtagactcctgattcgtagtagtggaatgggaactgggccaacacatttaatttgcatttctcctagaaaatgttgcagactaactctttaaaaagcaccaaatcagagatatattctaggcaacttgcatcagaatggcctgggttgcctattaaatatgaaagttactgtgttctagccaaaaacctattgaacctgaccctctgaggatgtagattagggacatctatttttaacaaacaaacttcccaagtgattcttattcacattaaagtctgagaacacaagcttatatatagcctacctcatttaagtcctaggagtgttgcaaatgtattatgatacagttgcaaagaataaaagaatgcccctcatccatagggggaacttgggaaatcttagcttaaaaacctctaccaattaagattcatgagtagaaatggtttgtttatagaaagattttgcctgggtcattaatttttaggaaggcttataatcttttaggagttagattcatatggaaatacacaagg

SEQ ID NO: 30691 - DNA, 1001 bp, Homo sapiens
gctagtatcatctaagagtaaggagttttttttttgttgttgttgttgttgttgagacaagttttgctgttgttacccaggctgaagtacaacggcgtgatctcagcccactgcaacctctgcctcccaggttcaagagattctcctgcctcagactctcaagtatctgggactacaggcaggcaccaccctccggccccagctaatttttgtatttttggtggagacggggtttcaccatgttggccaggctggtcttcaactcctgacctcaggtgatccacccaccttggcctcccaaagtgctgggattacaggtgtgagccaccatgcccggcctggagtaaggagtttttaatcaagttcttttattgttactttcaatataggtattcaaatgattttaattactcaggagcttaaattctcttattaaagtgaatttctccttaatcactttttgcctacaactggactttgaaaaatatataaagatccgtgaatcaattccactgatttaaagggtgttctaatagaggtagcttgaacaagacttcttagtgatttatcttatgtcagtaagattgtttttatattttatatgcaaagtgatttatcaaaaacacaaaagactcagacaaatcctggagggaaaatgtctttctgatctcaggttaacctcaagagcttgggttattcattctacaactggggcagcatggaggagtggggggacgcagattatctctgcctgaacagcggagtctttagatcaaacaccaaaaataggagatgaggaaaaagacaagccttaagtaaaatatacaaaagcaaagcagctggagaataagaaaactattgttttcttggatgtaggagcaaagagagggaccccagaagagaggaaagcaaatatatgcctcttagtatctgattttcagagtcattgaactaggtctctgagaatcaaatttttcttctcaaatgatttttctttgtaa

SEQ ID NO: 30692 - DNA, 1910 bp, Homo sapiens
taaaaatagatatctacttgctaaatttttgcatacactcagactgcacagctaaatctaaggaagaaaacttgtgtactgaatttgtcatggagttagctcagtttttctttaattctcagttcatatagaatcctcaatttatttgaaccatgtgtgacaatatgaatatcaagttttatcattatttgaggtaaataatataaagtgatcaatgattacacgtgtgctcctgtcagattttcagagaggctcaccctcacccaaaaatcctagcaagattatattcttccagaatgctctaaagagccaacttctctttcttcctaatatttacttcaattcataataacatattaatgcacagtgtttgataaagtctgtattcctcactaaactgcaagcttcaagagatcagagactatttttgttctctgtaattttctgaatatctggtccagtgcctgacacatagtagtatgtcaataatatccatttctttaatgaataactgaacaaatcatttaggttttgctgagatgatcttgataacccagaaaaacctgtcttttcttattagtgccgtttagaggtaatgacatttacattaatgtcctttaagtcgggagtacttctgataccaagtgatactggtcagtgcttttcctatttatatgtgttaattacatatgagggtccactcccctttttctcacaattgctgcctctggagaaagctcctgtacttcacaaaccacatttgcttcatcgtgactgctgcttcaggattcttccttttgactgttctcagaaagcaaataaatggaaaggagaaaagacttgattaaattctcaatttttttcatggttgtttactgctctaacctatttaaaatgtatatactcaatttaggtgaagtatatttgggttttgaaaaatttgctgccgatagaaaatatatatctgctatgaaaattaataccttaagctgtgactgtcaaaattctttgaactaatgggcctttacagagagtgcattatttagaatcgtttaaaagatgcaaacaatgcacgaggagattcataaagctataaaattattctaagccagaacagaatttccctgatctttaaagggatttagctattaatttttaaatgctgaacatagttgacatttcaaattgaattgttactgaggtaatcacattgaatctcttggttaaatgttcaaagtagagtccatgaaatatgcatgttaccaaatcaaggcaaagagtctttcttcagaatacatgatttttatttagataaaatattagatgccttttattttaaaataaaactatctcttaataggaagatgcacttactcttcaaagaaaacctgtgtgtagaactcaaggggtttgtgcaatgtttactctacaattcaactcattgcatatccattgtttgtgaaaaagtgaactgaaaacttgtaagactcgatttctgatatcaagatacttagactctgatagtatttggaaaacacactatttctaggaagtattacatatcacaaatattttccaagatcaaacttcccaaagtgtagtattgataattttgttgtcacattaaatgagtttatgtcatacatgagccaacatgttataattttaattcatttttaattttgtattaactgtcttccagtgtgttcagatcatatgatactatttatttttagtaactctctaaagtttaatttttaaagaaatatttgtaaaagcaacttgatttttttaaaaaaatcctagtaaataataatacatatggcatgcagatgctcacaactataaaatgattaatgaatggtaattgagaaacaactctaaaaactctttttaatacaagtttacta

SEQ ID NO: 30693 - DNA, 1057 bp, Homo sapiens
aatggtaaatttccaaagtgttcataatttagtttttgttgcctgccagtgtccatctgccttaggcaaaaatttaaattgcatactttacatcataaattcacatcctataatctcttgaatattaaatttgtttaatagatgtttaccatggactggataatactgtgttatatcagtagtacacaggtgagtaaaagacaatctgtgttctaggatcttcaaatttaggagagggaaactagtattttcaaacttctatattttagttttgaaatgagagatatataaagattgtaattgaaacgtgaaagctagacatttggatctgatgctgaaaagagaagagtgaagtaagtagaatctaggctattatggaagaaatgattgagactgaaattatcaggaaaatatatatatatatatataccaaagagaagcaatagtaggataaaatagggagccaaggagggaatggaagagaacccaagccaagtggcataagcaaactcagagaagatggcatgtagtaacattaaagaggagcaattttcaagaagcagaggggtagaatgaggaacaagaataagacactgacaacttgacctgattaacatttgagacaaccatttctatagtaaggggaatgggttgtgggaagaaggcaggctgattactgacgtgtcaagaagagagaggtaagtagcactagttcaataaagactcagggataggccaggcatggtggctcattcctgtaatcccaacactttgggaggctgaggcaggtgaggatctcttgaggccaggagttcgagaccagcctagccaacatgacaaaactccatctctaataaaaatacaaaaattagctgggcaccatggcacatggttactcagtggctgtaatcccagttactcaggtggctgaggcagagaattgcttgaacctgggaggtggaggcttcagtgagcagagttcatgacactgcactccagcctgagtgacagagcaagactccatctcaaaaaaaaaagaaaaaaaaaaaaaaaagag

SEQ ID NO: 30694 - DNA, 1145 bp, Homo sapiens
aggatattttttgttctgacaccattaagaaacagagattaatattattgctaagtcaacaaataatggaaacaataaagcagagttgcaaaattttagaaattattcttttcacaactctcagcattgttctctgaactctggatatctaaaaacagttactcatatcaaatgaaacttccaattaccatttagtaaatggaaacagaacagagttatgctttctcatacatgtctccatgatggactagagagtaaaactgataactttggaaaagttctcaatggtaccgtgttatcagaactagtttcatgatgtagaatagtgtctgcttttctaccattgtagggagaaaaattgattttctggtacttttttttaccagcaattaggactacttgcagcttcttgcaaaacaatggaattatattagttagtagaggaaaaaagggaatgaaagaaattctgagaggcttaggttatacagagtagaaaagagatgagcaaaggtgaattttaagacatgtagaatgacatatagaatatttcatatctagattgtttttgtcaatttgaattttttactcattcaaaaataaagataatgttcatatcaattaatatattaggcaaactggataactagatgtcgcatgttccagaatttttccaattttgtgtttaaactttgacttttgtcaaatttttactactgaaataatttgatttgttctggggcgtctgggtgtggtgccatacttttataggcaataatgatatgtttagcttctagaaaacctaaagcactgtaacttaaatttttctatttcagagtaaatactaaagatttttcagcttgatatgtatcattatgagaaacatagtttacatgacaccatgtatagaggatacatgtataatggaaacatgctggacatgtctcccctttttattgcaacaagtatattaattatagacatatctcatttcattgtgctcacttaattgtgctgctcggatactgcattttttttttttttacaaattgaaggttgtggcaatcttgcatagagccagtgcgttggctcaatttttcaatagaatgtatttacttggtgtaattcttgtagtgtttaaaaaattt

SEQ ID NO: 30695 - DNA, 1066 bp, Homo sapiens
tgtagatgtgtggtgttatttctgaggcctctgttctgctccattggtctatatctcaaacagatgcaatcttgtgataaaacttgaatggatgaggagttcttcttatggatgagcaaagaaaattgtttcttgagatgtaatctactactggtgaggatgctgtgatcattgttgaaatgacaacaaggagtttagaatgttgcatcaacttagttgatatagcagcagccattgtgaagacagtgtggcgattcctcaaagacttaaagacaggaacaccattggaaccagcagtcccattactgggtatatacccaaaggaatataaatcattctattacaaagacacatgcatgtatatgttcattgcaacactgtttacaatagcaaaggcatggaatcaacctaaatgcccatcaatgttagactgatgagcatacatgcatgcatatgttcattgcaacactgtttacaatagcaaagacatggaatcaacctaaatgcccatcaatgttaggatgaagacaatgtggtagatatacaccatgggatactgtacagccataaaaaagaatgagatcatgtctttttcagggacatggatggagagggagaccattatccttagcaaactaacacaggaacagaaaaccaaataccacatgttctctcttaaaagtgggaactaaatgatgagaacacacagacacattgaggggaacaaaacacactgggcctatcagagggtggaaggtgggaggagggagaggatcaggaaaaacaactaatcagtactagccttaatacctgggtgatgaactaatatgtacaacagacccctatgacacaagtttacctgtttaacaatcgtgcacatgtacccctgaatttaaattaaaagtaaaaaaaaaaaaaaaaagcaaccacagggtttgagagggttgactccagttttggaaaaagttatactgtgggtaaaatgctgtcaaataacattgaatactacaaagaaatttttcatgaaaggaagagtccattgatgcagcaaactttattgtcttat

SEQ ID NO: 30696 - DNA, 1048 bp, Homo sapiens
ctttattgtgaaatgcagtttattggggtggtttgttactgaacccacaatatctccatggtgtgcctgtaatttaccaatgcttcttatatactacattttaaaagataataacaatgttccaatgaatatctgtattagcactgcacttaccgaaataatgtaaccttcccagacctggttataaaatggattgcaaagtactatggtactggaaataactttcaaatcgagctgcaacaactcagtttggaagtgtgggggagggagttaatggcaggatattgcagccatttcatatactgtttttttctttgtaatgaaactattttccaaacaaaacttacctcagaaataagtagtttttctcatcaaaagctggagaactctccaaaagtgcttatatcacataattagcattttctataactatttttgcaggaggcatctggaagagaatattcaaagagtatgtaatgaacctaaactcaggaatgtataaaatgtgtaacacttataagaacagaaattactgtatatgaagaaatatagttgatgacttcacaaattaaactacaaaaaaagcagcttacagtgagaaatgaatattctcccaaactgtcaatttaagaacatagtgcttatatataaagtatacatgtttatgacacatacaatgtttcatatgtatgtggttttttgcttgtttgaatttcctgttcctttaaaaataaagataacatacatattgatatgaatgttagcaaaactgagtaattatacatcacatatttcaatttttttggaatatataggcttgatttgagcatttgagacaaagcacatagacatatgcttatatactttaatagttgtatttacaccataaggtgagaaacagactttaaaaagtaatgactcactcttttacaaaaactagaagtgcttttgtatagttttgcacctactgattttatgaaatgtggaggtgacttgctatagttttgtttagttttgtattcctcaacataatgccatattcatatat

SEQ ID NO: 30697 - DNA, 1052 bp, Homo sapiens
tgtggcagagtggtcactcaggacgtttggaaaccaggttttaccaattgatagaaaagtatttcatactttaacaatttgtgaagctgtaccagtgagaactggctgaatataaggtataactcttacatgtctgaaaaacagacaaaaactaaataaattactatggaaaaatagttaactaatatcaaacttgttgataagatgctgaatattacatgaccttttcacagtttgcttttttaacatttgatgacataatttttagaaattaaaatcatacttgagtcaaaagtctataggcttatttttctttactcattttttctgatggtgtatctttctgtattctttctgtaatctttctgatggtggtatatcaacaatctgaaattaatgcaaattatctttccccttgatgttgccctcaaaatgtggagaattccaaagtctcagaaatctgtcattttccaattccacacattgttttcaaaaggagctactcaaacaaatagaaatcaaaacgatctatgcctgttctcctctggatttgtgtatcagtagcttcaaatcctattatatgtaaatgataataaaatcttacattgctattcacgtggcttcacagcagagccagctttcaccctaggagtctctagaagtaggaagtgacttccctagagcatttggtaagcccatcaaactctaaccattttgaaagttgagtgagtcattagttttatgacctatctagctttaaaaacatggaaaactgatgtgatgctggtttaattgaaaacaaacagggagattattttcaccacttcctgaataagggataaagcaatataaatcatattgaaattttgtctgtatttaattactgagtagtgtgctgcaatttatactttaagtactaattattcttaatgtaattatatttaattattataattgctattcatatcttatgttctaatagagacatatcatatcgagggcctttttcacaaaattactatattcccttcatgctagaaaacagaatagaa

SEQ ID NO: 30698 - DNA, 1033 bp, Homo sapiens
actgagattcatccctaggcccagcctctttcagagataatacactgttcattgtgtgagcagagaatggagttagtaagttaagtaggaacaagacaggataactgggataactgaaggtacgtgttccaaatatttttcctttattttaaaaagttgaaatacatttcagttactctgaacattatcaaagtgatataccaagtgtttcctattatttcccattttcacttgtttgggctaaaatgtctgtatatttttgacattattgttgtaattttttctacatattctatcctaatattaaccactccctgaatattgtgctggagaaggtagtgagattttaaaataatcataaatgagaataagataaatgattaaaacagcatctctattacagaatgaaataaagattatcaataaagtctataattatttgataatggagtttagtatctgtgaatgtaaaacgactttataatgtattatgattcagattttcaacttaaggcacattgtctctgatctgtcattttttactgtggtgagtaaattatcataactatatttttggtcaattcaagcttttacagtaaattttgaacatataaattatttaatacaggaatagggaaaatgaatccaatactcagaaataaaaatgaattaattagaacatattagaagtgagctttgcagatatctattctaaccacttcattttacaaaggaagattcagagacattgagtggcttttctaaaatgtcactgataggatgaactcaactacaaaatctagttcctttgtccccatgatatgcccgctctctccaatttgttgtttgtgtgtctgtgtggccactgcataccttttgagtgactttatttaatttccaaataagttataatggatatttgactgggtgtcatgttgttcatgtgggaataacccaaaaggcccagtgtgtctcctctaaatgcccatttggagttcctgttcatccctgattcatttaagcaagtttttct

SEQ ID NO: 30699 - DNA, 1059 bp, Homo sapiens
ccatgctgttttgattactttatctttgaatcaagattgtgatcttagctgtatttgtttgcaagcaactgtgcatctaaatctcacaagatttcttacactagaaatgaatttggtcataagaagaaaccaagtatgaatggtgcagcataattattttattcttaaaaaacaaatcaaaatatatttcttatatgtggtagttcatatacaaagaactctgtatcattttttgctatattcagttcctttagtgtttggcacagtgtaatagtgcaatgaatatctctttaaaatcatccactgaaaagagaattatattttgtaaacttctttttgatcttcaaatactatttgaaataactagcttactaagagttgaaattcattaatttgaataaaatcattaaatgattatatttcattaagatttaatttttactgaagccagagcaactttatatacaaaagattatttcaaagtctcctggtgctttggaccttatttcagagaatctgtcaacttctgattcagaatgctatataatctgtgtgcatgttaccaggacacgtgattgaatattatttgtcttttttttttcatacttttgctctctggttcagttttggagactttcactcataaatattctataatcagaatttattttatttggaaaacaccttaaaaactacctatctcatcagctgtctaatgtgtacagtatgtttgacaaatgttccttcaatctgtacttaaacttttggagactgataattccctctttttttgaaatatctcaatataaagatcttacctaacatacatcttctcttgcctagtcttaacacattagttccttttctgttttttgctaagtggtttccagtttcctcaccatattcatttcagtttgaggacctactaggatccatttgtatagggtagaacttgtatatttaagaatcacacaaatatggctaaagtcctatttccagtctatagtacccatgatcttgggaaaattacttaacttccctaatattcaatttttgcat

SEQ ID NO: 30700 - DNA, 1057 bp, Homo sapiens
cagtttgggctgtgtaatactaggattattggcatcgacatctgtctttcccttaaatttagggaatttaagccaataagctactcccgtagaaatttgaaattaggagcatagaaactttggcaatacatgtgtgggtcctggaaatgttaaatcatgtagaggtggagctggaacagccattttcatgaaagcatgtaaatgttaagttaatagagaaaatagtcatcaaagagaatcaaaaggatagtttgaattcatagagagaaagggtcaatagaccgttgtggattagagaaacaatcgtactgaaatcagtttgtttcacttcacagaaaccaattgctaaattttcaggaagttttgcatctggggtggcttcaagtggacaagtgatttgaaatcagccatagtgatgtacttctgccatagaacttatgctccaaatcagggcttcctgttcctgagagttgttaaacgtttagctgcatacattgtcacagagagggagagacagagagagagagagagagagatctcctgagtagtttatctgatccttgatagcttcccagttcccagctctaaatccatgagaaccagcaatgctttatttctatggaatgcatttgtatcctgttaataaaccaacatttatgttctgctcatttagttcccataaaaaattaattgctacatttctaatcaatataattggaagcaaggaaacaggatggtaacttatattcatgtgaaatgccttatatgtatatgctgaagtctgtttcttttttgaccccatatagtttagaatcaatcccaaataacatttaatgccaactatgttgactccatagcaagacatctttttccagatgcgtttcagtattaatctgatcatcaccgagaggaaacttagggaggaataaagacaataaattcagtatcttaaaagatatttgagtattttattaaggattttgcatttttaaatatagagttgtgatcaattttggccatcacaggcatacagaaaagtttgccctgaatgattaga

SEQ ID NO: 30701 - DNA, 1031 bp, Homo sapiens
ttttatttgaaactaaatgactaccatattatttgattgctccttttaaattatacaatattgccatcctatgaaaaattattttagaataaagtactaattttaactgacttctctgtagctttagtagtgttggtctttctctcattttataacctctgtccttgaatattgaagcctgcatcctagtttccatgacaaagttttcttgattttattctatccttccttgacattctttcttagtgtagttttctctgtagtttacctgcactcattaattaaatgtgaatgtttctgagagttccaaaaacagcctctcattctctttgctgctggagaatatcacttagttctattatttccaatactctctgtatgataatgtctcccaaaccatatccctagcatctctctccttaactcttgtttccaataatcataagactattgggcatctctacattatttcctcagactcaggcatctcaacccaaactcttcaaaactgaaagattttcacagcttccaaccttcttaatccatgactcttgtactctctatattaggtaactcacaccaatagctaccttatcaactaagcagaaattttaaaatgatgcctcctcttctttttaaaaaatttttcatgttcaattttatgcatgtcctttagattctacctttctttgaaaactcttctttatctttagttgataatcttgttattttgtcttgattatactaacagctttctaattgtttcccacttctaattccttttacctccagttcattctctgcactactgccagaatactctctaaaatgcaaagatgtttaaaaagaaatgaaaagaaaaataattacaatgtgtggagtgatgtaaattgctcttttaattaaaaaaataaattttaaaatgcaaatcttatttgtcatgctcttccttgaaatcagtagggaaaataatcctcttttaacttcccatcctcaactcaaaaattgaaaagatgttggcaaagcacgct

SEQ ID NO: 30702 - DNA, 1798 bp, Homo sapiens
tcctgagtagctgggactacaggcatacacccccacgcccagctaattttcatatttttagtagagatggggtttcaccatgttggccaggctggtctcgaactcctgacctcaggtgatccacctgccttggcctcccagagtgctgggattacaagcatgagccaccgcccctggccgaaactattttttatgaagagttacagcttgcaaggtggccatcctgcaggctgggaaatatagcctctgaccaagacatgcactttgagggtggtaagaatgacagggatttacgctgagtgaggtggtcaaagacacatattaaataacgctataggagtcatgaaatttatgaaagcagaaacatgcacatgggcaattgagcttcatgcctcagcatgggacccatgtacaaaaaaatggccatgttagcacaacccaagggtggagttttcagccctctgatgtcaaaaggtgaagcagaggacgtagaaaccctcactgagcatactctggactggccagaactactccgtggttggtggtctcttatcaggaaggaagctggttagttgttatgtctaaaccacagaaagggaggggcagcatcagatagttgatatcagcggtggagtgggtctttaaaaagggctggcttctctttaacccttgaagaaggaagcttaatggtagtaaaggagggaggtgtgtccagcctctcatctcatcatcatagtcgggatcccagttttaaggtttctctggggtaagcttggccatgagggggtctgttcaataggttgtggaattcggattttatttaatttttatttttataacaatagtttttggggaacaggtggtgtttggttgcatgggggaagttcttttgtggtgatttctgagattttggtgcacccatcactcgagcagtgtacactgtactcaatgtgtagtcttttatcactcactaccctcccatccttccccactgagttcccaaattccattatatcattcttatgttgttgctcctcataccttagccaccagttatgtgagaacatatgatgtttggtttgccattcctgaattacttcacttagaataatggtctccaactccaggttgctgcaaataccattattttgttcctttttattgctgagtagcattctatggtgtgtgtgtgtgtgtgtatatatatatatatataatgtaaatgtcatataaatgttatatatatatatatgtcacattttctttatccacttattagctgatgggcatttggactggttcaacatttttttgcaattgcaaattgtgctcctataaacatgcatgcgcaagtgtcaaataatgacatcttttcctctgggtagatagatacctagtaggggggattgctggatcaaatgatagttctccttttagttctttaaggaatctccataccgttatccgtggtagttgtactggtttacattcccaccagcagtgtaagtgtttgcttttcaccacatccacatcaacatttatgattgtttgatttcttaattatggccattcttgcaggagtaaggtggtatcgcattgtggttttgatttgcatttccttgataattagtgatgttgagcattttttcatatgtctgttggcagtttgtgtatcttcttttgagaattgtctatccatgtcctttgccaactttttgatgggattatttggttttttttcttgctgatttgtttgagttccttgcagattgagttcctttgttggatgcatagtttg

SEQ ID NO: 30703 - DNA, 1034 bp, Homo sapiens
cttcaaataattttcatgtaatatagatctgttcttagtagcactaggctcttaaaaaattataaccttgaattatctgctttacaatacttgtcaaaatttgtactatgtgcaatataattcttagagaattgcacaaaactatgcattgcattcatttctttagttaaaacatgttacctttggttcaagctagattagcagacttgtgcctatgaaaaaaattacttcagtgtaatatgtgcattatttgctaagtgtcaatcatctcttctataaaatggggatattaataaccattttacagggttattgtgatgattgagtgaaacaaattatgtgaaatattaagtacaccccttacagttagctatatttttttcaatacatgcttaccaggtataaaagtgatcagttctgacagacgatagcaaggagttgtcacaaaggaggtaacaactaaatcagaatatgaagggtgagtaggaatttttcagagagcaaaaggcggtaaaggcaattcaggaacagtaggtacaaaggcaaaagggagctagaggctaaagaatggacgggggcctggtatgaagacacttgtagacaaagctgagaagtttaggttttattctggaaatgaatggtatttggtctattcgattttttgtttgcctgttttaactattaactttaaaaataaaataacttctaaaagttaactaaatcctgattgatgggactatgaaaacattaatgcataacaagttttgttttaggcatcaatttaattactaaaagtaggtgcaagcatatcaaagataatcagaagcaatccgttttgccatatggaatgcaaaagatttgaagtgtgcatactcctgaattttgagtaatatttactttgaaaacttaagtttcagttgctcttctgtatataaaattatttaaaccctctaatagcattatttaagggagtctcctataggaaggcaataatcagttactaatttgtatgttttgaaaatgtgtatttgaca

SEQ ID NO: 30704 - DNA, 1034 bp, Homo sapiens
cttgagcagatcacgaattgaagagaaaatcttgtaactatataaaagaagactattacaggcaatggatataaaaaggtcaaagccttaaattcaagcaggaatacgtctggaaagtaacaagaaagtattaatggcatatttattctttagcatatactaaatttcatgttcactaaatcctctggtgctatacctacattttcaacaatggattttaatcaacactaaaccatcctttaatagcaatttttctccgtgatcatacattgctaaagaaatgtgtttaatcctaaacttgattttgagcagttggcttttagagtcgtcagctgtgttctctgaggaattctcatttgcacattttgcaggaaaggtgactaagtattttatatagcataaaataataagaccttattgctgttttggtgcctctattactatatcaacaattttaatggcatttatctgtacgaattaaaaaatagtcatacgattctttagtaaaatgctttaaatcctgtaaaattaaaccagattagcagatgtttaactaaattgaaattaagtgtgtgcatgatcacatcctacataatctatagctatcatatgatataaggctctactttatggttaggcaaatgtctaacaaactggcacattttcaatatagttctttgtttgaaaatggatgccaatttgatttcattaactgaactctgcctacaaaatgaatgagatgatttggataactgattcattatgtatgttgttaatatttaacactgggtttatttgtgatatttgatattttctttttttttttctctttttttagacagagtctcactttgtccccagggtggagtgcagtgtcatggtcttggctcactgcaacctctgcctcctgggttcagacaattctctgcctcagcctcccaagtagctgggattacaggtgcccaccaccatgcctagctaatttttttgtgtttttagtagagacagggtttcaccatgttggccaggctgat

SEQ ID NO: 30705 - DNA, 1060 bp, Homo sapiens
tcaaaaaaaaaataaataaaacaaaattactttcaaagtggatggattattctgatcatcattaaaaatgtgaatttcttcatacttaaaaatatttcaattgcaaagattgaaaaactaattgccgaccttttaatcaggcagaaattccacagaccatcattagatgagtgttttttcttccatgtattcctctgcacttttctatttcgtttagattctaaaacagtcagtcgtctacataaataatttatgatgtccagtgaaaaataaaaatgcgggaccctttgttcaaaaagtaggaaaagagagccataaaaggtactaaaatacagtgctctttctttcagtgatttttctctctcaacttggcacaatgttttttgtttgccatttaatgtccctctaagtaaagaaaaagtaaaatttcaaattatttgcattaaaatttaacattcatctttatattgttcagtgaccattttaaatgcaaatacaagaacatttaacataagtgaaagcatcaaaatatacaagtcttttttctgtagttgaccccacatgcacctcctgttcccaagtgtgtctcaagtaggccagaacagaaaaatatcagccagactcaggaaggttgggaagtaaaagagagggtcccttaaaacacggtgcctgtccagagagcactccctctgtaccagggatacttgagcagaaaaatgatgacactcccaggttcccagggccctgcctcaggactccagctgcctttgtaacccacaatgggagaccaccagtggtcttcaaatctcctccctggtaggtgagagacctgcttgcgttaagacatgaaatctgcaaagcagaaacagctacacacacacactcacacacatacacacacacacgcgcgcgcacgcacaggcacacccacacgatgctccagggttagcatatccaacctagatcctttccatgatgtccagatccctcactggggaaaatgaacaggcaacccaggaatgtggtcctacctgcactgaggtcaatatattcacctaac

SEQ ID NO: 30706 - DNA, 1031 bp, Homo sapiens
tgtgcttaaagcatgttagcagccttgccaaaaattaatgatatgtgtaatcttagcttgctatagggtatgttattgcatttgtaatttttttatgctagaagataatatgcttcctcttattaagcaagtcggatttgcctaaaacaatacaatcttctgagcaactccattctgcctttttgacagataaggtttcaaagcttcatagcataactgaattaggccatcttgccacagtcataaccagtcagaagtgcatcaagactgactgcttttattcagtttcttaactatttatactcagtaacaaggttgcccagtttagaggatcttcatgatatcctccagcacagtaactacaaaagatgtctccagtgcaaactcagaataatttttccttttttaagcttcactcatagacaagaagcacaatattatgaacagtagttatcattgtacaacagaaagcctagaagtaactccctgaattcccagtcataaagtagtctgtggcttatggtttcagttgcccaaactctgctgttgcctaactataggggccattgaggaaaagaagtatatagcccttccagagtatatctcatatttgggaatccaggcactcattaaccccttcacctgtgacaattagagggtaatgagtgatcaaggactaaattgactaatataatttatatccaaacagacatttctgaaataaaaggggatgctgtaattacaccagtacaccaggtgttaacctggattgtcctatgcaaacttacttataattagcctgatacacaggtgaaatgaatgagcttctgaatttacacatttctgaatatgcacccatactcactaaatccatgagttctctcctcactttactgaaacaaataattattaaatggtattttactgtccttttgtgtgccttctctcttcaaattcctttaatttttgagacggagtctcgctctgtcacccaggctggagtgcagtggcacaatctcggctcactgcaa

SEQ ID NO: 30707 - DNA, 1022 bp, Homo sapiens
cataaatctatagagggatcacaggctgtaactgaaacacaattaagccatcatgaaacattttaacgttaaagtccagaatcattttaaaactgaaaacgtaaagatgacaactataggaggacatgtgacctggaattggaagactcctaaaaaacctaaccagaaatcttcactgatgaagaatttgaagtttagatcatttaaagaacttgcttaaaatcatctagcaatgtaaaagcagagatccagctaaatattctcctaatgtctcagttgttctagttggaacttagcctctggtgcccacctatcgaactctgtgtttcttttcacacttggtgttcttgaacaagtagattttaatcactgttaccagttcttgaagatattctggcttctcatcttctcaggcaactgaaactcttcttgttaaggtctcctattaccactcttttgctaatttaatatatatttttcagttactaccttatttgaccatgctgcatgaaacaaaaatctaatttaaaaggaatgatgtgcacagcagagtctggatttctcacatcctccttaattctctgaactcactatttctttattaaagaataaagaaatattctttatgataacatgagctgtccatggtattatataaatattataactaacagatggctttaaagttaaccagcaaaattgagtaactataatcctttgataaaatatcacagttttgataacttcagtggtttctttcaagtgaacatttattgagattccttctatttattgttatttatgcaagttatttatgtaaaaaaaaatgaacaacattccaatagtagaatttgtttctcaagaataataaatagaaaagggaagtgacttcagtaagttgtatgatttcaaacttgacaaaattaaatgatccaaggttgatgtcaatctgttcctttatattgagagttcttagagaaattctcttacgacatcacttgtacttttatcatgagagacac

SEQ ID NO: 30708 - DNA, 1039 bp, Homo sapiens
gctaccctttattcttcttttcggcatactggattaaacaatataaatcttatgtttttattctgaataactagcttagtagtgattaagcaagggggaaaatgacttaatcatgaaaataacctaagcaggaagagaaaatcactccatcttcagagatttaactacccatagtccattcttaaggaaaattgaattaatgacatttccttagaaaacatttggaacttaaggagcttaaacttttataacttgaagcagaaatatgtgctttttacagaagtttcagcgttttaggtttcagtcaagcaaatggtcttggtagaaattggatgcacacatcatgaaacagtaaaaaccttccccactgcaaagaacaaaatgattctaaacaaaatactgaactgctggaatagtagaaggcatgggaaatctgatgagatttctaagaagtatgatttgcctcattgcagatcctctgaaattaaatgtgaacgtcttaatttgcatgaaaactgcctaaccaatccactgatgctcctgagcacaatattgtgtagcaaaactttatgaattccaaaaggagcttatatcagtgattttcccattatacagtagcttctcactggtaactgtagagttcagtcttacaaatactgtgaacaaatcttttgccaatgaaaccacaagtctgttttatgagggaggttaagcctgaaaccggtaacctttaaaccttgtcatgtttaaattcagctctattttgaattaaacaggaatgtttactgctgaaagtgataaacagtaaattacattatgaaatataaaagtactttataatgcaagcaaccatctcttatatatttactaatctatgccatatattgttttcatgagtgcaattcttatttttaattgacatttttattgaaatgattgtagattcacatgcaaatataagaaataatacagagatcccttgtgtactttgtcctccagttttccactcaatagtaacatcttgcaaaactgtagtgaa

SEQ ID NO: 30709 - DNA, 1075 bp, Homo sapiens
tttttacaaaagtgaacaagtaaaaagtctttgtactttcatgagtttcacttttgtaatgaaaatctatcaagcagtttttataactgctctatcacacacaagcataggaaaatatacaaaattaacatcagggttaacaaaaggcaaataagtaaagacaaaaatgataagacattagatttttggaacaataagaaaaaagcaagtagtcaaatagtgaaaaataggaagaggaatttacagaagaggaaatacaaatgacaataaatatatgaaaactgttcaaacctgctagtaatcagaaaaatgcaaactaaaacaaaactgtgttttcaatcatcaaactggcagaaattaaaaagatttataatatccagagctggcagggataaatggaaataagcactttcatacactgttggtaagaatataaattgataaacctgttttgaagaacacctggcagtatctcaaattttcaatttgcaacttttagccaacaaggactctcttctacagaaatactttcacatgagaataaagacttatgtaccagatattgatagaagcattatttatgatagagaaaaatcgaaaggaaattaaatatcttcctatcaggaatattaaattcattattatacattcatagcatggatactatgcagccattaaggacagtgcaggcttcagtgggatgactttaaaagatctcccaaacatattatttaatgaaaaaattaaaagcatattggaaattaaaaatttgagaataataccacttatataaatgtatgtatgtttattgaataaacgaatctgtgacttagaaaggctctttaagctaccaaaatatgtggtgcattgatccttttttaataaaatacttcattataaatgaagaaatggtaccttaaaaaggcagcattacatatcctgaagcatgatatgctgaagctggcatgatactcactaaactcaacagttcctactgattgggagagggatgaaggggagctaacatgttttactctacttagttctgtataatctgaatctgttaacaaaaata

SEQ ID NO: 30710 - DNA, 1089 bp, Homo sapiens
taatgatgagcatttttttcatatgcctgttggccatttgtctatattcttttgagaaatgtctattcagatcttttacccatttttttagtcagattttttgtgttttgtttttccttgctactgaattgagttccttctgtattctggttattaatcctttgttgagtggatattatgtaaatattttctgtaattctgtagattatctcttcactttgttgattgtttcctttgctgtgtagaagctttgtagcttgatatagtccaatttgtctatttttgcttttgttacatgtgcttctgaggtcttactgcccaaatcagtgtcctgaagcattttccctgtgttttctcctagtactttgatagttttgggtcttagatttaagtctttaatccatttttagttgacttttgtatatggtgggagataggggtctagtttcagtcttctacatgtgtttatccagtgttccagcatcataagactatccttttcccaatgtatgttcttggatgtctttttggaaaatgagttggatgtaaatacatggatttatttctggcttctctgttctcttctgttggtctgtgtgtgtgtgtttatgccaaaactatgctgttttggttatcatggctttgtagtatagtttgaagtcagatagtgtggtacctccaactttgtactttttgttcaggattattttggctatttggggtcttttatggtttcatataaattttaggattctttttatatttctgtgaatgttattggtattttgatagggattgcattgactctgttaatctcttcgggtggtatagatattttaactgtgataattcttttaatccatgagcatagatagaatagcttttcatgtttttgtgtcctcttcaatttcttttatcaatattttatagttttaattgtagagatctttggttggatttattcttaagtattttatattttttatagctattatatatgggattactttcttgatttcattttcagattgtttgttcttggtgtatataaatgctactgatttttatatgtggacttttgtatcctga

SEQ ID NO: 30711 - DNA, 1032 bp, Homo sapiens
agtgtatttttcctgctacttttttgtttctaaattcagaaactttttgttgttgaaggtgttttaattacgaatacgcatttctcgtaagattatgagggaaaaattaagcaactaaaacatttaagggaactaaaaaatactctttagtaaacttatagggattccggaatagcaaagaagcagacagttaaggggaaggagaaacaagttttttttttaaaaaattatttactactttaaaaaggttaaatgtaaagtctttcattagtttcacaaaatgtatcttcctcatttggaaagcaacctgttatgctttgaaaagaatgagcaagtaaaaataatagggagataaatacatttttgacaaaaattactgttttgagattttaatgatgttaaaagtggtaatcttgttcattttcttcttttaaatcattgcccagattatataagactcttttgcaaatttttaaagcattttaaggatatttatgatattttaatgagcagcctgtagttcgctttcttcaagtggcgacataggatgagcagccacttcatactacttatagaaaagaattaattactgttcttttcatgttccagtgttctttttgacctggggagaaatattgtggctaaaagttacaataaaccaaattgttaacaaaaaatgtatatctttcatataaatgaccattttcaaaatgtcaattagcatatcttctactgccaaactgagaggttgtttatgctgtttatatgaggagagggcacaggtgacttatagtgccagctctcagaatgagcagaaggttggacgggtgaggtggagacaactggaatcaaattgtagttgaaactagtgaaaggtgagatgtgcagtgtctctagaatctggctggtgacattctaaatgtagaggctcacaagatgtattaaatcctaacacatcaaacaatgccatgtgcttactcagaaatcccctttgacacctgtgggaacaaatttaaaagtattgtttgcttg

SEQ ID NO: 30712 - DNA, 1029 bp, Homo sapiens
aaccagaggtagatgccttaggctctcctcctgctcttcttaaaagtaatatatcttggattttaccacctattcatgatgaaaaaatcagtaggcaaatggcgcagaattgtgaagctcacacttgtgtgtttcatcaatctttggatatttgtgggactaaaaagatttctggtcactcagaaatggcggaactcagcttaactaatatttcccctaaattccaagaaactggcagcatgaaagtaaattcaccttttctggattctgattccagtttggaaaaaaattcttctgcatctgaggactcaagcttccttaaagtaccttctgtgctgaaattggaaaagaaatcctcatcttacagaaagaaagagaacatccattttttaaatggtggtattgatagtgtgtcatcttcctctagttaccctgaagaagttagcatgatagtaaattcacataagccccaaaataatttggattctatacaagttaccaaagatctcacacatgaaggtacctctgtaactaacctgttgtaccctactacctcttatttggaatttgaaacgtctgtctcaattgggacagaagtaaccccatttcaggaacattttgggatttatactgggaagatatccattgatttcccaactgctgcccaatttgacaatctcgtggaagcagagactggagcagttgctgggcctgcagcgtcagttaacagctcaggccaacagtgttctgaagcctctgctgagcacatagaagccaggagaagagcacatgaccaacttttggacctcaaaagtagtttactcaaaaaggccgatacattgattggtgagatttttaattctgtcagggaagaactaaaattcaaacacacagtgagtacctgccaggagcatatagccatagaaggtataatgaatctgggtaccctgaaagaagacatctctgagaaaaacccatcagaagtgacactaacagaaatacaacagacagagggtttggaagagcaag

SEQ ID NO: 30713 - DNA, 1027 bp, Homo sapiens
aacaagaaaattcttcctttactatattatacgaagagccccttcaagaggaggacaagtatgcttccgcagaagcaagacaaacacagtctgtcttgtttcatgatacgtccgctgacagcatgcctgttctggcatgtgaaaggtctgagagtagaactgaccttgtccatcactttgaaaaaggtactaaattaggtgagacatttgatagtgatagttcagaaatgttcttatcagtggaggccaaaaggtacaaaatttatcctttagcattgtctcccatttatgaggatgacagctcacaggaggacattctatctagtgaggtttcacctggtcaccatggccccaggaaatcaagagacagtgaaaaccagtcctcttctgttttatcccttctccagtcagtgtcagaacgtttaaagatgaattttgatgaagatgacagagaggcagctgatgaggaagaagaggaggaggaggcagcagtattgcataaaggagatctgagagctggaagtggggagcgtgttaccttccagttgccagatccttccatcacattttaccctgatgaccaggagagcgttggaatttctaagaattcatatgtgatgccaaatgaacctactacctccaatctgcaagttggtctgtggccagaaaagacctcgtttctccagaaatctgaccttacttctaaactacattcttctttaaagagtgcttatcatcagtatctgcagacttcccaaagtcattcctcagaaaaaggagccagatttggtggaatttttcaggaaccagtgtcaaaatatttccgtgttcaagacagcccaggcagattgagcccatttatagaggtaagttattttgtttattgtattaataatagttattaaagctttgggtcacgaaattatctaaaggcttattaagaaaagtcaatgttttggccaagcatggtggctcatgcctgtaatcctggcactttgggaggccgaggcaggtggatcacgaggtc

SEQ ID NO: 30714 - DNA, 1050 bp, Homo sapiens
cttaggcagccaatagaactgatattgattctgaaaacgtggctcaaaatgtaaaacaccttgtggaatccctacctctgattgttccagtttaaaaaagaatggaatatagtgaaattgtttttgattttctaattatttcccacttgaattaaaggtgccacgtgttttaggtatcagaaaaataaaagtaatgcctaatgattggaaaatgtatcagacttattataggacagatagcttattataggatggataatgtgtgaatgtaaataacatggtaactattatcgttatataatgtctggctctcactttgagtgtgttttactagtgtaattctgtgatggaggattttgtttttttattttggtagccctttttacttacagaaccagactaaagcagtactattatactttaactaactatctatttttatatagttggcttgcctacccagatattaattttaagggacaagctacagttctggaggaagaccatgggctctttgagatttctacagcagaaatgaaatcattacatccgcttcaaatggtaagcaaatttaaaaagaagcattccttttcccaagtacccatgaatccaaaattaaataaccatgatgtttgctcatgcatctcaatctcaagtgaatatgtgtactactgaattggcaaactattgtactgtagtgccttcagtatttacagtatttcttttttgttacaaacatttacttgagtggcagactgttcaattaaacattggctatgtgataaaccatttttggttagtccatgccccttaaaaacatagccactaggacaaactaaaacattttaagaaatatcacaacgtggagtagcacttgaaacaaaaaaaactacagaattggggtttttgtaaggaaagagttgctttttatgctgtacaactttgaggtcacaaagacagtgcatgtgagaaaaagtgttggtagaacttggaaaggttagtgtggttagctcagtgctctaatttaaaaagcccaaataattgtaggga

SEQ ID NO: 30715 - DNA, 1044 bp, Homo sapiens
tcacaaagaaggaataatctccttgtatgcaaattcatgaagttgtagaagagtgtggccagtttggataataaaccctgtagaacaataagagtgcccatgagataatgttcagaaattcacactccttctttgtaatgggcactaggccatatttttcttccacctacaatattacttaatatgaattagttataaataccaaaattattataagagaattcagtaggttatttgagatccatagccagttcaaagagtctcataaataggtcaaaccatgaaaaaaatttttcaagctgggtgcagtggcacaggggtgcaatcctagcactttgggaggccaaggtaaaacatccctaaagcctagtagttcgacaccagcctgagcaacacagtgagacctcgtctttacaaaattaagcaaaattaactgggcatggtggcacatgactgtagtcccagctacttgggaggctgagttgggaggatcgcttgagccctgaagatcaagggtgcagtgagctgagactgtgccactgtaccccagcctggataacagaggaatactctgtctcaaaaaagaaaagaaaaaaaaatttttttcaaagggtattttcaaaactttcaaaaagacagattatgtgattacaattttgaaaatgttttaatatgtttttcaggaaccacttgggataaatgaacctccgcatttggtatgtttaaaaatattcttgtaattgttaaattgtttactaaaagcatttataccctttctctcaaatctttctcttttctgcagataacttttatgtgtctctctggcagagcagattacaattgcatttggtacctatgagcagaagaattcacatctttgtcagtggttgtattagactgggtttgtcacacttccttttgttttctcctgacagagcggtagctctgaccactttagggtcattttgaacttctggcactctttctttcccatcgtccattatttcttcagtgtcacattcttcatagaatattatatttatt

SEQ ID NO: 30716 - DNA, 1050 bp, Homo sapiens
agtctgcctcagaatatggtccccagttctctttcaaaattcatttagaattctaaaatcatcaggtaatttaatatagggaaatttaatttaatcatactaagacagctctatgtaagcatctgggaaaaataataacaaattaggtggcctagaattaggaaagtgaactaaaacccagggttttcatcaggctcttctcagagatatatatctggaaaaattacatgactaataataggcctaaatatctatctcaaaacatggtgaatgggtttctattgtcttctctttaagtttttcagtagccttggtttggtaatggcttgattgcttaacagtgattacaagaagaccttttaagatgaaaaagattgaatatcatgcctaaggaagtttaagtgttttgtgggggctgaaaccaaagccttctatatttaggagtaatcatactgggtggaaaagggcaataaaatgattaaaaaaaaaaaaaaaaaggcttaggatgatgcttggggcgttggtgtagagttccatgaatgaaaaacacatctgattagtaattttgtagaagaaagtttaaaggtactccattttgctttgatcaaagaaaaatatttaaggtggctgaattctttctcccatctcagcctccgaagtagctgggactacaggtgtgcaccaccatgtctggctagtttttgtgtgtttttttggttgagatggggtttcaccgtgttgcccaggctggtctcaaactcctgggctcaagggatccacctgcctcagcctcccaaagtgctgggattacaggtacaaaccactgcaccgtccagctgaattctttatataaatatcacaaatgctgcacaataacaccattgctgaagatgcattttatatttattcaatctaaagtattgaacacctgctctttactaaatactgtgctaagtactgaatatgaattaaaaaagaattagatggcataacaaactcatcaaatctaagtgttatcttactcttggtctctcaagtgtagatgtttct

SEQ ID NO: 30717 - DNA, 1023 bp, Homo sapiens
actattactattataactctgtttttatagctattatgacaattctattcttcctcaattagttaaaaattgactttccccagaaaccctttctgattgttcttatatacctctaattttttctcagatctgtttcctcttagcacctggcttccctttggactatgttaatctacctatgttattatatttctttcatcattcttcagcgaacagcaacaaatactttgcatctatcatatgccaagtactctgctattataaagggatccatgggcatatagtagagggattcagtgtgtgtgtgtgtgtgtgtgtgtgtgtgtgtgcatgcatgtatgtacatatgctttcaagtggagttagggagagaaaatctgtaggttgaatagagctatgaatttttcagaataaactaggcttaaggagcaaaaaccgttctctccgaatgttcttgaaatctgagattttttttttttatggttcaaaacatagaaacactgtagttatctctgatcttgaaacagctttacatatgctttcttggactcctatgtcatcatccagatgcagggtagagatagaaagggaagtcctccttgaagaacagaatcctaacagattattccaatttatattggggagtgggaatgttgtgggaggggaattggggggcagggtgagaggagagggagaacattccgggcagcaggaacagtatgaccaaaggcgctgagacatgaaactgccaagaaggattgagaagtgcacaaagtttggtgttactagagtcaagcatttcaggagatgagtcaagagtcaagcatttcaggagataaggcaggacaggccgtaggagccagctggatcagacttagaggcctatggcttatatatttatatctctctataaggcacttagggaggtaggtctatataaacaatttataacaggtaaattctacatgttgcttctaaatttggacttggggcttacaatatggcatgtaatacattccttcc

SEQ ID NO: 30718 - DNA, 1024 bp, Homo sapiens
gacctcaggtgatctgcccgactcagcctcccaaagtgctgggattacaggcataagccaccatgccaggctcttttttttttttttttttttttttctgagacaaggtcttgctctgtcgcccaggctggaatatcgtggtgcaatcttggctcactgcaacctctgcttcccagctcaagcgatcctccagccttagcctctggagtagctaggaacacagatgtgagccactatgcctggctcatttttgtgtgtgtgtgtgtatttttcctggagatggggtttcaccatgttgcccaggctgttctccaactcctgagctcagagcgatccatcaaccttggcctcgcaaagtgctaggattacaggcgtgagccactgtgcctggcccaattttttttttttatttaaatgaattacttcagcatttccagttataaagcagcctcttaagaattctgcttctcaggtgaacagacaactcaagtgtctgaacccgcagggctgagctgccaactcctggctgtgtaactcctcccagataatgcccctccctgaggtcctagctgggcttccaagacccctatttcttggatagctccatcttctctaatgttttgtaaagtttttatggaaatatatcagacatacagaggagtgcacaaagcatataagtatagttcaataaatttccttacagtgaatgcacccaggcaagctgcctccagatgaagaaataggacaatacaggccctccagaagggtaccatgtgttcccacccagtcactattactactcacatgtaaccactactctgacttttgccaccatagattaattctttcctgtttctctttcacattaattagcgcctggtattctgaatgacctaggatattaggatccgtctggctgagggtgagccttgggcaccccaacgagggtgtaattggttcagttgtgcccccctcccccccccgctccaagagatatttagaagtcctaatccccagtacctca

SEQ ID NO: 30719 - DNA, 1035 bp, Homo sapiens
aacctaatttctactccaaggaatgtacaaatttgtgatgtatttgtttgatagaatagagcatttaaaaagaatgaaccagatctttaggcaccatatggatagacctaaaaattaaaaatatagagtgataaacacaaatttcagaatattatgtatttgctattcaaatgttaacactgaaaacaatatcatatactctataatgtttatgaatatgtatgtgtgggtatgtgtttttgtgtgtatatataaaaaggggactgactatgtatcaaatccatgatactgggaggagaggaatgggggtagggaagggaccataaatctagtttaaaaatatctttcagaagagatggttatttttggtaatgagctcatgggcatttattaaattaacatttggacctctattaatgtttttgtgataaatatgcataatatttcctaatgaaatagatcacaactaggagccatacatttatcaagattctgggaatgagactgaagctattgttaggcacacctaatatttcatgatgtcattctgtgcaaattgaaaattaacagaatgaattttgaacatgaggaaagcttcaagttgatctcactcttgggaagcttacaggttgggaataaggaccctggcagcaaactgcctaagagcaaaccagccttgataccttttagcttaagaccttgggcaagtcatttaacttctctaggtctcagtctccttttctgtagagtcagaatagtagtgcacatctccatctcagtgctattgtggggattatatgagtttgtgcctgtgaaacctggaatgtagtaagtgtgcaaaaaagattagctattattttcttttcttatttgtatttatttatttttttgagacagagtcttgctctttctcccacgctggagtgcagtggtgagatctcagctcactgcaacctccgcctccgggtttaagcgtttctcttgcctcagcctccctagtagctggaattacaggcgcctgccaccatgcctggc

SEQ ID NO: 30720 - DNA, 1027 bp, Homo sapiens
cccttcagcatatcccacagttgagctatgagagtcttaaatattatttttattctcagttgaatgggccttctttgggactcttcttaaccaatacataagtgaggagtaagaaaactcttaaaattagaacattatatgcatcacaaatattatagaaattctactgttaaccagctttatattgggcaagagggtttccctctttgggccttgttttctcaatagaattaattccagttctctgtctttaagtgcaacaattaatgatagtttcattaaagtaccttctaattttttaggctgatttttcttactttttttggaatcctatgcacagatttcagacatcaatgtataactttattctgaaaaaagatctagagttcagatgtctaccaggaatgaactacatgttttacccatgaatatatgcaggcactcaatgatttattaaggttcatcagagaatgattattctagcaaatttgtttggagatctttttgggaaagacacttattgactgataacattatgctttagtagtgctggccaatatggacactcataatggtcttgtgatttagtcctagggaacctcttaagctcttgcttgttcctattgagattgctcatgagggtttcaaagtccttccccagcgtggtccttagccactggacttgcagaactcttgaggacctgaatcaaggctggaggtagggctggatcctcaggttttactgccagcaacacctcaatttagtggaatctggactgtaatcatcttggtgatttgtaaagctgtttttcttgtcaatctttaccatttctggcatcaaaaagatggaagtattttgagagtctttgtgatgctcctggactctagtacgtgcttgggttcaagtcccagctctgtcacttttgatttgggtatcccgggggaagttataacttctctgtgctttggtgtctttatctgtatgatagggatgacgataaagcctttcgtaaaggttggttttgag

SEQ ID NO: 30721 - DNA, 1040 bp, Homo sapiens
cagtggatgagatgaccaggatcactactggatccacaggaacctgacccaactgttaagctgctagtcgagggctcctcagactctctttctgtgggtcagaatcagtcccagtgcctggggtggctgggcttgcagatgggcattaggaagcacctgcttccagactgaaacagaactggggatggaggagacagggaggtgaggtttgtgtgtgctcagcatccggaatagagaacgccaagggtctttcttccttggtgttgcatattgactgagatacccaccgggtttttctattaggttggttttaaatgacaaaaaccacaattacttttgcactaacctaatgcttgataagtagaacaatgtttctagaattattgctgaacatgcttttttctagctggttggaaaagcaagctccctttggtttgagaaagcattaggggagtctaaaaaaaaacctgacatttttttcaagtgtttctccgtagagtttgtttttataaacaatgctagcatggttgggaggagcagaactgggaacagggttgggagtaacaggcttttatttcagctgagtttgaatcaaaagtattataagctttacctccatttcatcaattactagaattgatattgcttaaggagcttgcaggattgcttaagttggagaaatgttcagtaatgtttagtctggtagcaaaaggaggggcctgtgctcacttgtgaaagctcacatctagggggaggtagtataacgcatggcctgtggcctgatagagacagatttgagtcctcgttctgctacttgtcagctcaacaaagtcgttgcttctcccagagttttggtttcctcctctacaaaataggaattgtaagtctaccacttcttttgcaaggtggttgtcaggatgtcatgaggtaatacaccaaaagcaattatcacatgccttggcacaggctaagcactcatacatcttaatgcttctaatcagttgttattcattgagcatttaccacgtgctaggcattta

SEQ ID NO: 30722 - DNA, 1024 bp, Homo sapiens
tgcctgaatgctgcctctgagtcaacttagttcctcaagtgaccttatgtagttctcatttctcttctcagcctgggaataaagctctagaagaaagatgtctgagaacagtctttctttctcaggcagagaatttagactgcctttggcaggagagtcctccctgagcccctggcttgtgaatttgtgagctgggcccacacgtccaaggaggaaggtattgatatttaggctggcttgtccttcatcatgggtctgtaggtcagagaggaggagctgaggtagaagggattactttcaagttactttcctcctttttctgctttctttactgatatttatataattgctggccttgctctctgctcattttttcctacctgtgctctagaaggtgctcgacgtagtttgagttataacagctaagcacattattttccttgctttttattctccttccatcctctttgtcccttctagaaagggtcagatgttgttggtgctgttgtttcaaatctgaatcctttaagattctaccagatataagttgtagttttgtcagatatctcgtccagcatgtatgatgccctcagttgggatagattccactgtgaatgggaaaactcaaaatatcagttgtgattgtaagaaggaagttctccatttgtccagttttcatgtaaatgaactctgcaggtaaacttgccagggctggttctgtgagcatcagggaccaaggctgcttctctatcttgacgccaccattcctaaatatacaacttgttccttctggtctggtatgatggctggagttccaccgatcacgcctacctccctgccagccaggaggaggaaagggcgaagggcataccccaaccctttaagacatgccttcttcttaagggcatctcccagaaatcccatataacacttccttacctccaatgatgtgctggaaccagttggtaccaacttgtgagagctgtatctctttgtattcagctccatatttagtgccatcaag

SEQ ID NO: 30723 - DNA, 1190 bp, Homo sapiens
attgaaagagttcttgaaacttcaaaatgaaatctcattgactttcactcctgtttgccttctttccctagaaaacaatactctagacccatacagtggcagagatattttttactggaagcttgagtaactgtataacatgacaccttggttgaaatgagtttttcacccctttttaaagtagggaaaaatccaaagaaataaatatacatcatgtattttcatgatgtatatttagcatgataagaattgtgattaagaaattcaaaagtgttatatgctgaaaacaaatgttagtgttgcacactgaaataaaggaatattaaaaatcaaaaaggaagtcaccagtctattctcttccctctacaacccatgtaacctctcaagcttttctaccttttatgtgcttccagactatttgctatgcattcataaacacataatctttttgtttgttcagtataattatgattataccataggtattgttgttattttcttttttctctttatttaactcttcccctatttatagacactcagatatatccaacattttcttctctttaaataatatagcagtacatgtgtttataggggttttctgcccatttgtcggatttctgtaggatggacttctggaagtggaatgctcaagtcaaaaagcatacatgttttaaatttaaacctgacttcctagtaattttgagggtaaaggacagcttctgaatgtgtgttttgtgagttttcacttcctatattcctaagtgaagtatgatcaggtatatctcttgcttcttcattttaggtaatatctttaattccaaaagcacaggaagaccctgagcatacttagtgatgacattagaactagctgtagctacatcaaagtcccagtaggacatggtgtcccagaaatcaaatgctgtatttcaagagaagtcagccatgtcagatgctgtccagaggttgaatgtaaataataaaccctggttttagaaacgtggaggtcatattggtgatatatattaacaagaaagaaggaaaaagcctgcttgaattgggttgaagagaacctgggacatgagcaagcagcaacaaatctttagtggactttttgctagaacaaggatcgtagaaatgaagcaatagttggaagatgatataggatcgaagaagcgtgttttatt

SEQ ID NO: 30724 - DNA, 1845 bp, Homo sapiens
atagaacagtaatttttaacacatcttaaactgaaccaggcattataatagtttatctccaggctgattttgtttgtttttaaactgatttctaggggcttcttccattaaagtgaacaactcaaaattttggtctccagatttgtattgtaccatgattcggtctaccagggtttgatatgaaggagtcttacttatgtgagagttgaaatggaaagagtgggctgtagggaaagcttttgcacaagaaccagcaaggaaagtaatttaaaaggctatcaaaagttaaaagtacatgcaactcgttacttaacattcgagttctttattcggatttttttagatataaagtactccattggtgctgctaatactttgagattgggaaagaatgatggtaattgtatttttcttctttagaacgcgtatcacaatgtgactgcagagcagctctttttgaaggacattatagaaaaaaacctcgtaatcaacttgactcaagattgactctacagactcagaagatgatgctaacagtgttagttttatttttgtactgcaatttttagtttaaaatatgttggatgcactcgtcaaataattatgtatactgtctgttgctgcctggtgattcataaccaccagcttaatttctgtgaatactgtatatttaacttatgaaaaccaagaaatgtaaagataacaggaaaataagttttgattgcattgtttttaaaataagctagttttctgaggtgttttcacacgtctttttatagttacttcatcttagatttttgaagggatatgacttcctactaaggatttagtttaccacaacaattctgactacaataagacattttgaggaggatatttggctactgtaaacatggctggtggaaaatcacgattgtggcttgatgtggcaagccgaaaccacttggctctggaaatctaagttcatactggtttaattaagctctctcctgacaacccccagaattaaatgaaccatgattgtgaagagtaatttggtacaatgaaggcagtgtttgtttttaagttaaaggaaatgggctaaacataaagttcttattagataagtaaataactaaagaaagaatacaattactaaactctgatggctttgtattattttaaagaaatgaagtttaactttatacagtgaagctaagctaggcaagctcaagaaggaaaaaaaaatcttgaacattatttttttttgcctgacttacttattcattaaattttgaaggttttccacttgaagtaaattaggaaaggtaaagaagataacagaacaagtaaacacttaagaaaagtcaagctgaggccgggcagggtggctcacacctgtaatcctaacaaacactttgggaggccgagggaggcagctggattgcctgaactcaggagttcaagaccagcctggccaacatggtgaaacctcatctctactaaaatacaaaataattagctgggcgtggtggtatgcgctgtagtcccaggtactcgggaggctgaggcacgagaattgcttgagcccgggaggcagaggttgcagtgagccaagatcgcgccactgcacttcagcctgggtgacagagtgaggctgtcttctaaaaaatataaaaagtgaagttgggatttttggatttaaatggtacaaaaagaatatctcattttcccatgattaaagctaatcttcagatggaaagcttgcctggctacctagggtgcaccagagaatctgatccaatgcaagccagtcaatcctacaaatgtggtgagctagtcttccttcctatattttaataaatg

SEQ ID NO: 30725 - DNA, 1123 bp, Homo sapiens
catggtgaattccttctggaaatggagtaggggagcaccttggatcttttctttaaacccaagtacccaggtttttttgttctgtgttttttctattttcacaccaaagttaaacctttacagtattagttttacatatagacagtcttgcattgtagatgttgtaaggcattgtctctacatataaaattcagacttggaatatttgtaggagatgttaataacacacaacagaggatcgacttctgggcatgttgttttcataatcattcgtcaagctctcatgcttagccttgttttagacactgtaccagaattagagggaaaaaacataatcagcttacattacaggatttacacattgatgtggttcagtcaaaatgcaaatagtattgacagatattcaggggcaaaacacaggggcaggatgaatttaaaaagcaaggggaaggaaagaagaaagaggagggagaaaaatgactatgttattagtcattgctctacacttgaaggctgtaacagatggacacttagataaccttcatggtctggtttaatttactgcatataatttccacagttctttcagatgattaaatgagtggttcttgacaacaattacgaacatttaaaggtggaaatttatgcatatttccctaaattgcatgtcaggtagttcctgctataattttgctaaatgtccatgaatctcttgaaaaatacaactcataaatgtggaaggcctatacataacttccatttcctccctcagattcaataataatatatcattttgtggcacaaatctttttttctttttttctttttctttttttttttttttttttgagacagagttttgctcttgtcccccaggctggagtgcagtggcgcaatcttggcacactgcaacctccgcctcctgagttgaagcgattctcctgcctcagcctcctaagtagctgggactacaggtgcatgccaccatgcctggctaattttttgtatttttagtagaggggggtttcaccacgttaggcaggatggtcttgatctcctgtcctcatgatccgcctgcctccgcctcccaaagtgctaggatttacaggtgtgagccacggag

SEQ ID NO: 30726 - DNA, 1103 bp, Homo sapiens
aatgaaaatctaggattggaatttgagtctcctaaccccaagcttttgttgaatcaactgattttcgatagtgtttattcagagaagagatatgaataaacaatgtcctgtgagatgataaattctgtattttttcaagcacctggaatattgattcatgtctccctaaaatatctcaatgttactgagactaagtgccagtggtcaggtatgcttactacaccagtgattgtcaggtattctgcacaaaggatatattcggctgttattcacttttgttatgcttttcctcctttaagaattatcactttgctttttccctcctggtcataaagaaatcatagttttagaccttaaagtgtgattttaattgtcctgtcatcttgatggaaataatctgattttcttgactcagattaggaatttttgctatcaccttttcttagcaaaatatgattaatcagcaaagttctgtagaatgaagaattacttctgttttcaccagaaaactcttgaactgttctagtgaattcagtcctatcccaggctgattctagatagttcatctttgggttagattatatgtcggatgaggaaatgggtagatttgggtgtgggtctaggcctgcgagtgtttgtgtgtgcatatacacatatagaagtaaaataattgtagacgtgctgctttttgggggatgatcttcatcaggtccacaaagctgcttcaccatttcctggagagatggtcctttggcctttcatagtggtaattttagctttccacatatttctgtagatgaatgtatccaggcagtgcattggtatgagttaccttctccctcccacgtggaggaaggtgttggaggtgacagttctcacgatgtgtagcttcccacagccattttggtaaataggcttatccataggcactgtgggggctttagtggaaatcttggtgatgcctgtagatttcggtttagggatccgtgctgggattctctgcttgcatacctccttgatcttgaattaaacaagagaacaaaaggtaattaatggtacagttggtggagaagtagaaattgtttaggacatggagtcagttt

SEQ ID NO: 30727 - DNA, 1050 bp, Homo sapiens
cggggtttcactgtgttagccaggatgatctcgatctcctgacctcatgatccgcccgccttggcctcccaaagtgctgggattacaggtgtgagccactgcgcccagccattcccaaatctttaaaaaaaaaaaaaaaaaggcctagcgcagtggctcatacctgtaatcccagcactttgcgaggctgaggcgggcggatcacttgaggtcaggagttcgagaccagcctggccaacacggtgaaaccctgtctctactgaaaatacaaaacagccgggcgtcgtggcgcactcctgtaatcccagctacttggaggctaaggcaggagaatcgcttgaacccacgaggcggaggttgcagtgagccgagatcatagcattgcactccagcctgggccacagagcaagactctgtctcaaaaaaaaaaaaaaaaaagttgttttttttttttttcttgtatgacttatccttggacatgtttcagtaaatgaggtatggagcattaaaatgtgtcatctcttggatcatttttatagagcgttatgtcaaatagctccaagaaagttttgtccaaatttggaatgcatattgcaagagaaatacatgcatatggctcttttaagaccacacagtgaatgttctactcagagttggaggctcctgggtttcatcaaagagcagatgtcttggaggagattaagcaagttggaaagctcattcatagaagaaaacgattttttaataaatgcttaacccagttcaacatgaagactgggatttggaatgccttaaaagtctgaaggatgttgagttcaatgaggcagaagaagtggttccacctagggagcagtagaaagaagaggagtaaatttgtggaatatattaaattctaaaagtgttggtttgttttatccatagattctcaaaagaaacctagcaatctagaagactccctggttacagtgagttattagaaggcattgagtcataatgagcaaaagaagtatggaaaggtgaagtgttttcagttgtattcaaagtctcagt

SEQ ID NO: 30728 - DNA, 1055 bp, Homo sapiens
ttcttgcttttgagatgatagcataggaggggtaacaaataattatgaggtagaatgacgtgcaataatagaattacagacagcagttttggaaactcagtggaaaactaaaaagtaaggaaggttttccagaggaagtgacacatgagggatgagtaggattttagtatgaggaacaaaggaagaagagtatttcagccctacaaacagcatgatcaaaggtaagaaggcccagtagtatgtgggaggatagttagtatggtgtcctggtgaagatgtgagggtatgtccagagtttcaaagggagatgaaacgaaagatgaaggccatggtagaaggtttggactttgggcactaagcaattttaagtgctgttttctgggaggctggagaattgctgtgatcagaatggtatttaaggctggattatagaggtgaggatttaagtgtagtagattaactatcttacagtaccatctgtcctaaattctgggcttggggagtagtagtacaaataagtggggaggacagagaaagaaataatatgacagagtggaggatgagcagagaagtggagaatagttcccagatgttgaacctgagcagtggggaaggtgatggaccatcaatagaggcgagacaaagagcagttcaagaaagatagtatattgggttatgggcgcatgctaagtttgaagtgtatagttgggccttccatgtggaactgtttggtagagttgaaattttggagatgttgctttgaggatcgtggtagagaaattgttgatactactcaagtgcctgagacagccagagagaaaaatgtaattcccactcaactgccgctcttttcttctcccaccataggtacttctacatccctttcccagagcctgagatgaattttgtgggaccctaccatgtgcccacatcctctgcacaaggccactctatcttaatgataagaatataactagttctgagaacagccacctaaggaggcatttattcccattacttgaacagtacatagtgattgaaccactatccaggga

SEQ ID NO: 30729 - DNA, 1048 bp, Homo sapiens
gacactgcgcatgtcactgagacacaagtttggttgcataaggatcgtttccactcacttgattgacagattggcccagagtatatgtacatttgaacaattatatttgtgttaatacattgtacctttgtttctttcaaatatatcaaattataaactagagttttcagataaactggagctttccatttctactatgcctgtggcagaaaaataatgtagataaccaaccacctttgccttttgccggaacagcagataactccctctattgtttagacctttctaaaaggtcctctctcggaagtctcaattccctctgtattagcttgtaaccaccacaggcatgaatattcattagtaacctcacctccacctatccaaaagcctcaggaatggctgaggacgaggtaggctttgtaggtctgtagggcttatatttgtatattgtagttgtccaaatatggctagcctttaaagagctgaacaaaacaggcgcaatcccatcataaaaatgggctaaggacatgaatagacaattctcaaaagaagatatacaaatggcaaacacacatataaaaaaatgctcaacatcactaattatcagggaaatgcaaatcaaaaccacagtgcaataccaccttactcctgcaagaatggccataatcaaaaaaattaaaaaataatagatgttggtgtggatgtggtgaaaggggaacacttttacactgttggtgagaatgtaaactagtacgagcatggaaaacagtgtggagattccttaaagaactaaaagtagatctatcatttgatccagcagtcccactcctgggtatctgcccagaggaaaagaagtcattatatgaaaaagatacttgcatataagtgtgtttatggcagcacaattcgcaattgcaaaaatatggaaccagctcaaatgtccatcagtcaatgagcggataaagaaaatgtggtatatatacaccatggaatactactcggccatgaaaaggaatgaaataatggcattcgtagcaacctggatgga

SEQ ID NO: 30730 - DNA, 1178 bp, Homo sapiens
gaggcaaatctcactcttttaagagcagaaaaaggagcaaagtaactgagaaaaagggtctctgaaaggtgaggttccagaacaagtaaaaggccagtctgagggtccacaggcacagaacttgggtagttaggcagctacaaggagaatattttcatcttgagaacaaaggaggtgcccatgattctgggctagaaaagacactgtccatgctgctatgaaagggccaggtggagacttgaaaagatgctcaggctagacctggaagaagaaactggaactgacaggggagtgacaacaagtacagcacatgtaaatttgtaccaggataattactgcctaaataatgtgttttgacttctgcagtactgtattgttagggagctttctagtaagaacctttggacaatggatgttcatttaataccgtgaatattgtgcctctcctatcactcttttaatttttcttattaaaaatacctactcaaatgaagttttctttatgccgtttactcagatgacatctatcaagaaggagcttttaaaaagttaattactgtgaatacactgctgtgctagagagtctactcatttttctcacttttctttttgttttcctcccccaccccctgctcccaccaccactctgaattggggttcttgattatttagaaaagatcccttaaatcaaagtttcctcttttccatactttccattttgattgttaatacacccccgccctcccaaaaaaaattacctgtcttccaacagattaagactttaggtctttgtcagactaacagtttcaggtagatgtccccttaatcctccaaagcctacctgggccttccacagccatgatgccttcccctggctgccctgtccctctagggagaagtatccaaaaagccactcagcatgtgatgccttgtattatcacagatgtgtgtgtattcctgaaagtgcctcctagttcatggcatacagagctgcctttacacctagcattgtgatggtgctcctcctgggcttgtcctcaggttcctaatgctttcattgtttatcattgtctccattccttcctcccactctctgcagttgattttgtactctctgtgatctgcgttcttctgtatcttgtctgtttgcccaaggtagccttctttaagacagggat

SEQ ID NO: 30731 - DNA, 1926 bp, Homo sapiens
atgacaccatgttgaataaatgcgttgctttgacataaaagtcttttaaatatttgaaaagtttgtcttgagtcttcagttattcctatattatatcattttagtcttttcacaccctgtgtccaaaaggttggtgcttagaatgaacagattatttcatcatgattatttcagcattatcagagttatcctccccttttataggctatgtgaatgtgtgtgttggctggggggtgttgtataaacagattttcttaccattttagacaaccatatcacactgttgagtcaaagagcttactgatcatcagtcttctaatgaacaactgcacacccaaatgttgtcatcatgtactgcttctgtgataatctaggataatcacttctatactggttttgtttgtatgacttcattgttataataataacaaaaacaataataggtgacacatttaatgtttaattgatgtcagacactacacgctttacaaatagtaacaactttaatccacataataaccctatgggatagataactgaggaacagagaggttaggtaatttgtctaagatcacagagctagggaatgatggcaccagagtttgaactgcatactgactccagcaacttctggggaaaatcacactcagtgttttgtagtaagatttggatttagggggtaaacagtactaacagagagttacagaactttgtacttctctcatctgctatttagttcattggacttgaactatgggctaggagagtgagaatggatcttggagattatctagttagcagcccttatagttcatggaactaagacccaggctgtgcagtagcctgttcagggatatgcatatgggaaaagctcaagccagaatggagtgcttttttactgaagaattctaaaatgtttctgcttcatataatatcctctctctgtcctttttccccttctttctccttgtcttctctccctttttatttatggtgctatcagtgttagaacaacaataatagaaagtacatggaaaagatcacttaaaatcctaccacaccatgttttaaactattttcatgtattgctgatttctgaatctgttatcttgttagattatgacattgatttaagtttcatagctcaaatatggaacctctataaagaagttccagggagtggaaagggaagggaaaggaattgctgttatttattaagagcctactgtctgtcagtcactctgcctacctgctgtctctgatgtctcaaacttccttcccactttatgggattctgtaggaggaccagcacaataccctgcacaaagtgagcattctgcaaacctaaagaacgaggaaatgaatgaaaggaagtgctttgaattcagcagaagaaagagataacaatcatgtgcgaactactcccagctattgcctattgactgttagctttcagttcatttttgtacaatttaaccattgaggcaaatgtgtatacaggataccatggaatgctgtttacaggtatagattttggttcttgtacttttgaagcagctgaatactgataaggcctgtgtccagaaactatttttttccttcatttaatcaggtttctttacttccttgaccacaaatattatttgctaaggaaatttcttctttggggtggtatttaaccatgcaagtggggaaaattgtgctacgatactgttctgacagcctgtggacttgagggaaaaaactgcaggagcagagtttcctttcagcagtcaactataggctcagtcacttcttgacaaaacataagttaaaatagtgctgatttctttttgaacataatcaattctaatggaaactgttccagctgagtttggaaacacacagaagcagccttcagttaccattgaggctattattgcccta

SEQ ID NO: 30732 - DNA, 1851 bp, Homo sapiens
actacaggtgtgcaccaccacacctggctaattttttttttccataaagatggggttttgccatgttgcccaggctcatcttgaactcctgggaaggttcaagcaatccatccaccttggcctcccaaagtactgggattacaggcatgagccactgtgcctggcctcctgttgtatattaatacttctcttaggtactatcttcggacaattggtgatgtggagcagcatctattgaaaaattttaaatgtctgctctgagaataaaaataaaatgggtctatgaagttgtaattaaataggagactttattttgaacttattaaatattagaatagctgtcagagggccaggcattatgttgtgcacctgttgctacttgggaggctgaggtgggaggatcacttgaacctggaaggttgaggctacagtgagccatgatcatgccactgcacttcagcctgggcaacagagtgagactccatagcttaaaaaaaaaaagtgactgctagagaatggtttttgagccatttacttgataagtaattatgatttaccaaaggttcttcccagagaaaagttggtggctgggtaaagatctcccaggctacaacaaacaaaacaaaacaaaacaaaagcacccctgaatattaatgagttggttcgttggttggttttgtagaggtgcctgtttgatccatcactgaaaatagagagaggctctttatgttttaggtacaccctcctaactgcttaacctatcaacaattttatatactggctgtggaaggtaaagtagagaaaagaatcttcttagactgctttttgtagagatatgaacactttatcttcatttttctctcttccagcaaaagaaattctataaccatctttgttgattcattttgatgtttcataaatttccttgcaaaaaaataactctgctaagaactttagcttgtctcttttctctccatgatcttattgggctttcatctctttacttagttgtttagaattgtgcttcttaatttttataaacatatttttaggtagaggaagagcatcttttttgtcattgattacattatattcagagaatttgatcagtatgttatctatcctttgacattaaggtttgtttcatggcctcactacatggttactttttgttcaggttctctatctgcttgaagataatttatgtttcatgaaacttaacagttttctgtatataaataaagcttgttaattgtgttgttaagatcttctgtaaccttactgatttttatctgcttggtttattaataactaacaaggatgtgctgtactctcccactgtgatgatggattagtttgtccttgtgtttctggcaattcttgctttacatatttttagatgcacacaaattcaaactgttcctaggaaatggaatctcttcatattatataataaccctttatagatgtttttaactttaagttcattttgtttgatattaacatagctatataatctttcttttaattagtagttactaatgtcttttctgaccttttactttcagctttaccatacccttatgttctggtgagtctcatataaataacgtatagctaggaattataattgttaaaattgctttaatccagttttacaatttttatcttttagcaggatcattttgtctatgtttatagtaattatttgctgtcttatttgataattccatttgtaccacctttttgttgcttttatctcatttcttggcttcttctgaattttatttttatctatttcctctctctctctaccttgtaatacatactgtattcctattctattaggga

SEQ ID NO: 30733 - DNA, 1087 bp, Homo sapiens
tttattccagacttctctctgggaccactttccttcaatctaaatgcatccttttgaagttcctttagtggaagtctgctctttgcacactgtatttatttgaatctgtctttatttcaccatcgttcttgaggatttttactgggtatagaatgcttggttgagacttgttttctgtcagtacattgaagatattattccaccaacttctggtttcccattttactgttgaaaaatcatctatctaattgtcattccttttttccctggctgtttttatgatcttccctttgtctttgatattatactatttcatttgtatgtacttaaatgcagatttcttttattttgtccttaccaggtttcattgagcttcctgagtctgtagattagtgtctttcttcagttctagaaaattcttagtttatattaacatttcaaatatggcttctgaacagttttttctctccttaatctcttataacctagattagacacatgttagactttctttatcttcacatcccttaactactcttcagttattccatctgtttggctttccagactatattctgtgcaatttctttgaatttttcttccagtttactaattctcattccttgatctacagttgttacctatttcatttcccaaagtttctatttgtttttctagtttgaccattttctatagtcttttactttttaaactagaaataccaatccgctgtttttttttttctgacatattaagtatgtcttacatgctgtctgattatttaaatatctgaggtctttgcagctctgattctgccatttaatgtcactggctttcaataattgtatattattttctgtatgctttcagatttttttatatgaagtcacgtatctcagaattttatatgtaggaattccttgagccctgagttgaaggtagtttcctctagagaggatttccatttgtgccaaatgccaaaggggtattttcagcctaaaatctttttaaactgaattttttgacctaggatctttgggatttttttcttttgttttgtttttgtttttttttcagaccacccagt

SEQ ID NO: 30734 - DNA, 1047 bp, Homo sapiens
ataactagaatatttatgcccattttatagatggaagcatcaacacataactagtgttattttttttaatgttgcccaagaaacttgggcccaaactcaaacaatggccaaaggcagttatattctctaagtaaggttagctgagcaacccttttcaaggatgaagagatggagactggcctgtcttcttggcagagctcaggttacagttgaaataaatagacgctcctgtttctttctcttttccagttggttatatctcattgccgtttgttcattcacatgttgctgtaattagccaattttaggctaggcaaagggattaggtagcgcattacacacccacatctccctttctgggatttaggatgaaatgagatttatttttccatttgcttcagccaaatggaaatgtatttcttcaatcctatttggctgtaaagtaagtttttatcaggaagttgtacaataatggataatgtgaaatccatttctcttgggtgttttgctcgtaatagttttctggttgttgtttttgttattatatattatataatatatattatatgttattataacaaaataataagtattattattgttaagttgtttccaaatttgactctagacacacttaacacaaggcctgtatacactctaggttctctaacaacttgccagtggtgggttgagatttttctgcatgacgaatgtctcatggtctcaggataaaggggaaatccaaggttgtggcatacagggtctgtatgccctggctctaaaatactcatcctcacccgaggcttaactccataaatttatctttttaatgtacctgtgagtgcatttctctgcctgctaagtctactcagccttgaagctaattgctgcctgctgggaaaccttcacattcgctccctgcagagctaatccatctttctaatcagatccttgagcactcttgtacatgcctctgttacagctcacaattaattaactcattctacttatgtttccacctgggcctcaaagacaggatccatgtct

SEQ ID NO: 30735 - DNA, 1043 bp, Homo sapiens
aaagaagaaggaaggcaccaagcttgggtatcaggcatagacagagaaacaggagagtaaactatgtcccaggagccaagagagaattatttcaaggggcaaagagctgctgtgacctcattttaacaacattaccactgcttagaacaactttggacctccacttttggagtcatctgctttgaaatatccctcagctggggcaaagcctgtttctttaaaggcgaacttaatttctgataacaagaacaggttccttaaaaacaaatctagtgaatctagtggtcagctcatgcctattttggtcaaaagaaccaattatgacattaaaataatgggactggcttttgtgtgtggccttcaaaggaggtttgaagacatttccaaaatgtgtcagccctgacactttttcagaataagcttcataagataaaaccttcaataacattacacatttggattaataactccgggcttttatttttcatattccatctactttggttaaatgttaaatcttgccgggtatggtggctcatgactgtaatcccaaaactttgagaggccaaggcaggtggatcatctgaggtcaggagtttgagaccagcctgaccaatatggtgaaaccccatctctactaaaattacaaaaattagccgggcgtggtggcatgcgcctgtagtcccagctactcgggaggctgaggcaggagaatcgcttgaacccgggaggtggaggttgcagtgatccgagatcacgccactgcactccagcctgggcaacagaatgagactccgtctcaaaaaaaaaaaaattacatctttggtgtcttggagcttcagtctattttctataatccaaatataagcaaagcagtaataaacagcatggtagacagcaggggaaagagcataggctctggagtcggcctggccgagttataatcttacttccctcgcaacttctgctgtccaaattgggtcaaactacttcatttcttcagggctcagtgttttatagggttattgggaggattagagatg

SEQ ID NO: 30736 - DNA, 1032 bp, Homo sapiens
gggcatagactcgttctgtggtgcagatttaccctatagacttatatgctcagtaggaagtacattgagtttttataagcagtgataattctatcttccaaatccattacgcttcagttagatttaatttttatttatcaatatttatcttgattaatgatcttacctctagctaggttacaggttccatgagaatagggacagtgtctgtgtctagtttctccctagcccagtacaaggcatatggtactcagagacttagggatttctaagtctcttgagtaccatatgccttgtactgggctaggtgatgtttaggatgggtccttaaacaggatcaaggccaaaccacttacattatagtgaggcagtcaaggtcctgacaggtaagtgatctgctcagggctcagagctaggtagtgagaaagcctgtgccaaaacccaaatctcattcctcactctgttctttgcaccatatcactctgacattgaatcaggttcttgtagtgatcttctctgtgtgtctagggccaaaaggaaatgtgtttcctaagctagagcttcccaacctgtttctcaatatggctcacagagaagctgggaatatttgtctagaacagtatggtaaacaaaggaggctttggagggcagccgaagaaagaggtcccctaggagactaatgcccagaaacctccaggctacccaagggggatcataccttcacacacctctcatctactatgctccctgtaactgtggaaaaactctttcctaagttaatattagatcacttgaacatcagtcccatagtgcacagatacaatagtttcccaggctttaagactctgtataaaaattgttcttcaaaccaaaaagaaacatgatccttttcattgtatttcttgaagtacctgatatacttagatactgctgtatctgtaaataaattatgataccttataaagttttaaaggaaatttacaagtgttattttctagtaattaccttgaaagattacattggtccaggaaa

SEQ ID NO: 30737 - DNA, 1059 bp, Homo sapiens
tctccccatatgtaagcccctagtaaaccccatgtctcatttgctgcctctgggtcttttcttcagcctcttgaacctagtgccttccctgctgaggttaataggggtacagcacaacagtgttgtaacacagaaagtgatatttacagggatatctctctcacaatatctcttaggaaaggtaaataaaatgttcacaacttgtaggtgagtaattccttagataagttgtttcttaacttgggaggagtttgggaaggaacctaagcaggctgcagaggctgggcatgggagcttgtcatggctggaagttgaaatggtcaactccaggcagatctcctggggcaaagcagcctccaccaccagtagcccttcctttctgtttctttcatagccccactgctccatctgaagcctgaacccttccagaaaattgatggatagattttttttttcggctatatatagttttagaggttagaactagatataattcagtctagaagatttctccttccccagaaatgattgtttttgtgcagagccccgtcaaaatagtacggagacttagactgagttcactcatcactaacaattaactttataaacattcaacaagtaggacaactattattactgttactcagaacccttcgctctgtatatacagtttgatttaagatgccacatttacatggcattttcaaccttcaaactctagcagattttaaaactaggtggatgaaaatagaatcattctaataaatgtagtgtgtcagatttgaaaaatcatttggtgagcaggatctctgtaaagttatatgggccacgtatacaagacgtaactgaagaaaattaattcaacagagcatgccgtacttgaacgacttagagatttactcgaactgaactaactcaagctggcagaactccgagcagcctggattgtaaagtctgggtgaaaatagatggagtatgcctgactgaacctctgtactgccccacatgctatacaggtgggggattggatggctgttaggtgatcattgcattctcttt

SEQ ID NO: 30738 - DNA, 1035 bp, Homo sapiens
atttacaaatagataagtgcaacggtatgtgggagtgtcagaaaagcatcacagtacttcagcacatctacttgggcaatctcaaacatgtattactcatgtaccaagcagtatgctgttcacagagagatacaatctctgccttagggatccttggggaaaacatgtacaaagagatagttttagcacattctagtaaaggcagtgatcaagggcacctagccttacgtggcaatttagggaaggtaccttggaggatgagacttctcctaaagtcttaagaattgaaaagaacatgggaagggaattccaggctgggagagtagtatgttcatacgccctcagtgtttaaccttctttgaacaaaaaaatggcaaactacagaaagtttggtcttattgtagcctaaattgtacttaggggtacgagtgagaaacagggattaagataaaggacctgttttgctgtcttgtttactgttgaatagtagtatgaagtaggtcctgaaaaactatgtttttgggggaaaaaaaaaaaaaagactgaatgatatgttgggtttaagtccttgcaggcaggctatccaggtaaataaacatggaaggtgatgggaggtaatctgggctggaaatacagatttggaagtcaccccatatcagtggtgtttaaaatcaagagcaaatgaaattgcacaaggagaatatatagaatgaacaaattaccatgggtgaagccttgagtaatacagacatttaagaagcaaacaaaagacaaggaacccatgagggagactggaaaggaaaaaacagagaaataagaaaaaatgagaggagagaattgatacattttcctcaggtgtggcattatggagttcactggtgtctcatcagagaagtttcagtccagtggccagggcagaatgacattgtgtcttgttttaaagtaaatgggtagggtaagaaagttgagaagggttagcacaaacctctctttcaagtcacttgccttagaagagaaggaagggtatggtttctg

SEQ ID NO: 30739 - DNA, 1057 bp, Homo sapiens
cgcccagctaatttttttatttttttatagaataagagtctctcactctgttgcccaggctggtctttcacccctgggctcaagcattctgcctacctcagcgtcccaaagtgctgggattacaggcatgagccactatgcctggcccattcagctaacttttttaaagtatttttgaatcactgaagtgcttaatcatggaagtaaccagaccaccattcatttgcatgattctgttaatgccatatatagtatttcatagaatgatccttcctcatttttcaaaaatgtgcttataaaatttgtgatgacaattgaacagcccaaccctatgaaatggtaatttatgcagcaataaaaaataaataaattcatataatgtaggcttgcagctgaagacagctgtgttaaacatgttttttagtctgttacatcaaagtaatacatacagtgctgtacgaaaatgtgtagggcgaatgtctttgaggtgcccacatataagctgtgcttttgtacccactgtgtgaatatgagggaagtcattgttctgtacccatcaggaataacacatgcaatgatgaaaatattaaaaatgcctttctttcagatggtgcagtctttttacagctattatctcacttgccttaagtgccatttgaaaaaaaatttctcagggatattgttatctaacttctttgaattactgaagtagccaagaaatctctctagcactgatataaagaaatggaagtaccagccgggcacagtgactcatgcctgtaatcctaacactttgggaggccaaggcaggcggatcacctgaggtcaggagttcaagaccagcctggccaacatggtgaaaccctgtctctacttaaaaaataaataaataaatatatatatatatatatatatatatatatgtatgtatgtatgtatatatatgtatgtatatatatatatgtgtgtatatatatatatatatatatatatatatatatatatatatatatgtatatatatacacacacaaaaagaaaaaaattagccaggtgtg

SEQ ID NO: 30740 - DNA, 1056 bp, Homo sapiens
aaccatttattactgatagataatgacagagcagaaacaggaggcaccagttagtctgcattagctcatgagcctggataacttttttgtgaactctaaagatttgtgaaattctatcatttgcattaactttctgataaatttctgatgtggtcagtggtcctctagcccctggtcactgaaactcattctgcacactgccaagaggtatctacccttagaagatctttgcccaaaatttcccccttcaagtgctttttagaaagaatgagcacctttgccaaatctaccaagcctcctctctggccaattactttggctactgtgggggagggaatcctagcatgtaggaagatgtgtagtaagaatagaaagatctatgttttactcagaattctgcctggttgagaaggtaagataagtatatgataaaatcaaggatcatattcagctaatgtttattgagtacattctttgttgccaaacatcagccccaaagcacagtatatagatattaacaaacacaggattaggttaataaggaacttggacaactggaattcccaggttaaataaactgaggatattgctcttagaagaaaagatttagtggaaatgagataactcgtgttaaaaataaatacttaaaggggttgccgtgaggaaggtataaggggcagggtaccaggtatatatggttagaagttgcatattctgcttatccttttttaatttaaaacacagactactagaaataaagttcaaaagttaattggagtaaagagaagattgaacaaaaaatcatcctagggggtcaaaggttgttttaaaaggttgagaaaactgcaattggttctctaaaattagtctcaagaaagtgatctagggcccatcatggtggctcacgcctgtaattccaacactttggtaggctgaggtgggcagattgcatgagcccaggagttcaagaccagcccgaacaacatggcgaaacctcatctctacaacaaatagaaaaattagctgggcatggtggtgcacgcctgtggtactggg

SEQ ID NO: 30741 - DNA, 1091 bp, Homo sapiens
atttagaggtctctttatcactctcctagacagtttctgagtgctgagcattggggctattgggtcagcttttgtttgtttgtttgtttttgagacgcagtttcactcttgttgcccaggctggagtgcaatggtgcgatctcggctcactgcaacctccgcctcctgggttcaagtgattctcctgcctcagcctcccgagtaggtgggattacaggcatgcgcaccacacacagctaattttgtatctttagtagaggcagggtatctccatgttggtcaggctggtctcaaattcctgacctcaggtgatccacccacctcggaaagtgctgggattacaggtgtgagctactacacccagctgggtcagctgtttataacttttctgatttcttggctgtgaagactggcagacttctgtgagggtgccttgctgaaacttcctccctgatgtgaatgctcctaatcttctgtgaccttgaaactaaaatactttgccatatgaatatgcatataaaataggagtacactaggaagctctttcacatgtaaagtccatgcaattcataaactggctgctcttgaatcctttttatcctttcacttatttcttgaatctgaattgtaacattttagatatgtgcaaagttgctataaacttataaagcagacatttcctttatctcttttcttaatagtgcttctaggaacagatgcagatttcatgacatcttagtctatgttatctaatggcaaagtgagaattagttgtgtccaaaatatcaatcagaatatttccatctaattatagttcacagcttccttatgaatcattttatatttacataagatttgctttaattttgttgaacagtaatggagatctttaaatgggtttttgttagtttttcaaattcaccagtttctcacatgtgtgtataattcttcataaagacttctatagcacctcattttgatatttttccttgtcaaaatgatatttcctgaaaatgtttgtcatcaaaaatcagaatttataaaatatctgatcaagtatatgtctgtatctgattatcaattaagctgaa

SEQ ID NO: 30742 - DNA, 1071 bp, Homo sapiens
ttgatgcttactttacccatagtttttgtgttactaattaacacgcatttttctttgaattcttcctgataataaaacagactctttgttattgtagggagttaatcgaggccgtaagatttcccaattctgtcaatgaccatacttagctaaaagagagaaaggctgagtggaagaattttcctatgcctatagtagggctcgtccttcttgccactacacagccccatactgtttgtggctatttttgttggtctaaagggcacaggcctctgaaacaaaactgcttttgggtttgagccagatgattaggtttgtatttatttgatcacattcacaaaccgtatttgctaactttcctaataccaacttgggaagattttttttaaatcactttccttcttctcttccttccttccagtgttgtcttccttccccacccactttcagaaaggatttgatgttgcctagggttaaaatagataaataaaatcaaaaccattaggatgaatacgaaggaacggggaaagatgttatactcgaatccctgaggtaagatggctttgctgttatattgagcagtgcatttagctctgagcttcctggtagacaaagtgaaacaagtctttgggttcatgttatttctgtttgctgaggagaaacataccaggtcgtccacagagacattgttaccaggcactttattctaagccagtgattttcatgtaagtgaagctaaataatcatctagaataggggattcacatatacattagagtttgagaagctctgctgtagtcgacctccattttttgttggtaagcccagggaagataaataatttgccggttaccaggcttggtggtgataacacaggcttagagccagtttgccttggtaccagcctgggcctcggagctcccttgtttggaaagcacaggtgtagtgagatgtggtattagagctggtatggtcaagtaccttacctcgctcccaggcaatatggacacagactatgacctgagtcttgggatttagacttaatgaaatcagaatatgtgaaagaggagt

SEQ ID NO: 30743 - DNA, 1046 bp, Homo sapiens
cactgcttccattctttctctcctgcagccagaactgtaagtcagatcacatcgccccactgcccacaatcctccaaagtctccgcatcttactcagcatgaaagccaagatcctcccaataacccataagactctccgacctcatctctgcagctacattggcctcctgtctgttcctcacatatgccagctcatttcctccttgtgacctttgtccttgctgttccctatttttccaggtatctctacggcccattcatcccctgcatccctttgcttaaatgtcatcttctcagtgaaacctgccttggacacgctatctaaacttacacacatgaatacacacatccttcctctccaccttctctgctttttgtttctccttatcacatatggtctagtacactccatcaattttttattacctgttttctgcactagaatgtagattccacgtggatagggactttatatgattttgtgtatttgttcactgctgtttacatctggaaatgagcctcacacatggtaggtgttcaataaatgtttgatgaatgaatgaatcttaaaaacaatttttttaactttgggccaaataaaactcttcaataggccaaacctgggctgtacttcttttggcctagagtcaaaaagaagaatgagtgcttctccagcagctccttgtagcttgggaacagactttatgaatgcatcatgatgcctgccctgctcaggaaaccacagatgagttcttcccttccattcccacatgtaccctcctacttccaccctgctcaacttcgatacatgcttattgttttgtgcctcaacattgtttttcccaaggtattgctgtttagaatatggaaaatgttgtgtgaattatttcagcctcctgagtgaactttcaaatctctgaaggtagcacacatttgaacagtttgacttgctttctgcaacacagagtttagaactgggcaagcaataagtcagaggaagattatctcagagggaaaagcatgtgtaaagacaggtgtaaaaatac

SEQ ID NO: 30744 - DNA, 1116 bp, Homo sapiens
taatccatccctaaaacattgtcatattaatagaaattctggaatttgacctttaaatgtagtcattattacatattaaaggatctacaaagggcaaaaattgtggcagtagatgaaaacaatagccactgaaattttttaaagcccacaagcttgtaagattcctcttaaacaaacagaatgatccagtcacagagcttagtgctgtaaatgtcaatataaacttgatttttttttgtattctaataagaagaccagccagtaacaaaaaaacattggctctgtgaccagccaataccagatacagtgaaatctgttatctgatgtttcgtcagctagcctgtgagcaccatcatgtaataaaattctctaaactgtgattcacggtgctacaagatctttgtgcaccttttgactaatcagagacaaatcatatcaggctcttgtattattttattaccaagtgtattttattttaattctttggaaattggtaatccatgtatggttcagacattgttaaccagagtacataattagaacaattccaaccatgccagatgatactgtatttactgaagaattttattgccttttatggagaacatgagggaggaatagagaacaggttttttttcttttcttttgccacatagctgataacccagttgctataaccatttcttccacacaaagggacaacaacatgagaaatacacgttttaaagttcctaacaatcgagtacttcttacgggaagctgggacagttcaagaaaaaaatggattgaaggagaggaatagagccaaagttcccagaccttgacaactagggcaaatgtaacaagtccacattcatcatggaaaaatgtaaagtcctacatgtttgtggaagaaaatgactgcattcgcagaacaagagggataaagggctaacatagcctgtgctggtcacagccttctttgctcatctctctttacctcaatgtgaagatcagtgacagaccccctgagcagggaatgttttttgaattataatgatggagacaagtatcctgtgtctcaaattgacaagaagtactccccagtcctcaaagctcagagaggctttcttcagg

SEQ ID NO: 30745 - DNA, 1035 bp, Homo sapiens
aaaatatggctcctggatcaacagcatcacctggggacttttcagatatgtaaagtattaggccccacactggaccttctgaatcagaaactctgggaatgcgacccagcaatatgtacttttaaaacccttccagattattctaatgcacattaaagtttgagagccactgctataagggataagagaacttagagagatggtctttactctttaagagattaccatctattttcccttgcccacctgtcagtgtctgaattcaaactggaatttctgatagctaagagctgacagcagtataatgattttgttttaccatgtctgctagattcagaaatgcctcctgcagctctctgtgggattcttttctttttattattttaatgagagtcaatcactcatttataaaacctcttacagaaattaaagtatgtttcagatgacagttacacttttttatttctccaggggtctgatttgcaaagaattcttatggaactggattgttttgtttatgtaggcagtcatttgccatgtggtgatcttgaaaacagactaaataaatggtttgaatggtgatgtcatggatagtggtgattaaagcaaggatgatgtggaaggctttgcttcttttttttttttttttttttttttttttttttgagacggagtctcgctctgtcgcccaggctggagtgcagtggcgggatctcggctcactgcaagctccgcctcccgggttcacgccattctcctgcctcagcctcccaagtagctgggactacaggcgcccgccactacgcccggctaattttttgtatttttagtagagacggggtttcaccattttagccgggatggtctcgatctcctgacctcgtgatccgcccgcctcggcctcccaaagtgctgggattacaggcgtggctttgcttcttaaaccacccagggaccagaccaactcctgaaatcctgggtcacagtttaaagatttttacttgaccataccatatttatagccagtcattactt

SEQ ID NO: 30746 - DNA, 1035 bp, Homo sapiens
aacagatgcaatcaaagctttccctaccctaccacccaggcaagtcattcatgtccttgtgttagtctgtgtcccaaagacccaaggcacctccaagaaccctcttttaagtgcctccacagcataagctttaaagtcaagccaacctggatccaccactaatgatgggaatttaggaataactacttcctaaaattgtgaaagattacatggagcatatgtaaaactccaaggcaatcagagaaatgcacatttaatcaaagaaataccattgtttgcatgtcaaattggcaaattttttaatggtgattcctggtattgacaaagatacagtgaattaggacgtgcacttgcacactgctagtagatgtgtaaatggcctttaaagcaattttgccatgttattataaacctggatggatgcatagtgagacaaacatgaatgatgaaagagcctctgtgtgtgtgtgtgtgtgtgtgtgtgtgtgtgtcagagagatatagtatcttttgactcagtaaacacatttaactacaaaacatcatctgaactaacacacaagtctatctagattctttaacaatttaatgtaaatattcatacatcttgctataggaatattaatgttggattagtgggtgctgccaaagaacccactgcaagtttcatataatacatagtatatgtatcagtttacttttctaaaacatgaaaaattctgaaacaatagtttttttgttttttgtatttttgagactgagtcttgctctgttacccaggctggagtgcagttgcacgatctcggcttactgcaacctctatctcccaggttcaagcgattttcctgcctcagcctcccaagtagctgggaatacaggcgcccaccaccatgcccagctaatttttgtatttttagtacaaatggggtttcaccatgttggccaggctggtctcaaagatgtttcttctgtttgtgatttcagaggttattttgtgaattcacaggtaccactcccaagaaagttcagcttgct

SEQ ID NO: 30747 - DNA, 1083 bp, Homo sapiens
ccagacagtttatactcttaagaattttcactgcttttcacagacattaatagtttcctggcattgcctatcaggaaatgtcgtcatggtctggaggaaccaataaaaatacaagtaacctgttttgacagatctcttttctgccagaaatttcagaatttgtggtaagaggaggtggcagaatggagggccagtctatttgtgagggcataagcagaaatatttgccctacgagagggagctgatatctaccctggatatgagaaatagaggactcacactatccagttcattttgttggaaacttaaaaaaagaaaatctggtttgatagggtaattcaagtctatggtacattaagatatttttctccttttttttccttttatttcaaacataattcttgtttgatcctcaaataaaaaactcatgcgttaaaaattaacagtatttgattaaggatgtacacatggcactgtcataaggtatgcagaaagaggccgtggatttggacagtgataccaaacagctaacatgaagtgctctgtgctcattcctgttacagccagagcatgattctgaactcctttaatgtgagaaacactgaatatcatccttagatagttaattgaagttagattttgtggggaggtcagttgtttctcccttgcaagtttgtggggaaaattgatcaccataatacttgaaagagtgtgatcagagtaaaattaatagacatatctgaaatgactgtttgatctcttctaattaatgaaattttaaagaaaattttatactagtgccaattttgagtactctgttttacttaggacttgaatattaaataatgttgatttattctccccatcagtttagttttcaacttaaatacattttaaggtataaaacttacagataaaccttgtgccaatttaagtggatgtatggggttgtaataagatactgcccatccccatcaaaagttgtctatgaataaagacttcatatcatcgtggggtttttttgttgttgttgtttttctttttttgagacggagtttcactcttttggcccacgctggagtg

SEQ ID NO: 30748 - DNA, 1025 bp, Homo sapiens
aattgctctttcttggccaagactgctcctccccaaatgatccttgtctggctctacctcctgacttttcacctcttattgtcttcttcctgccctggtcccttttcctgtcagctctcaaggcttacacttattgggcacccaacttcattatttcccaggtgtgaaccagtgacccatcaaccaggtgtcttcagggggactttgccatatcagctaattacatttttacaatttggtgtcttgatcggcagactgaaactgaaatatagggaactctctcatctgcagcagttcagaggaccagttgtctccgtggcaaagtaattagcacgttaggataaaactgtcatctttgatggacttaaaactgtcattcttccagaagagaaagatggactcatcacccacttgagcgttacatggaccatattttaagaccaaacactaggcaatatgctgtgaactaaaggtctactgatcttggccactgcaaatctcatgtgccaaagtctttcagctctatctccccaagcccaaacccaaggattattcagtcagaaatagaatgtgtgtaaaattgataggagataattttctcattggcctcctgccctagttcattctgtgcatttccaaatctgggctcaaacttgaacatggctctgagagctctccttgattcaggcttggagctcaagtaacagagttgtctctggctgacttcctggattcccccctttctagatggcccttaatggtgcctgattttctcttatgactgatttcatcaactgaggcatttgcagtggtgcaatatcttgcattactttgtaaagttgtgacaccttctctggcatccagttccagcattttaactgtcaaccgaccatcgcaccccacctccaatccccagctggtacagtcttctttgcaacaattaggaaatctttattgccttccagaaatatgggattgcttgaacacagctgaaatacagattatctactggacagaggtgatga

SEQ ID NO: 30749 - DNA, 1102 bp, Homo sapiens
cacattttgttagagctcctcaaagaaggccaggaagtttttcatgccagtaataaaccttgaggaagcctaggaaataacccactggtctgtcttctaacatgacagccggtgttcactctacattcaaatgcagagtagggtgtgtgccgggcaagatctcctgtttgattcctctgtgggtcttgtctccaggagggctttattaagaatctttccactcactctttttaagcttatgtccctttccttttaaaacaccagaattcaacattcattacctttcttccctttgattgcccactgaagttttcacagaggaagtaatggttttcctgtttcctttcggtgtggccattttgcacgccatggttctccttcccttttttcagtcttgcattcaagtaaaagcaagtcgtcttctactgttaactgcgggaaaaggtttgtgggggccttttttttcccttccctcctccacaactggaaaatatgaggcagatcttgtttatgtatgctgtaacctcaaaaagagctgatacgctgttgtcattaaagaagaatcccaagctgtttatcctgcagtggagtccgagagctctaaatctgacagcccccctgggcctccaggcacagactgtggagagctcttcgctgctttcccaggccagctccaaaatgcaaggcaaaggtttccgttgctgaatccctacactctgggaacagacaagatgtcaatgttgtggctttattaaaaatcagaggctttcttcccttgtattaacttgttctttgaaatctgttttccagaggccttttctactctaaaatgtaacttgaatacccatctttctgctacatttttctctgtggatctcttatcatgttccagaaatcattttgcaaatttattctatagccagtatgtttggcaaaattataataaaataagctttcttatttatctaaaaactagtaaaaactatgcttgagaaatacatctttctgttgaagtttggttcccaatgtttcttttaatcttattttctatgcatgtgcaacatttgatttttttttttttttttttttttttttttttttt

SEQ ID NO: 30750 - DNA, 1074 bp, Homo sapiens
tgtaacactttttatattccatattgttttatattttttgtgtttttcctacttccattactaaactattaattctttgaaggcaaggacaatgccaagctgcattctgtgtcctccgccatgctttgcattcagtagttactccgtgtttgactaaattcatgaccccagggacactgtgcttcctctgggtttgttcatttacttggctatgaaagacaataatttgcaaagccaactttctcctttttctgagatcagtgactaaattatattaaaagtattttgcagtgctataagtgtataggagagaggttttctgtttagggaatgttgctaagccctgtcatcaaaaataacctttccatctaccactaagttctgccagagcatagcagattggcaagagcagttgaaaggaaaaagcaatgtaatgccctctgcttatggcactacaggtgccagtggaggaaaaaagtgtgaggttgaggcttgggagactaagtgctgtaaaaatgaagcagaccgactgtgggtacacagatctagtctttgtgaaataccttccctgacttttgtatattcctgttcaccctgtgattgtaggccaggagtctttaataggaaactggtgatttgaagtctccccacataagcagaccaagcagctttttgaaagaagcccactcagaccatggagaaggcagcagctcacagtggcagcaagagctatgagacagcaagagtcagccagaaacacacatgcagaacccgaagtcttgagcacagcaggaggttgggcaaagctgctccattctgaaggttattatggccccactgggggctgccacacaagtactggcatgaaagcaaactagtgttgggataactgttttaatatttgcaaaatccactctaggtgtgagctcctttgtgtaactgaagatctagagtctttaggagtttattcctcaaaacttgaatcaggttttttctaggcaagttggaagcacggattgggcaggtaacaacaaccattcttcatgttgagcaaaaaggaggtgtgggcagtta

SEQ ID NO: 30751 - DNA, 1035 bp, Homo sapiens
ttcatactccattggctttcgtttttttcttgctttccccttgattttcttcttgtttgttccttgctctttctggactcattggtaaaacaataaagaccttttattgagcagttaatactgttactgtataaggcacactgtaacataatcctcacggcatccctaggaggtaggtggtacccactttacaaagaaccagaggctcagagagatgggttctgggggtcatggcccatctgcttggctgtgagccagactccaaggatactgttgctttcactttcctttttacctgtcctctctctttcagctcaggaaaattggattaaccgtgttctcatgtgttttgttggtcacatgccattgctattttctgccaagcaaaaaaataattacaaaaccttaagctgttactgcccccttttaatcacttttctcttgctttaatttctttcaccaccaaattgctttgaagagtccaagtcctaacccctttctccaaccctatcctaatttccctggccagagaaatatcatttttttctgaattgacatgagaatctgcatgtgctcctctgcctcatatgagtgttgcccatcttggtccctgcttatccccaggagactcacctcgaggacagattttatctgtgcgtctccacagcgcctgacatggaaccttgcccttaattggcactcattatttgtgaaatgaaggaatgaatgaccataccggtatcccagttttctcatgactcttcccatctcagccctttgtcccagcttgtgagctgtcccctccctgacacagctgcctgcagaggtctcttggggccttgtgatgccctatccctcctccaaccacatccctgatttcccaacacaattccctccttgaaaggctcctccaccttgacattcagggctggggtctgtcctctccatccctgcctgcccacacagtccctccaactcccctgtggcctccttcatcctctctctcccactgctcttctccctctggaactcatc

SEQ ID NO: 30752 - DNA, 2108 bp, Homo sapiens
agaatcaaactcactagattatgagaactaaaaagaaaatgtatgtaaagtgcttagcaccatgtcagtatttagtaaatgtttgctgtttttaaatgtttgttccattttatatcttatgttgaatgtccctttaaaatttaacatgattgaatcagcatttgtttcctatttaatcaacattgtcttcaagtatcaaacctaaattaaaatatcaaaaatgtaatattccaaatttttttacttaattttaaaattagtcacatttagggacttggtatgtttgttttgtgttacaaattaatgatactttattttaatctaatatttacaataaccagaaaattgaattacaattgtaattataatgaaccatgcttactatattttgttttgtttaaatactcaacaaagaagaaatgctcaacttgggaggtgtgccctgttttgccatatttcaaataattgttttctgttcttttttccagtttgtcctaagtgggtaaaacttaggaagaaccacagtgagaagaaatcggtcctgatgctgatcatctgcagctcggccgtccgagccctggagctcattaggttggaaggttcacctattccatatcataaatgttttctgaataactgatatatgccaagctattatgttctatgtgctggagatgtagcaataaacaaaacagagtccctgccctcatggaatttatatttcagtgggggagacagataataaacaaatgaagatacattataacgtcaagtacattgataagttatgtaaggaaaaaataaagcatggcaaagggatataagtagatcaggactacttttaaaagggtggtcacagaaagcttctctaaggagatgacaatttgatcagagacttgaacaaagtgaagaagaaagcccagcagctatctggaagaaaagcattccaggtagaggggagagtaagcacaaaagaccccaagataggatgccattataggattttgaggacttacttgatctgaatcatcattttaaaggttcactttggctgctgtgtggagagcacacattatagagagcaagggtaaaagccagatcataccccaaacaaccagttagaagaaaagatctgacttaaaatagtaacaagaaaagacagaagccgggcacagcagattgtgcctataatcctatcactttgggaggctgaggtgggagaactcttgagccctggagcttgagaccagcctgggcaacataataagaccccatctccattataaaaagaaaagatagaataccatggaatatacttaccaaaacttatgtacagacaacatcatctaagggatgcagaaaacttggacaatcaaaaatgtataccatattcttgaacaggaaaactcaatattgtaaggatgtctgttttactcagggtagccttcagatttcacacattcctagtaaaactccaatagaattgtgttgtttttttttttaactggataaactagttctgaattcttatgggataatatacaactaaaaataggcaaagaaattctgaaaaagaatactaatgagaggattatattcctagagattacaaattatatatatatatatatacacacacacacatatatatatacacatatatatacacacacacacacacgcactctgaagtctcaataaaataattaacagtatggaactggcacatgcatgacagatcagatgagtggaacagaattgaaagttcaggatcagacccaaatgcatatgaaaatgtagcatatgcctaaggtgacaaatcagaaatcagtagggaaagacggattgtttaataagtggtgttggaacaactgagtagccatctggaaaaataaagttggattcatatctcacttataacaagataaattccaaatggaataaaaacttaaaggtaaagattatgttttaaagataatttgtcagtgctttactaagggcttgcacatacgttttcatttactattgtttttgtagaataaacaaaaaggcttccactggtcagtggtaatattcagctttcagagaagagccgtgagagtcagatg

SEQ ID NO: 30753 - DNA, 1022 bp, Homo sapiens
caagaggattaataagtgccaccaagtttctaaaactgcagaatcagaggcattgtgcatgctgacaatggtttaaagggtctctcaattttactttaatcccccatttaacctttgtttctttcaaaaaatcaactgaaagcggttaactgaatataaatctattttacagcatttactacgttaatttaaaaatcaacatgctgtaaaatacttacattattcacacatatatagacggaatcatccagaacataatcaactgccaaccccccttaaaaaaaaaatcaacaaatcagtttttatttgcatggccaattatcatttgtactctttgcaactttatttaaaaatccctttaacatgttctaatcttttgttgcacagggaataaaagctgcaagactgcaaacttccttcaacagccacacccacaacacctagacatgaaacagatgtaacaaataacaacaccacaaacagaaatactgatttccaccattcaacacagttcatgacagtgtctttagggttcagttgaagagggggtaaacttttaaaaagagggtcagtctgctttccccctgttttataatgttggtggttttaatccgtatttctttgcaacttctgtctgggcatgggcggcatcgcaaagtgaatacagatgggccatctccatttccgatttggccaggttaatagctttgttgaacatgtcaatggctttctccatgtttcctctaaaagaacaaaatttttaagtctcagattcaacaagcacttcacaatattcaatgaaggttgtaagtgatggtacatgaagtctgaccactaagtttcttcacaatattcaatgaaggttgtaagtgatgctacatgaagtctgaccactaagtttctactatgattctagtaaaatgcttcttttaaaataaacaagagtacctaccacattgaaagcactcaatgaatgtcaactactattacaaatactatgtgcttacattatatcccttgta

SEQ ID NO: 30754 - DNA, 1050 bp, Homo sapiens
tggaatacacggtattttcatgaagacaactattaatagaaaaatcagagtccagaactatggttctccatttctggtatactggtttgcagaagccttacattaagatttcataaatgattgttttgctgttaagtgcaacaacatcacagtagagctacataaagattgaaaggagatattttatcaagtggcaccagaatggactgattaaaatagaatggcctaattggaaagaatttcaggatcaccggtttctcctgcttcatgtaagttcctattagtaaattgccttcaggcaatagggtttcttagcaacagactaaaaaaatgggctaaaaatagcagtggaattgagttgatcgttgcaggcaataggcttttctcccctcctgatcccccaatccccaaaggcaaattttctgccccttaatataagctctgccttgcctttttcagaacacaagttaggatttttttttttttctgaaatttcagttttgctgtggcctcttggaggattgtagagtgctaacaattacaaacttgataggaactaaaacatatttgaagttttttttttaaacctttttcttatttattggagtaagcaatacactgttacggttaaactccaaaagttacagagtttactgtgaaaagtcttccttcagtccctgtcctcagctgcacagttcccctctccaaagggaatcggtgttattttcttgaaacattttttggattaatatttatctaaaggcctgattttgtttggctttatttttaaggttggcattagtaaacgaatctgttctggttacttttatactttgataaacatctcatttccattctctagcctatgctattctctcattttctcctccatttcctaattgatggtactgtagagccaaatagagtgtcgcttactggctttgggaccttactgatctgatgcatgtttttctaatctgtgaaatggtgaaaacatctacctctcaggctatagtaaagatttaattagagaatatttaaagttctttt

SEQ ID NO: 30755 - DNA, 1065 bp, Homo sapiens
aggggaatagtttaagcttattattttttcttttttacatcttcttggataccaatattttaagcttcttaacacatatttctcaaggctttctaagaaggctgcacacatttttaatcccatcagtaagggatgatagttcctgtctccctgtactcctgccagtgttggtattattaaaacacattttttttgctaccctgaaaggtaaaaatattgttattttattttacataatctttgactgctaattaaatattaacattcgtaaccatttggtatttccctttcttctattctttatactgtacattcaatatatatttaatgaacccatgctgtgaacaaggcaaggtgctgggtactagcagagagtaaaacatagccctgatgtgatgcagcacacaatctagtggagaagagaggcactgaacaaaattacccgaattattaatgacagttgtgataagtatcccagaggagaagcattggaaaccaggagagcatctggcaggaacctgaaccaatcagaaaggtagaaaaggctttctgaggaaatgcagtttttcctgtgactgaaggatgattagccattagaaagatgagggagtagggttgtggatgaggtcactggcagggaggagcctgtgccagtgcctgcgctacacaggagcaggtgagctcgagaaagagatcaaagaccagtgagaaaggaaagatagaaaaggaagactagtctagaaccttggggagccccaacagctatgagctgatagaaggaagaagtgagcaaatgtctaaattacagtggcagcaagatcaaagggaaagcaggaaggtgcggtggtagcaagcaaggaaacagtgttttcaaaaggctcctgtggataacagagttgaatgccactgaatgacttagatgaagaccaaaaagtgcacagaatttggcaacatgaagaccaatatcctgatcaaaattagctgtgggcgaggaagctggactggagtgagttgagtgagtcagagaaattgagagagcaaatgtcataattatttcaaaaagtt

SEQ ID NO: 30756 - DNA, 1075 bp, Homo sapiens
aagattacacagtgaacaagtggcaggtgtagaaccagtctaactttgtagcccgagccttacccaataggctatgctaccttaggtataatacagctacagctgctcttcgtgtttgtggtggtgatagttgagaagtacatggaaggaagatcattggagaaagggcatatttggagatattgatttggtaaaatttgcctggcgggggccagaatatcaatgtgaatcttgtctatgaaatgtgctccatatggagacaggagacatgtggatctcattgcaggcatgcactctgtcttttcaccttgtttgaacaaaacccacatagcacctggttgtctagcagacactcaatacatgtcaattgaatgactgtcccctttgaaaaaggaagttgtgaccacactatttttatttaaaaaaataaatagagagactatgaaatgtcccaagacttgtgggaaaatgggtcagatgccaggtaaacattctacttctgcttttggggcatctcagtttctctttttatttctggacatgctgtggttttgggctaagaacttctcatggtgaatatcaatgaaggtctattttaggtatatagttattaatcatacccattctggatttggcatctatctttttgggaattcattccttaaatattttgtgtattgaatcaactttaaaatatttgaaaaatgttttaggttgctctttatctaatgtagttgctcttttcagtatggcatagtgactaagcacacaggctttgaagtcagactgtgagggtttgaattccagatctgattcttaccaatgtggccttgagcaagtcactttcctctagaagcttttattatctgtaaaatgggggtactcatatgcattacatgagaaaagccatggagagcattcagtatattgtctggctcacagtaaagcctgtacatgtaagcaattccttttttattgtggtaaaatatataacataaaatttaccatcttaaccatttttaagtatacagttcaatggcattaagtacattcacattgtgtgtaaccatcacca

SEQ ID NO: 30757 - DNA, 1088 bp, Homo sapiens
gactaacagcggatgtctcggcagaaactctacgagccagaagagagtgggggccaatattcaacattcttaaagacaagaattttcaacccagaatttcatatccagccaaactaagcttcataagtgaaggagaaataaaatcctttacagacaagcaaatgctgagagattttgtcaccaccaggcctgccctaaaagagctcctgaaggaagcgctaaacatggaaaggaacaactggtaccagccgctgcaaaatcatgccaaaatgtaaagaccaacgagactaggaagaaactgcatgaactaatgagcaaaataaccagctaacatcataatgacaggatcaaattcacacataacaatattaactttaaatgtaaatggactaaatgctccaattaaaagacacagactggcaaattggataaagagtcaagacccatcagtgtgctgtattcaggaaacccatctcatgtgcagagacacacataggctcaaaataaaaggatggaggaagatctaccgagcaaatggaaaacaaaaaaaggcaggggttgcaattctcctctctgataaaacagactttaaaccaacaaagatcaaaaaagacaaagaaggccattacataatggtaaagggatcaattcaacaagaagagctaactatcctaaatatatatgcacccaatacaggagcacccagattcataaagcaaatcctgagtgacctacaaagagacttagactcccacacattaataatgggagactttaacaccccactgtcaacattagacagatcaatgagacagaaagtcaacaaggatacccaggaattgaacccagctctgcaccaagtggacctaatagacatctgcagaactctccaccccaaatcaacagaatatacatttttttcagcaccacaccacacctatttcaaaattgaccacatagttggaagtaaagcactcctcagcaaatgtaaaagaacagaaattataacaaactatctctcagaccacagtgcaatcaaactagaactcaggattaagaatctcactcaaaaacactcaactacatgg

SEQ ID NO: 30758 - DNA, 1055 bp, Homo sapiens
acatacattttttttacaagcattattttctccttttgtccatataattctggtttcttttagcttaaaaaaattttttttctattcttatttcccgaaatgaaaggttttagtatgtattgaatgaaaaaggattttatggtcaactaagtaagggaaagctggtttaaacaaagacaaaagtgtttctttattgtaggagttttcagattatgtaatatgcttatatacattttcagaagttagtagtatgcagtgttcccagactcatttgttgacaaaattatctttatggaaataggttttgaatgaaaaatgtttcggcaaacacactgagtagaattatagtagtagactgtatttcctattcttcaacctgccttctttgttaatatctctgctgaaattttctctttaggtggttaccagtgttttttactgtggaacttacttgcagtgtatttaatcttgacctcactgtttagcactgctacccacaccatccttgtttttaaatacttttacctcttaacatctctgacactgcttaacctagttttcttatcactaacagttttttctctgtctgtgttagggttgggcttaaagtaatgccagcagatataatagaaatcttaaaatctgagtggtttaatagttgagaaatctttcagggatccaggttgaaagaagctgttaccttcaacacatggcttataagctcaccataggcattgacattggcaagcagatgagtgaagacagagtatgaagaatcatatgggagattttactcactaggcctgatggtgttgtatgtcatttctgcccttatgacattggtcagtacccagttacatggctttgctaagatgcaaatgggttgggaagtatagtccctggctgagcagccacttagcacaacttatactgtggaggagaagtgtaaatcactggtgatcagttaaattgaccatctagctaaaggtataattctcctttgtttttgtgatgtgtagtctaagaatacccaaaacaaatttttgagagttgcc

SEQ ID NO: 30759 - DNA, 1068 bp, Homo sapiens
aggtatccctggtgcagtattatagttttaatttagctgtattagaatttttaaattgtaattatcttccttcacattacagtatgttgttacttattatcagggcttaacatgtaagtctgatacttgaaaccagtagtcgccaacctttttgcactggaaactggtttcgtgtaagacagttcttctatggaagggggcaggagaaggtttggggatgaaactcttccactttgcatgtgcaattcacaatagggttcacactcctatgtgaatctaatgccactgctgaactgacaggaggcggagcccaccacttaacctcctgctgtgctgcccagcccggtttggttcctaacaggccacagagtagcactgggttggggacccttgctttagacagtatttcccgaggggtacttaaagattaaaaatagttctgataaaaaccaatagaagactaattttaatcttttagattttttcttttagatcttaatagatatgcaaggcagaactcttaagggacaagatagaaaagattacagagttaaatggtagtgtgattatgtgaaaaataaaatgtgtacactttttccggctgttttgttgttttgtttagcattaattttatttttttttaattttgttgcatgaaacttagagttcagtgtgaaatatgatcatggtctattgatttaatttgtatctatttcatctccatctaggaaggatgaatatgaataatcagaatttaaatgttaataacaaaaactgtttaaaattatttaaaataaaggtatctttttacagtattgaatgtaaaatacttaactattgactaggcataaagcagattagataatctgaagacccttactttaaacaggatctgctagataaacttacaaatgtgttttctgaattctgtaactcagcttgcacaggaaagtaagggaaatatccagggaacaaaaaagtagagggaactaaaggcctgatgtaccaaaagctgaaacttggggtgttcttggtggtgatagtagagattttagcctgcataattta

SEQ ID NO: 30760 - DNA, 1794 bp, Homo sapiens
aaaattggtttcttctctgcattttggaaatcatgccatatgttgttttcttgtatggccattttctagttattgtgtcctgtctgacatatctgatgataagatgatataagaataatacaatctgcattatatttttagagatagttcttatttttttagaaaacaaaaacaacaagaaaaccatacatcagaaactgaaatctagtccacaaaatgaaattgccaatcagctatcagtgctatttagaacctgtggcttaccctcaccaagaaatgtggccacctgtggtcttcagctctctattacagcggttcttggatgcttgttttcctttaagaggcaaatgatgtgtaaactaccttagatagaagattgacctgttgcagtatctccagcagctaatggagcaagtagtaggacgtatagtatgtttcctgatggttttagtttgtgataagtgaaaagaggcataggtagtgagatgtgaggggaaacaacttgtaagactgacgtggtatgctcttgggattagaggaaggaagttggtagggaagatagataactggtagacatgttttaaaggaatacttctagtagtagttttctttttccaaacatttagaaaatattagggtagcctggaatggtatgttaggaatgaatgagctgccagccagtgtgtgctgtgggtacttatattcggtttagcacttaacatttttttcagaagatacattttgtattgattacaggggtgatctaagaactgatgttcatttacttgcttggtaacaaaagtgataatcattgtcccttaattgagtaaatggttagcaacagtctttttgtttacttgttcgtgttttttgtttgtttcttttgatgtcttttgtatcttggacttggattcctatttgtaaaatgtatgttaaaattcttgaactctttttctttcacaagacagtagtataaatgcctgtggaatatcttagtatcctgagaagaaaagcatgattttaaatttaacctgctcataatatttgacattttgtttttctgttgttgttttaaacattttattatagaaaagtttaagtatataagaaagtagacattataatgaatcccagaaacccacatccagtttcaacagttaccaacttatagtatcatataattacactatacacatttccgcccctcctgttacccagagtggagtacaatctcagctcactacaaactttgcctcctgggttcaagtgattctcgtgactcagcctcctgagtagctgggattacaggcatgcatcactgtgcctagctaatttttgtatttttggtagagattgggttttgccaggctggtctcgagctcctgacctcaagtgatctacccacctcggcctctcaaagtgctggaattacaggcatgagctgttgcacccggctcccctcctgtattattttgatgcagatcccatatacatcatttcatctgtaagcattttaataagtattttaataagtaatacatattaaaatagaaggtagcaaattcaaaaatgtttttaatgtgctatttatggaagattatgaattaattatggttggcttgatttccatgtaatttaatagtggaccagtagacagtagaaataaaatgtaaaatttgagattataaccttagttcagtttctttttataaaataaagccttagttcctataattattttttccagagtgcccagtgggtatctgatactaggatataggttattgggctcca

SEQ ID NO: 30761 - DNA, 1035 bp, Homo sapiens
ggattacactggctgttttattaaacagtaataagcctggtgcatgagtgaaagcaaatttcaaaatgtccaacttgttcccagaacatcatgggtcctcagtgttgtacaatgtgtaggtaaacattcacaactgtttggtgttataagaagactaagtggaaaaacgcgaaatcatgattcagattctgccatgcctgttcagttgaataaatttagaaaagcatgtagttgtgcctcattgagacaggtacttaccagaaactggctcactcactcttgggtccgctgaggagaaataaatagaaaagtcagaccttactaggtaaaaccccaacattccagtggcatggtgaagatgatgggggcttacacttgttaagaagtcttatttgcaaaatggtactcttttgctaaggattgaatttgaaagtttgctttgttttggaaattgttcttgattgaataatctcctgcctggtaggtattcagctgtatctgttacatgtaatttgagtacttaggaacatttgtcgctgttccagctttcacttgaatttcaaaagctgctgcttttagtttgatagaaaaacttcatggtaaaaatcaccaagatgccatgaactacagttggtataaaaattatgcaaatattaatgctgtatgtgcagatgtatctcattaaggaattggagattgtaaggtctaattgggaagtttgacagctgttattaaactatcatgggttccctttgtggatgtactcactggtattttcattctagacatgcaggagaggattcattgactagctttttggaagagtatagattcattatgctttttaaattaaactgatgtgtctttaagtgaggaaaaatatgcatggtgtttctctaaaccttcatcagtttgctttttcccacaaatgggtttttagaaattcaagaaacagtacatgtagtgggtttcaaacaaacttcctacgcaaaacattgctccactgtggcccttttacatcctttttgggaatta

SEQ ID NO: 30762 - DNA, 1094 bp, Homo sapiens
ttttcttcttttacaggggttttgttacatggctgctttcctcaaaatgagtgttagtgtcaatttcttcagacctttcaccaggtttttggtgccatttacccttcataggaagagaaataacttaacaattttgcagagatacatgtcttccaaaataccagctgttacttatcctaaaaatgagagtacacccccttctgaagagctagagttggataagtggaaaactaccatgaaatctagtgtgcaagaagaatgtgtttcaacaatctcaagcagtaaggatgaagatcctctagctgccaccagagagttcattgagatgtggagattgcttggcagagaagtaccagaacacatcactgaagaagagctcaaaacccttatggaatgtgtttctaacacagcaaaaaaaaaatatttaaaatatttatatacgaaggaaaaagtgaaaaaagctaggcaaataaaaaaggaaatgaaagcagcagcaagggaagaagcaaaaaatatcaagctgctagaaaccactgaggaagataaacagaaaaactttctatttttacgactttgggataggaatatggacatagcaatgggctggaagggtgcccaggccatgcagtttggacaacctttggtttttgacatggcttacgaaaattatatgaaacgaaaagaattgcagaatactgtttcccagcttttagaaagtgaaggatggaacagaagaaatgttgatcctttccatatttatttctgcaatctaaaaatagatggtgctttgcacagagagttagttaaacggtatcaagaaaaatgggacaaattgcttttaacatcaacagaaaagtctcatgtagatttatttccaaaggacagtattatctatttaactgcagattctcccaatgttatgactactttcaggcatgacaaagtttatgtaattgggtcttttgttgataagagtatgcagccaggcacatccctagccaaggcaaaacggctgaacctggcaactgaatgccttccattagataaatatttacaatgggaaattggtaacaaaaatctcaccttagatcaaa

SEQ ID NO: 30763 - DNA, 1036 bp, Homo sapiens
taactgttaatcaaggccatctcttggagcatcttctttttctccataaataaactcttgatccagtgtagcataatacattccatatggtgaacgggcaaactggggaaagaaaataaaagttttaatcatcagccagccttcttctgtcttaccgcctgatatgttcttagtctcatataacagacccaagaaagtcagaatgtgaactaatttcatcattgacttcatacaaacagaagcaaaattagcaagacattttgccttccaaacctacatatgtatgccttctactgtttgaaattatgattagctcatctttcatgaaaaaaactaacatataaaccaaagtatgatttttttttttaaatagctcttatgggtagcttaaaacaggtaataaccaaattgtcagagtagaattaaatttctcaagagggaatgaccttgaagttccttttcaactcctaagattgtgtgagatgtacgtgaggaacacatcactcaaggaaataactgggctgtattaacactgtcatttgggtaataatgggcctgtttataactaggtactttgtatgattattacattactgaagaatattaaaatttattagccaagtgtattattttaccgtgtgaccaattgctcacaaactactaagtgtaaaagatgttagatagatctgatttctaaaaagcaaaatcccacaaataaccagattattgtacaaattgtagtgtttagttgaagggtcttgactttttgtgaactctgtgtttataattttaaattgctctgtattttatgctagttaattcatgggagcctcttctactgccacacaatctcagttcctgctgtatactctaacaaacagtggaagagactgttgggtcagtaggtgacaactgcagaggtatcttccttataacgatgctttttgaggttgctgctcccatcaatctgctcagtaaaaatagctcatcttggtaagttgtttcgacttcaccaggacctgaagaagaagcagaa

SEQ ID NO: 30764 - DNA, 1209 bp, Homo sapiens
tactaggttatggtaaattaagggtgaaaaggtacattgtttgagaagtaatctttgacgtatgaacttagatgattagcaccctgtttaagaagggtctgaatgaattttatctcaataaagctgttaagaaacaaagatttggaatattaggaacaactattatagggaatatgatttataaaataataaacttagaatttttctgcgttggctgggcacagtggctcacacctgtaatctgaagacttggggaggccaaagtgggaggaccagttgagcccaggaatttcagaccagtctgggcaacatagcaagatctatctctacaaaaaataaaaatataattaaaaaaaaaatcttttttctaagttgagcaagtcctctgaaaaatattgtcagaaagattttccaaagttttttttttatctttcagtgcctgtagtattaaaaataatattgagcaatcagttatttgtatcttaaaagatgaatattagtaaggtattgcttgataagatctacctaattatcttactttggaacgacaaatgggaattgaatactgtatatcttatgttggtagtcttttacaggtcaatatttgatcctttgttttaagatgtcagccttagattaatacttattaaccatggaacctctggaagtgtttgaaatattaatttgaagcatatgaagttgtagatacttgtttctgacctataatatgaaaatttcataaccttcaaccaaatagatttcttatttaaggaaaaaggaagttacttaaatagtgtattgctattggctttggaaaatggttacattcttgtgtgaggagaaaaatcctaaaattgcctttgagttggttatttttatttgtgctatgaaagttaatgctcaattgccagatgtgcatagctttattctacattagatgtttattcaaagatcttaaaaatatggtctggagcagtcagtatatttgggctattctcattttaaaaagctgttattacttagaatccccaccctcactctgctctgtttgccctttttctatttctattttttaaaaaattcagtctgaacaaaaaacattgagcttataacatcagtacttcattactctatttctgtatttcagctggtagtttttgtttaatatgtagttataaaacttgtatagacctaactgcataaatattt

SEQ ID NO: 30765 - DNA, 1075 bp, Homo sapiens
caaaggttacagataataaagaaatcagaaatggtacctttttaagaattgcatatttttttagacacaactattagtacattaagagggaagcaaagttactgtctatttaaaactgcaagcagttaactctcttaactcccttattacctaaacttgtctggctcccaggaacagccttatagagagagggagtattgtattgggaagaaaatgttactgaactattgactgaaagtaaatttagataaaatacagcttttttccttatgggcatttgttttgtttcaagtcatcataaactaggtattgcattgctatccgtggatacagacgcttagctcttaaaagattttttttttatgtaaactgttgaatatttgaaatagtccacttcaccttaatgggtcttgtctatcttcattagtcttcaaagaaaaaccatttgctaccaaagtaaatcagtattttgaatgtgcttctcttgttttttgtttattagctagttcctgtaagcatttccaccagaacttgaggcaaatcgtaaggaagctgtttcttttaaaacacaaaccaccaccaaaaatttaaatgtacatattgcttaagtatttggctgtttttattttttaaaaggtataaacaccaaaaaaaaaattaacattgtatgaagatggaaaataagaagatgcactttctgtaactttgtctaaggatttaaattactaacttatgaactccaatttgaattgaacttaactatcggctttcttactggtaaaattatatggtttattttaaatgcgtacatattgaccaatggcctctgaaaaagcacattttagatactgaaattgaaggaaagaaaatgcatcttcaaacattttttggaatctcaccacatatactttgttagatttgtgtattgtagggtgtttgttttgtatttttgtattgtatatgaactttttttaaatgtgacagttaaacacatctttaaaagcatagtcacagacaaaagcatacagtataaaaatttccttgaaaactcctacaatattatatttggaggcag

SEQ ID NO: 30766 - DNA, 1754 bp, Homo sapiens
aaactcctgggcccaagttgtccacccgcctcagtctcccaaagtgctgggattacaggcgtgagccacccatgcttggctataatgtattttcttaacttatacagtgctgctgcttaacaggtcaggtcctagttaatggaaaacttgaactacattgtggaattaagattcgtttctagtttgactaataaataaaggctatgcgtttcaaggttttttctcttttttaagttttttggttttttttagagatggtgtcttgtcaagtttttttcttatatcaaggttgcttgacacgaagggatggctcaaattatgttagtggctaagtaaaaatactttttaattttttttaattttcattttgaaaaaacttcagacttacaaaacatactacaaaaatattacaaagtatgttcatataccctttactcatgttccccatatgttcttttccaaaacctcaggacaattgtagaaatcaataaattaacataattgcaatattatctgttatactactttatactattctacagaccttcagatttgccccactaatagaaccctagtccaagatcttcattatcactttgtggattttcatctttttttagtctcttttaatctaggacacttcgatgtttattgttcatgaccctagacgaaagtacaggccaattattattattattattattattattattattattattattattttattattatttttgagacagagtctcgctctcactctgtttcccaggctggagtgcaatggcgtgatctcagctcactgcaacctccgtctcccggctccaagcaattctcctccctcagccccctgagtagctgggattacaggtgcgcaccaccacacccggctaatttttgtatttttagtacagatgggggtttcatcatattggtcaggctggtctcgaactcctgacctcatgatccacctgcctcagcctcccaaattgctgggattacaggcgtgagccactgcgcccggcaggccaattgtttttaaaagatacctcaaacgttaggtttgcctatgtttccatataattaaattcagtttatgcatttatgcaatacctcagtatttcattcccgctataggaattccataactaaattatggttgatatgaaactttgaataggtcagtagaaactacaaaataacccatgtaaccatgactgaaaataaagtattttacccaatgaggaaaaagattataacaagaagctgaacaactaagtaatgcaaagaaagcgacattcagggaatgcaagtaatagatattggaatatttgcaaatgattaaagcaaatataacaagattgaattgggagtaaaaagatgtgcatgtgtggggataaaggttatgtgggaatgctgtactttctgctaagtttggctatgaacctaaaattactcttaaaaagtttactaacaacaacaaaagaggtatgccggatgctatggcacacctctataatcacaacactttgggaggtcaaggtgggaggatcacttgagttcagaagttcaagaccactcaggataacgtagtgagacctgatctctacaaaaaaaaaatagcccattatagtggtgcacacctgtagtctcagctacttgggaggctgaggcaggaggatggcttgagcctgggaaattgaggcttcagtgagccgtgatcacaccactgcactccatcctgggtgaca

SEQ ID NO: 30767 - DNA, 1032 bp, Homo sapiens
gaaaaaaatcaaaaaaagaaaaggaatagggcatcctttttagaagcggtcactgtagagcctccaaaacccattccattaatttggggggaaaaaaaaaaactgtatggtaaatcagtagccgcttccaaaacaaaaactggaggctttacacttattagcaaagaaacagttagaaaaaggacatattgagccttcattttcgccttggaattctcctgtttgtaattcagaaaaaatccggcagatggcgtatgctaactgacttaagagccattaatgccataattcaacccatgggggctctcccatcccggttgccctctccagccatggtcccctttaattataattgatctgaaggattgcttttttaccattcctctggcaaaagaggattttgaaaaatttgcttttactataccagcctaaataataaagaaccagccaccaggtttcagtggaaagtattgcctcagggaatgcttaataattcaactatttgtcagactttcatagctcaagctctgcaaccagttagagacaagttttcagactgttatatcgttcattatgttgatattttgtgtgctgcagaaacgagagacaaattaattgaccgttacacatttctcagacagaggttgccaacgcgggactgacaatagcatctgataagattcaaacctctcctcctttccattacttgggaatgcaggtagaggaaaggaaaattaaaccacaaaaaatagaaataagaaaagacacattaaaaacattaaatgagtttcaaaagttggtaggagatactaattggattcggagatattaattggatttggccaactctaggcattcctacttatgccatgtcaattttgttctctttcttaagaggggacttggaattaaatagtgaaagaatgttacctccagaggcaactaaagaaattaaattaattgaagaaaaaaattcggtcagcacaagtaaataggatcacttggccccactccaaattttgatttttggta

SEQ ID NO: 30768 - DNA, 1028 bp, Homo sapiens
tcatagtacaattaagacttttacattgtacttggatcaaatggctacattaattggtcagggaagattacgaataataacattgtgtggaaatgacccagataaaatcactgttcctttcaacaagcaacaagttagacaagcctttatcagttctggtgcatggcagattggtcttgctaattttctgggaattattgataatcattacccaaaaacaaaaatcttccagttcttaaaattgactacttggattctacctaaaattaccagacgtgaacctttagaaaatgctctaacagtatttactgatggttccagcaatggaaaagcggcttacacagggccgaaagaacgagtaatcaaaactccgtatcaatcagctcaaagagcagagttggttgcagtcattacagtgttacaagattttgaccaacctatcaatattatatcagattctgcatatgtagtacaggctacaagggatgttgagacagctctaattaaatatagcacggacgatcatttaaaccagctattcaatttattacaacaaactgtaagaaaaagaaatttcccattttatattactcatattcgagcacacactaatttaccagggcctttgactaaagcaaatgaacaagctgacttactggtatcatctgcattcataaaagcacaagaacttcttgctttgactcatgtaaatgcagcaggattaaaaaacaaatttgatgtcacatggaaacaggcaaaagatattgtacaacattgcacccagtgtcaagtcttacacctgtccactcaagaggcaggagttaatcccagaggtctgtgtcctaatgcgttatggcaaatggatggcacgcatgttccttcatttggaagattatcatatgttcatgtaacagttgatacttattcacatttcatatgggcaacttgccaaacaggagaaagtacttcccatgttaaaaaacatttattatcttgttttgctgtaatgggagttccagaaaaaatca

SEQ ID NO: 30769 - DNA, 1095 bp, Homo sapiens
tgggaatggggagaaaaaggaatctctaccccaagaccagaaataataagtcctgtttctggtcctgaacatccagaattatggaggctttggcctgacaccacattagaatttggtctggaaatcaaactttagaaacaagagatcgtaagccattttatactatcgacctaaattccagtctaacggttcctttacaaagttgcgtaaagccctcttatatgctagttgtaggaaatatagttattaaaccagactcccaaactataacctgtgaaaattgtagattgtttacttgcattgattcaacttttaattggcggcaccgtattctgctggtgagagcaagagagggcgtgtggatctctgtgtccgtggactgaccgtgggaggcctcgccatccatccatattttgactgaagtattaaaaggcattttaaatagatccaaaagattcatttttaccttaattgcagtgattatgggattaattgcagtcacagctacggctgctgtggcaggagttgcattgcactcttctgttcagtcggtaaactttgttaatgattggcaaaagaattctacaagattgtggaattcacaatctagtattgatcaaaaattggcaaatcaaattaatgatcttagacaaactgtcatttggatgggagacagactcatgagcttagaacattgtttccagttacagtgtgactggaatacgtcagatttttgtattacaccccaaatttataatgagtctgagcatcactgggacatggttagacgccatctacagggaagagaagataatctcactttagacatttccaaattaaaataacaaattttcgaagcatcaaaagcccatttaaatttgatgccaggaactgaggcaattgcaggagttgctgatggcctcgcaaatcttaaccctgtcacttgggttaagaccatcggaagtactatgattataaatctcatattaatccttgtgtgcctgttttgtctgttgttagtctgcaggtgtacccaacagctccgaagagacagcgaccatcgagaacgggccatgatgacgatggcggttttgt

SEQ ID NO: 30770 - DNA, 1115 bp, Homo sapiens
aaaaattattaattatttttaatagacaggatcttgctatgctgtccaggctggtcttgaactcctggtctcaagtgatcctcctgccttggcctcccaaagcgctggtattacaggtgtgagtcactgcacctggccaagtttattttttctgtatacatttcttcagccacttcaatcaaacatttaattaacatgctataatgaatgacttttcttactaggctaacaaatgaggcacttggaaacttactttagttacagcctcactttctttttttgtgaggaaattctgtgttgacatactctttaatttctttttaccttttctgactgattttctgtaatttgggaatattgtgatgactgcttattctaataatattaacatatagcattcttttagcacataaatagtttcatttgcatagtaagcgccaggctttgccatcgaatttgataaaataatccatgcttcatggtaccttagagatgggatattttaagtccaattctctctctctctctctcatttttttctttttagagacaaggcctggagttacccatgctggagtgcagtggtgtgactgtagctccctgcagcctcgaactccttggcctcaattgatcctgccaccttaccttctgagtaactgggactacagtgtgtgtcaccacaccttttttttttttgacatgagggatatatgctggtaataaaaataaaattttggggtatggcaataggcatgctactcaaaatgctgccaagttacaaagtgtaactatgatttgtaatggatagcagcagtgacaagtgatgagaatggtctcttgtcatgactactctgttatagtgtaaaagcagccatagacagtagataaatgaataagtatggctgtattccaataaagttttactcatggacactgaaatatgaatttcatataattttgtgtcacaaaatattaaattttttttctagccattaaaaatgtacaaagcataattagctgtggactgtacaaaagcaggaagcaggttggacatggcttttgggccatagttggccaacccctgctagagaacatctatacatagcagccttttg

SEQ ID NO: 30771 - DNA, 1062 bp, Homo sapiens
gatctcattaaactaaagaccttctgcacagcaaaagaaactaccatcagagtcaacaggcaacctacaaaatgggagaaaatttttgcaacctactcacctgacaaagggctaatatccagaatctacaatgaactcaaacaaatttacaagaaaaaaacaaacaaccccatcaaaaagtgggcaaaggacatgaacagacacttctcaaaagaagacatttatgcagccaaaaaacacatgaaaaaatgctcaccatcactggccatcagagaaatgcaaatcaaaaccacaatgagataccatctcacaccagttagaatggcaatcattaaaaagtcaggaaacaacaggtgctggagaggatgtggagaaacaggaacacttttacactgttggtgggactgtaaactagttcaaccattgtggaagtcagtgtggcgattcctcaggaatctagaactagaaataacatttgacccagccatcccattactgggtatatacccaaaggactataaatcatgctgttggagcattttaaaagcaaatatcagatacccttttattcagaactcctttttttttttttttttttgagacggaatctcactctgtcgcccaggttggagtgcagtggcacgatctcggctcactgcaagctctgcctcccgtattctggccattctcctgcctcagcctcccgagtagctgggactataggcgcctgccaccacgcccggctaattttttgtgtttttagtagagatggggtttcactgtgttagccaggatggtctcgatctcctgaccttgtgatccgcccacctcagcctcccaaagttttgggattacaggcgtgagccaccgcgcctggccttcctttttttttttttgagacagtttcgctcttgttgcccaggctggagtgcagtggtgcgatctcggctcactgcaacctctgcctccttggttcaagcaattctcctgcctctgccaccctagtagctggtattacattttttttttttttaaagagacagagcaggttgttttaagttc

SEQ ID NO: 30772 - DNA, 1042 bp, Homo sapiens
ctgcattcttcacgtagttctcgagccttggctttcagctccatcagctcctttaagcacttctctgtattgattattctagttatacattcgtctaaatttttttcaaagtttttaacttctttgcctttggtttcaatttcctcctgtagctcggagtagtttgatcttctgaagccttcttctctcagctcgtcaaagtcattctccgtccagctttgttccgttgctggtgaggaactgcattcctttggaggaggagaggtgctctggtttttagagtttccagtttttctgctctgttttttccccatctttgtggttttatctacttttggtcttcgatgatggtgatgtacagatgggtttttggtgtggatgtcctttgtgtttgttagttttccttctaacagacaggaccctcagctgcaggtctgttggagtttgctagaggtccactccagaccctgtttgcctgggtaacagcagtggtggctgcagaacaacagattttcgtgaactgggaatgctgctgtctgattgttcctctggaagttttgtctcagaggagtacccggctgtgtgaggtgtcagtctgcccctactggggggtgcctcccagttaggctgctcaggggtcaggggtcaggggtcagggacccacttgaggaggcagtctgcccgttctcagatctccagctgggtgctgggagaaccactgctctcttcaaagctgtcagacagggacagttaagtctgcagaggttactgctgtctttttgtttgtctgtgccctgcccccagaggtggagcctacagaggcaggcaggcctccttgagctgtggtgggctccacccagttcgggcttccggctgctttgtttacctaagcgagcctgggcaatggcgggcgcccctcccccagccttgctgctgccttgcagtttgatctcagagtgctgtgctagcaatcagtgagactccgtgggcgtaggaccctccgagccaggtgcgggatataatctcctggtgcaccgttttt

SEQ ID NO: 30773 - DNA, 1256 bp, Homo sapiens
tgctttcagtagttctctccccagcctccaatagtttctttatacacatatgcttatcatcgctctgttgaatacttgagtgggactgtctgtagatctcctgagttatttttcttcacagttgttttgctttcctgtgaattataatcaccatggtctttaagactctcagcctcatctccttgccttgggtgctttgccatgctccaccggggctcctcttcctgtgctgcagcctggaaactctctcaagacactaagctaaggacagtccttgggctcatctcgtttgtttactgtctctcaggcatcactgtgttttattgtctgatgcctagtgtctggaaaaccattgtttcatgtattttgccttttttttttttcagttgtttcatgtgagaggctaaatcgcattactgtttctctatctttgctggaagtggaagtttgagggacttgaatttgtggggaaagagattatagagaagctgaaggggggaggagaggatgagatctagagcacagatggagcatataaccttttataggacaaggagcatgagtatattgtgagtattcttgttattttattaactacataggaggagccgtgttccttcctctgacctaagagggaaagatatcctgatggttggcaatgcagatacatttgcttagagggtaggacattcagggagtttctggctgtgaagaagatggaaggtaggagggtagagcccaggaggtttgtgtgggacttgaaataatggttttctagatggagttcgaaataatggatttctagatggagtaggatggcagagggacaataaatttcaagaccttaagtgtgcatggcacttactgcattggttttgtgaatgtgtgtgttaattttatcatattcaacacacaaagtattataatagacaaaaaaagatagttgtgtagttcttgggtagagaaggaggaaggtaaagggagagacagagagacttgagagggtaggctgcagtcccacatcagtaatgttataacagtcaggaaggaatgttagaaaattattcttttgttctactttagttcttggaaacttccgtacttaatgccagctaaaggctctaattatttgaacgaactaactcttctctactgaatggagaaggcaggtatcaatattgaataaacagttgtgatattgaaaatcagatgcgtcttttagtggagtgagctataagcattttcacctgtctgaa

SEQ ID NO: 30774 - DNA, 1057 bp, Homo sapiens
agtggagtgaaatttaagaatcaatttaatttcttttcagtttttatgtacataaaacctgcttactacaagagacccagtttattattttgtgttggttaacattcataagtatatttcatcataataaggctccgtgaaattagtcattttatcatttgccaataaagacatatatctgaaaataaatgttcctgaacctgagcttgtgcttttttattcctcttaaagtggtgtcaatatcaaaatgccagtcaactccagtggacctgattgggtaactgtgattcccaggagaataaaaggtaaaaaaaagaataagcttgatgatttgttgtttttcttactaactgggttgaggctctgtcgtttcatttatgttgcaaaaacttatatgccatagttacttctgggcacaattgaaaatattaaaagtactgtttgattaaaaaaatcagatcttatgtgcataattctgagttttgctatttattgttattttatttttatttttttgagacagggtcttgctctgttacctaggctggagtgcagtggcgcaatctttactcactgcagccttgatctcctaggctcaattgatcctcccatctcagcctcccgagtagctgggactacaggcacacaccaccacacctggctgatttttgcattttttttttgcagagacaaatttttgccatgttgcccaggatggtcttgaattcttgagctcaagcaatcctcccaccttggcctcccaaagtgctgggattacagacatgtgcacggccgagttttgctatttaagctcatgtaaaagttttcttctcttgccagccctcttctgtttggctcctcaagagtcttttgaacaaccttgtccaatatgatagcaactagtcacttgtagtgattcaaatttaaatcaattaagattaaataaaattcaaaatctagttatttaatcacacatgcccaataactatatgtagacagcattttatgtagaatttatccatcatctcaaaaagttgtgttggacattgctgctcta

SEQ ID NO: 30775 - DNA, 1035 bp, Homo sapiens
ttattgtgatgtccctaggtgtcccagggatggtcagtgggaggaactttggaaagtttacctgtacctgacaagtcttgaggattagccaggaagtggctgtgggtttatgatgtactcttctggttagagggaagatagatttggtaattagtgagccttttgatatatttttagaggaagaaagtaactatgaattagtaggagcagaatatcctggttttgaataggaaaaccatcttgttgtaacaggtatataactggaaagaaaagagaagggcaattgatttatggactatggaaggaacccagcttggcagaacttcattgaatttcactctgtggaccagcagggggcattcaaagaccctaaatcaagggctcataattttttttccttcttttgcttcattctatgcaaacattctgtttctgcttaaactttcaccaactaattttagcattcatcaaggttcatcagatcttgcctgtggcaatgatttctgtggaattctaattgtgacttttaatgtctctcattctttcaacatttattagttggaattcttttgcaaagaagagttgtcccttcttcattttaagtatttatatcagtgtagactcatgaaaatttcattccttggaatgaaggaaaaaaaattataatccaatccaattcaatcattattttatttgcttttatttttgctcaaattgttccagttttggcagttggggaacactttcagtttggcttctttgtgcccttttgtcatcctgtgtgctgtcatccttttgtttgttttgagcacttccttagtttctggcaccacaagatatttgaggcttgtcttgtattttctttgccttagccttagaaggggtttacagtatttctacttttatttcacttatgaatcctatattttgaagttttttccctgtgaaattgtatttatgtattagctaattaatattcttacaaggtaaaactattgttaagattcatatttagattgcctgagattggcagtg

SEQ ID NO: 30776 - DNA, 1032 bp, Homo sapiens
gctttttttttgagacagagttttgctctcccacccaagctggagtgcagtggcatggtggcatgatcatagctcactgtgtcctctaccttctgggctcaagtgatcctcctgccttagcctcatcagtagctgggactactacaggtgcatgccagcatgccaagcttctttgttcttttttgtttctttctttcttttttattttttattgtagagatggggcttgctatgttacccagactggtctcaaactcctggcctcaagggatcttcccaccttggaccccaaagtgctgggatacaggtgtgagccaccatgcctggcttcatatttatttcaggaaagctttattgattatatccttaaatactttaaatatatatttttaaattgtgataaaagatacataaaagttgccatcttatccatttttaagtgtacagttcagtgccactaagtacttttcatattacaacttttgccaccacccatttctagaactttttcatcttccctttgactgaaactgcatatccattaaacaataattctacatttctccctcccccaagtccctggcaaccacccctctactttttgtctctatgaatttgatgactctacataccttatgtaagtggaatcatataatacctatcttcttatgactggtttatttcatgtagcgtaatattttcaaggttcattcatgttgtataaatgtcagaatttccttcctttttaaggccgaataatattccagcgtgtgtgtaggtgtgcataccacactttgtttatccattcatctgtccatggacacttggattgtttcttttggctatcatgaataatgctgctgtgaacatgggtgtacaagtatctgtttaaatccttgctttctttacttttggggatatatcaagtcattctatgtttaattgttttaggaactgccatactattctacacagtggatgcaccatgatgaatttgtttttaattcattttgtgcagtatttggcacagtg

SEQ ID NO: 30777 - DNA, 1051 bp, Homo sapiens
aattcctttttttttttttttttgagacaaggtcttgctctgtcacccaggctggagtgcagttgtatgatcatagcctactgcagccttgacttcttgggctcaagtgatcctcccacttcggcctcccaagtagctgggaccacaggcatgtgccaccatgcccagctaatttttaaattttttattttatgtagagatggggtctcattatattgcccagactggtcttgaacttctgggctcaagcaatacttcctgccatggcctcccaaattgctgggattacaggcgtgagccactgcacccagcccagccctcaattccttttttgaaactctggattattggtctcaagatagtgttacaatgttaattgacaccataaaactaaaaaatgttctattgcataagatacaataaggtaaattattaacatttataaagcctggggaaagatagcgttctcatatttttatttcttctttacagtttcttccagtagctttggattagatttctcccctctatgagttgtcacagaactctctgatgtatcatttcatctttttcagtatctttagatgtagacagtacctctgagcctggagtaaatgaatcctctaatctcgttttttaaagcaaaagatgaggcttcagagtcagttagatgaagatttcaatctcttctttgctttcgatggagcagtgtaactggacaaattctcaaggccccatatttcgtatacagtttttgtgcatcagaaatctcttgagtgtttttgagggttctggttcaaagtgtctcgtaagactatagtcaagatgttggccagagctgcagtcatctgaaggcccgatgtgcagctggagaatctactttcaaagtagctcactcacatggcgggcatattggtgctggctgttggcctcagttgacttttccagacagtgtcctcgtaacatggtggctgtctcccacagcatgagtgttcaaccatatttgattagaacaatggcagcatcctatcattcgacttaatagatcaaa

SEQ ID NO: 30778 - DNA, 1029 bp, Homo sapiens
gtgtgttgggggctggagaggagagagaaagacagagacagagagagagagagaatgaattctgaaggattagaggcatggaatttattgtcacaagttaaaatatggtaaaagaagggttgttggaaaaatgagaatgttcttttgatgttctttttgtttagccccccatttgagagctgaaataaatgaaaccacaggtttaagagattacctaaaatccagtagcaaattaaccacaattcctagtgacatgttttcagtttcatttgcgcctaaactcatagattaaaggttttgacctgtaaagaacctaaaaattaattaactacttgactaaggtcacattgttggccaatccagaactaaaactcatgtcaattgatcattcagcatatataacagctttcaacaaatattaatggagtgctcagtatgtactacacattgtgcttgaggatatggaaataaactaattactatacattcaagatcctatcactcaaagatgttatgttctctcagggaaacagatatcaattaattaactatataactatttgctagaaattttggtaaatgtcacaagaacaatgaacagcattttacaacaaaggggccagatctagtctgggatttaagagaaactcagaaaacgtctagcaggaagtgatatctgagctacgtgctgaggaataatctagcaaaggatgtaggctgaggaaataacatgactgaggatgctaaggtggtaagaaacatggtttctaactcctggaggtgaaaatgtgcctatcccttttcatgaaaactaaagaagttttgaaggttgaggcaaaaaccaaggattccttgaagttgttcaaatactttcctgcaatctccctaattgacttgccagttgtgggatctacaaaaggatgtctttgtcttattgaaatattcacatattagtaaatatttgtatgtatacctccctacttaaaaaataaagtggaaacataccatatacatcattttgtacctttc

SEQ ID NO: 30779 - DNA, 1025 bp, Homo sapiens
agtcagggtaaaatagtaacttcttaatatagcatttaaagtttttcttacatttctcagaacaatttttcttggaattccatgtgctagccatatttctaaatgtgccatgcccttcctgcttcctgagtgggttgttattcacgtctctgtcttattcaagaacaccctttgcttcacaccctctcaatcaccctttctttgcctgaataacgtgtatccctatccttcagaacacagtttatatgccatcacctccagaaattcttccctgatctctctaaggtgcctgtcctctgtagttccagagttcatttcatgtattgcctattcattcttctctctctcccttagtgaatttttatattcctggaggcaggagctgtgtctacttaatcttttttctacccagcgtctactgatacatggtacattttcggtacacacccatgatgattgaataaatgcattagtcaaaattagatttcttagtctactgatacatagaactttctcagtacatacatgacaattgaataaaggcattagtcaaaattacatttcataattatcaatgaagcctattttaaacaacaacatataatgttgtatgaataagaaatatctacattgagaaaattgttcaatttcttttaaaaattgagggaatgacaactctcctaaaatatggtcctaaaaagaatttgccttattctacccatgctatgcaaattgagtgctaaaacaaatggaataaagttagatttcttctgagtgccaatccaagttaacataagtactcttcttgagtttccatattgaacatagtctgttcattaaatgtgagatcatcctgagaattatagaaatttatttaaactaatttattttaaaaactgtaggtttgtgaagatactaaaactactttttctcccacaggataattgtagacatacattcaaaatagaagtaaattaatggtaatattagttcttctatttttaattaatagattaaacctttgg

SEQ ID NO: 30780 - DNA, 1045 bp, Homo sapiens
tgccttttgagattaataaatttttctcttggcatttgttcccttatctaactggcaatgtgagtttaagctttacagataaatattatactattgttttaagttttgatttttgtttattccttataaacattacttttgaaaaataaagtgtatcttctgcaagttgtacacatgtatatatgaagtaaacttagtcaaagtgcttgagttgctttgtaattcaaaattatgtaagtacattatgttatgttgaataacaaaaagtgataactctaagtttaaatgggtgactaaatttaaaaaataatttataccaagtatagagataatagatttaaacatatcaatttaaacttatagctatcacttcttgttatttaacataacataatatattcatgaataggtagtagattccatttttcatgatcaagctttcctcaaataaccctccctccaattttcaataacaacgaaacacaacaaattaaccactcatccagaaattctaaactatttacgtataatgattgtcacatacctttttaaagaacactttgttttccaaatataatttgactaaatgcaaataagaactgaaccaataaaatgaagcttttaaaaaaattgaacttctgtttgataaatggaattatttatttgacaacactaaaaatatgtaaaataatgctttagaatatcattttaaatccactttttaataaaagctttcttaactaattaattcaacaaatatttgttgagtgactaccatgggttagctactgtgttaagttggatgctagggatgcagtgataaagaaaacatggtcctatgaagcttttgttttggtggaatggtggttcttaaacttgcacgtgcctctcaatcacctggagagtttgttaaaacataggttgttgggcttgacatctacagtttcagattcagtatttctgaagtggggttccaaatttgcatttctaacaaggtcccatatgttgctgatgttgccagtcctgggaccacactttgagaaca

SEQ ID NO: 30781 - DNA, 1027 bp, Homo sapiens
gcataatgtatcatttgcatttatataatgattttaccactgtcattttagaatactataaatttagaagagtaatacagtaataataagaatttttaacattttttagtctcaggttcagagatgagtaaaagaccctcaggacatacgtaaagagaagaactctttctagacagaagtgaagaaatactaaacactcaagtgtaagattccctgaagatggaatgatggtagttgtgttggaagtggtggtgggatttgttggttgagggaagagaagagaaactaatctattgttcagagatggggttaagtagaccagggattagatttctactcagttaccagctagtcatttgccgttgagaaagttacatcagtctttggatactttaattcccatctgtaaaatggggaaggtaatacctgttttataaagttagtggcataattaaattttaaaaatgtgtattaaagcattttgtacacaaagtaggcactcaagaatcgaactattactaaagactcttactattaaagaaaagcaaaactgtattataaaggaaaagcaaacaaactctggacaatcagaattataccagaagtgtattttccatggaagttgaacctagattagtgcataacaaggaactgctacaggcattgatcgtttcttagaaattggctactgattccacaaggaacacccacaccttagtagctgatgatccccttttgtgtggaatagaaataaatgtaagtagacaataaataaaaactgaaattatgtactgtctctgtaatttacgtctagtatttgaaagatcaccactgaatcttacgaattttgctgactcctatacacaactacttgggaagtttccttaggggctgagacacaggagcagcacagtagaggagcagtacaaaatgttcaggagaagataatagtcagatagcattgtcacaagaaatacgctgtattttccactaagctcatggttgctctcagtgcggttgtttattc

SEQ ID NO: 30782 - DNA, 1028 bp, Homo sapiens
gacacagcccagatgtggtggctcacacctgtaatccctgcactttgggaagctgaggatctcttgagcccaggagtttgagactgcagtgagttaggattgtgcactgcactctaccctgggccacagagtgagatcttgtttaaaataaataaatgaaggaaggaaggaaggaggaagcaaggagggagagagggaaggaagaaagaagggaggaaggaagaagcagaaataatgttataatactacagacgaaggtatatgaaatcaggatggtaatgacagttgcaaaataggtgaaagcatttgctcttcctgccagagcaagatggctggggggccttagacagtgagtaatcaaaattggaagcagaaactatggcttcctagttgctagtagctagggtaatgagttagagagttaggattaatgatacaggatttgtatttctcactagtcaggatccaaagaactttagaatcattaattgagagtgggaagtgtaaccaggtctcagaagaaattctatttaattgtttaagttatagacctatactgagtgcaaagttccatagtggtgatgacacagagtggactagaatcccagagcagtcattatttgaatggtttgtgcaattgacatatgcctcagtttttgtttttgttttttaaccaataagcatggaaaaaaaaaacctcctatgttagtttcttatttttcatatatagaaagtcatatggaatactcctgctatatggtaagtactccacaaattacagttactaggctacagataaagaaatggtctaattttgaaataagcttatgatcttttggaaagtaagtaccttatattatgggaattgggtatgtgaataatcggggctcaatatgaaattttgaagttctaccattctgaattggaaaattgaagcaagtgttgatctgaaatctaaaatgtcatgtgcactgagatcaggatacacgtattcagagagcagaatgaattcaatctcaaggcagagg

SEQ ID NO: 30783 - DNA, 1106 bp, Homo sapiens
tttagtttcacctagggtatttctaggagttagaacctccatccaagaatgcctgagctaatgtaaattaagatctgactttatgtcttggttctacccatcaatcataatcactcggttattaacagagtatttgccaaaggccaatggcacttcgtgaccaaacaagaagaaaaggaaatatgaaagttcttaatatataacttttcttgtgggtttacattttctttttttttttagttctgaatcaggtaattgattcagtttttcatgtttgcacagtttatttaactatgttaactaaatggtctgaacagaatagttgctaccatggcttaagttactggttcagtgtctatggcaatgcattaaatcaagtttctgctcccagttttataaaaaggaaaattgactagatgagaacattgccaccttattcattatgtatagctcattagttcccttgtcaactttcctttgcttttaatcaattgaaagaaaaagtcttcatggatttttagtaggaaacatatggagctgtaaatcatcagtaatgtgtgaacttatatttacaggtgcaactgaccttgactgtgcatccttcccaacttacttcttataaatcctgtaatcaataagtgaaatagtattccatacccttcataattcaccttccaatgtctgtttttccacacatcatctaagcttctataaaacattcttttcctctgtaatggactccaatcctgtttataagttttataaataagagcttaacatttcttctcaatacttagaaatgacgataaaagaattagttgacaagattggtatcttaagaatttcaactccacttaaatatctaagtggatgctgcattttttcaaagagttaccctgagtggcaatatattcattccaagagtgttgcctttgcacatagatcattgcagctatccctttcaaatagcatttagaatctattttcagatttaaaaaatagtctaacattagttttaaaaaataaccaaaggtatttaatgcacaccactacatattatttctttctatatacatttgtgaatttattgggaagagtaaacagtt

SEQ ID NO: 30784 - DNA, 1024 bp, Homo sapiens
tcacttacctgtagaatctacaggagttgatctcatagaactaaagagcagaatagtggctcccagatctggaacgtgtacaagaggaaggatggggagaaactgagtcagcaggtacaaagtcacagttagataggaagaataggttctggtgttctattgcacagtagaatgacaatggttaacagtattgtatattttaaatagctggaaaagaggattttgaatgttctcgccacaaaaaaaaatgataaatgtgcgaagttatggatatgctaaatgccctgatctgattttcgcacaatgtatacatgtatcacaacatcacactatataccccataaatatatttattattatgtgtctcttaaaaacaaaatttcaaaaatggtaatcttgttatactaaggtttctgaaaatgcaaagagaaatgtgatatatatatgttactcctttaaacttaaagagtaaaaaattaaaatcaatgtatcctaaatactaaaaaaaaattagaatgttgagctaagacgacaagatgaaaaagagtagtacttttagtgcaggagtaaatttcagaattttagagattgtatttttaaaggtaaatcactacctgtcctgttaagaggaagctaagacagatactgtggttctcacctgtaatctcagcactttgagaggccaaggcaagtggatggcttgagcccaggagcttgagaccagcctaggcaacatagggacatgccatctctaccaagaaatacaaattaaaaatttagccaggcctggtggcatgcatctggggtgctaccacccagctactccggagactgaggcaggaggattgcttaagccagggagatcgagctgcagtgagccataatcatgccactgcgctccagcctgggtgacagagcaagaaactgtctcaaattaaaaaggtgcgggaagataagtttgtgtttatacctttgtaaatataattctgaaactgtagcgtatttttgacaagtgctttgcttt

SEQ ID NO: 30785 - DNA, 1026 bp, Homo sapiens
agagtttagttatggggggtaaaatgaaaactttaaaagaaatattttctatttaacaaagacgtacaggtgactcttagttactcaaggtaggacaatctcagtccacaaagagattgtaagtgtgtttgagtcaggagcctagtttttcctttatattttctccttcataattataagcatattaggacaaataacaactttttattgcattgggggctcttgaaataatgtagtatgttttctaccatatagaaaactatattttatcataaaaacagaaaagttttagcaaggagtaatccttcccagaagactggatctgttgattaacagcattttaatgtgaggactctgtctttgcaaaattaactgcagataatattatggtggaattagttgacaagagatgaatgtataagacaacagtttggcagaggaaatattagtatgcatgccatccttgaagaatattttaaaaatataatttacataaagatcttagtggtaggatttaacagattttgacagatgcattcaacggtgtaaccaacaagctagtcaacagatagaacatcttcgtcacccaatctctttccagtcaatctcccctgtacccagcgcatagaaaaccagtgcttccatttttatcatcataaattggctttgtctgaatttcatataaatgaaataatatggtatatacttagatattgtgataatgaaataaatgagaaaaaatagtatcacttagaagttagaagaggcaaggaaagtgttgtcaaaatagaaaaggcttgtgtatattgttcatgagctcaaggaaaaagatctgtggcaagaaagagctaaaagattcaaaagcaggagtagcaacgatgtgattttgaaagagtaaaaacatcttttctgaattgaaggtaacacgatgtgcaaacataaattcgtagtggtgtcagtcaacactgttacatgacctttttcagaaaattctgagctgttaaggagtaggttcagaagaatcag

SEQ ID NO: 30786 - DNA, 1058 bp, Homo sapiens
tagtctattaatgtagaaggttttaagtttatagtttcctcaatgaatgcattttaaaatggtacagataactctatataatatcctccatatgaatttagtttatatgctagcaaaatttaaatgagatttaaaaaatattctggttgctctgaggagaaatcactcaggtaaatctagaaaaataaaacagtaaattgcaatatgcattctgttcatctgcttcagttgtgtacttgcttgaaactaatttgctggctatgttatcacttccctttaaaatggtctttactgagtagagaaaatatatctgtaactttttgttaattggcgcataagttttaaacacagaagacttcatcacgaacacataatttggtagtaaaatttttttagcatcaaatgtaactactttataaatttcatgctcagcaaaacatttgattatttgaataagtttaaggaaaaacacttttttaatgttgtttctgactattggactagtttttaaaactggtagctcatatctgtcatagcttctcccagtttctcaggaactttacacgcttgtgtacaccctttccctctgaactggatcctggcccccatcatgctcttaaatgtcccatttaagataaaaaatagatttccataactttaccttccccaactcttctatcaccttcttcttccttcctcttttacacccaaactttttgtaaatagctatctataactgctgttatgtccccacatcctcattttctatgcatacctttctcctgagggtctaattctatttcaagtttcagccctccacgaaaatgattcctcctaagaccaacaatggcctgtatttctaatccaatgggatttctgagttttcattttcatgccttctctggtgcattccaagctattgatgatttcttctttgaaacaccttgttcctgtaatccaacacagggcacaatactggtttctttcctaatcctgggtttcctttgctgctcactcatctacctacacttccaatgctggaattccttgagcctccg

SEQ ID NO: 30787 - DNA, 1557 bp, Homo sapiens
atattattaattcttaaaactgaatcctccatagaatcctaaaatttgtcatggactataacatatatcacatttaattttctcaaaggtcttgtagggtacataaaggagggactgcccctgattttacattaaattgcttattaggtgagagaatttttgtgggaccagaggaagaaatgcgttatatgtctcagtgctcttggcataattgtgtatgcagagtacatcttattttggtgatgtttttgtatgaaagacttttgagctcattgttatgactcagcaaaactatgggttgtattagttaatctgactcattccttaatggacataattattttacaagggtaaatactgtttctccatcaagactggttaaactattccatgtataaaggtcagctacatcagttttggttagaggtgtggacatttaaaataggtggattaaaataaagaatattccaaagataattgcccaaaatatccaaaccagtatttgcagctcaagtgtatacctgccgtgatggttatctgaacatcattttgtacctttgtttgcatttatttatgttttattttatattaaacatatgcagcccatgtaagtttcaaaacagttaataattctatcttctcaatgaaaaaaaaatctgattcctagagctctaccctttcatttttactcattatggcttctctcttatgaaggattttctgtaatcaaatatttacgtgagacttgtataaaaattattcttcgtagacaaaaaatatagatattggtagaatatggccaaggaaatgttattttgaatgtaatcctgaaacatctgaatatgcttgtgtttaaatgtattattattttaatttttaggaaaagcccgatggctccccagtatttattgccttcagatcctctacaaagaaaagtgtgcagtacgacgatgtaccagaatacaaagacagattgaacctctcagaaaactacactttgtctatcagtaatgcaaggatcagtgatgaaaagagatttgtgtgcatgctagtaactgaggacaacgtgtttgaggcacctacaatagtcaaggtgttcagtaagtagtctgcagcagtgtcactgctaagtgggattgatggccagtaccagaccatgttctttagaaagaagactgaactctctgtagtgtctctatagcaggtatctatataaggggacttaaagagatcttcattctgctcatatatactatcagcaaagaaaacaaagagtatgaaattcaaataggagatttgcagtgaggaactaaaataatattctctgttactttgtcatgtaaaaatgtcgtgagctatgaagtactactactgataactagcaggtgatcttaatttttactgacatgtacaaataagtgttgtgtgatacatacatagatatatgatatatatgtaatcatgtatatcacgcatacatatacatgtatttggctgaaccaaatgaaattgccattttgctgcataataaaaaaatataagcaaattcaaactata

SEQ ID NO: 30788 - DNA, 1031 bp, Homo sapiens
gtcattttctttttttcttctcctctctctcttcctttcccctttctttctttctcattcttctcatttcatcctttcttcctttttactttccttccttccttctttccttccttttatgttttttcttttaatctggatatatagtgtatttccttttaagctgcctcaaatatttttgtcaaattacataaggcataaatataaaaataaaacattggactttttaaaaatgcccttgaaacttgagcaaaagccatgctgtcaataaaataaaagtcatcaatagaaaataaatcagctctcaaattccttaggtccaaaatattaattatttgcccaggaatcagatattggtaacacaaactgtactctttttgtgtgatcaatgaaacacattcccttttttatcttacttgataaaatgctatcttcatcaagaaatacaactgttctcattgtagcgaccaagtataatcatctgacattttgcctctatcaaaagggacagcccgaaggaataagaagctcaaatacttacacactgacggatgtgaggcgcaatgcaacaggagactacaagtgttccctgatagacaaaaaaagcatgattgcttcaacagctatcacagttcactgtaagtcacctacttcttcatcagcagcttcacctcaaaggcttctaatagcttaatgtagctatcttttcaaataaactgcacgtatatctttcttaaataacttggttgcaatagatgcagtagagagagaaagcatcgggataagctcaactttgtccagatttgtactgcaatattgaaaccttgcatggctctgataaccgcaacttttggcagtggtacatctccatcttctttctaagtgtcttcaatttgtggtgtcaatgaacaatattcatatagaccttaaagaaacaactctgtatattttaagaaaacatttccatgttcttgaagtgcaccagctttgcagttgacccagcattatcatttgtgttacagaataaattt

SEQ ID NO: 30789 - DNA, 1089 bp, Homo sapiens
tttaaatagtcaccaattaattattttgaaacaagtatcatcaggccaaaatgttgactaaacctgagattctatttaaaaagaagagtttaattaacttaattattagaattcacaaaagaaacataaacagaaatttcattatggatttactaatctttgtagatattggcatacatgggtcttgatctatgatcttacatagcttttgaacaccagaatgctctatagagcaccacgcctatcctattacagtcatcattactctttcctatgctttttaatccattttgatttctaaacccaccttttttcttctttttccagacagaggaatctccttatattaatggcaggtattatagtaaaattatcatttcccctgaagagaatgttacattaacttgcacagcagaaaaccaactggagagaacagtaaactccttgaatgtctctgctagtgagtattttatttctggcattacaaaagtaagaaaatttgaagttattcttcattagtttaaaatcttcaattccatcttcctgtactgcattatggtaagttttatttatttattttgcatttggtatcatcatcataaggttattttttcttttttcctgtccattcttgtactatccttgtcttgacagttaaatcatttcatgttttatgggtcagaggccttatcctgtacaggaatagttcccaaaagcaacagagaataaaaaataagtttctcttatttaattcatgttttatgttcagagtggagataattcaaagatcatcttaaaacatttttgtaacagttttaaatttggtaaatttgtaattccctttgatctattattttgccttctaattctttgtggtatttatcctacccttatgttgtactagaatgccacaagcttaaagtcatttagtaaactagcaagagtgattttagaattcatgaatctagtttacaaaactgttccttttgtcatatcatatttaaactatagccgaaaatcagataagtgaaactatctcagagaatgtggaaaaatctgtcgatgttgaaatcagggtaatacatacat

SEQ ID NO: 30790 - DNA, 1051 bp, Homo sapiens
tcaataatctggttgttgttgtattcagtaaaacagaatattcataaagatagacatagggtgttagctcaactgggatacatgatagggaacaccagaagggaacgcgccttcatgaaatgtccttaagaaaatttttttggagaaaattcgcttagaacaaaaatttacactatcaaatgagttacttcccagaaagtggagagaaaaataacctagctaaaaacatgatgcacaaagtgttgtatagtctgttttcaaaataattgatttttttttctcttagcatacatttactggaaccccatcaccaagctaatttcagtacaatgtgctccattatcagtcaaggctcacagatatggaaatttttgcctagcggtttgctgtaaaacatttgcttttcaaagacacattaattcaaatcttaaaattaaatataaaagttgaacatgtatgtgtcaatatgatgaagtttatttaattctcttacaggactgcatcaaaacatgtaaacaaggacctcggtaatatggaagaaaacaaaaagttagaagaaaacaatcacaaaactgaagcctaagagagaaactgtcctagttgtccaggtgagtagtctgtacgaggttcatagaaataattccctagcaagtaggaaacatccttaaagatgaagtcctttatgttaagatgctccataattacagctttcaaaacaggaagagaggggttttttttctttttattatgctttaagttctcagatacatgtgcagaacgtgaaggtatgttacgctggtataaacgtgccatggtagtttgcacgcatcaacccatcatctacattaggtatttctcctaatgcgtccctcccctagccccccaccccctgacaggccccattgtgtggtggtcccttccctatgtccatgtgttctcactgctcaactcccacttatgagtgaaaacatgcaatgttgagttttctgttcttgcgttagtttgctgagaatgatggtttccagcttcatccatgtccttacaaaggaca

SEQ ID NO: 30791 - DNA, 1046 bp, Homo sapiens
ataaaaggccctcctgtaaagtaatttactaaattacttttagtacaaagtatctgttgatgttaaaaaattattgctttggaagcttatctaaattatttttttttcatttcagagataaaaatcatatagaccaattgaagcatgaacgtggattgtatttaagacataaacaaagacattgacagcaattcatggttcaagtattaagcagttcattctaccaagctgtcacaggttttcagagaattatctcaagtaaaacaaatgaaatttaattacaaacaataagaacaagttttggcagccatgataataggtcatatgttgtgtttggttcaattttttttccgtaaatgtctgcactgaggatttctttttggtttgccttttatgtaaattttttacgtagctatttttatacactgtaagctttgttctgggagttgctgttaatctgatgtataatgtaatgtttttatttcaattgtttatatggataatctgagcaggtacatttctgattctgattgctatcagcaatgccccaaactttctcataagcacctaaaacccaaaggtggcagcttgtgaagattggggacactcatattgccctaattaaaaactgtgatttttatcacaagggaggggaggccgagagtcagactgatagacaccataggagccgactctttgatatgccaccagcgaactctcagaaataaatcacagatgcatatagacacacatacataatggtactcccaaactgacaattttacctattctgaaaaagacataaaacagaatttggtagcacttacctctacagacacctgctaataaattattttctgtcaaaagaaaaaacacaagcatgtgtgagagacagtttggaaaaatcatggtcaacattcccattttcatagatcacaatgtaaatcactataattacaaattggtgttaaatcctttgggttatccactgccttaaaattatacctatttcatgtttaaaaagatatcaatcagaattggagttt

SEQ ID NO: 30792 - DNA, 1103 bp, Homo sapiens
agtagaccagatatgggctacttgtgactagacttttaaactttgctctttcaagcagaagcctggtttctgggagaacactgcacagcgatttctttcccaggatttacacaactttaaagggaagataaatgaacatcagatttctaggtatagaactatgttattgaaaggaaaaggaaaactggtgtttgtttcttagactcatgaaataaaaaattatgaaggcaatgaaaaataaattgaaaattaaagtcagatgagaataggaataatactttgccacttctgcattatttagaaacatacgttattgtacatttgtaaaccatttactgtctgggcaatagtgactccgtttaataaaagcttccgtagtgcattggtatggattaaatgcataaaatattcttagactcgatgctgtataaaatattatgggaaaaaaagaaaatacgttattttgcctctaaacttttattgaagttttatttggcaggaaaaaaaattgaatcttggtcaacatttaaaccaaagtaaaaggggaaaaaccaaagttatttgttttgcatggctaagccattctgttatctctgtaaatactgtgatttcttttttattttctctttagaattttgttaaagaaattctaaaatttttaaacacctgctctccacaataaatcacaaacactaaaataaaattacttccatataaatattattttctcttttggtgtgggagatcaaaggtttaaagtctaacttctaagatatatttgcagaaagaagcaacatgacaatagagagagttatgctacaattatttcttggtttccacttgcaatggttaattaagtccaaaaacagctgtcagaacctcgagagcagaacatgagaaactcagagctctggaccgaaagcagaaagtttgccgggaaaaaaaaagacaacattattaccatcgattcagtgcctggataaagaggaaagcttacttgtttaatggcagccacatgcacgaagatgctaagaagaaaaagaattccaaatcctcaacttttgaggtttcggctctccaatttaactctttggcaacaggaa

SEQ ID NO: 30793 - DNA, 1032 bp, Homo sapiens
taagcatgctattgttcatgtacacagactggtataataattgtttaaaatatttgatatctaggttacttgattccaatacttacgttaatcagggctgatcatagtatactttatagcacaaatcaaaggtcccggaggtttgtcaatgtcttcactgttcataatgtgttcttactcccagagttattattgactatatccttatacttgtgttgtgtatcatacctaaaagagaattttgcttcgctatatgtccagaggatttagatttcgaaagagacatcacaggaaaaaaagtgtccttgaggcttgatgaaaatgatattttcagatcctattaatacataatacaaaagaaaaactgtaaggtgtggactctaagatctatatctctcaattaaagaaatataattcatccgtgaatcactgaaaggatggtcttagcaggacttcaagctgaggatccttaggaacttaggaattctccaaaagcatagattttgagggtggagacagcttcaaattaagaccatcagatcatggaaacaactgtgaatagtagacaacttccattcaagatctatgaagaagatccagatgaccagaaccagtgattcccatgctttatctgcaatatgtcattctttatttccctagctattttctctcctctttgttaaagtttctgattgctaacagaaagttattatttcttaaacataatatctgtacggttcccatccttaataatatttcggcatgtttacatacttcttggcctgattccaatacctgccagcagttttattgcaatttggctaaagaatacaatcaaactgacctttggatttgtactcatttttatctgggtgccatccagctttatttgataccttttccttgttataaataagttggtttccaccaatcaacttatttagatgacaaaaaccgtaacagaccagagagtcaagaaacctaaagtctctgctatgtcaaacctataaatgaggtgtttcttcttctgta

SEQ ID NO: 30794 - DNA, 1044 bp, Homo sapiens
ctctctcaagttctctttcttgagtaacctgtggtgtttgtaacagttacttttggggtggggaaaggtgggattggcagtgtggtaaatctagcgtttagtgcactaatttgattcaaaattgatcataatttcttttaaaacttacatgtttggagaaattaggaacaattcggtagcctgtaaatttaataaacaaagactttgagatctgttgttaagtgcctttttcagatatatgactcccaagtggaaaaatctgcaaaatatgtgtgggacagtaagtgtgtggaaaatttgtgagaggtaacagtgtgggtaagaactgagggtttacagagcatttgaaagcagcacagtgagcctaatctgcagaaaaccaccttgtaagtttgcccctccattgtaaaggaacaccccaggtactcttgagttgttgatgtttggaaactagtactaaattgtgtaaatcagctgtagtgctttgtaatattaccatagtgaatttagagattgtattttgtgaatgaaaatgaacttgaacttacttttctgtgaaagaaaatttagagacctcatctgtggtgtttcctggattgctgacataatgtgtacattaacaaaattattgtctttgtattaagaatataaaactgttgtcttagtattgagttagaggactagacctttctggtagtgtccatttggtaacaaaatatactttcatgttattgaagactttagataatctatgtaagttttgcattgaacatttagaaaatctagagaactttagataatctgtatatgttttgcatcgaacattttctatggaatataaatattgcattactgctgataattaggtggtttgttcactaagagctcagaatacatcacatacatagcaggccaatcggagtgtcaaaatgagaaggttctataagttgaatttagtgcacactaaaatacatggatttcattgtctttgagtttttttaaagcttgtttgaaaagtttcattttgggcaagagtattcaaaa

SEQ ID NO: 30795 - DNA, 1941 bp, Homo sapiens
aggtagtttatgtattcactcctctttttggaatttttttttactgagacttcctttttaaaatgatggttaaaaattcttattttatggtcataaaataaatctgtcatgcatatacttgagcatcatcagagttggggagaacaaacatttcctccctgagaagcatctttctcctttagtggctggccacatgaaagcatgcctcgttggctctcttatacttgttattgcaacttagactttacattgtgatttcactgacgttgctttgtttgctctgtataaccatgctcttaggtaggtgtccttattcccattttacagatgaaggaacaggctcaaagttgttaagtgtcttgacctaggatattgagtttgcagtggctcccctgcgaccagcactcatatattctggccatttgtctagagagcagtgcaaaatttatctttttgagctaaaatttttttttcttgtacttaatttcaacctgataagttattataaatatttggagtagcagtggtgaagaaaatccggtgctaattttgttcatgccctgtgagctacaaaatatcagttaaggcccatgtagggccttaaattttgggtgtacttaaatttatttgtgcatttaaataagtgtactaaaattatgtagaaagactgtccatttgacttaacttttttcacaacttgtgatggcaaattaaatgtatagtgaccacatactgacaaacaatgaacttttaggtgtatgttgggatttgtaagtgagatttggattatatttagattatgttaatcccccccccatgagacatatttctgaagttacaatgaaaattaattagagaatatgatttgatattcagatacctgagctactcctatttctgtaacatgttcatattgtaacttgatattaactgatgtttttaaagaagtataagcaaattctataattttttttttttttaagagatggagtctggctctgttacccaggctagagtgcatcggtgtgattatagctcaccacagcctcaaactcctgggctcaagtgatccttctgcctcagcctcccaagcagttgggctacaggtgtttgtcaccacgactggatagtttttctttttaaacttaaaatgctttttagtttggcactccgtagtaaaggaggttccagaagccagtaagagaacctctgccaactatgaaagagaagatatttctatctacaagttatttcaggatcaattattcaattaatattttatataatagaaaggttttatttgttaggactttatctttaagttccccaagagtaaaaaggtctagtcattattatactgtgggagaatgatagaagattgattacattagaactccagaacttctatttatttaaaagatttaagatttgacacaaaagcggtttattttagaatgtttatttctatagattgtcattacttcaactcagttttcataatttgtatttgagtatactaactttggaacatagtgtaatattaatggctacagaagaggtttgttgaagaattgtaatttgaaagaacagcatatgtttattgaagagagcatatagagatggaagtggttagaaactatgaactttctttagtttggcttttcatgtaaagtggaatatgaaaacaaaagtcctaaagacagttcagcagagttcctcttcaccctgtttttaagcagtgatgtaaaccatgaatttagtgtttccaccctcttttataccatgcaacaacctgtgaagtaggaactattatctccactttgaatgaggtactgagtttcagaggctcagcaacttgcccaaggtcattcttctggtaaatggtgttgctggcattccatcccagttcattctgtctactggaggccatatttataatca

SEQ ID NO: 30796 - DNA, 1219 bp, Homo sapiens
tcattcctgcctataaattatttgcaattttgttttacctttactactgtcataaatctaggaaattttagtttgggcaacttaaggaccatagtttttatagcccattgtcagaacactagttatttacttactttttgtgacataaaacccagattttttagattccatgatacacagaaccatatgattaaatcagttgttattatgtgcttttagtgacaaatctttttagggctacatcatcttatcttacatgagacagataatttctgtaagaaacttgtatcagaaacatgtagcctgtcgtgaatttttattactttctttgttgtttattgaaagggttgggacttctgagttaaataatttaaaaagttacattttactgttataaaaatccatgttaatccaagaagaaaatttctgttaaatgcctttttgatttaaagtgtgtgaattagatatttgatcatgatttgggacctgaaaaactatcttatttctttataaatgtaatatagttactgtatctgaaagtaatatatggttcctttatcctctctactactgctgtattttcagaaggagaagcaattatattgatttgctgagtaacttcttactcaaccagtttctgttatagtatattaacataactgttctgttagtttatttattctgacttgtgggcatgaatattttaggtaaactttataatgttcaagatagtttgaaagattaatcaatgcttatttccttgctttacaaatgtataagagctattcaagtaacagttatctaaacaagttgttttataatgaggtagtataagagaagtatttccctagacaacatgaaataaagctcaaacatcctcaattttttttgtttgtgaatatttatagctttgaatctcagctgtagtcgggatgatggcataaattgtaattatactgcagaactgaaagaaaaatttgaaagaactgataatggctctaaaacagtatctttaataagctaatggtattggtgaccattcagtaagtatctgctcagtcaatgaaatcattgaacttcatcttatttgtgtaagtgatgattgtgccctccatgacttcacagtacctagttcaatacctactaagtaaatgagcattcatgaatgaatgaaatgtaaggctgaattttgaattttgcaagcttttttgacatacga

SEQ ID NO: 30797 - DNA, 1090 bp, Homo sapiens
accaagagtcaactgttgactcttggataaagtgattagtcactctggagaggtacagacaatatggtcagatgagggatcggtaacttttgacgctattgttggggaagtcctcatggaaacttgaaatgggccttggagttgaatgggatttgggcacatccccctgagcgtggggagatcaccttatttggctttgtatttttagcaggtggtacagcataggttggaaataatttttttagatgaataaatgaggggaaaggacagttttggtgaggggtaaaccgcaagcaatggcatgccagagattgggaagtacaacagagtttaggggctccagcagtgattcagttcagctgaagaaagagtaactacaagggaaatgtatcttctaagtaagatcagggtcagatcctggggaggtcatagttgccaggccaaccatgtaggatctaaagcaggcttggtagccaacactggtgacattggagcagggtatgggtggcaggagcctcagatgaggagactattacagcatcagagctggaagtaattactcatctagggtggccatagggactatagagacctggatagaggtaagtgatattttagaggcggaattgacagcacactaaagtaagtacttcaactgtagctcagtggaatgattttgaatgcctccttttgctataggaactctttttgagaaaatgaaaacctcaaatcaaatttcctggaacaacttttttggagagtttagcgctatctaagtcattctcctaggagctcttataaaacattatgaaggcaaaaaaaatgttaaataaagttattatatcaacaggtaatttacagcacagttcaatatttatacactgtaaatatatttttatagttcttttggaccctttgtatattctgtgttatacatactcacatacaaacacacacataccaggaaaggagagaggaaatacagaagtagccacgtgttagttaattatttgatgctgcatcttcgattactaatgagcccagtgacaacactttgttgatttttatgtgaaaattctttatgatcatc

SEQ ID NO: 30798 - DNA, 1048 bp, Homo sapiens
atagttctttagaggctgagtcattgctttagacaaatgcagaatttatttaatgtgcttttttttaatatattggtaattgtctatataagtaataaaaatcttggaatatctcattttatgtagtaattcatttagttttgacaggttaactgaatggaatagaattttaaacaaattaatatgtaaaatatatttgtgagtatatttttaagaaacattaatgataaaataacaagtgaaggagacttttttaattttggaaactgcttcttccttaagcaggcttacaaaactgttttttttacacttcatattttagaatgaaaataaagctctaaaccaggaaggatactattcacatttatatttctgctgaagtggaaatggatgaagaagaatcaggttacatgtgtaacctgaaaagaaatgaattaacgtgcttcagacttgtacaaaatattttaatcaaacagaaaataactttcaaagtactgatatttgagatgatctatttttaccaaatgaactgcagagtataagccagtggtcttctttttcccctccaaaatatgggggaaatttttatgtgtggtgttatgcaaatacttaggaaatatccaaactgacatctccttttgacctggaagcctgagaatttttattttattgttaggttctttggttcagaagttgtgttaggctcacagctttgcctcccatgtgggaggagtgctcagggtcagcgatttatgtgtgtggagggagggaaggggtggaggttgttaatggagggatctcttccaaacatctcctttgcccagtcagggcctgattgtttgtggcctcagaggccctcctcttccctgccttcttctcaggatccatggatcttgttcacatacccctgtgaagctccttgcagattttaggtccatctcacagagccagactgaaggcagtacccgctacttcctaccacaaggagtgtacaaatatctctatacaaagcctgcatttctttttattaaactcatattttctggtc

SEQ ID NO: 30799 - DNA, 1050 bp, Homo sapiens
agccaggatggttttgatctcctgaccttgtgatcccctcggcctcccaaagtgctgggattacaggcatgagccactgcgcccgaccattttctgctcttttcttatgttgcctcttctccaatttctctattctcacctcttggaattgccaacagatggaaggtagatctgtcctctatgtctcctaacttttctttttttaaccatttatttctttatttctttcttttgcattctggggaaatccttggcccaggttccactcataattctttcttcaacgatattctttcagtggtgtcctaacagtctgatcagtcttatagttcaataaataaatttttaatttccagcttcccaaagtttcatttccaggactcaaggttcattttagatacatccaaatgttttgaagtctatgtaaaatatgtgtgtgatacaagtatagattccaacaatcacacagagctctgttcagatcttgtttctctgccattaactgtgttgtggctggttacctgattcctctgagcttcaattttctagcaaaattgtggtaaaaatgttatactgcctatattgttgtagggatgaaatcccataattgtaataatattacctaacttagctaactacgtgccaggaactgtactaggttattttattcacgtgttatttcatttaattgagcaattccttcataacaatcttaagaatatatccttgatagtttcttgatatcctacttccttgaaagtaactgaacttgttgaaattaattacaagagtgagtctttgatcactagttctcatattgatatctcaaacttaccacgttaacagtattttatggaggtgtgtttggcatattcttgactgtctttcttatttagagtaattccttttttattttttatttttttaatttttttttatttttatgacaacaaggctgtttatttcacctgggtgcaggcgggctgagtccgaaaagagccagtaaagggagataggggtggggccgttttataggatttgggtaggtag

SEQ ID NO: 30800 - DNA, 1029 bp, Homo sapiens
tgactaggaaagctaatttttaaaaatatactgatttacctctattgttgtattaaaaggctcattttaaagaatgcaaaacatccaggaaaattccatgaagagatattgttaagtgagccaccctctttgttaattttgtcttcaaaagaagtctgtgcatttaatttgctaccggtgtacccaatatatgtgtttcttggcttatttaaaaattttaagtaaatttccaactaatataatattttaaatgttatcccagtttagtaataaattaaccaagtgaaaacaatgaaaatattatattcaatcttacatcctcattattggaatgagatcgtatttacaataattaacctacatcaatgcaactatttttcagtgtttcaaagttatgattctttaatgtgtacgtagaataaatctaaacaacaattaaaaagaatcaaacaagctatgtctaatggagattaagaagcattctccgtgaagatttagtatatcatctggtatctctttgtataaactcaaaattttttaggtacaaataataaataaaatgtttgttggctgggtgcggtggctcacgtctgtaatcccagcactttgggaggccgatgcgggtggatcacaaggtcaggagtttgagaccagcctggccaatacggtgaaacaccgtctctactaaaaatacaaaaattagccgggcttggcgggcatctgtagtcccagctgctcgggaggctgaggcagcagaatcgcttgaacccaggaggcccggaggttgcagtgagctgatgagatcacgccattgcattccagcctgggtggcagagtgagactccgtctcaaaacaaacaaacaaacaaacaaacagtgtttgttaacatgttatgtgggctttaaaaatgaaactaaatatagattaaacatagttacagttttgttaaatattttcagtacattttaaaggaaataaacagctttggtttcctgtgacagtcctaatttaaaatctctctctctttt

SEQ ID NO: 30801 - DNA, 1036 bp, Homo sapiens
tggtctgtactatatatgaaagcaagaacaattaaaaagtctttaaattgttcaattttctataattccaatgctcctaagaagctcccctccccgctgccattatggggctcttacctaactcaatataccaaaaatactatcctatttctttatctgtggttctttgtttatcttttttggaaaatgttttatcaaaatttataatttctaatgatgctgtattggcataaccacttgaaaaaataagagaaatagtcctagaataggaaacttgtgatatatatgactctctggagaactaaagtaaaaattaaactaaaaagtgaacttattttaattatgttattaaaaacacagtaggcggatgtaagaaaacaagctatttggttatatttatttcagaaaaaaggtcagtgacccattaactaagaggtttcacaaacttcagttttcacttggctattactcttggttagggtcacattataatttttggatatttttgtgaaagaacgatacaaaattgagttttaaatatgttttctgatgttctttcatataactgtattgttaaatattttcatttaatgtttagtattctcattttaagaaaacccaatgcaaaatctgaagttaataaaaaaaatagacggtgattatttggctaagataattcacccacatcattctcttaacagtaatctgatattctaaagaggttatttatatattattaactaacttgtataccagagaactgtggctgagtgcagagaaatttaaaattaagaaatttaagacttttgaatattaatcaagaatgaacttgtatgcagtttgttgtacatacgtattctggtactacaactatatattcatttcttgagagatattcgtaattgttttttttagatctggatttctgaaacttgagtcaagtaatggacatatcaggggtcacctagtttttaatgtgaattaaacaattttaatgtttcatttagatgataaatataaaagaaataatgtcttc

SEQ ID NO: 30802 - DNA, 1590 bp, Homo sapiens
gactgtggcttcatattagagattaaccccatcaagaagttaacagtctcccagtttagtatgactttcatatttgagaaaacttgtaagcttgtctgtttacaaaatgtaatctacttactgttcctatatttttcttaatgttttgggttaaaaatggtgtattaaacagctgggtttagtggtgcgcacgtgtggttccagctactcaggcgggaggattgacacttgagcctggggtgtgaaggttgcagtgagccgagattgcaccagtgcactccagtctaggtgatagagcgagaccctgtctcaaaaaaaaaaaaaaaaaaaaaaaggtgtattaagatgactgtatgttctttgtgagattactgattttaaaaaaatcttataaaactgatttttaatataatagcagccttagtattgaacagaatgctcaatcttaaacgtctattggagtccagtaatacaaggaaattttagggaaatgtgaaacatttaaaaatagatctttgcatagaacctaaagtttaaatttaaaatgtgtttatttattgatattgctgtgtttaccagtatgtatgagctcatgttttattgataaaaggggcatgtgcaatttttaggaatgccgaggtaactttttcaaatttttcaaataagtatgtttagattcatcaaatagtaattgaatttggggagtttcaggaatattataataggtgatccttgatcctgagcctcccacctccacacatgtcttaagggccaacaatttctgttaagttgtacagcttatcttatggaagagtggtttttttaagatcaaggtcaaatgctcgtttagcactttgtttttcaaagatctacttgatctttctatacagaagtaaagaattatgattttttaaggttttcaaaattgtctctaagtatatataattttaactttgtacttctaaaaagctaattatctgatcttaaagtcttactggtgttctgctagatctgttaacaccctcgttgggagttcaaggattgtctgcatttggcctgtggcagttctaataacaggagtcaattaatcaaccaatataaaagtgtttatctgacactgaccttgtgctaggcactttgctagatattatgggataaacaaagccctttgaggtagttaataaattttaagtgatcatgaccctaaggcgtatcttctgtttgaaaactgaacactggctgtttgttcaccaaaatagatactgaaagatcaacccaagggaggcttcctttttattttcccaaccaagtgccatgccagagtaatcactaatccactaaatcctaatcaattttggtgatctgagattattactgcctaaggagataggcttctagagtaagttcagtgtcaatggaaaccttgaaggattcagaaaacagacttgaaaactttcaaatagtttttcttccaacatttattgagtgcaacacagcatactaggtgctggggttgtaaagatgaacaagacatgggtcttctatgggatcgtagagggtaatggggaaaccagatctatagtcacagat

SEQ ID NO: 30803 - DNA, 1202 bp, Homo sapiens
atgcaccaccatgcccagctaattttttttttttgtatttttagtagagacaaggctttaccaggttggccaggctggtctcaaactcttgacctcagataatctgccagccttggcctcccaaagtgctgggattacaggcgtgagctaccacgcctggccttagaaatgcttttacatatttattagtacttttagtttttgaaagtgtctaggtgtgtctacttgtaatctatttgaagttaatttttataaaggaaatatgattttttaatttagggttgttggaattttcttttattgcttttatgtcagatgtttggaataaccttaagagaagggttcacacaataaaaatatgtgattacaaaaagagctcacctgttatcaaagtagttatctgtatagtggaattttaactgaaagggaatgtcccctggcaggagaaaaatggtaaaatcccttagcaagtcaattataaggcatgttaattctacaaagatattaaccttatgatcttcaattctggggtgcattctctaccctgcaaggtcagctaaaaatatgctgaaaagcaaattttataagataatgaaataaaaatgtgaagctaagtctgtaagatacaaattagaagataaaatcccttgttaaatgattctgacaaatccttttgctcttttacaattagtagtctgttctttcgggatgttcataaaatactgattaaaaaacaacgacaaccaaaagtaaaacaaaactgatgtacatagagaagccttgtagttgaatgacttacccatctgataatttgtactgtggagattatttttcatatttgtacagttaatgagtataactgtagctattgttagctctgttcttaatatataacatgggaaaactttattatataagttactataataatttttaatagatttgaatgtttctaagtgctttgaatttcaaaaaacagttatatgaaaatagataataatgctatttattttgaatttcatatgttaacagtttcaatttagtgcaataaaatgagcataagctaaatatataatagttgaattatattattattaaatcttttgattttatgaaaagttctgtactatctttaaattagaaactagcatatgatcaattcttagtttcttaaacagtttgatattaatactgatattaat

SEQ ID NO: 30804 - DNA, 1073 bp, Homo sapiens
tttcacgtttggatatcagagttggatatggtttgaatcccagctgtactagcttttaaacgttgggcaatctacttcacaatgctgaatctcaatttccacatgtgtaaactaacaccggaaatatttacctcaaagagtcctgagtacgtgctaggtacttgctactcgcggatacttaaaaatacctttaaaattgtttgttaaataaatatgttatttctgagagctttttaaaagtaagaatgctatatatacaagaatgtttgtatatacagaaaatgctatagatacaagaatatttattgtgcatggatattaatgaccctttgtaccttctgctaataaaacattagaaaactgtgtttcacagtaataacaggtataatgtcacaatactgaattaaatattagaaatggtgaattagactctctgtatgtccctatggtctgcaagctgaatatgtgcctttaaacaaaaaattttattaacttgagaaataagtttgtggctatagtcagcaccctattatgctaccttctctaccattgtctgtgtttataattctgcagtcatatctttagaatcatgatgaatctaaactatgataattttttttgctaccctacacaaaaatatttatactatgtagataaggtacaaagaataacattaacacgaataactgagaacctaccactagtttaagaatagaacattaccagtttctttgtagcccacagtgtgccccacccagattccattgcctctctttaccccctcatcacaatccttaatgttgagtttattacttctgtgtttttcttggtcgtttttctcatacttatgtaccccctacattaaattttgcctgtttttaaattttatataaataatacatactacatgttttcttctgcaacaactatttttcctgctcaacatcgtatttgactcattcctgcttgtctttgtaattcatttattgtcatatatgtataatcttttattgtatgaaaataccatagtttatttactttcttttaatggctatttagctgtttttctttct

SEQ ID NO: 30805 - DNA, 1985 bp, Homo sapiens
aaatgaaactgatgtcttaattttcaagaataaaaatgagatttgttaaaggatataaaatgacagctaaatagcaggaataagttctagtgtaatactgctgttgaatgactgtagttaataataatatatagtttcaaatagctagaaggaagatattgaatgttcccagcagggagaagtgataaatgtttaggacaatggatatgcaataattaccctgatctgattactatacatcgtatgtattgaaatatcaacaccataaatatgtatagctgttatatgtcaattaaaaaataaaataaaaatttcaaaaagaataaaaattatggaataaacaggaatgtttaggaaagaagagtttaggttactttattcattgaaagctagaaaactttttagtttcatatttgtgttacaaatataaaaatgttgaatacacttgactggattaataagaaatagtagagggaagcttattttttaatgagaggatcactttaatgaataataattattttacagatgtttgaagaagtaggtactgacacccaattaattgcccactaccaacaccaacaacatctctacctcggcactccctgcacaagacattctggaaggctggtgtttgtttttaattgatgctagctttttataatttgttgttttttcctaaaaacaattttaaaaaatatatggctagttgaggaatgtctgttagttgtgttctgagatttacgtagatcagattgctgttttatccttaaacatgttaaatggatccttcctgttgagcattttaaaaaaattttttggagtattctgatttttttttttttcattgtacaacctgcgcttccttcagtgaaaatagttttgggttcacaaacaagaagcagctgtcttaaatatgttcattgactcagccgagtgtctgcagttgcccaacaaaagttatttgattttgggtagtgcaaagaaatcaaaattagcattcagattatattttggctgctgtaataagagcttctgtctgtaacttgaagttctgaaatccacatgtagtgtatttttgtcttaaaatttgtagagatttgagcctaaacaccactgagactattaagagaacttaactgatagagctcagtatttcttttgaattatttttctgatcctcagaggaaaacattgagtcttcatttcaagattgacctaacaagggctacatctcaatgttattcacaagctgagaaaaaaaagtcataattttgtgtgtattatttggtgaaattaagtgaatgctttagttcactgaagaaagtcaattcgaagaatgacatggacaaggccagaaacatacagagaaacatatctcaaaaagacttttcagaattgtaaaattgagcgctgcagaataaaacaattcacacattttattagatccgtatagcactgcaaactcattgcctccttgagagaccattgctgtaaatatgtagggagcaaaagagtgttgatgagtctctgacataactaaatattcataatggaatagcatgctacaagaataatgaccacacgaatgcagcctagttttacgattctgttttctcagatcctttttgaaaaatcttacatcttcaaagtctctacttgtgattctttatctcagacaactacagaaagatcaacatggtttagaaaagtcctaaacaccaaattttaatcgttgataaaatgaatttttgaagttttgatatccacatgtagtgtattttatttgaaacttggaggcaaattggaaaaggatatcttctgtttcataactttctaatgaggcataatcttatgtctggactgttaaattgagaattagagcagatgtattagagtcacttgtatgagaccttaagtatctcttcaccttagctccccaagtgtaaaataattatgttaattatataactgttagtgcaggt

SEQ ID NO: 30806 - DNA, 1051 bp, Homo sapiens
atggcaaggacggattagaaaagaaggatggtgaacaaggaaaaggactatgggcaggaggaatggacttcagggaacagtcctagaactcattcattcattcatttgcctgcagtgcgcccggctctgtgtcaagccctggagacacaccatggtgaacacgatgcagcccctgttctctgtcacagttgagtgtgatataaagaaggaaacaggtcatttcagtgtagcctattaagtgtagggtgctgtggagacacctctctcagacttgaaaggaccagaagtggcgtgaggtgagatccaagctaagccccgaagcagggataagagttccaccggaaggaaacagcagccaggttccaggaggtgggagtgcatggcaagctccgggtgatggcatgtggctcaatatgggtagaactttgaaagtgagaatgagcaaagaaacatcagctgtaaaggcaagctggactaggtcaggaagagtcttacatgtttatgtgaaggaaggaatttggaatttttcattaatacattgagggactattaaagagactccctttaggagaaggacatgagcagatatttgttgaaaattaaagtcagcaaagctataggtaagaagatcagacagctgaaccaaccttgtggggctggagaggagtagactctttgtaagaggtagaagggacagatttttgagagattagatgtcagggtgaacagctgattgcagtgatttcagtttatgaagagaaacttgcaaagaaagataggctttccagatgcttatgtgaagggaagggatgtctagtttctattcaccaggctctgacataactccacaagggtatggtggaggcagaggcctggcccagacaagatattttctcgagaggatagaaattaaagacatgtgagtcatagtgaggtagagaagccagaggtgatagacatgttggaacaatttgtaagttctttctaggaaactaatcctgaggtttagaagcaagaatattaggaaccaggtcacttagtgaagcacatc

SEQ ID NO: 30807 - DNA, 1023 bp, Homo sapiens
ggactttcagagaaaatgggagacttttaaggtgagaaggagaaaggcttcaaatttggagtatttgctgttttctgtggcagcaggaccccttgaaagactgaaagcaaggtgtgatttgaaagtcccagaactctttagaaagaatgaaagcaggtgggtccaatttgtgtggaagtactagagtttccactatgttacagtgtctttgggctggtttttcctctcctccgtagactctggagaaggccgtgcggttttgtagtcttaattggacccagaagaggccctatttgtggttagaatatgtggttgtctagcagtggtatttaatgggcctcccatactctcctgtttcactgggcgtgaattttaatgaccaggatttgagtggaatttcattggacttttaggaaacagtttaaaataccaccgtgacacagttcagtgtatactaatgttttaatgattaaagtgtaactgattgcctaaattgtaagacaagacaatagatgagaggatcttattcacaaaatttatgacggtgccaaggcactgtttctgactgtgtatcactcagacaaaggaaaggaaactctccatctttctttttcagtttctgaggctgcagattatatcatctgggcagcatatggatcactatcaaatgggagacatctatgctcccttttgaatgacatcttaggatgagtttaagtgagcagatgctgcctgttaatcccatgcttcccagtctaaaaagcttgttgagtaaagggtggatttgccaacagtgaacgagaatcttctagacactgtgctgggtattacatgtgttctcacagtagagctattattatttagttttaacatgaggaaagatcagcacaagtattaactttccaacaggtagtttgtggtagaggcaggattctaaaggaagcctatcaggctccagtgtcctttttttttcttcttcttttaataaatatggcatttgctttgtactctttccttctaaaa

SEQ ID NO: 30808 - DNA, 1041 bp, Homo sapiens
aaaactctatacaaatgttggttttagggttatttctgataagcagctttatgttggtttctgtttcatacttctctatctaaatgattattatttttattatgaactgttaatacattgaagggctactaaaatgcaaaatcagtctttgaaacacaaaaatgaacaaaactaaaaatatcatttgcccaatttggccaatactgtccagtgttattaatagcctctagcaacatagatgttaattaagtgaactatttgattttgaaatattagtccatttgccaattgttaagtaaacacttgtatttaaatattcaaataaatttataaagactataaaaactccataactagggaataataaattgagaatttaaactgcgtctctcaaaactcattttggtatttggtttcagatgttaatttttagattgacagatcttagtagacagatcactgtccacctttttaaaagtagtaaaattatatttttaaataaattctgaaatttcagcttttaaaattagtgcacactgattaaactgactcttctggtaattactcaaattaaagagtaaaattatacttgtaaaaaaactactattgccataataattttcgcccttatagccaaatgaagtagccagtttccttgctttcaaattttcatttatgacatttccacaacacaacaagcaaataatttcctggtcacatattcaaaccactttttcaagtgtataatttctgttggagtggctttattatgaaagttttgcaggtttaatgtagaacttaaaatattgttcagtcaaaccataaatttaattcaattttctgtcagtgaaatagtctaattttttttctgttaaaaacagctagcaagaataattcagatcagataatgcattgagttatattatcctaacgataatttttaaatttttatgaaggaaaggtcctcaaactaaggaagtaacagattagtaccacttatcagataattccttctcttcttccacccttgtataatgtaat

SEQ ID NO: 30809 - DNA, 1056 bp, Homo sapiens
ttgtggtaactgggtctgtgatgaaaaaaaatggatgcgttttgatagtttgttttgtttattttatttgcacataatcggccttgtttttttatacccagagtacattgaaatgcataaattatttgggataaattatttaaaacaatgttggttgttacagaatttattgattgaggaagcaaaatcgatacattgagcacgaaagacataaaggagtgactcctggctcaaaatagcagactaagcatgtccctactgagaccctgtaaaatagaagtatagaagtctcattagtaaataaccccataataataaaggaaatggaaaggagtgtgtccagtgaatatgagattacagcaaattatttaaatcagaaatcaaatgtagttctttaatcagtaaaatgtaagtaccagacaaaaataggcggcagggagctacaacggagatgacagcctctctattaaatagaatgcccagaagtttaagtgaatatcacctttttttttttaatttaaagaaccagaaataaaaatgtagaacaaataaaagtaatcatgttcacatcaaactcagggaagaactaatgagaaggcagagaattaagcctttatgttttataccacagagttatctaaaaatgaaaatacaaaaaattgtcagtacttgatctagaatttctagaagtaatctccaggactagaaatccttatatttgttagttatcttaataaaaatggaaagctaaattaaatcttaaaaaacaaggcagggagtgatataattcagattgtggaaggggcagttattcaccatgtcatgtatacaacaacttggattgatctcagaaaggatgacatccagtatcagacctaagtgagcaacgtaaattcatcttggctagaacagaaggagaggggtggttggagaaaagtagaatataagttagtcagattaattatagctgatgaaaagcttcgaaggtatcaatatctgtgtagttgtatgactgttggaagctaaactttcaaatatatgggaagtaccttagac

SEQ ID NO: 30810 - DNA, 1034 bp, Homo sapiens
ggtaagtagcagagctgagattcagtctcccagataccctgacccatatccatatgcttcaccaacactgcatcacagctgcctctaactagagaacagcttggaaggagtggtattgggaagagagtgagggagtggcttcacttgcaacctccagcttttaacaatatacattttttcctttttttttttttaagtaaggaaatttatgtcaacaggtctccttaactgctgtttgatatatacctggtacccttaccaaagacatggcaaatgagccatactcagtctttgttctttataatcatctgtttttagaaacatggcctttgtcttcccttatcatttatactgctcttctaaagggattgagggtaatgactcatttttaaatctttatcagtgtctacagttgaaaatatatggcagaatcttatgatctgatgtggaaaaatgtcattgtatattaaaaattgcttgtttcctttcagatatcttcaagtacgtcccactctgatgcttctacaaagcagtgtcaaacatctgccttgtttcagtttgcagaggtatggcctttttaaaatgctttttaggctaagaaaacttgttgagctcaggaatactggaatggagttttaataatgtatagtgaactttaggcatgcctgttgtcattattaacataatacacataacagaatatttattgctttttctgctgcctttgatctaatcatagtcaaatcagctcccgattttacacccattttataagtattcattaaagagttcattcagaataccagtaatgtgtttatttcattttatcttgtttttaatttattttaaaagcttggaaaaactgctgtcaacaagaatgtcagaggctttcgatttattaaatttttccaatagtgaaattagatgctataattcatgaatgactctctcacagtgattgcagtggtgaatacgacctgttaaatcaggttaaattagctttcaatgtgatgtagcttcagccagtattttta

SEQ ID NO: 30811 - DNA, 1592 bp, Homo sapiens
ccctttgagttcttttgtaaattttttgtagtttatttaacttaatgagctgaccaatcatattctaaaattgctaaattttatggtaatttgtatcataaaacttatgcacttaaaatatataatatctttaaattaggtttttaaagattaccaagtccaaattagaaatataaaaatacaaaggccttaaaaagtaaaattaataaacaatggaacaaactaccccattgttgtctgacactacaatgacacgcttcttgtgtaagacaagttgagaccaaaatagagggctacaagtgactggaaaactctaaggaaaactaatgaagacagcagggaatagttctcaaaagaactgcatgagtcagtgcaaagtactactccaaacagagctgaaacagtgaagatctgacaagagagtgcctttagagttagagttgtaaacaaatcctagtaaacagacagactgtgaggtcatgcatttgtctagtaactctaagactgtatatagattgtcaagaaaatttatttgaacgaagtgattatttttcttgaataatatggatgtatgaccctctgcttgtgctggttatataattgcatgtgtatgtatgtgggcacacatatataggaaaatacatatgatttcttaaatattaaacaatactaaaatgtaaaaccagctttcaatgtatgatatttacctttaaacagtttttttttgttaaaaatgtatgaacctttggggtactttgctgcatgggggggctggtaaagaagtggattcgtcattttctttctttggcatagcagtcataaaaaaaggattccttattaaatcagagctcattaaaaagaacactcttctaatttgtagggatgcatcccaaatatgaaacagatgctatggtttaacagatgtttgaatgttggtatcataatttaacggggtaaaatgactgaaataagcctattccaattatagcaaatcagcttataccaagactgagtttcttatgacatttgagcaaagatttatacttttgattaaacagaatccctaaaaaagaaaactttctggcattgttatttgcactgaatcagtgtgatgtcttaatacagtgtattttagaataacattctaaaacctcccagtttctaattaaacttaagtatatgcacaatggattaaccagcatctccaaataatcaccagcagatttatgcttccttaatttttttattgcatgtgtacttgatattcatttttcattcacaaaatataacgtttaattatttctgatgcattttaagataaataaatataagaagatattgaagatttttcctattgcctagaattggtgatggtgtctgcaatttgaagacacaaccttaaattcacacattctaaagggaaagtcaccaagaaactacttccaatttgggccacacccatctcgggatttctaaagagatagcctaatacaacttattatcctatctaccactccaggagttcctcctcttatccccactccaatctcaagtcatcctttggtagagggttatcataggctgtccacaca

SEQ ID NO: 30812 - DNA, 1028 bp, Homo sapiens
gacaattcagagatacgtttgacgagttaaatgactgtataacagtgcccacagccttctatcaatttgattcatttcagttagtttggcagaagtgggctgattgttgtaaagtttaaagtgtgttttgattatttttaaaacagatataattgaaaactttaattttgaaggtggaataataaggatactttcgggtgctctcccattttgttttaattgtttagatgtgcctggcatcagaagggatgaaaatggaagaatcaaagctaataaaagcaaaagaatccgatggtggaagaattaaagaattagagaagggaaaggaagaaaaagaaattaaaatggagaaaacagatgaaactaggttacagaaggaagcagaatttgaaaaatcggctaaggaaaatttaagagattctaaggaattgagaaattttgaggcattgcaaatagatgacataatggctataaaaatggaagatcccaaagaaattagaaaggaagagttagaagaagatcacaaatgtagtcattttcctgatttttcttattctgccagtagcaagataataattagtgatgttcccagtagaaaggatcatatgtgccatcctcatggaattatgatcattgaggatcccgcagcattaaacaagccagaaaagctaaaaaagaaaaagaagaaaagcaaaatggatcgacatggaaatgataaatccacacccaagaagacttgcaaaaagaggcagtcttcggaatctgacattgagagcgtcatatataccattgaagccgtcgcaaaaggagactggggcatagagaaacttggagatacccctcgcaagaaggtccgcacatcctcaagtggcaagggaagcattttggatgccaagccaccaaagaaaaaagtgaaatcaagagagaagaaaatgtcaaaggagaaatcctcagacaccaccaaagagtcaagacctccagatttcattagtatttctgctagcaagaacatttctggtgagacacca

SEQ ID NO: 30813 - DNA, 1025 bp, Homo sapiens
aaacacttgcacagatttatggtatcagtaataacagcaacagctgtaatttcttgagctcttactttgtgataagcagtgcattaagagctttatttgttcatggaataaatattgagaacctgtcatgtgctaagcaccattgtaggcatttagattatatctgtgaatgaaaacaaccctactgccatcaagattacattataatgggggaaccagacaataaataagcctaagcaataagcaaaatatataatttgtttgaaggtgagacgtacagtggaaaaagaattggtggatagagcaactaggcaaaagatcaacaagaaaaggctggaaccaacactacaaaccaactagaactaacaaacatatagaactctccactcagtaatggcagaatgtatattcttcacaagcatacatggaacaatctccacagtagaccatatgttaatccataaaaccaaccaataaatataaaaggattgaaataatacagagtgtgttctctgaccatagtacaatgaaatttaaaaatcagtagtagaaaaaaattggagaaactcacgaatatatagaaattaaatacacttctacataactgtcacatcaaaaaagaaatcaaagagaaatcagaaagtactttgaaatgaataaaaatgaagacacagtataagagaatttaagagatgcatctaaagcaaacttagagggagaaggggagaattatagctctaaatgcctatattaagaaagaaatctcaaataagtagcctagccttctactgtaagacactcaaaaaagaagagtaaaccaaactcaaaggaagcagaagaaaggaaataataaagattagagaagaagttgatgaaatgaaattaattaaataatactaaaacagtagagaaaaatcaatgaaaccaaaaactagtcctttgaaaataacaaaattgagaaattttagctagattgaccaagaagaaaaagagaagactcaaattattagaatcagagatgaaat

SEQ ID NO: 30814 - DNA, 1049 bp, Homo sapiens
acaaaaaaatctcagaatgttttaagaaagtttacgaatttgtgttgggctgcattcaaagctgtccccagccacatgcagcctgcaggccatgggttggacaagcttgctttagacagagataaccagagcaagcagatgaccaccatgtcagcaaatgactgtaagcaactgtggttcctactgaaaaatgagtctattctgcagctttctacagacctccaaacatgttttattccatgtttaaaatcatagctagttttccaagagcatatctgaattcctagaaaagaaaggtagtttttaggactgtcatcttccctttatctttctcaatgtgcacaaaagcaatcttaattccaggagatcctatacttttaaagatactagatgaatcagtatttgaccatggtctgctgttcgggtcactacaagccagattaccaggcattcaaaccagtagattaagcttaaaatgcatccaacattcacttcctatataactggtttagaccatgcagggagcctgagaatgcttctggatttcttgagttatctgatttaattcaccaactggtgaatttctccattttcaatcatggcctgttgtctgtttgctgttcctggtagcctctttggcagtagaatgaccggaggagcccaaggtaaggggtgtggccgaagagtgatactgagaccccccggccgcaaaatcttggagtgctataccagctaggtactagtggccttggctgttgcctttctgcctctcagcacctccgcaattttattttatgtgatttgggttaatctaggtgttaatagaggggaactgtttgcttagttagaggacagtttatgaattttgtgcacttcttttgtgtgttttgaatatttagattgttagaaacatagagtatattaaaggccctgattttgccctgtcatataagagaaaaaattcaaagaggtggaagtttttgtttgagtacattcaatacaatagaagtagaatgaggactaacacctagatgtcctgatgtttagcc

SEQ ID NO: 30815 - DNA, 1043 bp, Homo sapiens
cattcgttagcacaaatatttcagaccaatattagtgctctccaccccaccttttgttatcattttcatttcatttctctcattcttttttattttggaaaatcatattgctatagtgtgtactttaatctgccagcagataccatctacactaacatttgtcccacagcatcctcaagagaaaaagttgttgcaccttatatatatctcaagcaaaccaaaatatgatgctcttctgctttgttttattctaaattgttgtatcatatctttctgaaaccattctgaatttagttgaaattatcaatatttatgcttttaaccttaatttctggattcaagcctgtatataaatcttttgaaaaaaaattgtcctagcccttctctgcgatgctggaagtagaagattgcgtctcagatggagacgcagtactgttccagttttctttagccttttatttatttagttattctgggtatttcctatgtaattttgaagtgtgtagagtatattatagtaactgaagctgcagctgtaagaagctgagtgaaagaaaaaatactgtaagacatccttaaagtttttatttgtttgggtactgtatatgagatcaggaaaaagaaaaatgtcccacagccacattggaaatacaggttcttgtccccaaattaggttagttcccagattttagatcaaaactgttaattcattaaaaccccttttaaaaggtaaattctactgttgtaattccgatagtctttttcccacaaatatcagaaatatatttatttaattctgtcagatgagctttctaccgatgccatgtcccaaagccatgttaaaataattcccacgttatcattgtgattctacttcctgccactaaaattgctggagaaacaaaataatgatggaacactatgaacaaaaaggagcatctgaactggtctggttatttagaatccaatgtgttcaaatccttttgttttcttattaagtcagatgctactgtaagtcagataaaattttgtttgcactctgc

SEQ ID NO: 30816 - DNA, 1027 bp, Homo sapiens
gatatgcttcagtacgccacttgggtgaacgcttctggggtgcgcttctgggactagtgatcagaacacaccatctttccctgaactgggacaaaactgtggaagcgatttcattaagagtgttacctaagtataaactcgcacctcagatttggtgaatacaatgttcctaagttgttttttttaatcctttggaaactacacgcatgcatgcacacagtattaattatcaacaaatagactttgtattcagacagttcttctacccatgtaccattgggttttttttaacctccctaattcagatttattgatagtgatgatacctcctcataccattgctgtggtgaagaaaagagagtatatatgaaaatattgtcatagggcctgtagcataaatgcccattaaatggtaattattgattgtattgttttaattccaactgtaaggttagcatttttttaagtacattcaaaagatatgatgagtataactattcaagataaactttgatgctgtagagataagctgttgcaggagatttgatggtatggaaaactcagaataggtaaaaatttgcacccattaactcataacttttatatgtagcactatgtaagatttttctataaaattagcctgtctaatgaattatacgagatattccagcacacctcctttccattgctgagaataagattgtgtgtgtgtgagggagagagagagagaacatggggtccataccaaagattaaaattctgttaggaaaaaagtgacaggatatacataagtgtagttttatggtcctgtgtgtattacacaattgcaccgatccttttgaatagaacataaaacctattgcaaggaaaaattaagtgattctaatcaacagtcagctaaaacatactactgactccattccatacatattttaaaaggatttatactaaagataaaattatgaatcataatttatcataaacctttttacctttttgaaattataggaattttcaaatacagtat

SEQ ID NO: 30817 - DNA, 1047 bp, Homo sapiens
tgctaaaaataaatttaaaagcaatattctgcacatgaatctttgaataccttaaaccttttaatacataggatatgaagtatttaacaggtgaatgctagcctcacctgcattaaaaactgtattgttagaataaaattgcatacagttcttcattccattactctgtttcaaagcccatggaaaattatttcatctcccatgctttgacttcagaagagttttctgttacccacagctcatatcatgcacccataacaataatccattcagcaaatctgcattggatgtctactgtgtgcaagtaccaagaagacagtctagcaggggttagagacagtctgttgaaatgcagtacagatgaagctggggatcaaagcctgtcaggggaaaatgacatatgagctcatgggaaactcgataatctgcattttgaagacatcaagaaaaaaaaagtgtatgtgttactgttctttaaaattttatttttaaaactttttctcacagaaaagatcttagcgcaaggacaaaaggaactgctgagactaggccacagagctccaagactgacaaatatgtgatcaaagtctttgggggcgatccatcatgctgtgtacctttcctttctgagtggcttaggatagggagcatctcagccaggctggttccaggactgatgtcactgtggggctgggttgtgcaccagctacagccttgacatagcctaagaatatttggaaacgtaaggtcaggaagtacagctcaaacatttggcccaggaaggaggtggttctgtcaccagatagtgtgattcccccaactcttttccttctccctttgccatacccttctttcctcaccttagttccagctctcacatactgctgaaatctaatttttttcaatcgttgaatttttctacagggatggcaccccatgcccaccagagctattttaatttccctttcttttttacttttttcttcactgagaatagctgtaaggtttttatggctgagggaatgactcaagaaatcctttgctcta

SEQ ID NO: 30818 - DNA, 1035 bp, Homo sapiens
aaatgtatcttatttctttattgtaaaatgtgctatttttgtatttcagatttggcatttaaatcctatagtgatataaagtagaactgcttttttaaggtcaactctagttcgtttttttgatcaggattatttattacttaccttgttattcatgttttgtttgttttatattcactgtggcttcactctcattgtatgtttcaaatgttaagctaagaaataacattaaacattttgaaaattgaactactttagggctattttttttccccattacttgcagtttgaagttgtgagaaaggatgaatatatcaccattgaaaatttaggagcaaggtaagcttaaaataaaatactctgttaccttttttggaatatgcatatattttttggttgcttaattcttctgtgtttctgtcacctaatagagctgcattaaattttaaggtatgtgaaaaaatcatatttaattgccatttctttccctctctatcaccacttattgtagacatttacattctaaagcggagatggagaaattatgtgaatactttcccattaaatatgaaaataatccttttctttaaacaaacatatttttcttaaagttagtttgttatgaaatacttttctatctttcaaaacttatccaaaccactaagcttgtcttacaattagaatcttcctgtttcttacatgagaaaactgtattgcagagtaatatatttgataaagctagaattaatagcggtattatagagtgttgctactgaagttagaagtttcaatataaaagttttcccagtcaattgattctctttttcttctgtttaacgtgtaaatgccatttttcaatctagtagggacattgcattgacatctaaagcatcagttttcccttattagttaatgaagcccaaatctttatatctagcacaaatctctctcctaaaagcttgaccttatatacctacctgcatactgagtatctccatttttatttttcaaaaatatttataatccagcatgtcc

SEQ ID NO: 30819 - DNA, 1064 bp, Homo sapiens
ggtcaggacatgcaaaaagttagtatttagagtctacttatgttctagagtatctaatatctagagtctacctaagattccagtaggtaacatagcactcaggttcacactgattagttccaggctggtgtttgtacatattatttggtaactgataaatgaacatcacattttcatcgagtaattgaaaagagtaagatatattttatttctgttttgtgaatgttgcttttttgggcaaacattataacattgataagaagctgaaattgctttcatctagattttgagaattttgtcttttatgtttaggtattgaaatagaagagttacagaatgaggaagaagaactaagtccacctctcatggagtacaatataaatgtgaaatcacaccctgagatacagtttgcagaaattaataaagatgggacctcaatacccagtgaatcttcaacagaatctcttaaagatctccaggaagtataagctctcattaatatttgagttagaagaacttattctgggcctttaatttgttgcatgtgctgtacttaaagcatcccagataattttagcttatattttcatagtgtttatacagagcttgaattggaatggtcctttccttccttgcctcagtacttccttccataatctttcctgccataaccatttattttgccaccatttcttaaacacttatgtggcaggcattatgctagactgtaatatgtttttttaatcccagttgaagtggatgtgggaaggtattagaaagtagaagaaagtatagtctaaaatagagaggaaagaaaggaagagaaaagtgggatatttcaaaaccatttgcgcagaggtagaatgaaattcgtccagaatggaatctccgtatttctttacaaataagtggtaacagttattatatagtcactaaattatccttagatctttcatcttataggcatgaatatgttgctttttaaaaagtgtcttcctcctttgttacatccatgtgtgtaagtgagcatctgtgaacttttatcagtaacctacttattgaca

SEQ ID NO: 30820 - DNA, 1039 bp, Homo sapiens
tactgtttgatagcacaacagggtgactatagtccataataactgtgtatcttaaaataacttagaaagtgtaactggattgtttgtaactcaaaggaaaaatgcttgaggggatggaaaccccattccccatgatgtgcttatttctccttgcatgcctgtatccaaatatcccatgcaccccataaatatatgtaactattatgtaccacagtttttttttctttttttttttttttttaaaacaatacaaggatcttctcaactccttctgggcaaatggcaggttgctggcactcattaagacccagaacaggccgggcgcagtggctcacgcctgtaatcccagcactttgggagtctgaggcgggcggatcacgaggtctggagatcgagaccatcttggctaacatggtgaaaccccgtctctactaaaaatacaaaaaaattagccgggcgtggtggcgggtgcctgtagtcccagctactcaggaggctgaggcaggagaatggtgtgaacccaggaggcggagctttcagtgagccgagatggcgccactgcactccagcctgggcaacagagagagactctgtctcaaaaaaaaaaaaaaaaaaaaaacccagaacagacaacacatgatattataaatgtcacctagttcagcaactggtttgatattttagacgaagactaacctttaacctatttatgtatgtgtttattgcatctggaaatatatgccactccatgaccttgaagactctgtgccatgagctagtcttaatataggtcagaattagaggccacattgatgtaaaccccccaagaacttggacatgaagaagataagattccacactcaaaagttaaatataagatcaccacaggaaggatctgagcaggcaaatccaaattcacttggaggagacaggactgttcccaggccaaccaatatctcattaacaaaaaagaatgtatgaacatatctataaaagatgtttttaaaaaatcagaatgggcttggtcattctcgaggca

SEQ ID NO: 30821 - DNA, 1032 bp, Homo sapiens
gatctgggcattgatatattttctttatatttatagttaatagtaaaaatgtttaaatatataagtagctggtgaaatttgtatttggcatgccccaaagccccttttccttcaaaagctttaatcctgacagcatctcttgaaatataaaacaaatttgaagttccctaagaaaaatacatgtttttctttgaggatactactgttgctttgctgccctctacagtcatctaaaatagtcactctagatttttctccattcagatacttagaatactttttccctgacctgtgtatgagctttatatttcaggaatgggttaagtaatatttactgttacagaagtaaagtttagtcacagttaatctatatatgtcatgcaaaaaaaaaaaaaaaggacttagagatttgaacaagggataaattggggactattgagcaacaaccatgtgctagggagtataaaggataccacggtggaatgaggcatgttggccctctaaagcttatgaactcattaatacgattaatggcatgcttatatatcaaatgacatttgtaacaacatgccaagtgatatgatatagtttacagaaatattagtaagggctggaagagttaaaaatgagacttttgagctatgtcttcaagagtttagacagataaaacagggtggttttaaacatatttaaaacacaaagcaggctgggtgcagtggctcacgtctgtaatccctgagaggctaaggcaggaggattgtttgagcccaattctttgagaccagcctgggcaacatagtgagacctcgtctctgccaataaataaataaataaataagccaggcatggtggagtccacctgtagtagcaactactcaggagggtaaggtgggaggattgcttgagcccggaaggctgaggctgtagtgagctaagattttgcctctgcattccatcctggacaacagggcaagactctgtttcaccataaaaacaaaagacaaaacaaaacaacaagaaaaaccacaaccc

SEQ ID NO: 30822 - DNA, 1033 bp, Homo sapiens
agaaagaacaaattgctaaatagtgcagaaaaagactccagacatctaatctggttatattcagcctccttcctgttcccctgccccttacttttttcaacagctttacatattaatatggtttggtggtgtcctcacccaaatctcatcttgaattcccatgtgttgtgggagggaccctatgggaggtaattgaatcatgggggcaggtctttcctgtgatctccttgtgatagtaagtctcatgagatctgatggttttacaaaggggagtttccttgcacaagccctctatgcctgtagccatccatgtaagatgtgacttgctccttgttgccttccactgtgattgtgaggcttccccagtcagctggaactgtgagttcttcattaatcctcttccctttgtaaattgctcagtctcgggtatgtctttatcagcaccatgaaaatgggctaaaatagtaaattggtgtcagtggagtggggcattactgaaaagatgcctgaacatgtggaagtgactttggaactgggtaacaggcagaggttggaacagtttggagggctcagaagaagacagaaaaatgtgggaaagtttgaaacttcctagagacttgttgaatggctttgcccaaaatgctgataatatggacagtaaaatccaggctgaggtggtctcagatggcgatgaggaacctgttggaaactggagcaaaggtgactcttgtcatgtttctgcaaagagtctggtggcattttgcccctaccctagagatatgtagaactttgaagctgagagagttgatttagagtatctggtgggagaaatttctaagcagcaaagcattcaagaggtgacttgggtgctattaaaggcattcagttttaaaaggaaaatagaccatgcaagtttggaaaatttgcagcttgacaatgtgatagaaaagaaaatcccattttctgaggagaaattcaagctggctgcagacatttgcataagtaatgaggagccaaatgttaatcatcaaga

SEQ ID NO: 30823 - DNA, 1026 bp, Homo sapiens
aaacgttagtttaaaaaaaaaaaaaaaagatgagcaaacaaacttaattaagaacttgcctttctggccttatctcctgtcattttgttaccaatacttgggtttttctgagttttataaactttccttgtgttttctgttgctgtgagcctgtttgcttttgtttttcctttagtgcctttaccctgcctggaaaatcccacctcacctaacatccatcataaatgctactgatctcctacagcttacagacaaaattagtcactagtttagttgtagctgaaagaaaatgttactttctagatgtagcttttcttactctacacacttctctcattggttttcctaagtatctttttaagtttgtactcttacctaggaggctctcataaggataatatgtccctgtttgccttggaatatctaggtttacaagtattgtggtaaaattattaataatgtttctctaaacaaaattttcgcttggttaacaaattacgtggtcactgtagccataacgttcattgccttgtatgtcttattttcttttctagattatcagttcttggaatttgtagctatacaatcttctgtgttgtagaacatagtattaatactttatattccatgagtgaaaatcaataaatatttgaacacttaatatgtgctatgcatcctatattttgcctgtattagcaccctttttttcttaaccttcagttgtcttagagtatctacgtgtctcaaacaaaaatttgcagtcacaccagcctcgcaaagtctaactatggatcagtctggctctatacattctctgtgcttacctcttagctgctagtgatgctggggttaggggagtggggaagaaatcatatagccttgtacattagtgccactacagaatcaggctttagttttaactggacctcaaacaattttagtgcttcttcctttggtgcttagttagtacctatttccatgtttgagtgcttccttttaaattttattgagaccttgttaattagg

SEQ ID NO: 30824 - DNA, 1079 bp, Homo sapiens
tattttttgtagagatggggtttggccatattgcccaggctggtcttaaattcctgacctcaagcaatttacctgcctcggcctcccaaagtgtttaaattacagatgtgagccactgcacccagcccttattttctacttttgatgctattctacgtagcaatgttttacattttttattttctaattttctgctgctaatgcatagaaatacaatcgatatgtatatattggtcttaggtcctgcataaggtctgctactaaacacccttttcatagtagctttattgtagattccatcatattttctctaaagacaattgtgttttctgtgaataaagacatttcatttgttcctttctgatttggaatttatttctttttcttgcttgattgtactggctagaaccttcagtacaattttggatataactcaaagactgcctagctctatttagtttctctgtccttgtgcttcacttcgtctactgcctctgagggatcagaactttgttgcctgttgactgttaacttgaaatggttgtttcaggcaaaaggataaatcttattactccttcatgtctgtaaggtgtcgtctctattctgtttcaaatcaagcttttattctcaccactccaccaaaacagttgctaaattcagtggttacttaccagtgcttttttttttttttttttcccacttcttggcagcatttggaataattgacccctctgtaggtactttcttcacttaatgtataggataccctcttggttcccttcttgcttccctggccagctttattgatgctactgaatttaaatgttagaatgcactatggatccttgacatttacacctctgttctctatatttttagttccttgctaattgtctgtttcctcattaaaatgcaaactgtctaatggctcagcacctagagcagtgcctggcacaaattgttcacccaacgcattctgatgaatgaatgaagaaatggttggttttctcaaccagtttttggcatgtgacccaggtttctccttagaatatagaaacctttaattccagaattatcat

SEQ ID NO: 30825 - DNA, 1032 bp, Homo sapiens
cctaatctagtgcttttttcactgcaacacatattggcgtattgttaatttatttgacagtcacatttggatctcatatcaagcccagaaaacacctagttcatttctttttgttactcagttgtacgttttgtgtgtggtgcgtgtgagtgcatgtgtgtgtgtgtgcatgtgtgtgtgtgtgtgtgtgtgtgtgtgtgtgtgtagctagagatagttacacagggggtcaggaagggaggagagtgttgaccacttttttctattttaaaaattgtagtacttttttttcctccataggtgccttagctggaccaattattgtggagccacatgtcacagcagtatggggaaagaatgtttcattaaagtgtttaattgaagtaaatgaaaccataacacagatttcatgggagaagatacatggcaaaagttcacagactgttgcagttcaccatccccaatatggattctctgttcaaggagaatatcagggaagagtcttgtttaaaaattactcacttaatgatgcaacaattactctgcataacataggattctctgattctggaaaatacatctgcaaagctgttacattcccgcttggaaatgcccagtcctctacaactgtaactgtgttaggtaggtatgcttgaattatgtattttggtgatagtggtgaagattataataaaaatatttttaagaaattaaaatggttgaaatttgatttaactttaggtttaaagtaaaataattcaaatacgatttttcaagatccttcttaaaatttatgattctaggttccctgtaaataaaatcttgtctatatatacctacttatctatgtaatgctacatagttttatctagtttctttatgaaagatagtgatgagttttaattatatactaagttctgagtttctgtgacatctttattttcattacctcccctcaaattttcagcctttaatcaaattaccatcttaaattttttcatttttaaaaaattgagttttgcatctaggagc

SEQ ID NO: 30826 - DNA, 1105 bp, Homo sapiens
ctaaaagtgaaaccttcttaaatccccattctaaattgtttttatctgtataatacatgattatagtaatagcagaaaattttaattaaattttctgtcttatccttccccacctgtccccaccttcctaccccctcagttctgatctttagaggctactttagcaattttagcagtttcttacggttagttacagtcagaggtcttaagctgctactacttaatagtttttaacattgtcaattgacttcttagataaataattataattttatgtctactccttcatttacaaacacacccatatacacacattcctacctttcatagtccaaacgaaattttagctattttaaattaaactcagtaatcactgtttgcttctctaggacaggtaaatgttactaagagctaagtagtagtataccagacttctgttttctcttgtctatagccatttgttttcctaatggctaatatttgcctctttttacttgtgtagttactacgtgcataattttctttctctgaaatttcaaactgttataccaaggtttttattcatattttgtcagtatttagggcctattttgatctccagatgtatctatcaacttgaataattttcttattttttggtcatttccctcttttttattcctgttcactctttttggaactcctgtttattgtataataaatatcctttcttttatattttcagatggtcttattcttcctagaagattttcttgatttttttttaaattttccattgacttaatgatataaattttttttggcctgttttcagtttttaagagcgtcttctcataagacggagcatcttctcattgaatattcattagagaatgagaagatgctcttataaactgaaaataggccaacaataaaaatatgttattttcatagcacgcttttcttattttatgagtgtagtatctttcttgtttcttcccagggatactagaattatttcttccccagatagtttttttctgctttctacatactatctcttttccctccaagttcttttattttttggtttggtctttcattatgtagatatttcttaatcttg

SEQ ID NO: 30827 - DNA, 1046 bp, Homo sapiens
tttgatgcctgtacatatagttaatttttcagttcaacagtactatttctttaatacatagtatgactttctagattcttttatctttacactaagaacaaatagtgatttttttcttttgctttgatggccactttgtacacagttgtctggtaaataaaatggaatattaaatttgatggcttgttaaatagcgttgtttcccacttaatatgggactataccatattgtgttactgagaggtgaaataggaatgctactgaaaatgtgttaatgaaataaaatttgtgatgttttttattgtctttaaactactaatagcttagatttttcacattctgtttcactttgaatatttttgttaatttggctgagtataaattttggcattcgtaaaatagagagctaaaaatacatcttttcctggttgtggctgcaagtaataaattatcaatagaatgcttatttataaaaattcaataaaatattttgagcatctccttactgattacaagaatgtagcaatcttcctgtctaacaaatggaaaattaagaggtaaaaggaagagaacctaagaaactcaggtttgtatggtaattatggaataaatagttaagggttttatctttgttcagatctaaaactagataaattagaggttttggtgaaattttgtgcttgcttaagtgttatattctcagtccttgtgtgatcagtccaagaaaagtaccacgtattatattgtcttagagcactcaccacagtttttagttgtatgctcatttctttgcttattatttatcttcacaattcagcaatttgtgcttgctttattcacgactgtatactcagcagtgagcattgtgcctggcacatgatagaggtgcaaactttctttttttttttttttttttgcatgagtctagaaagaagcttagagctgtatacatccctagccctttctgccagtatcagtactttggtggaaatctgtatttttttttcttttgagacgtggtctcgctgtgtcacccaggctggagt

SEQ ID NO: 30828 - DNA, 1045 bp, Homo sapiens
ctgggactacaggtggccgccactacgcccagctaattttttgtatttttagtagagatgtggtttcaccatattagccaggatggtctcgatctcctgacctcatgatccaccagcctcggccttccagagtgctgggattacaggcatgagccaccgcacctagccgagaatgtttttttttttttggtaatcagtagttagactttacttttctatccagagtctgtaacacagcatactatcctgagattagttaactcatctaacaactgcttggagtatgtcaggtatcctaggtataatgctgcctttccagaatgactatttagtaaaacctagtaggcttttacaagagtgagaagccataattcacaaaataaatgaccagttaatctttttcattgttacatgtactcattttcctctaggaaaaaaatgttacctcagtattaaaatagatatttaaaaatttgagaaattatttttaatatatgtaaaataaatgcatcttaggactagagatgaaaagttctgctcagaacagaataagcaactctgagggaaattgttcttaattttgttacacattttcccacattgataaatgtaagattttggataacaggtttttgatttaggattgcaatattcaacctcagttattaaattgtactctattatataatagtaatactctcaagaggtatagtagctctttgactagtacttactgactactggaaattgtgtttttctggtttgcttttgatgtatatttttcccttaactaatacctgtttcttatctttaaatttagaaaagcaaattttgatatgtcaaataagtgcccctatgtctaaaactcttattcctgtgcacagcttgaatttcaggtcatattgattttaggatccaagtgtagtttcaaacttaagaatctgcttacttagcaatccttaaacattaaaatgcattatttcatatatttaaacacctatatgaagtctaaaagaaaaataagccaattaatttttatgacact

SEQ ID NO: 30829 - DNA, 1033 bp, Homo sapiens
gacagggttacctgttataaatttaaactcaaaattagttatattgtacttattaaattttatactgtacttgctaaatttttaccacattctatacatatggcattccgtgatgaaacctgttcagtaagtatttttctttagcttgtaatattagaataacttaccccatgtagatttagtatttttctaacaatcattttttaaagctctatcagtaccactcatttaaaaattaattataggagattaccatttgggtcatttatttctttcactgtgaaggaaacaatatttttaaacttaccctttcttcaaactctacagttttgtgttacatgacctataaatactacttaattgataattaaccagtctttaatttttgctatttatgtttagttgctttttaatattactggctatttactctgttatctaatgtcaatacacagattcctttgcatctaatatttaagtattattagaatgttctctctaaaatattagctgttctttttgagactccatcctaaagtagtgacattaaattttgcagatatagttgaagtttttaaatttctgaatgtttagataacttgcccatagggtgttagacatggtgatgacatttttattactttataacatatttttactttgtctattagtttcctttggtaatagcctatcaggctaacataagtttaaacatatgcttttttatttttttaaattactaaataatagtgtttactatatatctccttccaaaaattttgagcttttttatttaaagaaaatatttttgagagaattattaaaccaacagcttatactatgcccacttaacaagagtctatagtttttcattcttttaaagatacgctcagctcttataaaaataaaccatattattaataggtaaaatggatattaagaaaaactttaatttttttattctttttattttcttgagctactggctaagaaaatgtacatttgaattacttgatttacttttttgttatag

SEQ ID NO: 30830 - DNA, 1023 bp, Homo sapiens
ctaaaggaatgtttctgccaagatgttctcagcttttgttcttcagctgaccatatagtcagtttactgtccaagaatggggcaggaaggagcattccctggcacatgggcccactgtcagtgggcactagctttgtcatcttacacagttaggtgtcctgatggtgaagatgtgccatgttttcagaccttttgttctcacataaagagtgtagtctcatctcttggcaaataaatgaaattgacaagtggtgtgaaatgtcataaaattcttagctggagctgttgttgtattttgttttgttttggttttggtctggatttgttttttttgcctgttagataactgaaaaagtagctcattaaaatgttttgtagattcctggatgaagttgatctgcttttcatgatcgattggttataggtattaatagttctgtaaattatctttttgtatcatttttcagatttttggtttctttttgaactttgcttcttagttttttaggaactctttgatgtggatagtaatcttttgtattatattcatctcttattttttaaccttatagtatcatatagaaaattgtacgtttttatgtagtaaaaatctgtttgtctctttgcttgtatttgttggaagttctgtattgtctgaaatggcttccttacatttccttctctctccttgaactagaatgtagaaaaaagtcttagaaaactaatagttttatggtttatatttcattttaatctgaaactttattaaacttgataaagaggtagagacccatttttcccaatgggataaccagttgtccaaatacttctgaattacctatacttttgcatggtttgagagcacttttatcctaaaataaattctcatacatattaggtctgtttctgaactcttaattctgttgtattgctatgtctttctcttcctaaaccaagatactgctgtttcaattactattgctttataatatgatttgatattcagtaaattcccttatctct

SEQ ID NO: 30831 - DNA, 1025 bp, Homo sapiens
aagtgaaagtgcttggggtcctcaagatgtaaaagatcataaaggggtcgtggggccaaaaatttgagaactgctgttgtaaactgtaagcagtatgaaggcaggggtcatgtcactattgtttagtaccatattcttagtgcataacacagtgcttggcacatataagtacctgataatttttttaatttgacagatcaaaattgtatatttttatgatatacagcatgcagcgtgatgttttaatatatgtggaataactaaatcaagcaaataaacatatgcattaccttatgtattccgataaacaggttttgaatgagtaggtaaaggaatcaagcccttttttatattctcttcagtttataatctgttaaaatttctgcatcatttataatatccatatcacagatactatatttcagtatatttaatgtcagtgtctataatatcactgtatcaagtatgagatatcaatatataatgtatgaaaaagaacagagaaaaagagactatagaaatatttttaaatgttagcagttatctttgtaatagacttctcagtgaatattatttttgttatattttctgtagtttctgttttttctgcagtgcctttccccacctctgtaagtagccttttagcataagaaaatagagatctattgaacacctgagtcactggcctggaatgttaagctggtcatactggttatgcagtgtgtcagcactgttaactatctgagaaaactgaatttctttccaataatttactatagtatattgcattctttagtaaatgtttgtaaatattcatgacagtgttagtagagaaagaatgtttttacatttttttagtgtatggataatacatacaaaacaatataaagaggtgttttctaaggtctcattcctatacctatttaccctacccccatctacagataaccacttttattaatttatgtcttggcactgtttctttaagcatagacaagaaaacacacacacacacacactcaggt

SEQ ID NO: 30832 - DNA, 1037 bp, Homo sapiens
tcaaatgttgctaaactttgtggttttaaggatataagttcaagagaaaagtctctccaggtattcagttacaatcaggccatatttcatttaaacctttcttgaacccatcattatatctttttaaaagtcatttttgtaatacatcattgccatcttccaataataatttttaggtaggctgcttttgttagtaatcattgatggtcttattttctcccaggatctgaatattttaacatgtttccagacactacgagtagttatgatctttgggattagggaagggagagaggaatatgatagaagagttaacatttttttccaaattatagagaagtatatgactgagtggattattcaaataaggattgagtatttctagcatggttctccccttgagtagaaaaatgttttcgtcttttatattgccttcagttagtaagtagtggcaattattgagacaagtagtgaaagaattgtggggctttattctgctctgaggtggaaaaaaaattttgtgatcaacaaagcttggataaaataatgatttataaactaattttagttggggagggcccttcaaagcaaaaagaaatattaaaaatctaaatatctaaaaatatttgtcaagaatcataaaattaaaggagatacagatgtaacatgtgaagtataaaagtttgatgtcttcatcatatcaaagcttttgctatctgtcttataaatgagaaaaagataagcttgttttataatgttttatagggattaatcaactaatatatgctacatccttagaatagtgcctgacacagtaattactgtgcatttgctgttattgttatttaaaaagctgtataattcctgataaaaatattaaagatgctaagcagtgaaattatttcagtagaaaaacaaagctgatgctactttgatttatttaaacttagcatatatttcttttagaagtatccatacctttattataagcttagtagtgcttgaaatgaaactagaatatatggagtctacactgt

SEQ ID NO: 30833 - DNA, 1068 bp, Homo sapiens
aaggaaggctggagaattgacccccagcaattaaatacttgaagcttcaagtgctatcttgctttctcccattctattagctcaagcacgtcacataacttcaagggggatgggttatataatcctcccaagtacctagaaagaggggaacaacataccagtgaacaatgttatgtccaccatgctccttttctgatccctgtccactttcttgtgacatgatacacaaccgaagaaaacaatgagcagcaaggaaattgaataatgcccaaactaaactcataattatctacctaattcctttgtagaacctgcagaagtctcagataggaccctgagtttagggaaatagttaagactaggaaatcagcccaagataaatgactttcttatattatcctgttttctgtgcctacttgatgtttatctaatttgagatctgggatcaatctagattaaggtctgccattaagagacagaactcctgggtgcagcatgaatatggattcttagatgtgtataaatattggctttgatagtcttgagtgaaatgatattcgcttgacagtaatgatcgaaagctttgggtccattctctttggctatatcacaagccttagtaatctttctgtttagaatttttatcactaaaactatatactatgtatatgtgaatacatgtaatgtaggaataatatataagtagtaaatagtgtttataatatttaataaagataggtaggtaggtaggtaggtagatagatttgaacccataagtgactgaaccagatgtaaatgtaggtgattcacccatttgagctaagtgatttttgcattttgtagccacattcactttgtaaaattgaatgtcagttagaagtgaatttttgcacacgtaggtgattcacccatttgagctaagtgacttttgcattttgtagccacattcactttgtaaaattgaacatcaattagaagtgaatttttgcaatgagtcaaaagatatttaaagagataactctacatctggagatatttctgcagctgggaaatagttcaagaataaag

SEQ ID NO: 30834 - DNA, 1057 bp, Homo sapiens
cttttattcttccttcccatatttaatattgaagcataaatctccggctgtgttcttctttattaggcatgaagatgaagaaaagtgaaaggtagagggggacagtaagtgagggtaggatggaattaggttggcgataaaaagttaaagcttttattgaattactatattgtgaataatagctattatttattgagtgctacttatatggtaggcattgttacaagcactttacatgaactgtgtcatttaatccttacagtcaacccctcaggtagaaattactgttttctcccttctgtcagtgaggaaactgaggctttgaggggtattaaggaaaaaaaacattcagtgatacttttattaaagcacagtgaggcaaactttattcaggaccatagaaataggtatagggagtcttgtaataggggagaaagactgggcttaattctgaatacagcatatgcaagtgggcatttatagcaaaggagcagagtaggggtcagtggatgaaaaattactaagaggaagcatcagaggtaaggggaacttctggctaaaccaacataacaggattcctgttgaagacagggcagtgtgatcagacattacctgggaggtagtggaggatgaagcacctgatgagctatctgggatgatcatatattgagggtgggagattcttgctaaactaacttagcagggattgctaaaacacagattttatgaggaagtggacagatgggccttgaagaaggttcagaagactcaagtttggccaagcaaggaatctttgtcaaggattaagtaattttaccagggtcatctttaatatacagcttctgaatttgggttcttaacttctattccttgctgcctaccaaccaagagaacatatgtcattactaattagagcttatatttatttagcattttctaaatgtgtggcattgttgtaagttctttatacatattacctcatgaaattctcataacaacgttgtgaagcacatgccgttattatcttcacctttaagatgagcatactgaagctcag

SEQ ID NO: 30835 - DNA, 1050 bp, Homo sapiens
gtatgttcaagtgagttctcccatccaaccaataaagtgtgagtcctcactaatactggttaacctttacctcttcacagcttatgttgattgctctagcctctgaacccctgtcatttctgtagtctgtattttaagtcttcagtatgttatctacaatttcaaaaatctctaagcaaatcaagtttttcctaacccattttgcactcaaatctgagctgaactactgattctcacagtgttatttataatcatttttctcacttaatatgaacgttcaattttccactgcggatatattgatgtgcttgaccgtggggttctgtaccatatcctgcaggaggtgctttataaatatatggaatatgtacctatcacttttctaaaatcagaaaaattctgaattccaaaacacatctggtcctaagagtttcagatgagagattgtggacttgtagtgatttagccatttaataatattaggtcagcaggtagttacatgtctacagtgtgctgggtactgaaacgggagggttccttgatcccccttgcaggacatacagcagggttgtggcttgcctgttccatcgccactgctgctcaaaccactgaggtttggggggtggggggtggggcgagcatgcagacagacaggtgcaagagcccaggtgtgcatgtgttacagtgtgcccttttagccctgctgtctgtagacggcttgagtgttaaccagctcagtggaccctctgcctttctgcaagggcagaaggccagtgtgacaactttctgtatcctgagctcttgtccagtgtcccggtagaattgggtcacacacggactcagtggatgagtgtggacttgaaggatgaatgcaggatttcagtgagtggtggaggtggctctcagtgggatggatggggagctggcagcggggatggagtgggaagatgatcttcccctggagcctggccatccagctgccaaactcctcttccaccacctccagccaaactcctctcagtgttcaaatgttgctcctcttctctattt

SEQ ID NO: 30836 - DNA, 1051 bp, Homo sapiens
ccaaaacttggaagtaaccaatatgcaaatgaataaatgaactaatatattcagacaatggaatattatttagtgctaaaaaggaataaaccatcaagtcatgaaaagacatggggtaacgttaaatgcatattacagagtgaaagatctgaaaaagctacatactgaatgatttccactatatgatactgtggaaaaggcaaaacaatagagactggaaaaagataaattattgctataggttgggtggctagggaggatggtggaacacaggagattttcaggccagttaaattattctgtgtgatactacaagagtagatcgtgtcatgatccatttgttaaaatccgtttgttacaacaccaagagtgaactctaatgtaaactataaactttaggtgatgatgtgtgagaaggtgcatcactggtaacaaatgtgccactgtggtgcaagtatgttcatagttgtggaggttgtggcatgggggcagggaatatgtgggaattatttgtactttccactgaacttttctgtgaacttaaaaccactaaaaaataaaattgattaaataaaaagagacgctagtttatgcaacatttcaggtggtctgtggattgacagaaagagcatgtactcatctgccattagatttaagttccttatgtattgagccaatgtcacaaaatcttgtcagagtttatatagccacacagtgcagaaacagatacataatgctttccatagcccagttccctaatgcagggccttttctagggtgtgttgggtccttgtctgcatacacaattttactaaatattatattacaaaagttacagtgatttaatgatgaagattcagaatatgggatagagaaaagaaatttacccattcacttattgtccgatcagtgcacatgaagattgtttgtagtgtccaggcaccattttttcctgttcaggtctgagaactttctcttcttgtcctttactgtcaaattcaccacttctggctatttaaaaaagtcttctaccatgagaaaaagacagcaa

SEQ ID NO: 30837 - DNA, 1047 bp, Homo sapiens
tcagaggtatagaaaatactacagagtgtttaggaaagagtgacataagcaataaaatacattaagtatatttccaacctaacttcaagggtagaggagaatgttagcatagatttctaatgagatgccaaagatacgttatgatttatgtcgtgctggctctagttcttctttgtgtgtttgtttcttctttctagttgccatgctttatcaaattatctaggtagttctacagccgaaatatattctcccccatttacgcgagtgaccagcaactctgggagacaggatgcttagatttcaactcaatgctttagctaggtaattagcagttttaaagtctgtagctgtaaggatcaaagggtgaatttcaaggacgcccattgctactgtgctacctcagagtaggagtgtactgccctttgtagcaaagaaaatattcaactttattatttggaaggccaacgctgagttagtataactgaaggtgtaggaatcctggcatttgtcttccgataggaggatggctgtgatcagagctctgcttgacagggaagtgtttcataaacactggatgttatggaggcaataagggggtatgtcagctcctttagaaagctttaaaaatgtcaatgtcttacatgttggggatggtttccagggtcctgctgggaagtaaattgttgaattagttcacaaaagcatactatagacccaggggagtagctgtcttcatttgcaccagagaaagggatctggaaacactggttctcaggagccctgtggcctgtcttcagcaccctccataccttgaggaacccactgtctaccttttaaaattctcagtgtagttatggaaaagaaatttcaggatgtagtctcacctctcctgcagccagtgagttcagtatcttctttgccttgtgtcagctaggatacttctttaacaaactggtagatgttatagctcttggccctttacacaggtcatagaagctctataatagcttatcctggtgccttccatctgttctctctaaaaactgg

SEQ ID NO: 30838 - DNA, 1035 bp, Homo sapiens
atggctgactagaagtatttcatgcccacttcctccatttggaagaaccaaaatagtatatggacagtcacactttgaatacatgatccaagagaatactggaatttaacacaaaagtgacaagaaacatcaaaagtgggaaacgggaaggaagagaggtagcctgcttggccagtattggctgggagctgggggtggctttccaacatgcagaaagggtgaatgagaaacttccagcagctcacatccccattatgatgttatgtgatctgggccacaagagaatcacttgactctccctacccctgttactaacatagggagcttctgggaaacagaacagatttgcagtcccaattctgggatactctgggatgagatggaactgctccaaggaaggagcttgtgctgtggcccacaccctttctgagatctaaatgtcttcagcatcacactgttttcctttatagtgatgcaaatggaccaaaaccacaaagaactcaaatgactcaacaggaaaaaaaaatcccagtaaaatgtgggcaaaggacatgagcagacatttctcaaaagaggacatacaagtggccaacaagtattagaaaaaatgctcaccatcactaatcatcagaaaagtgcaaatcaaaaccacaatgagatatcaccttaccccagtctccagtcagaatggctattattgaaaagacaaaaaataatacttgttggtgacaatgtagagaaaaaggaactcttatacactgttgatgagaatgtaaactagtacaagcactatagaaaacagtatgaagagttctcaaaaaaaacaaaaatagaactactatactatccagcaatcccactactgggtatccacccaaagtaaaagaactcaatatatcaaatgcatacctgcactcactggtttacggcagtactattcacaatagcaaaaatatggaatcaactttagtgttcatcaatgggtgaatgtataaagaaaatgtgatgcacacacacacacacacacacatatac

SEQ ID NO: 30839 - DNA, 1028 bp, Homo sapiens
aagcaaatgcccaaaattagagatgagaaaacaagggcaccttcaggaaacagagaagggctgccatggtcacctgtagaagtgacaggagaaggaaatgggaaagttacggaaagacagacaagccagttggagagagattttcagcactgtgctaagcactttatgctttgtgttgtagaccatagggagccagtgacaattttgggcttgaagaaaactgtgaaagaaagtgttctatccctgttataattccagtctttgaacaccctcccttccaataacccaccttcgctttgcctcgccaattacagttcagttcaggtatgacctctgtgcacatttccattataggacatgatataccccattgggactgtttctctctgctgtatacaactgttttgtcatttctgtatacttgctgtcttgttcagaataagcaccttatgataaaagtggagggaaagaagaaggaggggaaagatggaatcttgaaatatatctacaaagaatttaagcataaaaaacagatatttaaaaatctatatttctagttaaggagaaactaggacaggcaggaagcaagtagtaacgcctaaggtaagacaaaatcttataactgcattgcagtcttctcaagatgcctcaaggctttaagagtaagaacaagtataataataataaaagaagcagaagaaagatagcttgctcatttaatatttatatagcacttcctaggggaccgatattgctgtttgatttatataaagccaattaattattataataaattaatgatgtagatactcctactatccccattttacagatgaagaaattcagtcacagagaggttaagcagatggccccccaaaatcctgataacaatactagaattgtaaaaattaggtcatgccaaattcatttaattgcatttgaataaaagtcattgatagagttggagattgacccagtgttgggttgtaactttagtttcttttgttggttgtaataaagggtaattt

SEQ ID NO: 30840 - DNA, 1026 bp, Homo sapiens
acaacttgtgagttggtctggggaattaatattcacaacccttagcacagtacaaattgtaatgtagctggcccttctacattcacctgaaacatctgagtcattttagtttactatctccttcacctgtaagttctattttgttattctgtgttacttttggaaaagtagccgaaaaacaacaacaacaaaaaacacaaccttggaagatctgaggagcaagacatacagttcccttaagaaacatgctcaccttctttcctgcttttccaagatggtggtaattgcttcatatgggttggtttttcctcaatgtgaaaactcagggagaggaagaggttgtggcaatgtcactcattgccagagagataattcttgtatgttttaaattacatggctgtcctttagggatttgtttttcatactacaaggaaatatcgtccatgtagttggtgccaatgtgaaacttttctatgccacaagcctttttttgaaatcataagaaaatatacgtgtgtgagcttttcaaataatttctgttgtttttttgtcatttgcataataaataattggaaacaacttaaaaggagcaattagtaattccaaaagttcaagtatcaaaggtaaatatttgagtaatgaattatttcgccttccttaaaaaaagacgcagcttcacgcatgtgactataccagcttcatttaatgctgtgtggattgatcattataattcatgacattctatttagtcttgtggtgtgcttttatgttttccatcttcccttagctaaatgctatatggctttaaaaaatacatatgtatttataatttataatggcagattatattaaagtaacttattttcccagaaatgtctgaatctgaaataacctattttcacttaaatatctaaaaccactccaaatactaatggtgtgaatactctgcatgaaactaaaaccattttacagaaattttgacatacaatgctttgttaaggcatcatggatgtggcttctattttt

SEQ ID NO: 30841 - DNA, 1046 bp, Homo sapiens
tatgtcaagtgaagttcctcagaggaggtgacatgacttaaagggtgactacgaatttgggttggggaggaagctgttcttggcagcagaacagcatgctaaggctctaagttataaaagggtgtaactgggaattaggagtagttcagtatgactagagtttaggtaacctgtgggtgtggtatgatactttataccaccatgattttttattgatttgatacccttaaggagaggtaaaattcatagatcagacagataactgagcctagataactaggaagttggaaggagaaagggatgggttggtgatgatgaattttattctggtctccttcccttccatcaattcactaaatatacactaagcacctaccactcgcaaggaactgaactaggcactaggaacgcattgaaacaaagcttgtgcccatgtggaactttcattctaatgtgggagatggaccataaataatcaaatatatctcaagtagtaataagtgctatgaagaaaatgaagcagagtaaagaattagagaatgatgaaagcagcacagttttaataattgaatggtcatgggaggcttttctgaggatgtaatatttgagccaaaggcctgaatgaagtgtgggagcaatctaaatggctatctggaggagagtatgccatgtggagagaaaagctgatgagatgggagcttcaagaagcaaagcgaagatacagttgggagggagggagggagagagagaaaacaatgagaaatgagatcagagaggtgatcaggcaccaaagtatggtaagggctctggatttaaagattatagaaagcctttggagggtttgcaagacatggttttgttttaaaaggatcactctactatatagggaaagacaatgagtgtgaaaatgcaaacaggagactttttaggagactattgcattcagttaggttgagagacagtgtgactagcaacaggctggtagcagtggaggaggtgagaaagtgattggacacaggaggtatttgaaagttaataagccaata

SEQ ID NO: 30842 - DNA, 1070 bp, Homo sapiens
gatggagaaatttcagaagcataataaagttcacaataaggataatactttatataatgtataaagtatatataatataatatatatgttatataaactgcacattatattcaaacttaaaattgagctttttttttaaaggcccaaaattgtacagtgatacaaggagctatttctaaaatttggcttatgtataatatatttaaatggggaatttcatctaaaacaatgatgtagtatttttaatattctgattggtaaaattaaagaggaaattaatctttatatattatttcttgcagaaacattcattattttattaatattgccctaagtacaactaggcaagtgattgccacctaaatcagaagacgttctaaagtcagtaagaaagtgtgaaatgctagtataaaggttattttttttctttcctaaataactaaagtgaggtgtagattgagccttgatattatttagttaatgttttttattaattaattttggctggactttatttagcttgattaggttattatctgtcaaaccttttaagttgacaacatgactcatatatatacatgtgtataagatgagcatgtgtcgaagacttattcgactcattaatgaggaaaccagcagatagtaaacctggttcaaagtacaattcaagaaactgagtatttatgggcattgaagaaaaaatgttgagataaaattgctgtgcagaaaaaagtgttaatgaagccgacctgactacttaaccttagagacctgctttacaaggttggcccttgattggcatctgggaacttggagttcagggggcttccaccattcccagaactgatcaaagtagcttactatatctaaactgtaaaacaatatagtttctcctgaacacctgctttccttctgggagtctggaattttggtatgtgccaggcagagactacctttgtgaccagctcccagtaaaaaccccaggcactcagtctctaacaagcttttctggttgacagtgtttcacaagtgctgttacaactggttgctgggagaattaagctcatcct

SEQ ID NO: 30843 - DNA, 1031 bp, Homo sapiens
accaccaaggttactttgaaatctatgtatatagctagttacagacgggagctatgtgtttcttcattattttgcagctcctcgttgttcctgtgattcctgaacacctttttggaaatatgggtctctgtgagttttgagcacactactatcactttggatagtcactccatttatatttttataaacttccattagagaatcattaaggctgtttaatatctgctctggatattacgcattggctttttgttgcctagtgctacaaaccttcctgtgggactcagtgtcttcaggcaatgattgtgtatcctgttacagatggttgtgatacaagaagaaccactcttctttgaaaataaactcttggaagcttttgccagctatttggggggtaggaggaatattagcaactgtattggttgtctacagatacagaattgcctgttgtgagggaactgattgttttgttgggaaaagaaatttaccaggagaaagagttttgtgctgtattgtgagagatctcgcctctcagttaaatgagccctgggttaaagtcagtgtgaagggcagctgtgtgcgggcacgagccagagtgtctgcctcagactagatttgacttgagttctttatgacccaggactctggataatgtgaatttgctttcctatttaactagaagatacatgtactatagatcattgtctcattttagtgattgttccttaaactagtgaaactagtggatttctcttcttcctctttattttctgcatgttaaatgtgaaccttagtgtatttgtattttgtagaaaataatgaaaaattttaatggagaatgatttaaaaacatttacaatacattatttttgcatctgtgttgttgcattcccattggctgagctttgggctgggtttttgtttgtttgttttttgcagtaaatggtgttgagcataatttttttcatttcccttagggcagcttcctcttctgggtgaataagatcaagccaagtttggctggggcggcc

SEQ ID NO: 30844 - DNA, 1085 bp, Homo sapiens
tctaatcatacttgcccccgcctccccactgtgtaaagccagtatctcctgcagctgtcaggacaaagatgaaaatctttaacttggccaggaggccccacccctcccctatcccaggctggctttcttgcagtttcttgtaagtgcctttctcctccaccttttgtatccttgcccccagttactgccttcagcctccaggcctcaggcactaactgaggaatttggagattaatgagccaattcctgcttcaatgagctcaccatctactgaggacaaaggacatgcaattggatacagtaaagcaaaatgtgtagatattgtaattgaaatatgcctaaggggctttgggaacatagagaagaagtagtttggaaatgtaagtcttatcaaaagtgaaaatactaggaaatcaatgacttactttcgttttgggaatcttgcctcttttcaaaaatgagtatttttttcctgtaaaagaaaagcaaagcaaattgttttaatattcagaaactctcaaaggaaatgacacaagcctacaaaacttacttttaactctttgttaaagttatataccttttataatacctccttcagcatagatgagttaagtaaaaaagaaaaaagtaaaagatgaggccaaatagaaatatattcctttgtgcctctttctctctctcctcctctctttcttttctaaatctgatagggaattgatttatagatggggaaatatggtgatagaggttacttttttggagactttttttctgacaaagtatcaatttcttttctatcatgtgagtgaaggagccaggattattttcaatctcaattctaatctatgatctccaaaacaaacaaacaaataaacacactcttcgcataagggaacactgtaaaaagactccctgaaaaaatgtgatataaatataatggaagcccactatcgtttcagtagacaagaacatctgctgtgagggtaaccctatgtcctggtttgcctcagtctggtgaaggtcattatcaatcacttagcgagctttaactatttttagcatccctttcactctcaaaggtatct

SEQ ID NO: 30845 - DNA, 1035 bp, Homo sapiens
gcaaatctaccaccttgactccaacgatatagttaaataacaggacttctctctcttatagcacaaaggcttagaatctctctgcagtcctgcatctacattaatgtataagtatcattctgtacatttttctgaatttgaggcatagtcaactacctacatggttgaatgtgaaagccctttataaagtagtatcagttacagtatgtaaaaatgtttggaaaacaccatccaaaaatatctccccccgtgagctttcccatgaagtttcatcaggaggagcagtggaggagaggctgactgcatcgtgaccttggctgtgatcacctgcttggctgagcattctgacaacctctaagatctatgcatcatcaaagcctttggggcccagaggcacagctgcagctcttcctcttctttaggttaccttcaatgtgcttcagaccgtttgcttacattatctgctttgttgctaaggaaacatcgtaagaaaactactgaatcacaccaagttaacaaaccagattcactgaggagaaatgaatgagataagaggagggggatgattttgagagatattctctgaactcctgaggccacagtttttaaatctataaaagaggatgtatatactgcttacacatggagttataagaataagctgaggttaaatatgggcaaaaacgatctgtaagctggctgtttctcctacttgacttttctgcagtttattcttgcatttcaacatggtggttttggtttgggatgggttcagatagcctccaagaagcaagctagacaaatctctatacccttaggctacgtgtcaggaatttgaggtatctgtctctttcacaatgccttctctggctctctggtctacccaacctctcccttgttataatgccgtggcccttctgatttatttcatcatttgaactgtatgccttaaaatatgcccaatgatacccctgaaaatatgtaattctcaacttgaactgaaaaaattcaccctgttgaaaggaatctctgggt

SEQ ID NO: 30846 - DNA, 1035 bp, Homo sapiens
tagatattgtattattatttctacttaaaataaagaggctgaggtccagaaagtaaatctgagttctgtgcctatttaatctagatgacctctgcttacctgcttgcagggagtgcacatcaaaggaagactcaaggtggcaggaagcttgctgtttatttcaaacttaaaatagtggctgaaagagggtggtgattttgacctccttgtggagcatgaggagctcaggagagcatctccttcccgggctttcagaaagttgtttcatttcttaggtggtaacctattatatagaccttccttggtaaagtctttccacctttcagctattctccatcagctgctcaccatgattcttgggagaaggcaaaacctatgggaaatttaatgtggtatctggcacagagtaggcactgaaggcttggcagtttccttacccaactactttctaccccaacttagtgtgctaactgtatactagctttctttttctcttccttgctgtattgtcctgtcccatctcctctgctctcccacagggagtctagacttacctgttttctctcagcagagaatttcccatcctctcagtcctctcagggcttcccctccgtccctttaccacttccttcttgccttgtgctctgacagggcaactcctgacttaaagaaagggctgtgtggctctggccacccgtgcagagacagcagaaaggagaagggtgtctctgcagagggaaggaagaggctgggggaggagtgttagaggcacgcatgtgcagaatgtcctaacatgtcagtgcctgaaccaacctggctgttggccataaccagcaactacccgtcaatgagagcttcgaacctctggggaatcccaggtctgaaattacagatgggccatgggagtttttccactacagatatttacgtttataaatcacgttgtcttcttagaaaagtcagaaggaggttaaaacagtcaagccacagacctgtagaaaatatagtatcaacaactctcaaatctgaaaacaa

SEQ ID NO: 30847 - DNA, 1008 bp, Homo sapiens
atttaacttttgtaagcaactgacaaactgtttcagaccaaaaccactgttcaaattaaaactctgtttcagaagttgttgcaacattttacactctcatcagccatgtatgaaaatttcagctgggcgtggtggctcatgcctgtaatcttagcactttgggaggctgaggcgggctgagcccctgaggtcaggagttggagaccagcctagccaacatggcgaaatgccgtctctactaaaaatacaaaaattatctgggcatggtggcacgtgactgtaatcctagctacttgggaggctgaggcaggagaatcacttgaatccgggaggcggaggttgcagtgagctgagattgggagccattgcactccagcctgggcaacagagtgagactctgtcagaaaaaaaaaagaaaagaaaagaaaagaaaattttagttgctccacgtccttgccaatacctgttattcagtgtttttatttttaggcaatgtagtaggtgtgtattgacgtaccactgtgggtttaatttgcatgtttctggcagctaatgatggtgaacatcttcatgtgtttattggccatttgtatattctttgtaaagtgtctgttcacattctttgcccagtttttaattcagtagtttgtcttcttatttttgaattgttaagagttatttatagattctattatcaaatccttttcttggggaacttttgaaaaatccctaagcccatgactcatatttttccctgagcctgctgctcatattttttgtgatgtcttttgaagagcagaagatttttaattttggtgacatccaatttatcaatatttcgttttatggttagtacttaaaaaaatcctggctaagaaatctttgcctaccttaagttctcctatgttttcttctataatttatatagttctatctttcatgttaaagtatatgatcatgccacattacattttgggcctagtacatggggatcaaggttcattgctt

SEQ ID NO: 30848 - DNA, 1050 bp, Homo sapiens
tttcctgaagctaaatggaacaccacagccagagttttcagtcacatccgtcttggcatgggccatgttcttattatagtccagtgttttatttcttcaatggctaatatctataatgaaaagatactgaaggaagggaaccagctcactgaaagcatcttcatacagaacagcaaactctatttctttggcattctgtttaatgggctgactctgggccttcagaggagtaaccgtgatcagattaagaactgtggatttttttatggccacagtgcattttcagtagcccttatttttgtaactgcattccagggcctttcagtggctttcattctgaagttcctggataacatgttccatgtcttgatggcccaggttaccactgtcattatcacaacagtgtctgtcctggtctttgacttcaggccctccctggaatttttcttggaagccccatcagtccttctctctatatttatttataatgccagcaagcctcaagttccggaatacgcacctaggcaagaaaggatccgagatctaagtggcaatctttgggagcgttccagtggggtaagtttgtgagggtgttcctttttgcttgttcttcccaaatttaaagcatagttaattcaaggaaaaaaataaaatcagtactgatttgtcaaagaatgtattggatctctgacttttaaaaccgaatcaacaaacattccttttactcctgatgtttgcaagggctcataatcaatgctgtcaggtgtagagaaaaagtataagtcaatctcaaggaccttatgtgttacttcatagaatactatagaattatacacctggaagatacctcacaggttgtcttgtcctgtctgcatagttttacaagaaacaggcaaaatggtttacagataataaatgaaagaactggtacacctatgtctgactccaagtccctttctctttcttttccaccatagttagggaaaataagctcatttgtgagagaagttggcctttcgtattagtaagtcctgttgaatagaaagcctg

SEQ ID NO: 30849 - DNA, 1029 bp, Homo sapiens
ctattacatttaaagtaattgctgataaagagggacttacttttatcattttgctatttgttttacatatgtcttaaagctgttttcctctcgttttttgcattaatgtcttcttttgtgttaattttattgtggtgaaacatttaaatttctttctcatttcctcttggctactgtccttccttttcaacttacagaacttcctttagcacttcttacagggcaggtctagtggcaacaaactccctcagcttttgttcattggtgaatgcctatttctccctcacttttgaaggacagttttgccagatagagaattcgtggctagcaggtttttgttttgttttgttttgtttttcctttagcactttaaatatattagcccactgtcttctagtcttcagagtttctgatgacaaatctgctaataatcttattgggaatccctgtttataatgagttgcttttttcttgctgctctccaaattctctgtttgtctttgtctttcaacagtttagacacaatgtatctcggtaggggtctctttgggttcttgctacttggatttcattgagtttcttggatatttatactcatggcttttatcagatttgaaaagttttcagtcattattttttcaaatactctatgtggccctttctcttttccttttgaactcttataatgagtgtgtttgtctgcttgaagatgttccatgggtcccttggtctctgttcaattttctttagtctttctgttctcagactcaataattttcattgttgtgtgtttaggtttcctgattctttattccacctgctccaatctgtctctgagttcctctagtgaattttttatttcagtttttgtacctttcagctccagaaagtttcccaaaagggaggaaagagaaaaattgaagtggatggggagaaggaaaagggccccagccttttaaatcccctagaagtcacttcaatccaagagaaagtggcttagaacaatgagaggaagtgtaacaccattag

SEQ ID NO: 30850 - DNA, 1028 bp, Homo sapiens
attcacttctgaattttaagaatcagctcattttatatttaaaaacataggtaatttcaaaagtcagaactcaagtggtgcaattttccataatcacagagtgcagtgttattgggattcaaggggaaactggggtaagtggtattttgtgtatctacaaaaatgaatattaatatggccttcaattgttaaaatttactaattagtatttctctagaattagtacttacagagctgactgacatttgtgtgaacatcaattttaattaaaaaacaatcgtgaaggttatttggcctcttaatttatccttttctctggaattgtttcttgctccttcctctttctgccaaaagccagagacagtaagcagtgacatcctgaacaggtcattccaatgctcatcacagtcccacttgggtggaaatgtggagtcagctcgcctcctccccactctagtcaaaggacactgcatctggtttaaggagaggagagaagagtagagggatgtggcagaatggtgacatggttggcattttaggaagggaaatcttttgtaatcaaagaataaacctcagttgagttgacactatctattctggaacaaattcaccaaactcttttccaccccaaaacatgttacgaaaacaatgatctcatttgaaggggcagagaatggttagatgaagacttcatcagacaaggttactgaaaaggaaaaaaaaaataaatcaacatctgagttttgtaagtgccttaaaaaaagttgctgagaggaaaaccaataactctctcctctctactcttcctctagctctaattcaaacatcacacaaaatccacactcttattttgagatttcgttttcttctatagtcttgttcctcttccccttcctgaagtttttaatattttgaaaacttttccgtcatatgacattcattttcacaccttcgacagcttatgtatttctgagtccttttagtgagcccaggtctcccagacaagcctcacttcaggataaagtggg

SEQ ID NO: 30851 - DNA, 1072 bp, Homo sapiens
ccaagggctgagattctctttgagaagaaggtcccctcccattctctatgcattttttatttgtataaatttaaagggtacaagcgaaatttcgttacatgcatgtattgcacagtggtgaagtcatggcttttactggatttgttatctgaaaaatgtactttgtaccaattaagtaatttctcataatctccccaccttctgtgcccccacccttccaagtctctagtgtctatcattccacactctttgcccatgtgtacacattatatagctcccacttataagtgaaaacatgcagtatttgactttctgtttctgagttgtttcacttaaggcaatggcctccagttccatccatgtcaccgcagaacacattatttcattcttttttatggctgaatagtattccattgtgtttatataccacattttctttatcctattatccattgacaggacacttaggttgattccatatctttgctgttggccacacatttttttagatgtggttactacagcaacacacttgtcaggtcagccttgggaagacagcaataacttctgtcaggatacagaaacaaatttatcttcttagtagctggccagataatttcctaagggagaaagggctttgatagcaatgaggtgggtaaaagacatagccttggtcttaagtgaagaaggaaagtagacggaagactgggaccaagcactgcagaggaaatgtgaagagtgatgggagtctggctggagaagtgggggaagtcgggggaggcttagagaaataggtagctgcaggaggtgggggactgagcagagcattgggagatgtgactctttcctatgaatctccagatcaccactaaaattaccaaaaaatctttgctgcaaaaactggtgaagggccttgggtattaaggttggcctggggcagaaacagagtcacctgcacaaataagggaaagggtcaggtctaggctgaattacttgacacaggcagttaagtattatacacagagtcaggatgcagttgcaggacaggtatggagccagagctaaagtattt

SEQ ID NO: 30852 - DNA, 1050 bp, Homo sapiens
tttcatagtaattaaatgagatgatagtatataatgtggctaactccagagcctgaacacacagaggcactaaataagtaactgtcatggagtagtctattatgaaatgggtcacaggacaaataggttttaatgaatgtaataactagccaattagctaggcactgttctaagtgctttacaaatgcagactcaggccgggtgcagtgactcatgcttgtaatcccagcactttgggaggccaaggcagtaggatcacttgaacccaggaggttgaagctgcagtgagctatgattgtaccactacactccagcctgagtgacggagcaaggccctgtctcttaaacaaaaaaaatgtaggctcattcagtcctcacaaaaacctttgaagtaggtgctattatttctatttaatagatggggaaattaggataaagagagattaatttgcccaatatttgggcttgtattagttaaaagtttttttattattattattattctatagcttcataaacaactctgaaatctcagtgacttaacacagtacaagttttcttccttgcccaagtcacaggccaattagacattcagtgaaggccatcatgtagggattcggagttagtctgaatcaccaaaggtggtaactaccaacttttaggttctcagaatcctcttgtggaccctctgcatccaggctggagaaagaataaggaagagcttaaagcaatctttctcaacctcagtatttgtatggttaattttatgtgtcaatttggctgggttaagggatgcccaaatagctggtaaaatattatttctggggatgtgtatgagagtatttctggaagggattggaatttgaataaacagactgagtaaggaagatctgccctcagcaatgagggtggcaacatccaactcattgagggcctaaataatacaatagagaaaggacaaattctctctcttcttcagctggaacatccatcttctcctgcccttaggcatgagagctcctggttctccggtcttccaactctgggact

SEQ ID NO: 30853 - DNA, 1034 bp, Homo sapiens
tggtgagcacaagaaaaatcagtaacatcaaagttaaatacctgtctctaaggttgttatttcagacaaccataaatgtggaaagtttgtggttctttcattaaaggtaactaatacggcattcaagtggagctagctggacatgttttatttagataattacatgttttgtttagagaattacagtcagtgagatccacagatctttaaaaaatctataattttgccagttgagccatcccatgtaagtaaaaaaaaatgcctagtgataagatgtttagaaatattcatttctagtttaaaaagtagtgtggcatataatttttaaaaagctttattttcctttggacatttatcatgaaaaagttttattgcaaattggtgacattgtcaaatatagcctttggatattttccttccttcctgtttagtcacacatacaaccccagagagttcagtggtaaactttcctcatagattttatttctgtatattcaatccaattctcaggtgtaaatgtagaagtcgactcctttctgtccatcttttaaagtaaaaattaagccctgcatcctacaagcatctgccaacatagattctcatgcatctcgtaagccaacacaatgtttccacaactgatcagggtttactaagaggtacttattctgccgaagtatctgtcactactcacctgtaacaaaggtgagtgtcagagatctcatcactatagcataagcagaatcagttgcagaggggcaaaactttatgtggatgaagtttgtttttgctacaccctgcaattaatatctctcctctcctgttttggtgtcacctgtctcttatgtggtactttaacccttatatttgacagtcaaataatgatcacataaccagatgcagaaagaagcaggactttaacgcagacctgaaaggtcattaaatccacgctccttccagcactccaccttagcaaaggttcagaggtaagcaagagtatggcttgtttggagaactagagactgggacattcaggg

SEQ ID NO: 30854 - DNA, 1049 bp, Homo sapiens
catttgctaaatacagaatcctttccccattgcttgtttttgtcaggtttgttgaagatcagatggttgtagatgtgtggttttatctctgagttctctattttgttccattggtctctgtgcctgtttttgtaccagtaccatgttgttttggttactgtagctttgtagtatagtttcaagttgggtagcatgatgctaccagctttattctttttgtttaggattgtcctggctatatgagctttttttaggttccatatgaattttaaaatagtcttttctaattcttgaagaatgtcaatggtagtttaatgggaatggcattgaatgtataaattgctttggggcagtatggccattttcacaatgttgattctttctatccatgagcatggactgtttttccatctacttgtgccctctctgatttccttgagcagttctccttgaagaggcccttcacttccttgttagctatattcctaggtattttattatttttgtggcaattgtgaatgggagttcattcataatttgattctctgcttgtctgttgttggtgtgtaggaatgtttatgactcctgcacattgattttgtatatttaaattttgctgaagttccttataagtttaagaagctcttgggctgagtcaatggggttttctagatataggatcatgtcatctgcaaacaaagataatttgacttcctctcttactatttgaatacgctttatttttctctcttgcctgattgctctggccagaacttccaatattatgttgaataagagtggtgagagagggcacccttgtcttgtgccagttaaggggaacgcttccaccttttgcccattcagtatgttattggctatgggtttgtcgtaaatggctcttattattttgaggtatgttccttcaatacctagtttattgagagtttttgacataaagagatgttgaattttattgaaggtcttttctgcatcttttgagataatcatgtggtttttgtctttagttctgtttaggtgatgaattacat

SEQ ID NO: 30855 - DNA, 1035 bp, Homo sapiens
cttcatgctaaaaactctcaataaactaggtattaatggaacgtatctcaaaataataaaagctatttatgacaaacccacagccaatatcatactgaatgggaaaaagctgggagcattccctttgaaaaccagcacaagacaaggatgccctctctcatcactcctattcaacatagtattggaagttcgggccaggacaatcaggcaagagaaagaaataaaccgtattcaaataggaagagaggaagtctaattgtctccatttgcagatgacatgattgtctatttagaaaactcccatcgtcccagccgaaaatctccttaagctgataagcaacttcagcaaagtcttaggatacaaaatcaatgtgcaaaaatcacaagcattcctatacatcaataatagacaaacacagagccaaatcatgagtgaactcctattcacaattgctacaaagagaataaaatacctaggaatacaacttacaagggatgtgaaggacctcttcaaggagaactataaacgactgctcaaggaaataagagaggacacaaacatatggaaaaagattccacgctcatggataggaagaatcaatagcatgaaaatggccatactgcccaaagtaatttatagattcaatgctatctccctcaggctaccattgactttcttcacagaattggaaaaaagctactttaaatttcatatggaaccaaaaaagagcccatacaacgaagacaatcctaagcaaaaagaacaaagctggagtcatcacgctacctgaattcaaactatactataaggctacagtaaccaaaacagcatggtactggtactaaaacagatatatagaccaatggaacagaacagaggcctcagaaataatgcctcacatctacaaccatctgatttttgacaaacctgacaaaaacaagcaatggggaaaggattccctatttaataaatggtgctaggaaaactggccagccatatgcagaaaactgaaacgggacccctttcctacacct

SEQ ID NO: 30856 - DNA, 1074 bp, Homo sapiens
aaagcaaaatagaagatatagtgaaatttttggaatcatgaaggaaatggatcagataatattgatcatcagattttagaatactacaagacgcggctgggggaagagaagaaagctagaacacattaaaagatgttctgctttcatatatgaaatcataagaatttgtaaatttttttaagttgatgaattcagatgttatatctgaggaaaggaagaaaattatttctcttttcttttcacagtgctgtgaccttttctggaatccacctgttgagatgctttatagccagtgtaacaggaagtcttgactaatggttcccggtttagctgaagattcaaaaaaaaaaaaaaaagctttatgctaactggagttaaatacctagaagaatttcaacattgttttaaatgttgtgcatctgtaacttcaggaggatcacttgagctttaaaacctgtgccttctcgaaacaagaatttgtgcctgaggtgaaaaaagtttgtaagttattgaattatggtgttcattagaacagctactagctgattcccctattttaacaaactgacaagagcacatccataaaatgaaaacctgttacaactatgtacagaagggtttgacgttttattgggcttttgtcttttaaagaatatgtctactatgggtattttttttttaaatgttaaaatgggctaggtaaaagggggctgcttttctgttaagcatcgataggtaagttgatggataaaagttactatgtaagcctatttttttgagtccttatttgaatattgaaaacattcttgataaaatgtgttagtccatgttggaaacaaccgaaagaacagaattcaagttctagttctgatgtttattatatatgttggatcttgggcaacttacttgatttctcggaaattcatttgttactgtaaacgtgaaagctattaagattcaaatgaatggttttacagcaggtaacatgtgagaagacagctacatatttgtaaagccaaaccaacaaagaaatatagcaaaattcacaggtagatttattacaagaaatgtcct

SEQ ID NO: 30857 - DNA, 1035 bp, Homo sapiens
gccgggaaggagtgcggctgcagctctgaggtggggtagagggttgtctcctcccccagtagggaccaaactgaaaatcgactccttcgggaaggccaggagctagaagctcactgttaaccctttacagctggtttcagtggagccaaagccctctggtctgatctggtattaagaggatgttgggacccttggatggccaacggctgttctacttctcagtgatctgagtccctggaagctgctggccttgttaaagcagtcattggtggcttctcaggctttgatgtccaaacgcttaaatttgcgcatgcttggaaaacatcccacctctgctagcatctaccttagggccatcctatccctgcccctagaagcaattgttcctggccccagtcagcagcagccactatggctcagggacctgtttgtcacctttgctactgtagaggccgccttggcccccaaagtagatgttctttgcaatggcggcctcctctttcatctttatttctgtgcaaagaagagaaaatgaagaatctgaaaatccagaaaatatctggggaaatctgagagaagctttttgggaaaaatgttttcttccttaaaatgtattaagatatttaatttgtgtgagaaaaaatatgtattttagctttaaaaattataagaatttctttgaaatgatacagtaaggaacatctttatgcaaagtgttcaatttcaaacaccgtatccagtacagaacatttctggcagatattccttaccaaaatgaccccaaaatccacggcagagacacctgcactgggattctcaacgctggctgcacattactatttccaggaaggagtggtgaaaatattgatgtcaagctcccatctccccagagattctaacttcatttgcttgaggtgctgcccaggcattgttatattttaaagtatccccagatgattctcctgtgcagtcagaattgggagctacacatttaatgttatcagagaacagaaggaaaatgagagaacctaggtt

SEQ ID NO: 30858 - DNA, 1007 bp, Homo sapiens
attttctcaaaaaataaatactctgaggctacagtttctcaggattggtcttaaccccagagtgtgttttgttgttgttgtttttggaaagtttcaaaaacatctgtttggaagagattatttcagtggagaacatgtgtgtcagcagttaaatgtttcagacccattttctttctttttttgtgtgtgtccaaataaccctttaaactgtcaagtacctaggcctcaatgaggtgtcaaatgattttgatatttttttcttgatttctctgctttgtctcagaaaatgactaaggaaaataagaaggatcttagatatattttgcattgccaagaaaaataataggccttactgttgccttcacccaactttgaaattgtactttgttcatttcacaatgggacaacgttacactgcaattaggttctccagcttaagcgttacttgccttttttcccgaaacattaaaataaagttctcaggtaactgaaatctctagaattatctttctaaaccaaactcactaggtaacttggttcaaaaagtaactcactttccccagatactaaataaaatgcatcattttatgtatttataattttatttatttatttataatcatcatccagtgaccaagccccccaaccttccccaaacatagccatattttttggtcatagttctgcttttacatgaatgagaccccacgcatcctgttttggggtccttaaaatggtacttcttacaactgtgttgtggggcttaatgggttaactcctttctccctctctggatacctgcaccttctcactccctctcactcccaattcttttctccttgttgtttttgaaagcaggatggtggctggcagcagcaacaggatctgtttccattttgaaccttataaattaccgagggtgcagaagtaacaggaattgtttggctggtcctcgttaagcaggagagggtctgggctgaatttcctcagtaaaatatttgttgctg

SEQ ID NO: 30859 - DNA, 1073 bp, Homo sapiens
caaaggacataatctcattctcttttatggctgtgtagtattccatggtgcatatataccacattttctttatccaatctatcattgattgacatttaggttgattctatgtctttgctattgtgaatggtgctgcagtgaacatatgcatgcagatgtctttataatagaatgatttacattcctttgggcatatacccagtaatgtgattactggttcgaatggtatttctgttttgaggttcaaagtaccttttaaatctcccaatctcttcccacttaacaaagaagaaaactgagagtaagtgatataaattacttgcccaaaatcatgtactagtttgaagcatagccaggaatgtaactcaagttcccaagggtatttcctcaagatagttgtactaaatcacaagatgtgcccacgagagcacatcagctatgcttatcaacaacaaaaataatttttaaatatcatattttcacagtcgtgtcttttgatcatgcaatttaagactatgtctgactcccttacaattactgaaaactgaaacaagattttttattatcgttttcccccaacgaattgtccagccatctgtttgtctgtgtaccaggcaagctgggttgatactaagtaaaactataaagttgtcaaattttctttagtgtttcaaagagccacagcctcccatgaaccatggtcttactctgactccctgtggatcccgggggtaaagttttaggggtgtgtgtgtgtgtgtgtgtgtgtgtgtgtagtgtgtgtgttttattttcatcaatgctgggttccttctttgtgtcaggaacagggcatcttggagacccgagcagttggcctgtctgttacttcagggaagtgttattcctgagaactggtatttctgggtccccactaagccaccatgaagataagccatgacaaacaggactaaccgactgtttctgtccctctagatttaactgcccttttgtgaacaacgtgactcacacctatcttaaataaacgcctacctggagcatatgttatgggccaaaaagttaacatttgagtg

SEQ ID NO: 30860 - DNA, 1030 bp, Homo sapiens
aatcccagcactttgggaggccgatgcaggcggattgcttgagcccaggaattgaagggcaacatggcaaaaccatgtctgtacaaaaaaaaaaaaaaaaaaaattagccaggcgtggtggcacacacatctagttcccgctattcgggaggctgaggtgggaggattgcttgagcctgggaggcagaggttgcagtgagctgagatcgtgccactgcagaccctgggtgacagagccagaccctgtctcagaaaaatatatatgtaataataatatgtgctattatttgctcagtcaattaggtgcaatatataatagttttacttggctcagttgttttaacattcatttactcatccaacaatatttttaattcagttgaatgggtaatacatgtacaaatatggtaaaatttatatattcatacaagtgtgttttctctcccctcatccttattcttttcttcccccatatatttatccacaaatggtagcacctcttcgtattattctggaccttacatttttcgcttgagtattacgttggagatcttttcacattgatacagttaaaactgcctcattctttttaatgatagtttagtattcaattgtattaatataccctcatcatcatatgtaacatttattgagagcttactcctgatccaaatgctttcttaatactttagttttattaactcatggaagcctcataacaacctatgagataggcactatttttctatatttaacaaatgaggaaaactaggcacgggatgattaaatgtccaacagtcacacagtttataagtggtagggctcaggattagagcccagggagtcactttccagagattgctgccataataccgctaaacatgtagcctgtcatagtattacaaggtatttaaccagcctccatattaatggacattccaatcttttgcttaagaaacagtgctatagttaatattttgttaatagaacattttgtacatctacaataaattcctagaaatggactagc

SEQ ID NO: 30861 - DNA, 1010 bp, Homo sapiens
atgtacaatataaaaatatttatttttcaaagtcctttcttgttgtgttggttaattgagtgtgccaataaaggcaacaaggactcagatgtcttttgtctttctattttgtcatccttagcaaggtgggctgcctgcttagctccctcaaggtcctaatatggctgccgcagttccagatgtcccaggcagatgaccaaatcccaaaggagagtattgtttctcatagcctgtatctttttttttttttttttttttgagatggagtctcactctgttgcccaggctggagtgcagtggcgcaatctcggctcagtgcaacctctgccttccacgttcaagtgattctcctgcctcagcctcccaagtagctggaactacagacgcacgtcaccatgcctggctaatttttgtatttttagtagagatgggatttcgccacgttggccaggctggtctcaaactcctgacctcatgtgatccacccaccttggcctcccaaagtgctgggattacagccaccgtgcccagctgcctgcatcttttaaaagaacaaagaaattatttccagaaggtctccaacagattttgccttaattcttatggttagaacatcatttattatgtgcttatttccaaagcagtcgagggaactggaattacaataataggcttaacaaattttgaacaaagttggcttttggttggcaaggaaaaatcaggaaactaaatatacatagtgaaataaatctgccacataagccattctaataggattgctaggtaggtggattgaaggagatgaatagagagtgtcacaaaatgactagcactatactctaaaagtatgatcaggtaatgttatttgttggaattccacctgttctataactttctgaccaaacataaaaatattaaacagatttaagatacctttctctaaaaagattaacagtgtgtgaaaataagtaattggttataatccattagattcttctgaatctttttta

SEQ ID NO: 30862 - DNA, 1156 bp, Homo sapiens
ttgtatttttagtagagatggggtttcaccatcttggccaggctggtcttgaactcctgacctcacgatccacctgccccggcctcccaagatagcatattttaggtactgttatacaccttgctttttttcacttaaaagtatgtgtattctagaagataaatagatatgtgataaatatagtaaaatgttaaatatagaacctagcttgtagagactgggagtccactgtaaaattctttcaactttgttgttgttctgaaaattttcataatcaaaattggaaatgaaaatacatagtttagagagatttctagaggaattcatgataactctggttcttttttttacagccatataacaattccatcatataaatgtaccattatttacttatcaatgtcttaatgatagaagttttggtttctagtttttggttgttataaacagtgctacattgtaagtatagtaagaattcacagaagttggattcctaggtcacgacttacccattttgaattttgataaatattgctaaattgctctcaggaaaagttgtactgattttactcctgtcaacaaatgtgtagaataaagtggactcattatgcttatttatatattttattcttatttgtatgttttcaaaataactttattcttaagattttaggttttgtccaagtactaatacccttattaggggactgatattcctcagcagcatatgtgaagcaatgtattaatgagggagttttgcttctgtttttagccctgtggttcccaaactttgcagagtcattctgagaagctgcagcaaactcatgtggtgccaggatatttaaaatttttgaggcaaacacaggaatgttagacatattgtcagacaccacatgaactagtagcttgagataataaacagtttcattatgttgctgtactatatttttgtcaatgatgtcatatctttgcaaagctgagtttttggcagttgctaagctacaaaagcaggtatcatgtgacaatcaaaatggaacaagtttccaatctgattgcaagattggaaaattatatagttccccaagggcatatacattcatgagaattatggatatttaggactgaaattaatattattttttctttcaacttatgc

SEQ ID NO: 30863 - DNA, 1062 bp, Homo sapiens
aactagcatctttcttgtgtgtatgaaccatttaaaaactgccttgtgttcattttccttttggatgatagttgtttttcatactgatttctagaaactctttttggttttttgttgtttttttttgtttgtttgttggttttgagacaaagtctcactcagtcacccaggctggaatgcagtggtgcgatcttggctcactgcagcctctgcctcctggattcaagcagttctacaacctcagcctcccgagtagctgggattacaggcatgcaccaccaccacacctggctaatttttgtatttttagtagagatggggtttcaccatgttggccaggctggtctcgaactcctgacctcgggggatctgcccaccttggcctcccaaagtgctgggattacaggcttgagccaccgcgcctggccagaaactctttgattaatgaataaattcgtcctttatctgtcatgagttgcaaatatgtcccagcttgtttatctcttgattttgtctgaggcatatttttcttgtaggcactgatacctgtaggtctgtcagagaattctcacttactcatatgtatctgtcttttctgccatttctttctaatatcacaagtatctgtgacatttcatcacagatttaaaacacagcatgcttgtataagaaagaatctgttcttattagattggaatatgtggtaattattgtgttgttgaagccttaatattgataagtaatgtttcctaaagactttcttcatgagaccattttatggatgcctgaacagtcagtattttttattctgaaagatgcaatatgataaataggaaagtactgaattttccactaattatgttaattttacttatataaacctctgtttctttaccagtaaaataaaaaaaccaaggcattataaaagttccaaaatcttttggaacttttataatataactatatatttttcctaatatcttagtgtttcatagcgctttgtactttttagatgacatttatttaattcacttcatctgccatatatacaagtatataggg

SEQ ID NO: 30864 - DNA, 1071 bp, Homo sapiens
taggcagaatgactggggaaaactacatgaagagtgtgaatatgagtaagttttaggtgaagaacatgaggatgagagcatgcaaaggcactgaagcaaacttgagttgtttaggggatagtgaggagaccactgcaacttcagaaatcttttaggaaaacgagtctgtcactacgcttaatttgattaatggacctattgggaggtagactatgtagcagtaggaagaagtacaatactccagcaaatgggaagaactctgtagcaatcatactgatagataccccaaagaatcaggtattttgtatttaacgttttatttgggcatcagtataaacaaaactatattaagtgtcactgtaaattttgggcataaaaaacagaaattttcaaatctgattagaaaaattaatctgattttgaaaattaactttgtttacagctgaagagctcactcattatgcttcagaaaacgtttgatctactaaataagaataagactggcatggctgttgaaagctagtgatctgaaggactaaaaccgcagagatacttggaacttaaagaaaatacctggaagaaaaccagacgaatgaaggattttggcatagaacatttctatgttttttcattattgagatttctaatatgaacatttctttcagtaacatttatttgataattagtttctgctggccttaataatccatcctttcacttcttatagatatttttaagctgtgaatttcttcagtgaaccatgaaatatattatagaactgaatttctctgatacaaaaagaaaatgacacaccctgaattgagtggtatggtctcatttctacagtgaagtctgatgctttgttagcacagaatccgtacatgtccaataggtcgcttttgtaactgagataagaccaagaggataaacaggacaatataagaagaaacctctatgtcattactgattttaaaggttctgttttcaggcatataacatttccaggtttgtgtactgtaaagattataatgtcttcatttatttagcatgcaaatttaatagtcaaacttt

SEQ ID NO: 30865 - DNA, 1048 bp, Homo sapiens
aacatgaattttcccatactatgtaatacttctgatttagcatttttaagttttcataattctatttatctccctttccttaacatggtgaggacaatgttagatctccatagctgggtaatattgatatttaggaagatttgttagccaggttctgctttttatacttagtcttgtccttaaactgacgatatgattccactttgcgaagagtagagaatataagactgcattcctcagggtgcaagtttttaattccctaaaattgaaaaataagagaacttcttaataactggaatttacattttccctatttaaaaccttgtcttggctgggcgcagtggctcatgcctgtaatcccaacactttgggaggctgaggtgggtggatcatgaggtcaggagttcaagaccagcctggccaacatggtgaaaccccatctctactcaaaatacacaaattagctgggcatggtggcatgtgcctgtaatcccagctacttgagaggctgaggcaggagaattgcttaaccgggacccgggaggcagaggttgcagtgagccaagatcgcgccattgcactttagcctgaactacagagcaagactccgtctcaaaaaaaataaagctttcatgtttattatgtaagttatatcaagaactcttaaaaatgtgtttgcttttttatttctctatgctgttttgaggataaatagctgcgttggagaatcaaatcatcaagcatttatacttgcccttttgatcttcttgctcacctcggtgtatgggatcacactgaccttggacaccatttgtagagacagaagtgtcttcacagctcttttctattgtcctggagtttatgcaaattacaggtgagcagtgggtaccacagtatggaggccccctgggaagtaatgggtgttgccattgacagggactattactacttggttaggagttctcaatcaaaacataggccaggctatggaaatgctgggtatccctggaattgccagcaaaattgtgcattggtgatgtgtgttttt

SEQ ID NO: 30866 - DNA, 1051 bp, Homo sapiens
aaaccacaaccctcaacgcaaaaatgatggaaaattgcgtgcagaatgtgccaaagttacaggcattgaggcctcagtgcgtagacatattttaaaagcctgctggtaacctgacctccaacagcagcaataacaacaaagaaccagtcttgaatatcagttgagaaaaaataccctaacatcaggttctggaaacatggtatggaagactgtttaagtgagtgtctgtgctgtcacagggaagcatgcaatggccttttaggatttattagtgtccaccacagctgaacactaggggcatcaaggtaagccaggtaccgtctgccccgggagaggctgaaacaggtgaccagagtttccatacagtgggaaggtacagcagtggagagcagcacagaggactacccagtctggtggtgaggagcagacctttttgaagatgatgtctgaactgaatttttgtcaggcaaagaaaaggctttcctagaggagagcacatcttgagtaaaggcaacgaagcgagaatagcatgccgtggtgtgtgtgtggagttacagtgttgaaacgaagtgcagagtagttaagcttatattttcacaactataggcagagatgggatttgttctggcctcttgaccatctgagggagtcccagaatgcacatcagtcctcattaattttatggctgttggttaatatttttgataatgctgatttttgttggtggaggtactgctttaaaaaaaggcatggctgggtgcggtgggtcacacctgtaatcccagcactttgggaggttgaggcgggtgactcatttgaggtcaggagttcaagactagcctggccaacatggtgaaaccccatctctactaaaaatacaaaaattagcccggcatggtggcaggcacctgtaatcccagctacttgggaggctgaggcacgagaatcacttgaacctgggaggtggaggttgcagtgagccgagatcaagccatggcattccagcctgggtaacagagtgagactcttgtctcaaaaaaagaaaaaaaga

SEQ ID NO: 30867 - DNA, 1061 bp, Homo sapiens
ttctataaagaaataaatacaaattgatgtaagagcatagaggagtgagtgatcgattatgtccaggaggtttggagatcagattaatatgtgaactcagtgtctcaatggacacgtagtattttgccaggcaaagaagtagaagttccagcacctagaaataataaatacttgaggtgatggatacttaaatactctgacatgattattacacttgccctatatgtaagatgtctcacatgtaccccataacattatacaaatatgtatcaataaaaaaaagaaaaagaaatacggaactgtcagtcaaaaggaacagtgtgatcaaagtctgtggtatattcaggaacagcaagggttaggtaggggtggggcaggtgggataggggagagcagaagatgttagaaaagtataacaaagaattcttggtgggtagctcaaaagttgtcttatatgaccactgaaggattatctgtaagctataagatcctattacccaccatgtctggatattgaattgtcaccatctctgcagttgtaaagaagaattattgctttatcattttaattattttatttttatttgcattttactcttgctaattcctcatcattttgctccatggcagtctgtgtctgtgtggagtgttgcaggacgagtggaaatgactgtttccaagttcatggcaattcagaaggcccttcagccagactggttccagtgcctctccgatggagaagtatcttgtaaggaagcaacttccataaaaagggtcagaaagtctgttgaccgatcacttcttttcttggataactgtctgcggctgcaggaagagtcagaggtaaggctgtgccactaaccactcctttctcttgacactcttgcctcccttacattctgtgataccaccttttctgttcttcctcctactgctgtgctcctcacttctttgtctattttactctctatttttattttctttttgaaccttaagtattattgttctctaggtttctatcttaggtttctcttttcatccctttctatatgttgtccctg

SEQ ID NO: 30868 - DNA, 1013 bp, Homo sapiens
tgagcaatctttgtttattttacccactccctggtaaaaagtgataccgagcttccaagctgacaaagaaaagaaggggcgacgattgtgccaaaaagggctgcagccacgtgcagcctgttcgctgcaccatctgcgcccaatgcctgcccaaggacaaggctattaagaagttcctcatccaaaacacagtagaggccaccgctgtcagggacatttctgaagcaagcgtcttcaccgcctatatacttccgaagttgtatgtaaagctacattattgtgtgagttgtgccattcacagcaaggtagtcaggaattgatctcgtgaagcctgcaaggaccaaacactcccaccctgatttacatgtgcaggtgttgccctacggcctccaccaaagcccttgtaaggagttgagtccttaagggctgaagaaaaactgttctctctagaaaaataaaatggaaattatacttaaaaaaaaattaaaaggtgatattgcttgctctggccccatggctctcagtgatggcaacacattagaattacctgacagctttaagaaaaaaatgctgttgctcagacccctctaagaacaatgaaatcagaatcttttttagaacatgtggatacttaggcaggttgtaatctctgctcagattacagaccattttcccctggataagcggccttagccattcagaacgcaccttctgaatgtttggtaagaaccgtcagcctttttattcctaaaatttttttcctagttcttaccgcacttgaaaaatacacattaacatatatatatgacatatctttcatatataatgtatatatttgatttgaggcatgacagagggaaggttcataacaaataagtgcccattacaaatatgactttaagcttgatgagagtaagccctggtatttcaaagaacaaggataaggcaacgggaacttttagatgtgactcttctacatttctgaggctaaatgattctctttctttatctat

SEQ ID NO: 30869 - DNA, 1047 bp, Homo sapiens
cctcattcttaagatgatcagtgttagtgaagcatacagttcaagaaacaagtttgcttctctctcattaatctgctcagttcacgaccttctcccctggggctcactctcaggcacatgcggccgttctctgtatccattagcacttaagagcctccaccagtggtatcccaaggagcaggtggcaagaaagctgctcatccagtaaataaaactttgatcaggtgattccactgatgtgtgctttatgcagttaaactgaggatttaaatgattttaaatgagttgttgttgcctaggaatgtgctggggattgactgagatctttctgtcctccatcagcagccccatggagtgagtgatgtctccccctacaaatctcctaataacaaagctttctccacagacagtagaaaggatgaaccacataagcctttatcaattacacaaagcacagcagcttcatcaatgggacaaaacccttctgtacagtttctatgtacaagatgaatagggccagctctaagaccaaggtcacatggggatgtcttgcaggtttgttttctatgttcacagcatttgaatctttttctctactcagcaccacccttcctcagccacaaccactcccaccccaaacacacacacccagaggcaccctgtgggagtccctcttaagctctccccactggctcattcgctactgatgacttgtggacccagacactttcatcactctcaaccagtcttttatgtgtgagtcagataggctcttacctttcctaaagaaatttcaggcaacagctagagaagagtgagtcctctcacttcccctttcgttgacgaaccacgagaggttgtcccttctgaccctaaagggactccttatttttttctttttgtggcaagtcttttcttctagattacctcccctccctcttcccacacacacacacacacaaaagcctatttctttgaagggaagaacttcagggttggccctgatgaggaagctgaaggtctagtcccaaagctgccagtattgga

SEQ ID NO: 30870 - DNA, 1052 bp, Homo sapiens
gtggcttgtgcctataatcccagcacttcgggaagtcaatgcacgcagatcgcttgagctcaggagttcaagacgagcctaggccacatggcaaaacctcatctctacaaaaaatacaaacattagctgagtgtggtggcatgtgtttgtagtcctagctacttgggaggctgaagtgagtggatcacctgagcccaggaggtcaaggctgcagtaagcctgagccgtgattatgccactgcactccagccagggtgatagagcaagacctgtctcaaataaataataataaagaacaataaaaaagaaagattatttaatatctcactaccctgaggaaatcagttaccctttggctatcagatatcggaggaaataaggttgtagaggaaaaaatcgttaaggtattttaaacagacatttgtttcattatttggaactcaataatagagactttaagtacaaattgtgagtctaggagaatttttgatttccacagatgagaaataaaataagaatatagacattgttggactttgaaagcttacccaatgtttaatagtttgctgaacaattgccaaatgaaatgaaatgctttcaaagtttctgaaaggcacaattctcttcttcctgagctcagaacattttggtcataatcatgagcttagaaatgttctgaagggagtacaggaccttcattagcaataaaataatatatatttccaatgacactgaaagttccctatcctagctacatatacaactaaggaaaacagagagggacaaaatacgaatagaatgcagtattccaaaacacaatcctgaatgaaatgcacacagtcgtatgatatctcaaagattcccatatagttagaaataatatctttctacgtctagatacttttttttttttttttgagagagagaatctcactctgtcacccagtctggagtgcagtggtgtgatctcggctcactgcaacctctgcctcccgggttcaagccattctcttgcctcagcctgctgagtagctgggactacaggcgcccgc

SEQ ID NO: 30871 - DNA, 1043 bp, Homo sapiens
tacctcattcacaaagcctccatgagtataggagctcacactaaagcaatagttaacatttataactttatagagtgctaactcgtttgttacatcattagatctgtacatcagttcttttgtgagaatattaaagctcagagaatttttaactttttattttgaaattatagcaggcttgaaagttgcaaaactagtacaaagatttcctatatacctttcatccggattctccattgttaacattttaccatgtttgttttatcattctccctctgtataatatgtactaatttgttctgagctacttgacagtaggttatagacatgatgaatacttcagtgtgttatttcctaaaaacaaggaaattctcttatacaaccacaattataatatcaagatcaggaaattaacacagatatagtactattatcttatttaaagacctgtaaattttgctagttatcccacagtatcatttattttaaaaataaataaaaaaatgtatttttcagaagttaggcttgagttcttattaaaaaattaattaattaaatttttttttgtctggtccagaatctgaccctggatcacatgttgaatttgcctgttatgctgctttggtctcatttagtctggaagagtttctctgtttttgtctttcatggccttgactatgggtgatttattttgtagaatgtccctcaatttgggtttgtttgatggtttctcatgactgcattcagactatgttttttgacaggaataccctagaactgaaattaaattagaaacccatgatatctctgtccctttactggtgatgtttacttcagtgacttgcttaagatggcctctgccaactatacactgtaaaattactatgtttttccttggtaatttataagtattttgagtacttgttagttcctttgagactatgtaaatatcctgcttttcatcaaatttctactacttaaatgctattataaactataatatttctactatctaaaaactattctaaattcttagcatttat

SEQ ID NO: 30872 - DNA, 1065 bp, Homo sapiens
aggaggtcgaggctacagtgaggtgtgatcatgccacctcattccagcctgggcgacagagcgagaccctgtctcaaaaaaaaaaaaaaaactagaaaccaaggaatgatatggttctgctcttttttctctttccacttcttgtcctattaattatactcattaaatatatatggattctttcacttcttttttcccactgctactatcttatcgtccctgtttctaatcttgatgtgctctacctgtaacctagttacatttttgaaatatgaatatgattttgccacttttctgtttgaaattcttctatagtttcctgtcactttaatgtcaattcttgatctggcttccatgcgccactcttttgctttcactttacaatctcctcggatttcccaacatgttctttccttttgtgaatcagtccctcttcttgaatgcactttcccactaccacaattaattttgttcggctcctacttaaccttacctttcaaagtccagatcatttgtcagcctcagcttccctagagagttctccctagccattttctccctagccatgtttagttctatttagctgtctttcccttgtgttcacatacttcactgtttttttctttatctttgattttctgcagtttgaaaatgatatgcccaggtgtaattttgaggaacatttactgtgcttggtgttttctgaactttctggatctgtggtttgttgtctgacttaatttaggataaattctcagtgattgtttcaaagatttctttagctttctcttctccttctggtgttctagtacacttataccttttgtaattgtttcacagttcttggatattttattctgtgtttgtttgtttgtttgtttttggtggaggaggttcccatcttttttctctttgtctttcggtttgggaagtgtctgttgataatgtcttcaagctcagggattctttcctcagctgtgtccagtctactattcttcagttctgttacagtgggtttttaaatttgttttatcgctagcatttctttttgattctctcttcgaa

SEQ ID NO: 30873 - DNA, 1090 bp, Homo sapiens
aaaattagctgggcatggtggtgcacatctgtaatcccggctacttgggaggctgaggcaggaaaatggcgtgaacctgggaggcagagcttgcagtgagctgagatcgcgccactgcactccagcctgggctacagagtgagactccatctcaaaaaaaaaagttaagtataatttactgtgcaactcagcaattccatgtcttagaatctgcccaagataaatgaaaacatgtccacgcaaagacttatatataaatttttatagtggtgttattctcgacagcctcaaactgaacccataaattcatcaactagtgaatggataaataaaatatgatatgtccattcacttgaatattttcatcagtaaaaaactgatacatgctgcgacatgaataaaactcaaaaacattaagtgaaaaaagctagacacaaaagacttcatattgtataattctattcatatgaaatgtccagaataagcagatctgtagagttagaaagtacattagtggattgaggtgagattgggaaccaggagtaaccacaaatgggcgtgggggatctttttgtaatgatggaatcatttaaaaattggattttggtgatgattatatagcaatgcaactaaatttttttttttttttttgagacggaatcttgctctgtcgctcaggctggagtgcagtggtgcgatctcggctcgctgcaacctccaccttccgggttcaagggattctcctgcctcagcctcctgagtagctgggactacaggcatatgccaccatacccggctaatttttgtatttttagcagagacagggtttcaccatgttagccaggatggtctcaatctcctgacctcgtgatccgcccgcctcggcctcccaaagtgctgggatttcaggcatgaaccaccgtgccgggccactagatttttttactaaaaattattgaattgtacatttaggtgaattttgtgttatgtaaattatacctcaataaaactgttaaaaatatattaacacagaaggggaaaaaggcagtgcttttagataggaggaagcaaaattttctgtatttgtagg

SEQ ID NO: 30874 - DNA, 1043 bp, Homo sapiens
tgactactttagatacttcatatgagtggaatcatacactatttgtccttttgtgactagcttatttacttagcataataatgtccttgaagtttatctatgttgtaacctgttgaacggattgccctcttttttaaggctgcataatactccattgtatgtgtatgttacattttctttaaccatctgtcagtgaacatttatgttgcttccacttagcaaaaatagttattagtatgaggttacttaaattgtagctggaggaaatttaaggtgtatgaaggtcaaatacttctagtctgagaacacaagaaccaaactctcttcatcactataataattattatctaaatcagtttctcaatgggttgctattggcattgtgggtgagacagttacgccagactcttgaacttcaggatattttggtggtcccacccccaaaagccagtagcatccctccctcaaccagaaatgccctccacatttcctgtctcctagaggagctggtgccattctgaactagaaatttcatttttgagaaatctttggtgtggggctacttactagaacttgtcataaatatatatatttttcctctttgttttgatttatttctcattcctcataaaaacagccagtttctagatctgttgttttattatatatcagttaactttaggaggttgtagtgattgtttttgtctgttgttcagaccaaggaagagattacctcaatgtttttctttatttgacaaggacactttaattctcaaatgttcctgtacctaatagtgaacaagtggctctggtgttgctcacaccttagcagagaatctcacatgttgcaaggtctaatgactcgtttttcctaagctttccctctcctttcttctcagcactcctgtaggaggcctgctgatggcatttcagaagtactctggtgagactgttcaggaaagaaaacagaaggatcgaaaggcactccatgagctaaaactggaagagtggtaaggaacatgttgagcccagggaatcttggc

SEQ ID NO: 30875 - DNA, 1087 bp, Homo sapiens
agagacaaggtcattatataatggtaaagagatcaattcagcaagaggaaataacaactgtaaatatatatgcacccaacaccagagcatccatatatatatatatctaaacaaataatattagagctaaagggagagataaaccctaatgtaataatagctggggacttcaacaccacactcccagcactggacagatcatctagacagaaaatcaacaaagaaatatcagacttaaactgtactgtagatcaaatggatctagcagacatttacagaacatcacatccaacagctgcaaaatacacgtttttcttatcttgaagtgttcttcaggataaaccatatgttaggctacaaaacaagtctcaacaaatttttaaagatcaaaataacatcaaatattttttcagaccacagcagaataaaactagaaatcagtaacaggaaggactttggaaactgtgcaaatacacagaaattaaataatatgctctggaacaaccaataggtcaatgaaaaaattaagaaggaaatttaaaaatttcttgaaacaaatgaaaacagaaacacaacataccaaaacctatgggatacagcaaaagcatcactaacagggaagtttatagcaataaatgcctccatcaaaaagtagaaatgtttcaaataaacaacctaacactgcacctcagggaactcgaaaagcaagaacaaactaaacccaaaatcagaaggaaataaataaaaagatcagagcagagctaagtgaaatagagacttaaaaacaaacaaaaaaacacaaaagaagaactaaatgaaaagttggtttcttgaaaacaaaatcaagaaaccacaagttagaaaaaagacccaattaaggtaaaaaacaaaaaaggagacattacaactgataccacggacatagtcatatcattagagattattatgaaacaactgtatgccaagaaattggaaaagctacaggaaatggatacattcctgagcccctataatctatcgagattgagccaagaagtaatagaaaacttgaacagaccaataacaagtaacaagattgaactggtaa

SEQ ID NO: 30876 - DNA, 1035 bp, Homo sapiens
aacaaatctatatgatatttatatgatctacatattctaaaatataacatggggttaattactatttcattgtaatgtatgactctagaattaatcattttatagaccttatgattgcactaggtgttcaaaagatctcactatataaaagagaataatgaagtaccagccacttaggaggctgaggcaggaggatcgcttgagcccaggagtttgaggctgtaatgtgccattattgtgcctatgaatacccactgcactctagccttggcaacacagtaagacccagtctctaaaaaaagaaaataagagaaaaattgaaatacatagatttcattgaacctaaatagggctacatgtattttcttgttgttgttgttgtttttttcctggttcccatttaggtgtctaattatgaaatggccaatcaaatccttattttcttcgagatcagttttcatttaagtctgcctggattggatggcaggtcaagctttttaaactttaacccaacatagattctgtcagaagcaccactaggtctggtgaatttctggatctattctgtattgcctcctaatcccttggggtatgaatctctgagaagccctttcaccttcagccctggcctctacctcccacatgttgtgggaagtcagggacccctaacagagggaccggctagagccgaggcagaggaacataaattgtgaagatttcatggacatttatcagttcccaaaattaatacttttataatttcttatggctgtctttactttaatctcttaatcctgttatcttcgtaagctgagaatgtatgtcacctcaggaccactattgtacaaattgattgtagagcatgtgtgtttgaacaatatgaaatctgattgtaaaacatggatgtttgaacaatatgaaatcagtgcaccttgaaaacgaacagaataacagcaattttggggaacaagggaagacaaccaaaggtctgactgcctgcggggttgggcaaaatagagccatatttttcttctt

SEQ ID NO: 30877 - DNA, 1030 bp, Homo sapiens
attttgcaaattaatgttaaaacctattaatactctacggacagagaagcacaagctgcctgtgtggggaatagctgccgtcagcagcctgggtatatgattggagagaaagtcaagctgatctttggcaccaaaccattccacatctggtactaaaccctgagctgcagcccccaggcttgtgttgccactggagcccactcgtctagctttgtctttaactggcccatctgcattcccattagagttcgtgtattttgattatctggtgaatgatctacttaacagaaaggtagtccacattttcccagaaagtgtttgcattttgctttcaatatatggttttatgggataatatatttctaatgactaaaatgtgagtaagatgtttttgaataggagcattttcttactgtgtctttagttcctcggattactgtttcttcgcacactccctgggctttagacagtgggattgcaattaggtttggagtgtttcattctgtttgtcagttgtacggtgggttgtgccaaaatgcagtttttcttaccttttttatttatttatttttatctaatatagccaactggcagaatatattgtctttaatgtactttttttctgtctttacaggataggaaagaaaaacttatccaggaaggaaaattggatcgaacatttcacctctcatattaagtctggcaatgatgactatatgtattcctgcctaaataaatcatctattaatcattaagtagtagtttctctttcttagtattaccttgattcaatgttaaaaactattaacaccctaacaacacagaagcagacgcagcccgtgttgggaatctgctgtcagagtgacagcaaacatttgctgtacattgaatgaatgaacataaacttcattaaactgtgagctcttagaaagtacagattctacaatcagttgttcaacaagcgagtgttaactacgagccaggcattatgttatgtgcagagaatacaacagtcagtaagacagagcct

SEQ ID NO: 30878 - DNA, 1034 bp, Homo sapiens
catttaaaatattttataaaggcaatttgaactggctttgattcttttcaaagtgttgcataactaatatatttactgggtttgacattcaaaaggtacaacagtgtatgcaataaaggatctttcttctattcctgtcccctggacacttacttacttcccctcagcagagctaaacagtgtaattaatttgttttttctttatagacgttcattacatacatatataagcaaatataatatgtaacataattttctttcttatatgtacataagccaaatagaaaaccatatatttttacatatatcatatatagagagaatatcatatttttttgttaaacaaattagcaagacctttaaacaaattagcaaggtctttataatatattataaagagggaaaaaagcgagacaaaatatacatatatatttatatatattttattacacacaatatattgttaaacaaattagcaagatctttagaatatattataaagaaggaagaaagcaagacagaaaactgcataacatgctacataacaatgaaaataaataaactacagttaaatgcaacatggatgaaactcataaatacagtgctgagcaaaagaagccgaaagaaaacttcatatatattattccatttttgtatgcgtcaaaaaacaggcaaaattaatgctacatgttaatgtagcatgttatacagttttgtgtcttgcttttttccctctatagtatattctaaaggatcactctttatatagactttccctatttctttgtttgtttgtaaattttactgaatcatcaggaaactgtttaaatcttaagtgtacaccttgaaataactttgccgttgtgtaacaaacacctaaatcaagatacagaaaattactagattcatagaaactcccctatgttaccttccagtcacttacccccaggtatcctaatttccaactctatagattaattttgcctgtttttgacacatataaaaatggaataatatatatatagttctttgct

SEQ ID NO: 30879 - DNA, 1045 bp, Homo sapiens
acttggagattttattgtatctttcttttactgatttctagtttgattccattgtactcagagaaaatattttatataacttgagttattttaaaattgttgaggtttgtttttcaaccccaggatgtagctcatctttgtgtatgttctgtgtatgctagaaaaataatgtctattttgctgttgttgacagattattctgtaaaagttgattagattctatagggttatgattttcttgcattctatatccttactgattttctctttagttgttctaataattgctgagagagaggtattgaagtctcctacaagaatcatggatttctttttcctcctttcagttctgtcatgttttatttaatgtattttgcagcctgtttggtgcattcacatttagggttgctatatcttcttggtagagtgaccattttattattatttggtgtccctctctatctcataatttcctttactgtgaaattttcattatctaacataatatagtgtcttctttctagtgattcatgtttgcacgatatatctttgtctattcttatactttaaagttagctatgttaatatattcaaagtgtatttcttatagacaagcgtatagttgggtcatggtttttaattcattctgtcagtctatatattttaattaatgtttacattagatataattattgatatattagggcttaggttctccattttattttttgttttttggttgttctatttgttattgctctgcttttttccccttgcctttctgtggtttaattgaacactttttagaattccattttgacttattattagttaattttagtgtatttctttgtatcactttttaaagaggttgctataggtattttattatatacaaacaacttactggaatctactgctgctacaaattaccagtttgaatgaaatgcagagacttttcctttctttacttccctttacttctctcatttataataaattttattgtttttccctatatatattatgaaccacatcagactat

SEQ ID NO: 30880 - DNA, 1035 bp, Homo sapiens
catgttggtcaaagaataacataattacagttatgtagcaggaataaattgtaagatatctaatgtattacaaggtgattataggtaatgatatattgcactgttgaaaaatatagagtgtagatgttatgtgatcttatcacaaaatgataactatgtgagggaatgcttttaactataataagtttaaccattccacaatgtatatatatttcaaaatactgtgttatatgtgataaaaacatacaatgttatctgtcaatataaaagaaataaactttttaaagactgaaaaaataccgaaattgaaagaaaagtatgttaaacagcaatgcaatagcagaaggaagtgtgaaacttaggccagacatggtggcttacacctgtaatcccagcacttgtgaggccaagccaggcagatcacctgagattgggagtttgagactagcctgaccaacacggagaaaccctgtgtctactaaaaatacaaaattagctgggggtggttgcacatgcctgtaatcccagcgattcgggaggctgaggcaggagaatcacttgaactcgggaggcagaagttgcggtgagctgagattgtgccattgcactccagcttggtcaacaagagtgaaactctgtctcaaaaaaaaaaatgtgtaaaacttattgctaagggtaaatatacaaacaaattcagaatactgtagtgtgagatgatgatgggtacatcacttaattctattaggacagtgcaaaagtaattgcagtaaagtaattcaaaggatacaattagtaaaaataactctaactgaaaattatgttagaagatacaccatataagtagatgaaaattgtgacaacaatactataaagtatgtgttaggggaagagaagtttaagtgtagagttttggtatactattgaacttaaggtgttattgcttaaaatagagcattagattttatgtaagtcctaaggtaaccacacacacaaagaatgcctaagaagttacacaaaataaaaagaaatcaaagc

SEQ ID NO: 30881 - DNA, 1020 bp, Homo sapiens
gcaacaaaaggcaaaattgacaaatgggatctaattaaataaaagggcttctgcacatcaaaagaaactaccatcagagtggacaggcaacctacagaatgggagaaaatttttgcaatctatccatctgacaaagggctaatatctagaatctacaaggaacttaacaagtttacaagtaaaaaacaaccccatcaaaaagtgggcaaagggtatctacaggtacttctcaaaagaagacatttatgcagccaacaaacatatgaaaaacagctcatcatcactggtcattagagaaatgcaaatcaaaaccacagtgagataccatctcaggccagttagaatggcaatcattaaaaagtcaggaaacaacagatgctggagaggatgtggagaaataggaatgcttttacactgttggtgggagtgtaaattagttcagccattgtggaaaccctgtggtgattcctcaaggatctagaactagaaataccatttaactcagctatcccattactgggtgtatacccaaaggattttaaatcattctactataaagacacatgcacatgtatgtttattatagcactgctcacaatagcaaatacttggaaccaacccaaatgtccatcagtgatagactggataaagaaactgtggcacatacacaccatggaatactatgcagccataaaaaaggatgagttcatgttctttataaggacatggatgaagctggaaaccattctcagtaaactaacacaagaacagaaaaccaaacaccgcatgttctcactcataattgggagtcgaactgtgagaacacatggaaacacagggaggggaacatcacacaatggggcctgttaggggatggggggctagcagagggatagcattaggagaaatacctaaggtagatcacaggttaatgggtgcagcaaaccaccatggcacgtgtatacttatgtaacaaacctgcacgctttgtgcatttatcccagaacttaaaatataata

SEQ ID NO: 30882 - DNA, 1534 bp, Homo sapiens
acttggacatgataaagtagttttcacataaaaaaaagccttttaaacttgtaggaattaagaaataagaataacctacaaaatgctagcaaaatttatctcattttttttcattgtattttcaggtttaactgaactgaatgacagtccagttcccctagaacttgagcgctgcaagtctcctacctcaggtaaacatgagtggtattttgcagacttctggtaattcactgcagtaatctgttgctttattttcatgatctttataatgtgaaatttataattttagtaattaggtataattccattcattaaatttactgtaagcaaatttgattccaaatatcaaatacaaacaaatgtcttttaaaatatttttatctcaaaataaaattaagatcagaggtaaaagtgcaacactttaaaagacattttaaaggaaagttattttgcagatacattaataatgcttactaagtattgaataaaaattggtgatatagagaaacttgtcatcttcaggctagagctgaattagtgggaaatatacagtatatatgcagaagcaaatgataccattcctctagaccacagtttggaaacatgtatatttattcacaaggaaaaatgatgatagaatatgatatgaagcaaaacatcaagacaaagtgtgcacccattaaaatatatttaaaatgtgagaataaagattcctagggataaatctttaaggtactgtctgttaaaaaaaaagttaacagttatttttgggtggtgggaatatgactggttggcctgttttttaaaatttttacatatttgataattctgatttttctataatgtatatatagttttgtgtgagtttttaaacaccaaaatcattaggtatgtctttactgaatgatagatctgttcttacagacaagaaactgtagttcctttttatttacattattttaatttgaaccttatacaaatttataaaagtttaataatgccattataaagcaacgaatttggacttgtagaaattaatttagaattgcagcatttcttccatttattccatccctgaaaagtggttagttctttattcttattcttcaggaatctaggctatgtataatctagttatatcctatgtaaatttttctcttagtcatatatttttaattcttattttactgatcttattgtaaagactgtctcatatgtttaccctgccttttgcattctcattgacaccaacccaatttaggtatttattgcctcatacctatggtatcatacaaatattctagtagatgtctgtattttctctcttcaccttttacaattaatgttgcatgtcatgttgtaaaattaatattcttaaaatattactttgatcatattttcccatgcttataaatcttcgatataaaatataattcaataccctttatcaaatttacatacgtaacttcaaattttgttatagctggccaggcacagtggctcatgcctgtaatcccagcactttgggaggcca

SEQ ID NO: 30883 - DNA, 1030 bp, Homo sapiens
ttatttaattcatttggtgaagtcatgttttcctggatagtgttgatgctagtagatgttctttggtgtgtgggcattgaagagttaggtatttatcttagtcttcatggttgggtcttatttgtatccatacttcttgaaaggctttccagatatttgaaaggacttgggtattgtgatctaagctgtatctgctttgggggcaccccaagcccagtagtgctatagttcttgcagactcatagaagtactgctttaatagtcttggacaaatctgggagaattatctgggttacatgacagagactcttattctttacttactttctcccaaacatacagagtctctctctctctctattctaagccaccttaagctgggggtgaagtgacacccttgtggccaccactactattattgtgatgagtcagacctaaatttagtgtagcactgggtctcacccaaggcctgctataattactccctggctaatgcctatgttcactcaaggtcctggggctctatgatctgcaagtagcaaagccagccaggcttgtgtccttctcttcaagggtggcaaggccccctaggtcctgggtaggtccagaagtgctgtctgggagccagggctggcactcaaaacacaagacagagtccttcctactcttccctccttttttaaaagcagaggagctccaccccatagccgccaccaccccaggccatgagaagtactgtcatgctaccactaacattccaataaggtccaaggtcacttaagtcagcttattgtgaatgctgcctggcctgggactcagccttcacggcagtgagttaccctctggcccaggacaggtctagaaatgccatctaagagtcatgtcctggaatcagggaccccaagagcctgcttggtgctctcctcctctgtggctgtgctgatatctaaggtacaagacaaactcccctttacatttccttctgcttttctcaagcagaaggagttttgccccatagccaccacagctg

SEQ ID NO: 30884 - DNA, 1057 bp, Homo sapiens
gtgaaactacacaacatcaaggatgaaataaccttaaaaactacagagaagacaaactacaaaagaatagtctgacagcagacactcttagctagataggtaagccaaaagatagtgggggaaatatttttcaagtgttgaaggaatataattctacctagaattttatacccaaacacaatgtcattcaagagtaaaataattttcaggcacacgaaaacagcttattgtctgtagaatttagcaaatgtattattaacagacatatatatatgttatatatatatttcagcagaaagaaaagtgaaaacagaaggaaagtgtggaatatgagaaacagtagtgaacaaaaaaatagataaaatgtcaggaaatttgattaacctttgactataaagataacaagtctgttttagatgtttgtacatttggaaaatttttttttgaagattaaagctaaaactctagacaatagttgctgagagagtattcaatcagtagtttaagtatgctgagatccatgtcatgttaggaggatagatacactgaatctgactttattagataaatttgtagtgagttatgtatcctaaaatgttaagggtaccatttaattaataaatacaatctatagtttccacatcatcagtgggaaaaccagggaacatagaaaactttatctagtagaaagcagagaaggagaagtgaaagaaagtgattgatcaacccaaaacagaaaatatgaagtagaaataaatctcagtatatcagtaataacaaaagcaaagcattatatccacctaataagaaacagattatcagattagatttttttaaaacgccatatgctgattataacaaattgtctaaaaaccatatggaaaataaagagatagaaaaaaagatgctagctaagtagtaattataacaaaaatctggatcatcaatatcagaaataatacactttaaggcaaaatgtactcctagagataaagggacttggtaaattatgagaaaatgttcagttcacctggaagataaacaattctgaatttgt

SEQ ID NO: 30885 - DNA, 1026 bp, Homo sapiens
gtttctgagaaaggtcagaaaacctgcattctgtttgaatccaaggacaggcaggtagatctatctgtgcatgcttatgcaagtttcatcgatgcctttcaacatgcctcatgtcagttgatgagagaagttcttttactgaagtctttgggcaaggagagaaagcacttacatcagaccaagtttgctgatgactttagaaaaagacatccaaatgtacactttgtgctaaatcaagagtcaatgactttgactggtttgccaaatcaccttgcaaaggcgaagcagtatgttctaaaaggaggaggaatgtcttcattggctggaaagaaattgaaagagggtcatgaaacaccgatggacattgatagcgatgattccaaagcagcttctccgccactcaagggctctgtgagttctgaggcctcagaactggacaagaaggaaaagggcatctgtgtcatctgtatggacaccattagtaacaaaaaagtgctaccaaagtgcaagcatgaattctgcgccccttgtatcaacaaagccatgtcatataagccaatctgtcccacatgccagacttcctatggtattcagaaaggaaatcagccagagggaagcatggttttcactgtttcaagagactcacttccaggttatgagtcctttggcaccattgtgattacttattctatgaaagcaggcatacaaacagtaagtatttctcaagtccatgggtttcttgccactatgctacgattaccagggcaaaagagactgtcctgttgcctattagacaatagatttcccaaggaattatctccagggtcatgtgcaagggactgaaatagtggtaaaggtcacaatgtttgctggtaattcaaataccttttgtgtctatttcttaagacagagaaagggtgggtggagattatatcttgagatgggggtatcaggaaggtggacagtgtttccagcatgaattcaaggaaagaggagaaatatgagttattgggaatatgagcataa

SEQ ID NO: 30886 - DNA, 1058 bp, Homo sapiens
ggtccaggagctgtgatgtggctgtggtctaggggaatcctgcctgccccatggagttgcgcagcacaaccctggctccaattgccagaaggctctttttaatgctgaaccaaaatgtgcctttttttttttttttttgagatggagtttcactcttgttgcccaggctggagtgcaatggcgcgatctcagctcactgcagccactgcctcccaggttcaagtgattctcctgcctcagcctcccgagtagctgggattacaggcatgcgctaacacacccagctaattttgtatttttagtagagacgaggtttctccatgttcgacaggctggtctcgaactcccacctcagcctcccaaactgctgggattacaggtgtgagccaccgtgaccagccaatgtgccttcttatagtgtctactcattggtctttgttctgcccagtgataacaatgggataacgcctgctacacatcttcattgtgaaacccttcccctgtgctgagattaaatgaactctaagattattaaatagtatattttccttgacagcctagcgtttgatgattttaaagccttatgtataaataaaccaaaggaagtaagcagtcatattgctaatttgctaactcctatctattgaatggtgaagttttaaaaatttccccaggtaagtttaagattcaaacaccatctattgagcacctacattgtgtgccaggtagtaaaataggtgctttcatacacattgtctcaattcctgtgaggtcagaattatctctgcatttgaaacttgaggaaacatgctcagagtgcaagaagcttccttgcctgagatcacctagaaaggaaccctcagagccggcaactgaatcttggtccctgtgatgtcaagcccattgctctcccactgcagaacatggcctctagattaatgccaccgattcaggaacacctccgacagtcttgaaatacccccatgttgccttgtttgttttttccttctggcttcttctattacagtctcttcattggaagctctgtaggccaaggc

SEQ ID NO: 30887 - DNA, 1058 bp, Homo sapiens
aagtgctaggattgcaggtgtgcaccaccttgcccagtgtgcatgtatctttaaatagtgatgctctgtgctgatgaagcagacactgtcagctactactgatgggaatgtaaattactactaatcctcctgaaaaacagtttgcgagtatatttcctaagatctagagtgttcacacattttaacttactgaccctaaaataattttgaaagtagctaatattcacatacaaagattgtcacaccagcattattaatattagcaaataagttgttggaaacaactatccaacattaggaaaatggttaaatgagattttatatatctgtataatataatatcacaaaaccattaacaattattataaagaataatgaaatgagaaaatgcttgatagaccataaaatgacttagtgcataagctgtatattcagtatggtatctgtggttacctatgtacgattaagtattgattgatcaagagagtgagagatgcattaggaaaaaaactgaagaaaagactggaaaatcaaaatattagtagtggttgtctgaattggggtattccatttatagatgattttttttcttctttatgcatttcttttcaaaattttctactatgaatatgtattaatatatactcttaaacaaaaagacaaaataaaagttatgtgacaagaaacaaggaatgaaacaaaatgaggggaggtagacatctttcagaccaggactaaggccatttttcccctgtgcattgctgagagattattgtatatgaccttaataaaaatcttgtgagagaaactgggcttgttggctcacacttgtaatcccagcactttggaaggctgaggtgggtggattgcttgaggccaggagttcaagagcagcctggctaacatggtgaaaccccatctctactaaaaatataaaaattagccgggcgtggtggggtgtgcctgtagtcccagctactcaggaggtgaggcaggagaatagtttgaacccaggagacagaggttgcagtgagctgaaatcacaccactgcactcca

SEQ ID NO: 30888 - DNA, 1043 bp, Homo sapiens
ccagtctcgttttatctttgtaccacccacttcccacttcccaccttcctgcatcatgaaacaaatcccagatgacaactccatttcatccagaaatatttcaatatgtgcaatatatgtcaaaaatagactctttttaacatatagtgccgttattttaactaaaaacttttaaataataatttgctaatatcaaatcagtgtttaaattttcaattatctcataaacatttaacagtttgtttgaacagtttccacattagggccacacattgcaattggtccaaagtgccttagaatctataggtttccttaacatggctctttgtttcttataatttaattgttgaggagccagcacttttattcccaacatctggattttgttgatttcctcattgtatagtttgacatgttcccctctcctttatggttcttgtaaagtatgttgtgattcaggttttagttttgcttttgtttttgttttacaagaccgcttcgtaagtgatgctgcttcctttcatcaggaggcgtataatatctggacaactctcattttgtgatgttagcactctgtttcaagatgcacccctgctgctgtgtgtacacctagttctttgtactccatggtattaatctatcacatttcatctactcattctcattgtgtacccagattgcctccaatttattgttaccataaacactactgcagtgacatcctcatgcacgtcaccatagacctgaaaatttctttggaaaacagaccctgtaacatgattgctaggtcataaaatagtctaagcttaatttgtcaagtactgccagattgtagtgatgtgatcatagcacacagtaaccacctgcctcagccttgcaattaactgggattacaggtgcacaccactatacctggctaatttttatatattttttatagaggtgaggtctcactatcttgctcaggctgatcttgaactcctggcctcaagttattctcctaccttggtctcccaaagtgctgagattacaggcatgagcca

SEQ ID NO: 30889 - DNA, 1050 bp, Homo sapiens
gtttatgcagcataccaaaatgtaaatctgaaaactgttaggtaagcgtgggattaaaacagtcttttggattttcttgaggaatattttgtaaagctgtggaaactttttcagcatacctaagaattttctgcttgaggacaaatttaagtcactgggcaaaagtgcattcatttttcccaccaaaagatggcatcagctctcataggaagtcattttattctagaaaacacaaacatgattaaccatatcatgtcaaataagtacaaaacagaagatagtattcaaagttttaagaaggacagtcacataattacaatagaaatgtaaatcaactttagaaaattaaaagtgaagagaatatagtaaatgttgtatttgagatgggatcagctattctataagaggaacagttctgaaggacagaataaattgtgcagccagaggattgtgcccgtacaatcaacagttaatccacaggtgaggaaaagcagctggcaagtggaaaatttttttggcatagctaatgataagcgtctctaccagatgccctttagtttcatgaaaactcaaacatgaaaacttaaaatgctataaaagtcccaagtttagaagaataatattcactattccagatgccgtgtatgttttgttctcaagaagtttacaatctggtagggaagacaaaaataaatgcaaaaacaagagtttccaatagagaaagtgctatgaagaaataaaatagaaagtggaggtgggatggggaaagacttcttcactgagcccagagggccttgttgaactgagacctgaatgacctgaggggtaaacaggagtaagacgtgaagatccgggtggtaccagcattccaggcagacggaacaagtacggaagctacatattgctgtggtaagcaaccatggcatgtatgagaaacagaaacatggccatccaactggagaacagtagaagaagagagagcagggccaggcagcaggtcacataggacctcagaggctctggtgtaggcatctgtgtttgttctctaag

SEQ ID NO: 30890 - DNA, 1162 bp, Homo sapiens
agtttatgcaataaacaaaattttgaaaatacattattcaccttatctgagaactagatgtctagcagccctgttagccacaactcaccaagtcattttgtactgaacagatgaatgctttgaaaatggcattttgaaaaatgttagcactttgttgagtttactgaaacagtataatttgactgtttgacagaagttgccttgggagagattatttatctaatttcatctaaacttactagaatgctatgacagtgatatcagaaacatgctggatgggggagtaaggaaggacaactagctagacagaagcccccagggagtgatagctgaccacaaggtgacttcaagtgttatttaaagaaaggaaacatacccagttgtattgaaaggcatgcaacagctgggtcagtgggttatgcctgtaataccagcactttgggaggccaaggcaataggatcacttgaggccaggagtttgagatcagcctgagcaacatagtggggccatgtccctacaaaaaataaaaaaattaccagatatcatggcatgtttctgtaatcccagctattcagggggctgaggtgggaggatcactggagcctggaagttcgaggctgtagtgagccatgaccactgcactccaacgtggatgacagagtgagatcctgtctcttaaaaaaagaaaaataaaagggcattcaacatgtataggctagagagtaatcctcttactatattttcatgtcttttgcctctgttcttaactactgttttcaattttatggactaaaagtgacaaagtctcatgctcatgacagacagctcaaggaagaaaaagtagaatatggattaaaagaagagaatggatttgtgaaaaatcttaatgtaagaatcattaaatgctgaggcagatcatataatgtttatccatggagattttcaagaagagaaataagtcttgcagcagattctgtgtttcttacagttagagggcttgactaggtatcagtgagcgttccatgatttaatagtaccttacagcaaaatatgcctcatcctcttttggaaccacagttgcatatactgcgtattttaatcagaagtaggttatgaaggccacagcagtcactttttttttaggaagaaatgtgatgctga

SEQ ID NO: 30891 - DNA, 1036 bp, Homo sapiens
acctaaactttgtgactattgtgaacaaaagtgaaacttattttttaaataatttcaatgtttcttttagattcaaggagtacatgtgcaggattgttacatgggtatattgcatgacaatgaggtttgggacatgaatgatcccatcacccaggtagtgagcatagtaccctatgaaactataaataatcattaattttaatccaccaaggtggtttccaggaaaaaggtctcattaaattttggcattttaggcagttaatgagaagatacctgtaaaagagccaagtccagggcacagctggcacccaccagtgtttgttttgtttcttctagataattagctgactgatgctaggaagttaaatatctagtcttccattgtaaagaaatgcttttatatgtgtatttatgagtgtgcataatgaatacacagaaacatcgtccacatctctctagggctaaagttactagaaccatgaaatctatgttgaaactctttttagtaggattaattgatcttcccctaaaagtcctgcagcagaggtccacattctttatggtctcaggtatgattatacacaaattgcaaatctaaaaattctgtaaaactgtttcctaacaataactgttagttccacagcctagtaccctaaacattttatatgataaactgaacccccttccattaaagccagtgttcatatgtcattattcagttattttgaaacttgaaaactcacccagaagttaattatatgtcaaaattcaactattagttatgtgattagaaggcctgaattttttaggggtgggggagacagggtcttgctctgtcacccagtctggagtacagtggcaccattatggctcactgcaacgttggcctcccagcctcaagtgatcctcccacctcagcctcccaagtagctgggaccacaagcatgtgccaccaaacctggctaattttttgtattttttgtagagatggggttctgccatgttgcccatgctggtgttgaactcctgggctcaa

SEQ ID NO: 30892 - DNA, 1027 bp, Homo sapiens
cagggacaagagtgatgatgatagagggtacttaaaaaataattatcaaactaacatttaaaggtgattgattttttttctttgaagtaatttattttgtaaccaaagtcaaggtggattaaattgatgaaaagttatgaacaatattgattaaaaatattccacatggaagccccgtcatatattacacacatcacttagtctccagattgtcactatttattgaaagccagtttctaggccttccagggtacatttattataagtactttttaatgcagagcagattccttccggcatacaggtggtggtctgctggtgatacatgaatgtttaaaactgcatgtttttttgtcttacagagttgtcttggttcaactggtgccttcccgggtcgtgtttgctcagtctcctcctcattctgtgcttcagggaatcctatgacagactctatcttgatgtggttgtctccgtttaatagcacagacttgaaggagtttaaaaggaggctggaaatcaatactgcacactgcacatttgctcagaattgcacatctaacaggaaaagagggagaagaaagaaacttcattcagaggttttgttaggttacagattatcacattaatttaattactactaggtaataataatgggagacttgagtgataataggggattttaaaactctacagatggcatacctgtgcctgcttctggggttggaagtgtgacttcttacacataaagcactacctaagtaattctctctctgttttgtgccagtgctaaactactgattacttgtaattatgaaaagaaataaagggtgtctatcatatgaagataacgccttccctaagtcacatatcagaataggaagatatgccactaacttctaaagaagttcaaaccctgtatccaattttaatgataaaatagccaagaggtatatcgatgatggaaattagccacatgtacactacattttttctaataaagccatttcttatatgactccttatttta

SEQ ID NO: 30893 - DNA, 2103 bp, Homo sapiens
tcattttagaatttatagaaatgattctagagaggtaaagtacaactgaggctcacagtttctgactcctaaaccaggtgtttttttcctacctcacagaagcttaatttagaccattttgggtgtgcatgaataccttcatgttaaaaaatgatagggctttaacagtaagcttccattattgagtatgggaagtacaaggattaagttaaggtgattatttggtttataagtaaaattcttttttctccatcactatcctgaagatgctctgtcagctcttagcccttgggttgtaatgacatcatgtaaaaagattctgatgaataattcaatcccataaaccaagtcaacaccaatattaattggtaaggacatgctgtagtgcaggttccctgtggcttatcaattaatacttcacagtttatgggaagaagcattttttaatatgatccctggtggaggtataggaacaagacagttgtatacacaaatgcatttcactggaggatggagctaattacgagagaatcaaatacaaatgtaattttgtatatttaaatatatatggcctgagggccaagttttttcgtagatcatgtactcatgtttaattatggagaatgtttacagcttgtttttatgaagcccttctaatgagagatctaagctaagggattttaaattgaagaggttaaatccccatctacttaacttttaattagttttttgtttgtttgtttgtttgtttgttttttactattttactaaaatccaggcattcatcttactgtttgcataagtacaagcttcactttaggctcaagattgaataaaaatgcatagcaaatttgctttaaattaatgtttaaaaaatcacattgcacatttgtccctgaaataagtacagaaattactatcattttgccatattaaggcaagtactaaagctgtgatatgaagaaaatgtcatattaaaaaagaaatgcaggaaactatgagaacattttatcaagcctattttatgaatatcggagaaaaatgcaattccactttgatttggaattatattcatgcagaagggacaagatagtttatttctttactatcagacagtgtgctggtctgttaggaaatgtgagcaatactcagagggaatgtttctgggtgtcagaaagtcagttcaagaaagtggaacaggactttacagtgggctgtggggtactttgtgctcagtagaggcggggtggcctgctcactcagcagacatcttggctctcgagctcatttcctcacgtgtccttctggttcagatggaacctcaaacttaggagaggattccaggaactaatacagaggcccgtaggggtcccttggagggtgtcatctctggccagggggatgggagtgatacaggcagttacatggccctcagtctctctgatttacatttgtttgtggtcaggatttagatcactttatgattttctgaggctctgactcgtcagatacctttctcaacccttggatgaatctgacctcagctctgtccctgagaccttccactttcttgaactgactttctgacacaggcttcttcaccctcaacccctctccaggatccccagcagaaatccattctcattcccgaataggaaataaggccatacgctcagagtttcctctcctgaacgagacgctagcaagctcagaacatgagtaagcccaggtgctccagaaagatttaacaggtcttctcacagctaagctttagaagttcgagtatttccttgatatgggaatttcaaaggtctctaacaagtttctatagttattacttgttgcatttttagaatatgggctaattgctttatgtggtcttttggttgtgctctagaatctgatatgcctcaaacagtagctttccatcttagcccactctcaaaaagagagaacaaaaagctacccagccccagctgttctgttcattcaacaagggagaattaaacttttttttaacctagctaaaaaatgaaagcatagaattgatttcagtagctttgatgaaataatcaaaacacatcaagctattttaactctaaa

SEQ ID NO: 30894 - DNA, 1034 bp, Homo sapiens
atccatctggcagctcacctgggcatgagggacatgatgagtaaacgtggccatgggggcccacaggattctcctacctggaaaggggctttgtccaaatgcaaataaccatcaaccaaagaactgtgtgaatcatggttattcaataattttaaattatcttattgaatcaccctcttttaatttcttccaagcattcattgagctctatctaaaatgatctaatttgtcatacagcagacgcttgataactggactttgtcaaggtcgacgttgtcccccagcatctagaacaggcttggcacacggcagggtttcagtgtgtgttgcctggtaggaggactcattctcatgggaatctgccccatcttccataacacctctgtactgggtatggccattgaggaccccttctcgggcttccctggtgcatgaccctcaaccggaaacaagttccccatttctgctttatactgtcttcctttgaaaaaacaacaaatgatgaggaaaagctacccagcatgtggaatttgctagatggtcaagaagaggccagtggccaatgtgggaaccactttctgaccaaacattctgatggctttactcatgcggggctcctccagtttccagatgtgcttccctggtctcctcctcttccagtcttggctcagatggcgaatcatacagagcgcctttgccccactcacctggcacctggaccacctccctcatccctcacatcacatcatgttggaattgtccctttatccaacccctgcccagacactgagcccctaagtggggacagagcttgtatatggggttggaagaagtgactgtaatagcagctgacatttcctgaccatgaatctggtgccaggttctgtgctcactggcctcactggaattctcttattcagtcttcacaatatcctgatagcctagatactattattatccccattttacagctgaaaaaaatgaggcaccaagaggctgagttattttccttaagtcttactgtccaggcaaac

SEQ ID NO: 30895 - DNA, 1050 bp, Homo sapiens
tctggtgagtcctcctgctttctgcattcctgcgtgactgacaccccagccctgtgcccagcggtgcaggcagagcctgagcacagcagtaacatgttttgtctgcttggtggtatttctccatggacagcagagtggccttgtgctagtatcttgtctttagttataagtagcggtcctagagttggattcctccagtagttcaggggggcgttgcttaagctgcagtacttggaagcacgctctggtggccttgatggggacttggcctgcaggaacagccctcctttcctggacccagctcccttcctcctggcctaagtccttcctgctgatgaatctgctgagaggaggacagagcctccaagttcttcacagctgttttgacgatggtgccactgtgggtggtttcattaagggaaatcaaggttttgagagcccttgttctgtgcagttctccaactttccaattgaccctcctgccagttcagctcttctcttttcccctaagcacccacttccttggcagtggcccctggacttcacccaaggattggatatgaaagacagaagcatacatttagacatcattgaaacacaattattgagtcccttcctgttggggaccatgaacatcttacaaggtgtcatttaatcctgacacaggtgtttaccattctagcatgtgtgtgtctggacatgggtctccttcgttatttggagtatttgtagggggaacatatttgcttgtgtttttcaaaaaagttttttgtttgtttgtttttgggttttttttactgcaccttttcaataataatctcacaagagccacttcctggctgaggaccactagtgcccacctgcgaggcacagggcttactttctggccattccacatcctcagagttcagattttcctggcttagcttctatttgaagacttaaaaacatgaaatattgtcaaatatagatttaaagaaattttttaacacatcatgaaatggaatcctcttcacatccctatttattgactttgggcatgacctcagc

SEQ ID NO: 30896 - DNA, 1064 bp, Homo sapiens
aaacaccatctctacaaacaatacagaaattagctgagtgtggtggtgtgcacctgtagttccagctacttggggtggtgtgcacctgtagttccagctacttgggaggctgagatgggaggatcacttgagcctgggaggtggaggccacaatgggcctatggcaccactgcactccagcctggacaacagagtgaaaccctgtctcagaaaaatatataaatatatgcaaaatttgtgacaatggtaaatatctatttacttgaaaaaaggaaatcacaagttaaacacttaaaaagctgaaatataccacaaataacacaaaatccagaaaaacaatacaatgtttttatttctatttattttttcttaggggtctactcatggaactctcctctgaccagtctatataaagagccagtctccgttcttcaccctgctttcttttattccatagcatttatcccaagagcatcacatctgtcttatttgttcatgtattttctttcttcccctctagaatgtaagatctagagggcaaaaacattttctgtctagtttgccattttgcccccaaaccagaaaaggataagtactcaatgagtgttgaataaatgttggaaattttcacgtagaaccccatagctcacaaactgtatgtagtgtatgatccagttttcgtttaaaaatattcatagaagaaaaagaccagaaatagatcaaaatatttaaagtgattatcttgggatgataaaactaggattgattttcattttcttaatcctgtttttctagatattccaattttcatttcagtgatgtatttaaaattttacatgagtgaaatgctcatgatgaaatgcgagatgaaaaagctagaaacaaaatgtatctactatgatcctgatttctttaagacatattttaattaaaaaaagacttgaaggaaatgcagcaacaaattgaaaatggctacctctggaagttggaataacagatggttttcatttctttctacttgtttatgtttttgcagattttataatgagcatgaattactttga

SEQ ID NO: 30897 - DNA, 1048 bp, Homo sapiens
tggttcataattaattactgtgtaaagtagaggatttgattctggggtgtgtcaatgataacttcaagaggtcagtgatcaccttgaaattgtgtgcaatcttctgtgttctggcatctttctagggagagtgttcctgtcatcagaatcttgaaagggttctggactcaaaagtggaaaacatattgaagggttagactttaagctatctgtaatacttacaatacatttgtatatccattcccctgctttttaccccaagtgataactgaaatgttagaaccgtattgtgtgtccctctgtagtacattctattttttgtcttctgtttttaaaccacaacttaaaatagtgctgtattttggttcctttaaattttttcctagaatatataataaatgttaagatcttcattgccaccgtagtagcagtttatggtgtatagaaccagtcttgtgaagcagtgaattaccttgatttaatttgaaattttaaaaccaatgttttttacactgtagttttattagctctctgggagtgagctacatgatgttgtgcactgaaaattacccaaatgttctcgccttctctttcctggatgagcttcagaaggagttcattactacttataacatgatgaagacaaatactgctgtcagaccatactgtttcattgaatttggtaagggcctgatttttttttcctttttattctgtctgcatccaatcataagcaattttaaatctaatattgggtggaggggggacttctgctatcttgcttttgatataataatttggtaaatgatctataaattatggtaactttttacttagatgcttattagaaaaaaattgtgtttgagctgtgaaggggattgtgagtattggtccgaagaattaatgccagaggataacttctcaatgagaaatttataagccagagattcagacttttgcgtttctgtaataatcttttatagtctgcttcatgtagaataggggatggcaaacatttgctggaaaggaccagatagtacatatttta

SEQ ID NO: 30898 - DNA, 1049 bp, Homo sapiens
gttgtgctctgttaatttttaaatgtacaataaattattgttgactgtagtcaccctattgtggtatcaagtactaaatcttattcattttagctaactatattatgtacccattaaccatcaccctttctcccacccccactacccttcccatcctccagtaaccaaaattctactctcttatctccatgagttcagttgttttaaactttagctcccacaaatgagtgagaatatgtaaacttttcttttctgtgtctagtttatttcagttaataaaatgtcctccagttcatccgtgctgttgcaaatgataggatctcattctttttttatggctgaataatactctgttgtgtatgtgtgccacattttgttaatccgtttgtctgatgatgggcacttaggttgcttccaggtcttacctgttgtgaatatactgcagtaaacatgagaatgcagatgtctcttcgatatgctgatttcctttcttttgggtatatagctagcagtggggttgctggattatatgatagttctctttttagtttttgaggaacctcaaaactactactgttctccatagtggttgtactaatttacatccccaccaacagtgttccctttcttccacgtcatcaccagcattcattattgcctgtcttttggataaaacccagtttaactgaggtgaaatgatgtctcgttgtagttttgttttgcatttctctgatgatcggtgatgttgagcaccttttcatatacctgtttaccatttgtatgtctcttttgagaaatgtctattcagatcttttgcccattttttaattggcttgttagattttttcatatagagttgtttgagctcattgtgtattctagttattaatcccttgtcagatgaatatagggattcacattcccttctcagtttgcaaatattttctatcattctgtgggttgtctcttcactttgttgtttcctttgctgagcagaagcttttaaactcaatataatgcaatttgtccacttttgcattggttgcctg

SEQ ID NO: 30899 - DNA, 1048 bp, Homo sapiens
aagtgctttgcattttgttaaaatggctacattcaaggccagtgttcttgactgtcacggaaggtgtaaatactttagtgatcgtctgctcaaacctcccatcccaaagaaggaatactatcgtcaacagttgtgaaatgatataaacttttgcttaaaatgaacacctcattattttataaggtagcatatgccattgtcagactatttgtttaagaaaattattccaacctaaggctttaggaaaaaaaaaaaacttccttatataattgagctaaagtcagcttccctatgtctactagtttgttttgtgatctgttcctcccttccttcagcagaaccagaataacagttaagtcagcaactgtgtgtcctttccatcctcttagactagtctacttcatataaatatctccaattcaccaatgagaacacatggacacagggaggggaacatcacacacgggggcctgtcaaggggttgggggcaaggggagggatagcattaggagaaatacctaatatagatgatgggttgatggatgtggcaaaccaccatggcacatgtatacttatgtaacaaacctgcacgttttgcacatgtatctcagaacttaaagtataataaaaaaagaaataaaaatgtaagacaatatcaactatagaatacaaagcaaacacatttatcattgtatattgacaaagggcaaaattttcaattaaactgcaacaaacatgcacctttttgaatcacgaggtcaggagttcaagaccagcctggccaagatggtgaaaccctgtctctactaaaaatacaaaaattagctgagtgtggtggcaggcacctgtaatcccagttactcgggagactgaggcagagaattgcttgaatccaggaggcagaggttgcaatgagctgagatcgtaccactgcactccagcctgggtgacaaagcgagctccatcagaaaaaaaaaaaaaaaactccagttcacttagccttttcatttatggcatttcaagttctccccatcctagaagcttcctc

SEQ ID NO: 30900 - DNA, 1739 bp, Homo sapiens
tttgggaggccaaggcgggcggatctcctggggttgggagttcacgaccagcctgaccaacatggagaaatcccgtctctactaaaaaaaaaaaaaaaaaaaaaaattagttgggcagggtggcacatgcctgtaatcccagctacacgagaggctgaggcaggggaattgcttgaacccaggaggcggaggtggcagtgagctgagattgcaccattgcactctagcctgggcaacgagagcgaaaactccatctcaaaaaaaaaaaaaaaaaagaaagaaaatatgacccacacactgtgggcatggggtagaggggacagaatgtaggtaacagaaactgcctctgagagcaatcagctgtcagatttaacagacagaggcttcaaagtagtcattataatcatgttcaaagactaaaggaaactattaaaggagtaaagggggaggtatgataatgttgcatcaaatagacaataccaataaagagaaattatttttaaaaaacacagtggaaattctggaattaagtaaaattactaaaatgaaaaattcactagaagggcgtaacaatagatttgaactggcagaagagttagcaatttgaagatagattgatagagattatctaatctgaaaaacagaaaaaagaatgaagaaaaatgaatggaacctcaaaaaaatggggcatgctaacataggtgtgataggataccgaagaagaagggggagaaaaagcagaaaaaatatttgaggaaataatggctgaaaagttcccagatttactgaagaacattagtctgctcttgcaggaagctcagtgaactccaaatgggatacacacgagatccacaaatagatgaatcatagtaaaatgctgaaaactaaagacaaggagaaagtcttgaaatcagcaagagaaaaagaacttgtcacttacatgagtttacctgtataacaaacctgtccctgaacctaaaataaaagttaaaaggaaaccaaaactcatcacttacagtgaacctcaataagattaacagctgacttcttagcagaaccaatagagactagtaggcaatggaatgacatacaaattgctgaaagaaagaaaataaaaactaccagtaaccaagaatcttatatctagcaaagttatcttttaaaaaaatgaaggcaaagtaaagatatttacagataaatgaaagataagagaattcgttactagcagaaacaccttataagaaataataaaggaaattcttggctgcatgttgtggcttacgcctgtaatcccaacactttgggaggctgaggcgggcagatcacgaggtcaggagttcaagaccagcctggccaacatggtgaaaccccgtctctacctaaaatacaaaaattagctgagcatggtgccacacgcctgtaatcccagctactcaggaggctgaggcaggagaattgcttgaacccgggaggcggagattgccgtgagccgagatcgcgccactgtgctccagcctgggcaacagagcaagacttcatctcaaaaaaaaaaaataaataataataataatggaaattctttaggatgaaaacaagtgaccctagaaaataatttgaatccatttgaaaaaaagcaaagaacaagggtaaatgtaattaagtaattaaaaaagacagtaaaggcccggtgtggtggctcatgcctgtaatcttaatactttgggaggccaaagtgggag

SEQ ID NO: 30901 - DNA, 1031 bp, Homo sapiens
gtggaatgaaattgatgggggtggccaaaatgaagaggaacacttgtacctctacctcacactctttaggtcttagaatgtgctttatgttttcattttaggactcttgagaatttctatataccagtgtgtgacaattttgactgtttgtaaatattgttacatcctatcttgatggattgtttctggaaatgggctcccaccggaaacaaaaataatcttttattttgcttttgcagagtgatggtgatgattttaattacatcattgcatttttccttggaacagcagcctgcctttaccaggtaggttttcttccattttaaagaaacacttaccattattgtttacttcgggtatcagttctaacaattgtgcattttaaataaattattaaaactctgagttctttgcttctcttttaatttgagcctcttttaactttgtgacctatgtctccattttgagtagacatacatcccagtgaacctgatgttaaccttcttcctgtgctgaggcttcagtggtggtatgtcatctgcctatggtagtaaagactacttctaggctgggtgtggtggctcatgcctgtaatcccagcactttaggaggccgaggtgggcagatcacttgaggtcaggagttcaaggccagctggccaacacggtgaaaccttgtctgtactaaaaatacaaaaattagccgggcatggtgatgtgtgcctgtagtcccagctacttgggaggctgagacaggagaattgcttgaacccaggaggcagaggttgcagtgagccaagatcgcgccactgcactccggcctgggcaacagagcgagactacatctcaaaaaaaaaaaaaaaaaaaaaaaaaaaaaaaaaaaaaactactagattttctggtggttgattattcagcttccaggttctacttatactctaggctgaggattttgtattggagggaagtttttgaatagagaacagcacagtaaaaacaggattttaggattcaatttagcagtaatgaata

SEQ ID NO: 30902 - DNA, 1049 bp, Homo sapiens
ggcccaaagatctttactctaaaacagttctgttgaatttcaacctggcaatgtaagttgatatcttcacaggtatgggacataggacagaattcaaagtcttccctctcctcacctgagacaaatgcatatctgattgcttcctctgccctattgtctacgttatcttatgtaaaaatacagattaactgagccagactaaggcatgaatatttcctccactccccactcacatgaaaattgtgtattcaaaaggatgcaactgttttatctttttatctactgacacaatttaaaaatatttcttggctgggcgtggtggctcacgcctgtaatcccagcactttgggaggccaggcaggcagatcaggaggtcaggagtttgagaccagcctggccagtatggtgaaaccccatctttactaaaaatacaaaaattagctgggtgtggtggtgcgcgcctgtagtcccagctacttgggagactgaggcaagagaatcgcttggagttggaggttgcagtgagccgagattgcgccgctgcactccagcctggtgacagagcgagactctgtctcaaaaaaaaaaaaaaatttctcttcccccagtatccaccctttcccctttaagtactgaagccctcaaaatcatctttggagataggcatatacctgcctccctggcatgcatcctttactatggcaaataaacctcctaaaatgattgagacttgccttgatcgtgttctttgatttacagagtcaaggtgggggctggttagatcagatctctctcagtcataattttctcactgttacaatttttgcaaaagaagtttcaagacctcaagagatgaagtgagaggcataagttgacaattgtcagggtcccatcctttcccgccatggcagattgttcagagattctgttgccttgttttcctgaaattttttttttttggagacgaagtcttgctcttgtcccccagactggagtgcaatggcacactcttggctcactgcaacctccgcctcccaggttcaagcaat

SEQ ID NO: 30903 - DNA, 1034 bp, Homo sapiens
tgatggaagcttaaaatagtatattcagccattaaaaatggttttgcagaaacttacttttaaatgaggcttctgagtcaaaaacaaaaacaattaatcatttgtagcaaaagcagcagcccaagcaacatcctatgttggtttccaagggtcatcatgagggcgagatggtacctgcacatgcagcggggtgcattacaggacaggagccctgtaaaaattaggaaactctgatcttctatataactgccagagacctgcccatcatcctctccagagagagagaaaccttagtttactctggaatgtaagcaagtcttgtccaggaagggaggaagaagagttctttatctttactatcctggaccatctccagggaggtaaacatgtctacgctttactatcctgagatgtctccttatataagtattcttgaattgtttgcaattgccttcgatcagaggacctgagccatgcagaaaagtgagatgttcagggtaaatcttcttctaacattgactgtatgtgaagggcattagatgcaactgtcaattttttttctcagtttgaaaaagtttttattttttatttcccatttcttagagacagggtctttctctgttgcccaggttagagtacagtggcatgatcacagctcactgcagcctcgaatgcctgggctcaagcctcagcctctcaaagtgctgggattataggcatgagccaccatgcctggttttgaaaaagttttaagagaaagtttgggaaaataatattgcataaatgtatttgacatggacgttgtttagaatatgctaagtaaaaaagtggattatacatggcatgtagtaagatcccattttttaacaattaggtataggtgtttgtctatggagaaaaaaatctggagggggtataccaatatattaataatgtttatttttgggtgagagacagcatcatttgttttcaaatgttctttctgtttatatgtgttttgctttttctccaatgaatgtagtagtttttgtgat

SEQ ID NO: 30904 - DNA, 1065 bp, Homo sapiens
attctcctgcctcagcctcccgagtagctgggactacaggcgcccgccatcacgcccggctaattttttgtatttttagtagagacggggtttcaccgtgttagccaggatggtctcgatctcctgacctcgtgatccgcctgccttggcctcccaaagtgctgggattacaggcgtgagccaccgcgcctggccagaactggtacttttaaaatgtctttttattttttaattaattttttttaaagaaatagagatggggtcttgctatgttgtgcaggctggtcttgaacttctggcctcaagcgattctcctgccttggcctcccaaagtgctgggactacaggtgtgtaccactgtacccagcctttaaaatgtcttaaaaagtgaaaaactatatttgaatataaataaagaattaagaacaacaacacttgagtatcgagactatattatccaatacaattgatgaaactatagaccatactctctagactttcacacaagcttttcagttttaatttcacataatttgaaaagtgatgtacatgtgactgtcgagcatttgaaatgtaactcatacaactgaggaactgaattttttattttattttttaaagtaacttaaatttaaatagccacttgtgagtagtggctaccatcctggtcaccacacatccagaacatggtgataagcctgtatcaggatagtctaggttatgttgcagccactgagaaccccaaaatcttggtgatttataagaacaaatgtttatttcttgcttgtgttatgtccccattttgggttggctagagacccagatggctgcagcagccaccatctcatgtgttgcccgtcattatggagaggcttgtaccagcacataaatgctctggtcccgagggtacatacatcacttctggtcacagctcactgactaggactagtcacatggccccatctaaccaggaagccgagagtgaagccctaactctgtgcagagatccttagcaacaactgccaccaacattagccccccctttcaaattacaggaaggagtcc

SEQ ID NO: 30905 - DNA, 1023 bp, Homo sapiens
cattacatgtattgtgcattttatttctattattattacattgtaataatatattttattataatataaaataagtatacaactcatcataatgtagaatcagtggaagccctgagcttgttttcctgcaactagactgtcccatctaggggtgatgggagacagtgacagatcatcaggtgttagattctcataaggagcgtgaaacctagatccctcacatgagcagttcacaatagagttcgttcctgagagaacctgatgctgccgctgatctgacaggaggcagagctcaggcggtaatgcgagcaatggggatcggctgtaaatatagatgatgctttgctcacttgcccactgctaacctccttatgtgtgacctggttcctaacaggctacttaccgggggttggggacacctgctctataagatatccttctagaatgattgatatagtactaagctgatgctcaagagaaattttgaactaaatgtgtaaattcggctacctatataaacaagaacttcctaaatcattctgttccatagcaaaacacaaccacataagccagttcttcacatctaggcaccacagtgtttgtttttcatttccaggatatagctgtgtcctttacaactggtagcatggaaagaaagagaagtctgcaaagattgaacaaacagcatgcactgtggtatcctttatttaaaaattgtgagctgactacagttgtagtgttctcatttaccattctgatggcataataaaccaagagaacattaacacaattccaagaaggcattaacctgtaacacacatatacgccacacatgcacacacacaacatacacgcacacaaaggttatattctgaacacaaaagtgatagaaaaaagctttgaatgcgctaaatcaaataaaaaccctttattataataaactgtggcaatactgtggctatcatgaaaaatattgtaactattttaaaagcaaaaggaaaaatactggcagtttgaaactag

SEQ ID NO: 30906 - DNA, 1049 bp, Homo sapiens
caagtaaatagcagggcatcctgctcaaagctgcccctgttgtcagggaagcaaccgtcacacaggaggacagagccagggccacatgcactttgctgcctggagctcccatctcatgtcccacaagccactggcattgggagggaagagctgggtgcattctgagtggacaccaactactgtccctgccccccattacacaaatgcacagccttgaccagcaaatacaaggagattagaaagagtaaggatatcagttctgcccagaaaacctcactaaggctggaagaggaaggaagggtgtaatattcccctttactccttgccaccagggtactgttttaaacagagaaaccttcatcctataaaccacctggggcaagagggctgatctgcaccccactccccacttcctatacccttatacagaccccaaacctcgggaaggcttcactctgttctcttccctttgtagttaggagtcagaatttgtagaaactgtaatggagaggatttaggctggaattttaggaagtctgtcataagagtaagaatcgtgaggcacaggagtggggaatgaggataaccatgtcctggagagagaactttccattcatctgggtgggcgggaggatgccaagatgacctctggccccaactagaggggctcagaggcttagcagagaccaatcccatctggaaattttccctcaagtcagggtggggctaaggctttgggaacagatatcccacccccaacgcacatcctgttcaaatccttgattttctttcagtttcagtccctcagctgccttgagtcttaagtcaaaatgatacaagctgcaaagacagtacacagagagtagaggggcatgtggacccggcccctgcctcctctcccagggcaaggcatggggcaggcagcttttccaacctgcccagagcctggacccctggccatgtgcatgggcttggggaggcccccctagcaggcttgcaggcttggctaccccagatgaagaatctggtatttcctgtgggacagttca

SEQ ID NO: 30907 - DNA, 1068 bp, Homo sapiens
tgaaagctgcccttcatctattcccctttcatttattcagcacatatttattgagtgacttctgtgtgccaggcgctagggatacaccaatgaacaggacctgggtgggaagacagatgataatatggggacattaatatggtgttgaaaaagtacaagatgtggtgggtgcagatgcagggatggctggtccagctgagttggccaggaaggcttcctggagacctgaagaattaacacagatagctagatgaaggcaggatgggaaacagtgttccaagcctaggaagagcatatgcagggatccaaagggaagagatagcttagcatggaaacgtgaaggctgacaacataatgataatcataaacacatatataatgctttctgtgtgccagatattattctaagccccttacatttatgaagttatttaaatactattatcatccccattttacagaaaacggaggcacaaagaagtttagtaatttgcccgatcttacacaactgttagaattggcatttgaagggagttggctgcggagccttagtggtgacaaaacaattactatgcctgtgtgtgtagcactgattcccagtgagaatcctggcatgctgttagacgtgcatgggccttgtggtaacaatcaacttggaaattgtcttgttaagactgacagaacttctggcatatcctaattgttgactctgtctttgtcaggcagacgatgagattccttgcctcagtggatggttttgttatgtctcatcctatgtgaacaggctgcagggaggttgtccctgacctcctagcgagaagggacttgggactcaaacaacagtttaactgtggatgaccaaatcacattttccacagtagattcccatccctaaatggggagaaggagaaaggaaaatggtttaaagatcaatacccagaaatggccgacctctgctggtgctccgccactgtgtgtggttgttggagctacaggctgtgaggaagaatagtttggttgattgccaacttggccccgagggagtaggcctgaaagggggttaaggca

SEQ ID NO: 30908 - DNA, 1042 bp, Homo sapiens
ggaattgagacattaggtcattttcttttctatgctgatttttcaaaatttgatgaacatgtattgcttttataatggttaaaataagtttgataaagaaaaaataaaaagagaaagcttgggagaacagagcctatgtagtggcctatggctagattatggacctgggtgttccagactggatgtagtgaacaaaggacagacagaattgggaataaacactaactctttcttaggccttgcagaagtgatgctgaggttaatctgaagttacttgggagatagaggagaggggaatgtagagagtcaacaaatcattgtattgaagtttcctctactttgtttgtcttttgccttggcctgctggcctagtgataattgggagaagggggagtgagaggaaagggaccaaggtttcctgtgctttttttaattattatttttgagacagagtctcgctctgtcaccaggctggggtgcaatggcgtgatcttggctcactgcaacctctgactccctggttcaagcgattcttctgcctcagcctcccgagtagctgggattacaggcatgtgccaccacgcctggttaatttttgtatttttagtagagatggggtttcaccatgttggccgggatggtctcgagctcctgacctcgtgatccgcccacctcggcctccctaactgctgggattacaggcatgagccaccgtccctgtgcttttgaatggccatgtgtcagggctacctagaaagatcagggcaaggcctcagaaatccccatcaggatagactgggatgagattcactccaggagctttggaagaaaatatataaaacttgttattgttaccatgacatacaaaatgccccactatttatcattatcaaaaaattcctggtacttccatgggctttctgcagcagagaggtgggtacttttaaaagtatagcatttgggccaggcatggtagctcatgcctgtaatcccagcactttgggaggctgaggtggatggatcacttgaggttgggagttta

SEQ ID NO: 30909 - DNA, 1062 bp, Homo sapiens
tgacagaacctacctcatagagttatacggagaatgaaatgatagtccacataaaatgtttaggctattgcaagcatatacgattgaaaatagtcaatatatggcatacagcttacaaacaatatgctgagatttaaaaaacaaaacaaaacaaaacaaactcttgttctccaatcactgtgcctttaaaacagtacaagaattctctatactctgtcttgtttctcacacccatgctcttgcatcctctctaattaggccatggccccctccattccactacagctgcttttttcaaagtcaccaatgatctccatgttgctcagttttaagacttaattcttaggtcaactctcctgacctatcaggcagcatttgacacgccgatttctccctttgtaagacattttccacgtgcagcctccagaacaccccaccctcctggttttactcctacctcactggctactttcttgtcctctcgtcttcctgcttctggcttagtctttggactttgtctttatccatacccatgcctctcgctgatctcacccagcttcatggcttccaaccccatctctcctctgacaactctgcaattatctccagctcaccagcactttctcccctgagctccagacttgaaggcaagctgctattcaatttctccactcaggtatctaatgggcatctcaaagatgtctaaacctaaactcctatatttcctccctgagtcctgttcctcctatattcttccacatctcaggaaccccatcctaacctcagacccaaaacctgagatacccttgactcttttttcatatcccatacacacatagtctgtcagcaattcatattggcccttccagcaaaacatctccagaatctgatcacttctaacaaccactaggaccaccctacttctaaaccaccaacatccctcacctggaatagtgcagtggcctcccaaccagtttccctatttccacttgccctcaatatagaaaccagaatgacctttaaaaatataagccagattgaatcactctggctcagaatctt

SEQ ID NO: 30910 - DNA, 2326 bp, Homo sapiens
tttcttcacttgactccaggagttcagttggaagcaggaggtaaatctggtcactggtcgtggctcttccaaaaatgcttctttacccatggcaggcaaaataaaactttgcatattattatacacttgcttaagaaaagccttcttagtctagaacaataatgaatgagccctttggtaactatgtatctttggacaagtcagtttacttcttttagtctaattgtctgtaaaatggggatgataacagtattgacctcataaggtaatcaagatgctttaatgagataacatgtagaatatttaacacaatgtcttggcacagagtaaacactctgtacttataagcccttattcgtaagccctaataattgtttgactagatattatagttagggtctaggcttttaagaatacttaaagtatcttggatttggaagataataagccatttaacagaatgcttctgaaacagcggaatttaataaaaaagcaaaatttaaggattcgggtttatggatagtctgtgtgaccacttgatggggttcttgtatatggtagtggtcaggttagacttgctcagcagtgccttgtggtgattctaagatgtgtgctaaaattttcttcaattgtgaggccaatctttattgtatttttttgatattgaacctttctttgcaacatatgagttttacttctttttttaatatattgttaagctacagatgatctaaaatttgacattgagggggtgaatatttagggcaacttgaatttatgcttctggaaaaaaattacatgaaaaaataatgataaaataaataaggctgggtgcgggggctcacgctcgtaatcccagcactttgtgaggccgaggtgggcagatcacctgaggtcaggagttcaagaccagcttggccgacatggtgaaaccctgtctctactcaaaatacaaaaattagccgggcgtggtggtgcacgcttttaatcccagctactcgggaggctgaggcaggagaatcgcttgaatccgggaggcgggggttgcagcgagctgagattgtgccattgcactccagcctgggtgacagagcaagactctgtctcaaaaaaataaataaataaatagggcggggcgcagtagctcatgcctgtaatcccagcactttgggaggctgaggcgggcggatcatgaggtcaggagatcgagaccatcctggctaacacggtgaaactccatctctactaaaaaatacaaaaaattagccaggcgtggtggcaggcgcctgtagtcccagctactcgggaggctgaggcaggagaatggcatgaacctgggaggcagagcttgcagtgagccgagatagcaccactgcactccagcctgggtgacagagcgagactccgtctcaaaaaaataaataaataaaaataaataaataaataaataaataaaataaactttaccattgaaaaggagttggtgatcatctttctccatttgacgtctctggcctacccagtgagtctcttcagctcctgtttttacgcagttgctgtacaaaaggggaacgaaagtaggggcatgtttttatttaaagctggttagatactttttcagagaagtcatgtgacaggttttctgatttttgtattatgtgaaacaacaatttttgtgtttcttgcaggagataatcttggccaacagtacaatagcccacaagaagttattggcaaacgaggttccgatatcatcattgtaggtcgtggcataatctcagcagctgatcgtctggaagcagcagagatgtacagaaaagctgcttgggaagcgtatttgagtagacttggtgtttgagtgcttcagatacatttttcagatacaatgtgaagacattgaagatatgtggtcctcctgaaagtcactggctggaaataatccaattattcctgcttggattcttccacagggcctgtgtaagaatgggttctggagttctcatggtctttaggaaatattgagtaatttgtaatcaccgcattgatactataataagttcattcttaagcttgctttttttgagactggtgtttgttagacagccacagtcctgtctgggttagggtcttccacatttgaggatccttcctatctctccatgggactagactgctttgttattctatttattttttaatttttttcgagacaggatctcactctgttgcccaggatggagtgcagtggtgagatcacggctcattgcagcctcgacctcccaggtgatcctcccacctcagcttccagattagctggtgctatagg

SEQ ID NO: 30911 - DNA, 1062 bp, Homo sapiens
acccggtgggtgggagtcactcagtaccagttccgagcctgaacccaaactctcgtgtttctgctcacccctctctggcttctgccaccacatgggaagaatatgccctggttagcccatggcttctgaagagcaagagaaagtagagcagagcctactccagcctcccccgtccaatgtatgaaagccccagctgatctgtaagcctgggagcgtgataaatgcttagtagtgcatgccatggagttccagggtggtttattacacggcaatatctagctaaatacatttaacttgctgcagctctctggatccagcctggttaccaggaagacaaaaactgggctccaccaggaaccagtcttctgccttcccaaccatcacctctggctgcatcagcgatctctcccagcgaaatagctgcttggtcttgtgtgaatcctgtactttaacacagtggaccaagtgtcagtcattgaaaatgaccatgagtaaccctgtggactctctgcagcttggttcctttgccccttaacaggtgggtatgaatcgtgtcttcagtgccagggctgaatgagaaagggcattcctttttgaaggaatctgatactaaacacaaagcatgagaaaaatcaggacttgttggagttatatttttaaaatatatattttaacagttatatatattagatataatatataatagtatatataaataatactatattgcccaggctggtctcgaactccttagctcaagtgatcctcctgccttggcttcccaaagtgctaggattacaggtgtgagccactgctcccggcctgttggagttctttacatttattttataatcaatgctgttttattaaatgcggattttattttggattacaggatgtagaatgccatatttttcttagatcatagggcctttcacatttgtaatttggccttgtatgagttaccctgcaatccctttgttttccccataacccttccaaaggaaggccgcaatagaaatacaaagagaaacaaaataattagaatattttttaacttct

SEQ ID NO: 30912 - DNA, 1062 bp, Homo sapiens
ccccttttctcctagcctgcaaggtttctgctgagaaatcccgttagcctgatggagattctaagtgacttcatgcttttctcttgctgttttcagcattttctctttgtcttttgacaattttaccataatgtgccttggagaagatctctttgagttgtatttatttggtaatctttgagcttcctgtatttggaagctttcaggaagttttcagttattattttattaaatgggttttctatgcctttacccatctcgtctccatccagaactcccagaatttcagtttttggtcacatatgtgtcccatatatcatgtagccttccttcattcttttttctttctttttgtctgactggattattttaaaagactaggcttcaggttcagaaattctttgttttgcttgatctagtctattgttaaagctgtcaattatcttttgtatttctttcaatgatttattcttttccaggatttgtgtttggttctttgttatgctgtctatctctgttgaatttctcattcagatcatgaattgttttcctgactttttatattcattatctgtgttctcttgtatctccctgactttctttaataacattattttgaatttttctcagtcatttcatagattttcttttctttggaatctgttgctggagaattattgtgcttctttggagatgttatgtttcctttttcatctttcttgcatccttatgtgactatctgtgcctttgacataacagtcacttcttccaattttatggattggcttttatatgggaaaaccttttcttatagctgtagctacagtattcattggatatcacactttggctttgattctgggtgggtacagtggcatagtctgcatatgatttcttcagctgtaattggcatgagtggtgtctgtgagtcattcagtggcttagactgcagttttgtgtttttttttttttttttttgtgtgtggttgttgagatggagtctagctctgtcaccaggctggagttcagtgacacaatctcagctcactgcaacctctgcct

SEQ ID NO: 30913 - DNA, 1034 bp, Homo sapiens
gctagcaggggcatggggcatgaagaacagaagaagagaggaagtgtttccgagcctccggaaaagaaatcagagccaagcacagcttcccgggtcacagaaccaattcattcaccaggcggcaccactgccgtcatttcagcttctggccactgggaggcgctgctcaaaagggtttgccctgagactccgagaagaagctgcgggaaggacagcaggggtcccggggttttagcctctggcccaggagttgtatgtccataaccaaagggagcacagtctgcacccagctctcatcccatcggagctgctgcgactcccgcaggttcttccaaaactggtttagcttgcctgcaggatcaggaaagtttgagaaaagcatctgcaaaaaaataaagagcagagcttacctcattgcctgtccccaccccatcccaggtcaccacctggctgaccccaggtccccgacccaacaacaacccctcccaagttcctaactctctcacttggactcgagactcttcacgccccagcagcgctccgcctccaacttgacatcatgctttctggaaacttccccgtatgtcccactttcccacacttggtgccctggagcacctcccggcctctaacgtgctgtatgttcccctgcgagcaccctcctcttggcctctggccaagtcccacccatctgtgggtaacaagggggtgtcggtgttcttttcagccttgctaaactctctgaatcaaggatcacaaactacagcctgcaggccaaatccagcccacagcctgtgtttgtaaataaagttttattggaacaaagccacaccccttaatctacagatgatctgtggctactttcacaccacaacagagtaccatggttctgacagagactgggggacccagtctaaatgacttctgacctggacctttactgaaaatcctgccaatcattctgttggcaagaatgatgtattacttttagcaataagaaacaagtaacctttgcagaattccacccatctttc

SEQ ID NO: 30914 - DNA, 1070 bp, Homo sapiens
cttacctggagcctggcatatggagtatgctctaggaacggcaagtcagggtcgtttttgtcattagccttaaataggcacccttatcatcagtcttgggttgcagtcttctcttctagccatgagctttgctgcctgcctctggagtgtggggaaattacattcttacctggcctgcccctaggctcttgtatgcctgggattccctaacatctttctagagaggtagcctcttgtagcttcctgtgcaacctgtttgcctgtggaacagagctgcatggatggacttggaacatgacacacccacacagagatcaataatgtggctcaataatgatgcctgcctctttcccacgagccatactcagggccttgctatcagttttccctcatccctgttactttaggagtttttcttcttgtggagtgcatcttatttttaaatgccagctggtcacaatttctcatgaatcctttcagagttttcccaaggccgtggatacaagtgcactctttcctttctgcaagtacaaatgagatcacgctattccgtccattcccttttcctcttacctgcgcattcagtcagatggtctgaaatagtttcacttccttggcgtcttttgtaaccatcccctccctgtcactgcttcagttgtcacacttctcagtgctcctcctcctgatttgcactgttgtggtggtttccctgctaccagccccttcgtgatttcagtccctcctcctgctttgccagaccttcctgtgcaaagagaagactgaccacatccctgcttatagccttcactgactcccagttccagcttccttggtttgccatccaaggctctcaacaggtggcactccagcaactcctcacacctgatgttttcacgtccctgccagactgagccgtggtgctccttggagctccctcccttccgtgcctttgctcatgccacacctctctctggaacgccaccttctgctcacaccccttctctgctgtcatcccttcaggcccaattcaggccatctcccttctagctggaactcggagttccattgtt

SEQ ID NO: 30915 - DNA, 1032 bp, Homo sapiens
gctgtgaggctgcagctgtgttcagacggcctccatcactgtggttccttcgtgtttctatgatgctgccttacctgcaaggtgaggggcaggcggtgctgtgcgccgttgggaaagttaggatttactcttcctccttcacttccacccatgtctccatgacagaattgatgtgaactcattcttaaaacaaatcagtgattttttttttttttaaaggatgtggagtcaagaaacaagtgaggttcatgtagcttctgactggttctctggagagagaagctgaagtcatgtgggggtcctagaaacactttattgatggccagatgccatggagcatcctagaggtatggtgtgggtgtggaatgaggctgctcctactcaacctgctgttgaaagacccttttgcctgtgtcgcctggctctctgttcatctcactgcctgacttccacacctggctgtgcatctggatcacctgggaacttgttaaaaatgcagatatttggatccgatactgaaacaactggataagactcttggatgctgtgatcctggaatatgtatttctaacagcctcccatgtgattctggtgcagcaagcccaaagctggtgcctggaccaatgccgggagccattgaccccagagtgttttttggccctttttgcagtctagtcaccccagggatgtgaagtgttcctgccagggatgtggctccctgtggtcctcaggccaggaggctgtactgtttgaaaagtgtaccaggtgattctgatcgcttcccctgctttgtctccctctccctgatgcagctcctgcctagatgaatagctttgttgggcttattgacctctaagagaaacagatgctcttttctctgccagggtctgctagagaagagaatctgctgtctgtgttaccactcccttggtgagggatccaggccatctgggttcagcgttttaggggatagtagtaagacctctgatcccaaatccaaagggatggctgtgggatgcaggtgataccgag

SEQ ID NO: 30916 - DNA, 1098 bp, Homo sapiens
gttgggtggagaggtgcctgggggagggtgttcatcaggacaagctggcctgtgtggtgtcattgagcaaggagaaggtgaaacgcagtctctagctgttttgaaccctatggggagcttgtggactcctcctctttaaagaaagctgttactctgtggactgctcagattcaagtgtggggatttcagaatctcgctgttctagaatggccctgctgtaggaagggggagcccaacattttttgagtagcaggagatgtgcatgtgtattctttgtttaagaagctggaaggacacgtgggttttgcaacctgggcttatttggattttgtggagcctcccccattaccaaatcacaggtctgcggatgccttcagttttcttttctctggctatggtgcctggctcaggcgacctctgctgtgtgctgacagaagctggacatcctcattagctgctaactttgttaggcaaatggctgattgcggttccattcctggtgtcactgcttctaattagcagatcgcatgtctctgaaaatgtctgttagcaccagggatgactaaagaggctgacagctggggctgggggctggagaaactgtgcagaagtgctttctcttcagcctcttgagggtccaggctgccgacctcagctaggctccttggcctctgagtgcccactggagcccaagggaacagagcagcagggttccttgaaaattgcaccaactggaggggtgatctgagccatctgagagtggcattggagcagcaggtgacaccgtccctgacttcctactttgttcttgagagaagtccaggccagtctgagagttttggggtttcttgttttgaacagaggtcttacgtggtcatatgtgaacctaatactgtagggaaacctgattggatcggtgccatccctcctggctcgcatcagatggtatgcgctggcagtgagggcacaggtagtcagaggaagtagcaccaccccttctgctgccatgcttgctgtacccctgctcctcttccttcgggtcagtgcccaccagccctgccactcttctgtgtgtggatcaagtggggcagcccttac

SEQ ID NO: 30917 - DNA, 1028 bp, Homo sapiens
tgtgtaccttttcatcctgtgcagcagaactgcgagccagttaaaccatttttctttataaactacccagtctcaggtatttctttatagctgtgcaagaacggactaatacaatatgcatgtgtgtgtctttatggcagaacaatttatattcctttgggtatatacccaataatgagattgctgggttgaatgatagttcaattttaagttctttggggaatctcgccacattttccacagaggctgaagtaatttacattcccacagcagtgtctataagcatacccttttccccacaacctcgccaacatctattattttttgactttttaataatattctgactggtgtaagatggtatctcattttgattttgatttgcatttcgttaatggttagtgatgttgagcattttttcatatgctcattggctgcatgtatgtcctttgcccacttcttaatggggttatttttttgcttattaatttgcttaagtttcttgtagattctaggtattagacctctgtcagatgtatagcttgcaaatattttctcccattttgtaggtcgcacgtttactctgttgatagtttcatttgctctgcagaagttctttagtttaattagattccatttgccaatttttgtttttgttgcaattgcttttggtgtctttgttgcgaaatatttgccaagtcctatgttcagaatggtatcttccagtattttatggttctaggttttacatttaaatatttaatccatcttgagttgattttgtatgtattgtaaggtaggggttcagtatcactcttctgcatatagctagccagttatcacagcaccatttattgaatagggagtcttttcctcattgctggttttgtcaaagattagatgattcttaggtatgtggcattacttctgggttctctattctgttccgttggtctgtgtgtctgtttttgtaccaatactctgccgttttgtttactgtagccctgtagtatagtttgaagttgggt

SEQ ID NO: 30918 - DNA, 1058 bp, Homo sapiens
gttccggtaaaggaaccctgctggggtcatgttcctcagaacaagaagggagaggaagcacactgggtgcaggtgcggatttcctgtagcactccctattggagagactttcatggagccacatcgccacacaggagtgggattcgctgagtgccagccaggcccagcatcacggagaccagtgtggaaggtgagctgggatctgaagtggaagaatatgatgatcggctcagctaccattcccttagtaggtgttgccttggggtgaatgtggagtgggaaacatgaattggctgtgcttctggttgtcttgggtcttctttaataatttctctgttaatagtttgagcatcttgctacagtgcgttttagtgtgaacattgtttttggtacaacatggctcctaaattatattttgcatatggatgctatcctgggtactctatgtcactgcctttgtagtatcatacagaattggatataaagttgtatatatgtacttcacaggggagacagggtgtttcaagaagagttctgattatgtctgatgctctctttactttagatcctaatctgccttacattctctcagctcagtaaagtgaggcttcagttatattccagtcaagctagagatcaccacctgtgaccagtcctgcacacatccctcttctgacttccctgttttttgtcctgtttggatcgattctgaattcctaaggattgggaccatgtttatcttaggcataggaccttgagggcacttagtagttgctcaacaaatatttgtcaaatattgatagcaacaacagcaatcatatttactttacatataatcatttaattctcatatcaactctgagtagttgttaccatattcaattctgaggtgaatttttttcttataacatctttgaattagggatacattttataaccagtgacataaccaacatcattttttttcttagtggtaatggaataatggttcatgttataatcgatggtgtcttagattcaattacatatggtgttattcccactttataggaaactgg

SEQ ID NO: 30919 - DNA, 1049 bp, Homo sapiens
atgctgcaccatcctcagactcagatttctggttttctgtttgatctctagcctcccaatgtggcaccaaatgaagccagctcttaggtaagacccataaaaacaggaaactcacctggtactatttcctgctcccacatatcagctctcctccaacttctgcttgcctttggtcattttccagggcctttagagggttgttttttatattttgtctagaatctatcacttatttctgcaggagatgttatggactgaatgtttgtgtcctgacaaaattcgtatgttgaagccctaatcctcagtgtgatgtacatggaggtggggctttgggaagtcatgagggtggggcctccatggtaggattagtatctttataggaattagaaaaaacaagagttctcttgctctctttctctctatcatgtgacgacagagcaagaaggtggctgtctgcaagtaggaagagagcccttaccagacatcaaatctgctggcacattgatcttggactttcacacctccagaattgtgatgaaataaatgtttgttggctgggtgcggtggctcacacctataatcccagcactttgggaggccaaggcaggtggatcacctgaggtcaggagttcaagaccagcctggccaacatggtgaaaccctgcccctaccaaaaatagaaaaattagctgggtgttgtggcacgcacatgtagtcccagctacttgggaggctgaaacaggagaattgcttgaactcaggaggcagaggttgcagtgagccgagatcgcaccactgcactccagcttgggccacagagtgagactctgtctcaaaaaataaataaattaaataaataaataaatcatgtttgttgtttaagcctccagtgtgtggtgtttgtggtagcagcctgagctaagaggagggctggtgtgggaggagttcttctgccatgtggaaagtggacacttcactgttcatgctagtgttggccacctcgtgtcattatatgccactgggccccacctggattgtgaagactaaaa

SEQ ID NO: 30920 - DNA, 1009 bp, Homo sapiens
acaatttctaatttaatccttttgtgatcatagaacatactttgtgtgatttcatccttttaaacttattagctcaagatgtggtccatttcagtgactgttccatgtgtatttgagaagcatgtgtttcctgctgttgttagatgtagtgttgtatacatgtcatttgggtcacgttggatgataatactgttcaaatcttccatatccttgttgatttttttgtctacttgttctatcaatattttgagagcagatcaaagtatttgactgtgattgtggatttatttatattcctctttagtctcagatttgctttatgtatttaggagttttattataagtacctatacatttagaattgttattcttgaataattgtcccgtttatgattatgaactgcccctctttatatctggtcttattttttgccttgaattcttctttaactaatattaatatagctacaccagcttttttatacttagcatttgcacaatatatctttttccttttttccccaaatttttgtgtcttcgtatttaaaagctatttcttattaataacacgaagttaggactttgccttctcattggggagtgtgataggaagaataatggccccccaaagatttctaccttctagtacctggagcctgtgcatgttttctctcacatggcaaaaggaactttgcaggtgtgattaagttaaggatatgtgatggggaggttatcctttgttatccaggtgggttcagtgtaatgtcaaggtccttatgagggaagggggaaggcaggagagacagaaaagaagatatgataagggtagcagaagtcagtgtgatgtgaggccatgagccaaggaatgggggtagccgctagctagaactggaaaaggtaaggaaatagattcttctctagaacccccctgataggtacagccctgccactagcatgattgtagtcaaataagacctgtttgagacttctgacctttagaatggtaaga

SEQ ID NO: 30921 - DNA, 1063 bp, Homo sapiens
atgcattttgttttcaaactctttagatagtcatttagtcaaatatgtttttgcaaatgtaaaaaccaactacccagcagcaccaaggcagggctggctgcctagcctttgtgcagatagtggtgccacccaactggacggccctgcctcctcccacaccctgccagtggagtgattacggcagtagatttccttgtcgatcctgtttactcccagcacactgtggaattccctccttgtctgccctcacatgacttctatccatctaggttaaatgctgttctgtactttgcagccatttgaagctctctaccttcctttctgctttaacaccctctccctggcctcaggttggctccaggggatcccatcctggtctgcaggccctgggtctaggtaggatgagatttacctttcacgtaccatagcataattttaaaaattgttttttacacatcactttaaatgggactttgatcttttgcctttaactgttgatcaggcgtttcttccatgaagtttttcttgaataatcacatttctctgaacactttttctgttatcttcttatataccaaaacacaaacccttccctcatactgtctcctacagggacagtgttacagagctgcctttcacccctggttagcccctcctcttacaaatcactgggtacatttggttagccctgtagtcttcaaaaattcctgtgtgtgccctttccaggaaactataggctaaaaccccttgtatgtgtctcctctggggctcccctgtcaaggtccaccatagaggtgggtcattcccacccaaacacttgtcttggccacttgcagtgagaaatatttctgggatgatgctcagcactcccccaaagactgatggctgatgtttagtattcagtgtgaatcacattgttaaaaagcctgtgcggctattgctaattaacacagctatacgcttatctgttgctttactctttgcaaagtctgtgtgtgtgtgtatgtatacatatatacacacaactacatacatcggcagcatacacacaccccagtagtga

SEQ ID NO: 30922 - DNA, 1025 bp, Homo sapiens
aggtcatctgtggcagaaagtggggcacagctggagtcctagccaggctcccggggaggggcagttcccctgggcccagcccagccttgttgaggaggggacggggagcagagctgcacctgacagtgattttgcctgtctctgccccagtccggggacacggatctcccacctcaaggcagggcagtcctggcccattcagcaaagatgctgaggtacacagagcatgctgatgcgtattctagggccagctgggagtcttggtttcccagcctggctgactgtagggagtggtcagaggctgcctgtggttggaggtggtctccaagggggtgccacagaggtgactgtgggaagcacagaggttcccttggaagggcacctcatatggttgctagcctggagagagggggctctggagccaggaaggaagtcctgtgtaggatgagggtggagagggagcggttgtggctgcagaaacttccccctaagctggcgccctggtggctttgtgggcgtgaggcttgggaggcctggaggccgcttagctgggaagcctgacggtgccatcacctaacagtactcctacgaggggaacgatgtcagcgacctgccagtgaacctgtcagtcgtgtggaacggcaactttgtcattgacaacccacagaacatccagggtgagtgggcgccccggcggggtgggcagtgggcgggcccgagctgaccgcacccctccccacagcgcacctctacaagtgcccggccctgcgcgagagctgcggcctctgcctcaaggccgacccgcgcttcgagtgcggatggtgcgtggccgagcgccgctgctccctgcgacaccactgcgctgccgacacacctgcatcgtggatgcacgcgcgtcacggcagcagtcgctgcaccgaccccaagatcctcaaggtagggcccccagccctgcccccacaccccatgccccgccctgcaccaccgcacaccctacgccctgtgggatgcctgtaccccagcct

SEQ ID NO: 30923 - DNA, 1033 bp, Homo sapiens
tgtcaaggcggagggagatggtagacatgcactcctggtacccagtggatgggggcattgagttggacttcctttgagctgctgcaggcccgctgcaggggttgctgttcaaagggcccagtcacggagagggtggcgtgagcagcccctctcattctgcacccagccgcactcgtaacacctttgtcatgtcggcttgcaggggcttctcaggctgccacagggactctgtggccaaggctgccctgatggcaacaggcagtggtggcagcacccaggtcgtgtccattttgctaaggacaggtgaagcttgggaatgacccgccgagctgaggagtcagggcaacttgtcacttgccttccaggcctgtcctctgatggggccctgcctcaccagccaggcctggacagcccctcactggtcagcttgggggctggggctgggtgcttctctgtggtctgagctctgtgtgctccctcaggtgcaggccaatgtggagaagtcgctgacactgttcgggcagctgctgaccaagaagcacttcctgctgaccttcatccgcacgctggaggcacagcgcagcttctccatgcgcgaccgcgggaatgtggcctcgctcatcatgacggccctgcagggcgagatggaatacgccacaggcgtgctcaagcagctgctttccgacctcatcgagaagaacctggagagcaagaaccaccccaagctgctactgcgccggtgagcctggggggcactggggttgggggaggcaggcccatgcctccagctttggacaggttggtctagcaggcccagagacgttgctgtggcagttcccaccgggcaggggtgggaggactcacctggcctctgaggctcagctgccacctccctaggtactgatagtgaggacccaggctggagtctccatacacacaggcctgggctctgggcgaaggactggggtctccatggcagcccctgaagcgcctgctgcccactcatgtgggtgcctttcgagacctgaccttc

SEQ ID NO: 30924 - DNA, 1012 bp, Homo sapiens
ggcagtccctgaggtggtgtttggggcacagagggctggtctctgcaggaatgggtcccctgggccggagctgagctgcaggtctcagtgcaggagccatgagtgcaagccagcatgcaggcctaggagggtggtggctgtgtggagtgggcccctgagggcctggtcacatcttgcccttgtgcaaacgagtgcgtttgagcacgcctatctcatgatgctctgcgtgagatgcaggtggtgggggcagcacatctctggttgggtggcaggggacggccttcacttaaccatgggccctgcacctctgtgggcctcgtttccccgtctgcatggaaagccatgcccactttggattcggagctgggagggccacaaggtcactgctcaggagggagcagaggcctatctgagcagcgcctggactctcgcctgcagcctgcccctgcgcttctgggtgaacgtgatcaagaacccacagtttgtgttcgacattcacaagaacagcatcacggacgcctgcttgtcggtggtggcccagaccttcatggactcctgctccacctctgagcacaagctgggcaaggactcaccctccaacaagctgctctacgccaaggacatccccaactacaagagctgggtggagaggtaggtggagggtgcaggggtcgggggcaggggcccgggggcagcctggactctgctcatgtgcccacctggccactcacctgcaggtactatgcagacatcgccaagatgccagccatcagcgaccaggacatgagtgcgtatctggctgagcagtcccgcctgcacctgagccagttcaacagcatgagcgccttgcacgagatctactcctacatcaccaagtacaaggatgaggtgaacaccgtgggagcccacaggctgggctaggagggcttgccggcccctgccagagtcacctgctctgccccgccctgccactcctccctgaatctctgggctgccactgaccaccttcact

SEQ ID NO: 30925 - DNA, 1023 bp, Homo sapiens
aggggagcagaggagcagccagagactgcatgtattagggtggggagtggggacaaaagcctggggtcctggggctcaccagggaaaggggagctgaggctctctggggagctctgctttaaaggggcacagaaaccccagggtgtgaggactgggtggggacatgtcagcagcatggccaggcagccaagggatcagagcctgctgttttagggggtgagagtaggatgatgacaggggcagggctcattctccatattggggtcctggagggtccaggctcacaaccaaggtcctttggccaggggtagatggggttgaacctctggcacctactctggaggcatctgccctgggcctgctgagtgcatggaggctggtggcccggcatgctgacagttctcctggccctgcagatcctggcagccctggagaaggatgagcaggcgcggcggcagcggctgcggagcaagctggagcaggtggtggacacgatggccctgagcagctgagccccagctgtgatcatccagcatgatgcagcgtgaggacagctgagcagggaccgggacagccctcaccgcatgcgtgtggagtgtccggtggtgctcgggccgccgcagtgcagcgactgcccggccctccctcccctgcctcacccggtcgggtcccggctcttcctgtgtggaggtgatggtacctgccacaccacagctgcgcacacagctgcttgctcaggggccgggacagcactgggtgctcaggctggccaaggaccttcattgcctggcaagagctgcccagtggccttcatgggagaagggctgacctctgaggggctgaggggtgaggccagggccctccagggggaggggtagccagcttgggctgtccccttgagaccaggacaagaggctgggggtgtcagcattcccagctttccaagctgcccccaggcggcagagtctgagggtcccggggcccggttggcagctggagaaagaggcaaaaagcccgtagccg

SEQ ID NO: 30926 - DNA, 1067 bp, Homo sapiens
ggctgtttttttcagtagcccctagcattggctgggattcctgttcctgggtgcgcctccacctcccttctgatgtttcctggctatggtggggtgggaacctcagtttcccccaaagtcttccctggatgctggcttcaggttgaagtccctggttcttccagttcctcacgggttaggtaggggctcctgcatcaccttcagaatccagttccaacccccactctccttaggccttgtgctctgctctgccctgccaggctgcccttgtccatgtgagtagcatgggcgggtggtggggacggcagtggtgatgaagggggtgcaccacaggcctcatgaagcagttcccacatgggcgtgtggctggggcgtggccaccacagagcacatggctgtgtctaggcgcaagcactttagcagtatctgtttacatgcgcaaggatcaagccgactacctgtgctgtctactgggacagcagtctccgagctactccgtacctccctctgccaggtcgtggagttaggccccagtccctacttgtcactggttcccactgtgctcctaactgtgcagcacctgggagctctggcctggggctggaggccctggtaggagctgcagttggaggccgttctgtgcccagcagcggtgagcggctcccatgggccctgtgtctgcagggagccagggctgcggcacatgtgctgtgaaactggcacccacctggcgtgctgctgccgccacttgcttcctgcagcacctcctaccctgctccgtgtcctccctctccccgcgcctggctcaggagtgctggaaaagctcacgcctcggcctgggagcctggcctcttgatatacctcgagcttcccctgtgctccccagccccaggaccactggccccttggcctgaggggctgggggccccacgacctgcagcgtcgagtccgggagagagcccggagcggcgtgccatctcggctcggccttgctgagagcctccgccctggctttctccctgtctggattcagtggctcacgttggtgctacacagctagaatagat

SEQ ID NO: 30927 - DNA, 1814 bp, Homo sapiens
ggagtgcagtggcacaatctctgctcactgcaacctctgcctcccgggttcaagcgattctcctgcctcagcctctcgagtagctgggactagaggcacatgacactacgcccagctaatttttgtatttttagtagagatggagttttaccatgttcgccaggatggtctcaatctcttgacttcgtgattcatccgccttggcctcccaaagtgctgggattacaggcatgagccaccgtgcccggccattttctatttttatacagatggggtctcactatgttaaggctgttcttgaactcctgggctcaagtgatcctcctgccttcacctcccaaagtgctggaattataggcatgaaccaccatgcccagccatcttaaccattcttatgtgtatggttcagtggcattaagtacattcatattgttgtgcggccatcaccgccatccatccacaaaagtcttttcagtttgaaaactgaaactgtctcggttaaacactaactccccattcttcccagcacctagcaaccatcattttactttctgtttctgtgaatttgaccgctcagtgagtggaaccatataggatttgtccttttgtgcctggcttctttcactcagaatcatgtcctcaaggttcatccatgtgccagcacgtggcagaatttccttctattttaaggcttcatcgtccatcatatggacagatcgtgttttgttcatccattggagatcttttctgagccttctgtgtttctgacctggaagcgctgagcctacccacaatggggctcctgaaccttagggaacaggcccagttcctggatggggtttggtgcttagggttttcctttttggcagtaaccacatctgttttggtgctccctcagggactaccgcgccatcccagagctggacgcctatgaggccgagggactggctctggatgatgaggacgtagaggagctgacggccagtcagagggaggcagcagagcgggccatgcggcagcgtgaccgggaggctggccggggcctgggccgcatgcgccgtgggctcctgtatggtaggtccagttgtctgcctgcccgagggactgggaagctgggaaggagtctgggaggggagtagaaggtgctggggatgaccgcagtagcaggtgtctcttgcctccccagacagcgatgaggaggacgaggagcgccctgcccgcaagcgccgccaggtggagcgggccacggaggacggcgaggaggacgaggagatgatcgagagcatcgagaacctggaggatctcaaaggccactctgtgcgcgagtgggtgagcatggcgggcccccggctggagatccaccaccgcttcaagaacttcctgcgcactcacgtcgacagccacggccacaacgtcttcaaggagcgcatcagcgacatgtgcaaaggtgtggcttccctacgcccccgcctcagcccctgtagcgcctccctaaatcctccccagaaagttgtctgagccgagtgaacacgtgaagcacagggcatatggctgagaggtctgtcagagaaaccaaaagttttgagttttgcatcagggctctcctgctggctatgcagtgaccacatctgggccaccaaagcgttttttgacaagcttgaaaatggacagattttatataaaaatctggattactactttgatctttgtaataggaattgactctttttttttttttttttttttttgagacggagttttgttcttgtttcccaggctggagtgcaatggcacggtctcggctcactgcaacc

SEQ ID NO: 30928 - DNA, 1050 bp, Homo sapiens
tttagtagagaaggggtttctccatgttggtcagactggtctcaaactcccgacctcaggtgatttgcccgccttggcctcccagagtgttgagataacaggcgtgagccaccgtccccagccaggaattgacttttaaaagggacatgtagatcttgattcctgcaattccttccactgctttttgtcctgtgtttgtcagtttcttcctggctcttgtaaggcgtttcatgtttgtagctgtgtaggcactctgctcatatttaatttaaccccccagcaactttgtacactgtgtgacatgcccattttacggagtaggaagttgaagctcaggctatgtcacagctgaagtgtggtagacctagaagtgaaagctgggctttctaggtcaaaatcaatggtcggggtgggtaggccttgcttctcacacaggcattgttgcagcccagcccaggcctcatgcttagttaactctcttcccactgtgcccccttctagagaaccgtgagagcctggtggtgaactatgaggacttggcagccagggagcacgtgctggcctacttcctgcctgaggcaccggcggagctgctgcagatctttgatgaggctgccctggaggtggtactggccatgtaccccaagtacgaccgcatcaccaaccacatccatgtccgcatctcccacctgcctctggtggaggagctgcgctcgctgaggtgagctgagggcaggtgaggatggcaggtccgagctcagtgctgggtgactcggtcgtgattcctgaagagcgattgtggtgtgggcggggagggtgcagccagcagcatcctcatcgcaggtgagttgtggttgcacaggagtgtgatgggagggatcttcccgggctgggggctgggcccaatttccaggacagtgtgttgggacactctcgtctgcagcctggcctcaccctggctcacggcttctgatgcaccctctgcctccgcaggcagctgcatctgaaccagctgatccgcaccagtggggtggtgaccagctgcactgg

SEQ ID NO: 30929 - DNA, 1078 bp, Homo sapiens
catttattgaatgcttacagtctgttgagtccagttctgtgcctgtagtctgacagcaggggagtgaggtgagtcctgttactgccttcctgttgtgcagaggtggagacagatacagggcagccaagtaacttgtctcagtttacacgcacagcttgtacagcagagatttgaagccccttaatcggcctctccacccctggatattttcctcccataaatggaggtgatggtgtctgaaagtgcactgtaactggggcgctctggaaacagcctgttctcacaccactgatggctcactggacacttcctccttgcaggctcgtcagatcaacatccacaacctctctgcattttatgacagtgagctcttcaggatgaacaagttcagccacgacctgaaaaggaaaatgatcctgcagcagttctgaggccctatgccatccataaggattccttgggattctggtttggggtggtcagtgccctctgtgctttatggacacaaaaccagagcacttgatgaactcggggtactagggtcagggcttatagcaggatgtctggctgcacctggcatgactgtttgtttctccaagcctgctttgtgcttctcacctttgggtgggatgccttgccagtgtgtcttacttggttgctgaacatcttgccacctccgagtgctttgtctccactcagtaccttggatcagagctgctgagttcaggatgcctgcgtgtggtttaggtgttagccttcttacatggatgtcaggagagctgctgccctcttggcgtgagttgcgtattcaggctgcttttgctgcctttggccagagagctggttgaagatgtttgtaatcgttttcagtctcctgcaggtttctgtgcccctgtggtggaagagggcacgacagtgccagcgcagcgttctgggctcctcagtcgcaggggtgggatgtgagtcatgcggattatccactcgccacagttatcagctgccattgctccctgtctgtttccccactctcttatttgtgcattcggtttggtttctgtagttttaatttttaataaag

SEQ ID NO: 30930 - DNA, 1764 bp, Homo sapiens
cataattgaggggtctcacttcctccagtgatgagagggctctcagacctccttcggggactccaccaagaagactcttataacgactcactagaaaaggagtagggggacccttcctagtgggttgttgtgggatcttcttggtgaaatccccagatgaggacaagcaagcacattacaaacacagtggagaatatatacctcaaactactcatggctcttttggaggaatgcaatatacaaaactttctacattcctgtgttcattgagttttggtgataaatttgtattattttatcatcataaaggaaacagtgactagccttgtccctgtgtcctcccacagtctgctcccctggcctctccatcatgacctgatgacccctgccctgtcagtgtattgtggttcttttatgccatctgcccagtaaatactgagtaaagcaatgaatgatgaaacaagtgaatgaacttttcatctctgtccttagattatgtttttcctgacttaactgagaaggcaggttccattgaagacaccagccaggctcaagagctgccaaacctcccctctcccttgcccaagatgaatctggttgagcctccctggcatatgcctcccagagaggaggaagaagaggaagaggaagaggaggagagggagaaggaagaggtagagaaacaagaggaggaggaagaggaggagctgctccctgtgaatggatcccaagaagaagccaagcctcaggtccgtgacttttctctcaccagcagcagccagaccccaggggccaccaaaagcaggcatgaagactccggggaccaggcctcatcaggtgtggaggtggagagcagcatggggcccagcttgctgctgccttcagtcaccccaactacagtgactccgggggaccaggactccaccagccaagaggcagaggccacagtgctgccagctgcagggcttggggtagagttcgaggctcctcaggaagcaagcgaggaagccactgcaggagcagctggtttgtctggccagcacgaggaggtgccggccttgccttcattccctcaaaccacagctcccagtggggccgagcacccagatgaagatccccttggctctagaacctcagcctcttccccactggcccctggagacatggaactgacaccttcctctgctaccttgggacaagaagatctcaaccagcagctcctagaagggcaggcagctgaagctcaatccaggataccctgggattctacgcaggtaaagtgaggggcatgcgggccaccaccctgtaccttcttcacagagcctggccatccccagggctagtgtggcatgggggcaggatctgccaggttgaggagggaggccctttccacagcacgtagaaccccatggaacttgtggggatgcaaacctcagggccaacaatgggtgttctccccacacttctgtgcaaaggcctttggagaaacttggtggcctggcctgggtttcatttgttcatgtgttaccattgccacccttagacatcttttgttttttttttttcccgagatggagtctcactctgtcgcccaggctggagtgaagtgggcatgatctcggttcactgcaacctccaccgcccaggttcaagcaattctcatacctcagccccctgagtagctgggattacaggcatgtgccaccatgcctggctaatttttgtatttttagtggagacagggtttcaccatgttggccaggc

SEQ ID NO: 30931 - DNA, 1047 bp, Homo sapiens
gggccagttgagaggagagtgcccatcgataggtgtcctcatctgcaaggggaggcagtgactctcctgggcgcacagggtcccgtgggtgaagcagctggtcagcctagcactgctgactgctctgcagggcaccagccccaggacaggtgccagaggtgcagggagtgagggggctgctagccccaccagggggcccctccctggcaccaccagcccctttccggcgcaggcactgcagggcctgagcacctgaatacctcaccagaggcaggccctgcgttggtggtgcccaaggatcaaggagaggctccagcagcctagaggcctccccaggaggaagcgagcagagccctagcgatgctccctgcccacctcgcaagtggagtcttcttagggggctgttgggggatcgatgacgtcagggaggccacggggctttgtagtgccaacgactagtaggtttattttgagaaaggagttgagctgcagcaacagaaaagaaggatctggcacctgtggagggtgccgcgggaaccccctgggtggggttgcacagacggccgcgggcctggcgctgtccgggggctggctcgctcgcccatggcctctccccaccccgcctcagtcgcacggcgaggagctgcgcttcgtggagaacggctgccacgacaaccccacgctggacgtggccagcgacagccagtcggagatgcaggagaagcaccccagcctgaacggcggcggggccctcaacggcccggggagctggggggcgctcatggggggcaagcgggaccccgaggactcggacgtgttcgaggaggacacgcacctgtgagcgcagccgaggcgcaggccgagtgggccgccaggaccaagcgaggtggaccccgaaacggacggcccggagcccgcaccagccccgcgcctacccgggccgcccccgcggcctggccctcggcgcgggctccttcccgcttcccccgacttcacacggcggcttcggaccaactccctcactcccgcccgaggggcaggcctcaa

SEQ ID NO: 30932 - DNA, 1056 bp, Homo sapiens
agagagagagagagtgtgtgtgtgcgtgcgcgtgcgcgcgcactataaagcaatccccatatctggtggcttaaagaagaggggagtttgtttctccttcacttctgactgaggtgggtgccccagggcaagtggcttgcggaagatcaggtcatccctccatcttgcccctgtatgcctaagggtgaaggtcaaaaaccttttctctgaaggtgagtgtttcaggttctgtgggccatatggccctgttgtagctactcaactctgtagcgcaaaggtagccagagacagtacagagatgagtgggtgaggctgcattccaataaaactttacttgcacaaacaggctggatttggtccacaggccgtagcttacccatcctgcctggggcatcgcgtttggccatggagattgggtcctaggcaaactcatgctctaggaggaagaggaaggcagggcaagcaatgctgtttttgtagaagccaccggaaattgcaccacttctcatgttcccctggagagaacttcgtgcctacctgccaacaagggaggcttggaaagtcattctgtggccagggccctgttttgtgggggaaggggaggaagcatgctgggagacagagggcagtccctactgctgctctatctccagtggcagctcccttgtccatccctccgcgcggcctgacagcccctcagcctccatctttcccaccccctctactgggcatctcctgcagctcagcccagctctctggcccctgtagcaggggttacctttgcccaccctggagaagctccctcttcaaggagcctcgccacccaaagggcaccttgtctcagagtgtggcttgggctcttaacctgggttgatactggttgagctgtgtgacactgggtgagctttgtgatcttgggccagttacttaactgctctgtgcctctagaacatggggatagctctcgtcgtcacttcctaaggccttgtgcagatgcatgggttacccaggtaaaggaggtggcatggcacatggcacatggcttgtaatgtggtc

SEQ ID NO: 30933 - DNA, 1050 bp, Homo sapiens
tgatcattactatcggccagtctatcgtgtatgtgatgaccgggatgtatggggacccttctgaaatgggtgctggaatttgcctgctaatcaccattcaggtaattattatgctaacatctccctttgagtagcccctcacacttacctacaattctcacataacgaatctcaagcacacctaaaaggaactcctactgaaaggaagcagaagcctaagactctgggttagccctctgaattcagcagagaaaggctttactgaccgctctctggggctgaggatgtgatctcattccgtcttcagcgtttatatcagagaacccaattactgaaggacggaaccatgtccgtggggagcagtaacacatagtcttgtatttttgaatttttacagctctttgttgctggcttaattgtcctacttttggatgaactcctgcaaaaaggatatggccttggctctggtatttctctcttcattgcaactaacatctgtgaaaccatcgtatggaaggcattcagccccactactgtcaacactggccgaggtaagggccctgtgctcccctggtggcgacagctttcagcaaaaacaattgagcaatgcaaagcagaagacaaaaatccccccattccacagaaaaataatgtcagttttaggtttatctcttctggtgtttgggtccatctgcaaagttttaaaaacacaaataggcttgtaattatgatgatacctaacttgcacttttcatataaaaatatctcctggacgtttggcacgtcagaatacacaatcctgcctcacttttcttagcacagtataagcttatattgcaacgataaagcaacgttaagtcatttccaggtttttttatcgttaacattgaaaccatgactgtcctcatatgttcatctttgtatattttggcagctgctctcagtgaataagtttctaaaaatgaaattcctaaaccaaagcacttggtcatgcaaggggcagctttctgaaaaaggcctgaacttggagcttagcacctgcgttcaaat

SEQ ID NO: 30934 - DNA, 1613 bp, Homo sapiens
atctaccagtactttgagatcttcgttaaggagcaaagcgaggttggcagcatgggggccctgctcttctgagcccgtctcccggacaggttgaggaagctgctccagaagcgcctcggaaggggagctctcatcatggcgcgtgctgctgcggcatatggacttttaataatgtttttgaatttcgtattctttcattccactgtgtaaagtgctagacattttccaatttaaaattttgctttttatcctggcactggcaaaaagaactgtgaaagtgaaattttattcagccgactgccagagaagtgggaatggtataggattgtccccaagtgtccatgtaacttttgttttaacctttgcaccttctcagtgctgtatgcggctgcagccgtctcacctgtttccccacaaagggaatttctcactctggttggaagcacaaacactgaaatgtctacgtttcattttggcagtagggtgtgaagctgggagcagatcatgtatttcccggagacgtgggaccttgctggcatgtctccttcacaatcaggcgtgggaatatctggcttaggactgtttctctctaagacaccattgttttcccttattttaaaagtgatttttttaaggacagaacttcttccaaaagagagggatggctttcccagaagacactcctggccatctgtggatttgtctgtgcacctattggctcttctagctgactcttctggttgggcttagagtctgcctgtttctgctagctccgtgtttagtccacttgggtcatcagctctgccaagctgagcctggccaagctaggtggacagacccttgcagtgatgtccgtttgtccagattctgccagtcatcactggacacgtctcctcgcagctgccctagcaaggggagacattgtggtagctatcagacatggacagaaactgacttagtgctcacaagcccctacaccttctgggctgaagatcacccagctgtgttcagaattttcttactgtgcttaggactgcacgcaagtgagcagacaccaccgacttcctttctgcgtcaccagtgtcgtcagcagagagaggacagcacaggctcaaggttggtagtgaagtcaggttcggggtgcatgggctgtggtggtgttgatcagttgctccagtgtttgaaataagaagactcatgtttatgtctggaataagttctgtttgtgctgacaggtggcctaggtcctggagatgagcaccctctctctggcctttagggagtcccctcttaggacaggcactgcccagcagcaagggcagcagagttgggtgctaagatcctgaggagctcgaggtttcgagctggctttagacattggtgggaccaaggatgttttgcaggatgccctgatcctaagaagggggcctgggggtgcgtgcagcctgtcggggagaccccactctgacagtgggcacacggcagcctgcaaagcacagggccaccgccacagcccggcagaggggcacactctggagaccttgctggcagtgctagccaggaaacagagtgaccaagggacaagaagggacttgcctaaagccacccagcaa

SEQ ID NO: 30935 - DNA, 1049 bp, Homo sapiens
aaaaaacaacttttgctgttgagagagaagttgactttccctctttccatatctcttgtgttgtgatgattcctctcttgtcttgaggccttcaggaagactaaaataatttcctttgtctctaacctacttcctgaggatatttatttggtgccatgcacaggtgctgcttaaagataaacctgacttttttctttcaaaattagtgcttgaaatttgctagcattgccctgtctggcagcaggaacttgccttgcttggcctggtggctacatcccttaccatagatttatttgggttgcttagagctccagagggtcagtggcttgtccttggtcatttgacattggcactagagctcagtcttcccagatacatgacggtgtggcacttgaggaaaaaatggccctgtttgtggtcatttccaggtgagtttcaggatctttcgccatgaacagtaaaggccctcgggtttgtgttctcagcattctctattttctaaaaagatgatccaggggacattcagagatgatcttcagaacttacgctctagagaggaaagactttacataagaaggactccatttcttcggcacttgctgtctgacctcacagacaagtagaccacaggaagactggaagggagccctgaggtgcttacagcacagccgtgtttcccatcagcacccagcccttgcagagagggctgacagacactttggctggaaaaaacagtgttttaaaaaatctctgcagtggcttgatcagtactttccagcagaactttctgtgatgataggaatgttctacagtggcacggtccaacatggcagccacgagcctcatggctgttggagcacttgcactgtggctagtgtaactaaagactgaaattttagttttatttaattttaattaatttaaatttatataggcacaggtggctagtggctgctgtatttgacagcgcagggctggatggactgaggaatgactaggttctgtgtccctattgtagagttgggtttgagctgtcccctacatgtgat

SEQ ID NO: 30936 - DNA, 1010 bp, Homo sapiens
tattcctttgtatatatattttcccatgttttaaaagtatagggtaagtatgtaagtatctatcagtatatttatttatagccatctctgtagttctgtattttgctttggcttaacgtgtatttttcaagttattacttaaattttgtgagtattgttagtgataccatactgttctgattctgtttaaaatgaaggacattttttttccttatctcttatagaatgaactagctgtattacactgtttgcatatttctagaattgacatttccaagggacagtttagaaattctcaattgtatcacaaactctgcagtgattgtattttgcaccttacccagacatggtaagaaatacaggtctggcatggcatgatggctcatggctgtaatcccagcattttgggaggctgaagctagagattgtttgagcccaggagtttgaggctacagtgtgctatgattgtgtcactgcactccagcttgggtaacggagcgagatcctgaaagaaggaaaaaaacaaatacaagtctgccataccttatccataaatttgaaaattcaaatagctctgtaaactgaaagcagttttttggagtttggatgcaaaaccccatctgaactgactgaatcttttatttttcccatttagtgtgaatatttaatgtttgattatagggaatggccccatcgctgctggggtattatataatgtatgatatatttatgtatgtacagaattatcttttggggggataattattttaatttattcatcattttataacttaatattatgaagcacttcatatataccttctttttactaagcaataaaacagactttttctgtgacattaatttataatagaatattcttttgtgtgcaaccatatcatatttttttagaaactttttttttttcttttttgagacagagtttcactcttatcacccaggctggagtgcaatgacgtgaattaaatggaattatatatactttatga

SEQ ID NO: 30937 - DNA, 1050 bp, Homo sapiens
gcataaacaggacgagtgttgcgagttcaagccggccaccagcctccccaggcagtgatgggctggcgctgccacatcagccagctccttccagggctgccttcctgggagcatggcagccacatcccggggagcagcagtcctctgctagcacacatctgcagcgccagcttccatccttggtctcatgttttaatagcaaatctgacaaattctcattgaccctcagtgggggttggctgcccaccacaccttctgcattgcctcatgggtggtatttctcccaaggaaagccttggctagggtgagtgggagggagagcaaggacgctaggtccgagacctgggttgtggcagttgctgcattacttataggctgtgtggcctgggcaaacctttcgtcttccggatcttaggctcctcacctggaacatgggattgatgatacccctggttggtgataccaggtgaagggtctggggagccttagctgtgacgggaagaaagtgcttggcatgtccttggcatgtagttggcgtagtagaaaatgcagtctagctgatttggagggtgtgggtaagctgcttaatctctatgagcctgttttcttgtctgtacctgaagaattgacacttcagatacctggcccagtgccattcaagacatggtagaggtcacaggcatgtaggtcctgaacgatccagaggaagaaggggctctgtagcccaggaactgccttacacagtgccagggcccttggggatgctgagctcctgcttgtgggggagtcaggtgaagctgggcaggacccagcagggttgaggtcatgtctcacggggagtgccgggccacgtgagggaagaccagtggacaggcacattaagttttaaactcacatacttactttaatgtacgttagaaaaaaatcaaataagtagtacatcaaatctgtactttttatggaagtttttgctttctttttggttttatagttttagtatttaaaaaaagtcaatttaaaggaaaatattaagtaagtaataaaccaggc

SEQ ID NO: 30938 - DNA, 1033 bp, Homo sapiens
tctagagcagcatggttggatatagggaaggggcatttcatggagggcaggcatgaacagggttcccccaaatgaaggcaacctgaggtttcaaccccccagctcattttacagcagtgtgtctattacttccttctgcaggggccaggggtattagggaagagtctcctgaccagaaaggacaaaacaaaagaaaggacttggctctggccaggttccagagctccttggatctagtgggaggagtcgaatggcagggccccaccatatccaaggagccctggaacctggccagagctgggtgttaggatgtcccccagacactgtgagtcacagtcccctcctttacctgctgtcatgtcctcctctgaagaccattggtcccagaaaaagaccacttgaataaaatctagtttaagccagggactaaaagtgcaaatcttcaaaaataaagcacaaaagtgtaaaagtagattcagtttatatttaacaaaattaagattactttggtgactgtttgcagattctttgctagaacagaaaatgaatcagtactaaatttctttccagtctctgtgcttcctaagtcagacctctgggggccactctgacctggcatcccttccactctgggagaagacatgcttgcagcttgggagaggacctgggagtatgaaagaggtgtcaaaagagggctctctggggggtggggtagactttgaattgggggtacctgaggttctagagggagaaaaaggtttttgataagagtcagtggctgcaatgttagggctgagggcatggagaagggctgaggcagagaagtcagtagtggtaaggaggcagggatgttcgagtggggtcctgttctgagctttttggccaccctctttgtccttataaaggtggaacttgcctatcaggatgccagttactgatctttagtacttgggcacatggcaggtgcttggcagatacaaatttaattctccttttacttttgtgcacctgtttttccccagcctacttttta

SEQ ID NO: 30939 - DNA, 1027 bp, Homo sapiens
agaaggcagagaaggaaaccaggaaggttttgggaaagccagaggaagccatgctaggccctttgagcagatcagcccacccttggttgtcgccctcaggagggacctcgcagatcaggcccttcctctgcagcaccatggccactgctcaggttcaaactcccgggccctgcagggccgcttctgtggcatgctgctcctccccttgcctcccaggtcttcttcttgagtccagcccagccctgctgacagaaaagccttattgctgtcctgctcatctgtctgtgggtcctcattgtctccaggataaaatctaaagtgcatggcacggaaggcagagcatagctcttcattatcacctctccagcctcagtttcttgtcttaaagcctcataagacctcccactgctctctgtgtatcaggcagtactctggtttcaaaggacagaaacccaacttcaattgccttaagcaggataggaaacagataggctcagggctggagacgtctggatgtcatcaggagtgctggctggctccagaactggctctgccctgtcgtgtgtgggccacacactcaggtggcaccttccctggcataatccccacagctctggctttccattttctccttcaaatccaagatgcagtgctacttgtggttgactcctgaacatcacgctatcgaaggatccgtcctgacagtggaacacccctcccctggcagcggcttgttacctgactctggccaatgatatgtgaagggacatgtcctaggggtttggggaaaagcttttctgctttttggaactcaacaggaaaagacagcttttctccttcactggacattgaagggaggaaggatgtgacgcctggactcaggggctgaacggccaccttactcccaggctggaggtttgcagaggctgggaggcaggagagttgcccagaagcagagcctgcacctgagggctgctgtgtgtctgccccgcctcagaacttcgtgtattgtgagagctctgtctcc

SEQ ID NO: 30940 - DNA, 1070 bp, Homo sapiens
gcactctccggttctcagctgttttgtagttgacagtgtgtgggaagctggggcgttcccctgagttagtggtggtcgtgggatctgagcaggcagttgcagacctgatcctgctttggctctggagcctgaatggatttctgacaggagaagctgaggctgtccagcctgccttgggaacttggctgcttcaccaagtgggagctctgagactctcccacaggtcccgtgctccccacgtgcccttacagttacctgcccaccagggcccagaggaggggctacctggagcaagggtgcctggactgggcctctgtcttcccctgctgtgagcagagttctcacctcctgaccccgacttggtctaaccctgtgacccacatgaaatgccagccactggtggtgggaagtgggtggctggtctcttccaagccaggagtgcatcagctccagcctccttccctgctgccggcctcggttcacagggagccctttgaggggctttttgatgtgcaccatggatgtttggcttgaccaaatttgtttgcttaagcattgctcttgccagttcattcggaccttctctttcttttaaaaatatgctgcttgccaaaggttattttggatctgtttttgtttatcaggtagaattgttccagcgcaattgaaagcagacccacatgttgacacgcactggagctgcttgccaggacacgtgcacatgtgcacacgcgcacatgcagaatatgtggcaggcatctcatcgtgagccctagagtgtacacagcttaggaagggggactggggaagctgcccatttcaccggggacttggtatgtgaagattttcatcatctaggtgccagcactgacagacttcaggtggggaaaatctagggactgttacctcctgggagaggcaacctggtgagtctgagtaccttggggttaggctggctctgccgctggttgcctgtcatccttccctgctctggcctggcttccttctctgtgactgatctcccgacttcacaggctttgtgccaggctgtggctgacggccttcgggaa

SEQ ID NO: 30941 - DNA, 1027 bp, Homo sapiens
aattgatgtctcctgccaacatccaattgggggagtccaggaaaagggcagttgtctgggtaaccatttgtgaaagccaaggacagggcaaaatggagatgcaaggaagggtttatcctcctggcaacagggttgcactcatgtttctggtcgatgcagctttgtgcttcttgcctttccatgccatgtgggagccacgggtggcatgttgcattcagttagtgaccaggctgcatcttcagagcccaggcatccctgtcaccatctaagctagttggtcagccagccaggtctggcaggtaggcctcccactcccagagtctatggatgccacacccaggactcaggcatgaggaggtccactttgggaacctgacttcaccgctgcctggtaacggggctttggcaagtcaggctcttggcatctccatttttaacagggcacttgtaaccaggacatcctcatgagcacagcagagaactgttcccgggctctcatgagatgtgtgagaaggcccctcatgtggacatatatgaatgtagcacatttttgttagtttactttgaaaaggtaatactggcagatggttaaaaaggcaaaagatgccaaggttatgcagtgattagagttaagtctccctgacaaccccctgtcttgggtccctggtctctccctcctaggcagccactgctgctgccattctggtgataacctctgcatgtggaagcttatgtatctccccctgtttcttacaccaggccctacccagtgtgctaccccttgcttttatctcctccactctagatgcaagatggttctacatctgtacatgtggatgtctgtttagcctctgcctaggaatctaccgtaaggacatgctgctctctctctccctctcattgaggcatagagtagttgtttggagagcacgttaaccaactgttggtaagaacagctgtgtgtatcctgtctgctttgaggtttcagtggctcaatgtccttgagagcagtttttagggagttatc

SEQ ID NO: 30942 - DNA, 1059 bp, Homo sapiens
tgtcacagtgatgattctcttttcttcttccctatttcttcttatcattactgtcatggacccaaatgccttcaaccactccccctccagcacccacggagggagagcgaggcccaggctcagctgctgggcagcttccctggggcccctgtctctgcccttggcttgctggtcatacccttgtctagccttgctgatgctctggtgccagcagccacaggccagtgctcctgcaggatgtgagtccaagtgatgttgcccctgcacagctgcactggggtgcaggggatcatcagttgagtgtgacggacgttcctgagcatgctcctctgtgccagggacggagattagtgccacccagccccacccccccccacccccgctgatgctctcagtctggacaggaggcaggagctaaaggcatggctacatagcaagtatcggagataaagtgggggtcaagtggcgggggctgtgggggccaaggtgggcaggcagcatgacctgctctagctggagtaaggctggaaggacgaggaggggcctggcagtcaggaagccagctctgcccaggcacagggctgggaggcaccatcgggcctctaggccatgagttggacttggcccaagcttagggtgctgagggcagtgctgaggagtgctcaggagccagccagatggccacaggcctgtgtgcccatccagcagcctgccctgaggggcgggagctgtgggagccacacataggagggacatggccagtgctgggctttcataaacctggctgaaggacagggtagccttggaactgtggggatctttctgtccaccttggatccattcctttaagacccagacccacctgggctctttgctcaggcccagggcccacaggtgaggtactgttcactgctccatggcggtgatggcttttctggctcagccctgaaaacagagctggatcccttggcttacctcccaaggattccttaccccctaaaaagcccagggatgtcattaaaaacaaagtcccagttgtatagaaaacagaagaatcca

SEQ ID NO: 30943 - DNA, 1022 bp, Homo sapiens
acacggggtgacttggcctgcctggcagcatggcctctggctgggaagccagtatgggttctgggaagagcctggatgtggagtgaagatctggtctgagcagggtcaagattggagtctgagttcccactgcaccatttaccatctgagggggccttgggcccgcaccttggtttctctgtggaggcgggaataagattgagcctacaggcagtttggagaagagcaggtgagggagaccgctgggggcctggcatactgtcctggcacgtggtaaggtttccagggatgtgagttgtcaccctcctttgcccagcacagacccccaggctcagcaccacctgctgagtttgtgctggggcctctccgtgggctgggtcagagggtgtgtgtttgctgctggagagcccttggattttgtcagtgaactcatccttcaatcacttgtgcatttattcagcctacactgcatcatgttcttctgtgttgcaagcattgtgcttggtgctggggatatggagcttacagttgtaggaaggtacaaacaataaacatactaaagaaatccctgtcagatgggagtaggcaccacgtagaaagataaagcagggacgagatggaattgctgagcatgctgctttggatagggtgatcagggaaggacagagggagggaaggagccacatgggtagtcagggagagcatgccacagcgagggggaagtgaatgttaaggtcctgaggtgacagtgagcttcaagtgcatttgcaggtcagttgtttggcaaaagtgtgctgagcagagaggtgtgcaggacataggccagggttcatactgtgcgctggggaccgtgggaaggactaaagcctgtgttcgtatgaatgggtcatgagccactatcttttttttagagaaagggtcttaccctgtctgtggaatagaatgtggtgatgcaatcaaggctcactaaagccttgacctcccaggctcaaaccatcctcctgcttcagcctcctgaatag

SEQ ID NO: 30944 - DNA, 1031 bp, Homo sapiens
gcacccagccatgggaggcctccagcggtgaagctctaaaattctgtcctgtcctccccacttctccatagtggctctgagtcctcacctcagccaaacaggagtctttgtgcatcgcttcagtttggctgtgggttgtcctcagagactggagcccacagggcccctctctggactccagggagcatgcagggggcatgagccagacaggccagcgtccagacctcagtccccaagggcctcgtgcctatgcctgcctgggctattgtgagctttctgggagggaaggatcccgggattcttccagctgggtcgggggccatactgaggagcactgatccttcccctaaacagctctggggccctgctggaccaggcagagggaagagcttatggtcttctcctttgggaactgctaggatcacgctgacctcccctgagctcccttcctgtagcccaaggcaaactcagagctggggtattcccagggcaggcaagaaccaagaggagtcttggttgggctgctggggtgggagtgaagggagcctctcggggtgctggggcgggagtggagggagcctctcagggtgctggggtaggagtggagggagcctctcggggtgctggggtgggagtggagggaggaggggtatagggacactgcctcagtccactagagttcacattccttcgtctggtcaatgttgactttttagtctgcctgcttcctgtttgtggcttttaagctttttattaaatatcactggtcagattcctccatcccacccaccaccttccatccctcccacccccactccctgctgattcctcccttttaacctttttgaagtgccttaattgtgaaagaatcttcaggaagcctgagccatccagtgccaggtgaagggagagagagtgcattgctagctgcagcctggacatgcagggtggggaagcctgggttttggtgccatgagaggtaaggctcccagcctgcagctcgtggacagggctgggttcagatgcacttc

SEQ ID NO: 30945 - DNA, 1046 bp, Homo sapiens
ggagtggtggggactatggtgacctggagagctgctgtgtgggtcctgccaactcttcactatatgggaacgtaggcctggggtctcattttatctaattttatttttatgtaatatctcctgattaaaaactacaactgtctgtgctaaacaaagcatgcctttggcctggtttgagccctagcaactcgtaactcctgtttgaattttagaaaggacacttggccctcaggttcacgaggtgaagctgaaccgtaatatgcaaacagtatgttttaaggagccacagacacttgcctcagagacaagggtcctgatgctagggctgttgactcccagaatgtgctgtgggaaatcagagggctgggggacggccccatccttcctgatatccaaggagccttcccagagagtcttgggggatctcaaggttggaaagccccgtatttacaaaacatctcccttcaaagaccttgccatttgcagaattgtacttcatgggaggataggaggcctgacaagctgccagtaggaacctactggggaattctgctggtggtgagagagtagttggaggaaggagctggacatggaggaggttcctgtccaagtcatagcatcacttgtaattcccaagggttgtagggtggagtgagtcttgttatctccatctcacaggtgggagccgggtagcagagagcctgagggctttgcccacggtctgtctgtgtcacctcacccctctccatcagctctgttgatgcccctagagagcagtcatgtcttcaaagaatctggagctgggaggcccatgtggtgcttggagaagcactgcacctgggaggctgcgctcccaaagctcatcttggcaagccgtctgtcccaccgctgccaccctcccctctgcctcagtgtgccaggcatcagcactcactcacagaggcaggctggatggcgggtgggacaacagcttccgcagcccctcctgttcccactttgcagggagaaaagaacaccttgatgactcccaactggagaagaatcat

SEQ ID NO: 30946 - DNA, 1049 bp, Homo sapiens
gaggaggaggaggaggagcaggagctggggtcctgattttcaaggtcagagacaggagggctctggcctcacacagtcactctgactttagctagctcttctttaccaagcactgactcttgtgtgtggaaagtatttttctggtatcagacatagtgttgggttctgggcacatggctcaaacaagacacagtccctgcaccccgggagttcacagctaatcacccctctgttcaacagtgtgcttttgagcccctgttatgtgtcatccttgtgttgggttctagaaagaccacagtgagccacagcccacatgacccctgagctcatggggctgttgggttggtgtactagtcaactcgggctatcataacagaataccacagacgcggtggcttaaacaataggcattcatttcctgtcagttctggagcctggaagtccaagatcaaggtgtctgcagggtgggtttctcctgcagcctctctcttggcttgcagacggctgccttctccctgtgtcctcacatggctgtccctctgtgcgtgtctgtgtcccaacctctattttgaaggacattagtcagtttggtttagaactcaacctaaagacctcatttcatcttaattacacctttaaaggccctgcctccaaatacagtcccattctaaagtctgggggttaggattccagtatatgaatttgaagggacacagttcagcctgtaacagttaggatgctggcactggcagactttctcctgagcatttgtgtattggcagccacatgcatgctgtgcacagaaggtgcacaatgccatgagatcttacagtaggaccccaaccgagtctgggcttgggaaggcttccttcggaagtggcattgcactggggtctgaggacaaattggagtctcagtgcccctggaggtgagggtgccacagtggtgctgctcaggctattcctgctggccctgagtatcacctccgcatcgaaccagccacctgctgtgtggactcctgtgcctgtaagcaagagccacatcctgtt

SEQ ID NO: 30947 - DNA, 1079 bp, Homo sapiens
gggaagggctcatggtcgggagtgagagttgaaggcccacctccttcactggccattagacctggaccagccccgctgcctccctgagctgcactcccctctgcagcatgcaagggcagtgctgatgtctatcattagctctggagggtgcagttggaaaccatgagtatgaagtgcccacccagggtccagcacctgaagatgcaccatcggtgcccagtgctgtcatcgactgtgtggctcttttggacgtgacaccacaccagacccccaggtcatactgctgctttccttggggcttcctcagaggctgctgttcatgttttcccctcgcctccaagggctgtgcttgtagacttgtgtaagcggaccgtgcttacctcaccatctcctactggtcaggtacctacaatttttcccactgtttttcgttattatggccaacattcagagtcatcctggagcttttctcaccatcaacctttgagtgtgggccattcagtcaggacacacttactcactctcagatttctttagtttgcctcagtgggtgagtgggggagacctagggggctttctactggggaccccattccagttcctggcactaattgtggctcaataaaggcacactgaataaaagaatgccagaaatttcactgagacgtgattttcctccatgtttatgattcagtgatcaaagttagaaattgttaaaaaaaatgaaaaacaataatatatttctcactgtatgccatatacttttctaagcatattatatataataatataatttactcttcacaacaaacctgaaggaattataattattgaaattgccattttgcaaatgaggaaacagaagcacagagaggtaaaggaaagtgctccaagtcacacagctcttgagccccagagctgagacttgagcccaggccatctggcactggagctcatgctcttagccctgtgttctctgcctctgactgttctcatttttgtccatctgttccacctggccctgagctaagggcccaacatgaattccagaagttcccattttggtttggcccagcctt

SEQ ID NO: 30948 - DNA, 1025 bp, Homo sapiens
cctcaaatcagaaatgcttccttcagactcctgggccttgaggcaagtgtcatgggaaattggatgccaaccaagcccagggcagacacgctgtgccaggattcagcagagcagggagcgtgcagggagaggcaaccctatgccctcgtctcagagcaggctgtgtgcgcccagcggacacggcaccagcaggagctgtgtgggctcggctccatgcaggtgcgcctacgtctatgtgtgtccatgtatgtgtgtgcgtgctcacgcttttgtgtgtgtggtgtgtttttgacaggggggaggtgagtgagaggccagcttcctgacagggcagttgtaaaacattcataaaacttttattggacttgccacccttccagataaatatttttcgattttatgggcttgttttaggaccccaagcttaatcatggctttgtggctgccttaaagaaattaaatattgttttggcaaaaggagccctcttcccctacccctgccaaaggcagcctgaactctgagctcataaattcctgccactctcaactcttgccctttttccctccgtagtctcagagccatactaggatgagcccgaaaaaaaaagagggagagagagaagaaaaagcaacccctactcttctccctccaggttccccaactcccctgaccctggcgggaaattcaacccagctcatttgtccacacaagggagcgggcagaggagtctgtgctgggcagtcacctgctgcctccctgagatggcaggctgccttggctggaggcgcccccattcccccagcccctccctgcctcctggaagacctgagtggatccctgcccccagttcctcagatctcattgcctctgaggccccacttcccacactgcctcctcgggcccctctgaataccctttccaaaagaacacccccaaacccagcaccatcccgctgtctctttgctgtactgccttcctagcatctagcactatcggaaactttctcctgtattcatctattggt

SEQ ID NO: 30949 - DNA, 1047 bp, Homo sapiens
tggctgactctacagatggcctctttatccagcacccttgtcactttttttttttttttttaagactgagtctcgctctgttgcccaggctggagtgcagtagcgcaatctcggctcactgcaagctccacctccctggttcatgccattctcctacttcagcctctcgagtagctgggactataggtgcccgccaccacgcccggctaattttttgtatttttaatggagacggggtttcaccgtgttagccaggatgatcttgatctcctgacctcatgatccacccacctcggcctcccaaagtgctaggattccaggcatgagcccttgtcacctttttaaacatctagagctgcagggccagtgcacgatgctctcacagccttgagaaccattgtcagaagccctctgaaaggggtatcccccacccatcactctgagtggagagcagaagctggctttgccattgggtaagggctgtagctcaaatcctggctcttctgaactcactgtggggcttccagtaagtcactggcctcttagaccttcattttctcatccgtataaagaaggggtggccaacatcttcaggaaactgagccagaaataacccacacagccccgccagccagcgctcccagtctgagacgacaggccagggccctccggactgaagcttgatgtgcgagccttatagctgccttgacttttcagggacgaagctagtactgggcaggactgggaaaagggaggaaaattcttcaggtgccagcaggtgcagtggcacaggtgccaacggcacataggaagctgggccctctgcctgtgcctctgcccagcttcctccctgctctggtcctctaggttcccagcctgtacaggccctttgtgcacatggggaggggatcctggtgggacacctccttggcaggcagggtatgggctgccttcacccccacctgccctcagtgccttcatacccagctgcccctagcagcagtctcaggagccaccacccactggggctccctgtcccatgccact

SEQ ID NO: 30950 - DNA, 1100 bp, Homo sapiens
gccctggacgggagcaatgggctgaactggctcctgccgactggagctgccatcctccttagggagacagacagtgtgcaggcaccaaatacactcgtaaagtgacttcagatcatgatccttagccaaagtgggcacggagggcttccggaggggctaagccttgagtgacaagaaggggacagccaggccaagaactgtggaaagaggattccaggcggagggaacagcaagagcagaggcacagaatgctcacgctcacgggagggaggcctggggcaggggcaggagcagtggggtggagactgggcatgaaggcagtccatgccagtcctgaggagcagtgccactcagcccctgccagtggctgccttgtgggattggggacacggtgtggccagaggttccgattttgcaaggaaagctggaggtctggaattttgcataaagcatcctgatttttttgttttgttgtgttttagaaatgaagtctcaatctgttgcccaggctggagtacagtggtgcaatcttagctcagtgcagcctcaaactcctgggcccaagtgatcctcctgcctcagcctcccaaatagctgagattacagacatgtaccatcatgccagtcttatatttatttcttgtagaggtgggggtgggggacgtctcattatgttgcccaggtttcaaactcctggcttcaagcaatcctcctgcctcagcctctcaaagtgctgggattgcaggcgtaagccaccatgcctggcctcctgatttttaaatggccacagtttattcaattttttctgaaactgttcgagccacacaaaacctttctgagagccaaaaacagtgtgtgggccactagtttgagaccttactgggaagtgaggtcctggattcaaatccggcctcccacactttctagccatgagacccaggcaagtgacttactctctgtgcctcagcactgtcatctgtagaatggggaggagggtgtctaccttacagagggcctaccttacagggtgctgtggaggcgtaaaggatttaatttactcatttatccagcacatatttactgagcatctactgtgttcc

SEQ ID NO: 30951 - DNA, 1027 bp, Homo sapiens
ggctgaggcctcctcctgcctaggcgtctggcgtccgtttgtctgtccgaggcctcagcgcaggtaaagcgcggggctggggggcgcagagctccattgggctgggaaccagcgcgtctcgtgcccttgggggacccgcctgcccgagccgcctgctaagcctcccgctcccctccacgctggagcgcgcggagcccggtctgctcggaactccactctgcgggagcggaggccggcgccagcccgggaagccgcgcagggggcgggaggccgagcgcgaggcccttggcgccgggcctccgcggccaggccgggcaggtgagcagtctccgtgcctcccggttggcgttcccctcaacgcgtgcggtcccgccggggcccactgtctctccgtccgtctgtctctcaacttttcccatcctttagcttacgattcttcatcaactcgtaaaatgagatcgccgcggagctcgagcctatttggcgtctccggagactagcaagaccctctgaaagacaccgcgtccccagggataatcccccgtgtccggcaaagctgccccgctcgagcgcgaaccctgggacccagcgcgggaggcagaccagcagctggccgctgggctgtgaacgccaggaccgagcggaagcttcccgcccggccgcgatcggtgccgcggctctcagggaagtggctacgcgcgtccctcgggaaagcaggtaattcgcctttttctcccaccggcgcggtaaaaattaccctccccctccccgttccgtgtgtattcccagtttcagcgcagcgagctcggcgtctaacccctccgcggcagggtcccggccactgcggtagtggaggtggccagcctggctgagtcccctgcccaaacgtcagccctgtgctgccgcctgcctgacgcagagcggagcgagggaggggatttaattaccccgctcggcagctcagaaaatcgccgcacagaggggcttagcaggacggttaaggagtgcttgagcaggggcctcggga

SEQ ID NO: 30952 - DNA, 2745 bp, Homo sapiens
tcgttaggcacaatttgtctgcaatttgtcagcccggctgggaaacgctccccagacgcctcggctgccgcacgggccctacctggttctcgaatcctgcctgctcataaacgaatcctagcacggggtgcctgcgtagacctggagctcaccaccagatgttcccgacctcgggagaggaggctttttccaaaacaacgaatttccttccttgttttccggtaaaggagcgttcgccacacacggggtccctgaacgcggggcctttcccctcgtggttggagcaacgcggagttcaagcctggccgccacagaataattttaaatgccccgttttcagacagatccagaacgccgtctacgcctaccggcggcagatcttcaagcccgcggcggccccattcttattgaaatcccactaaacggattccgactccggcttggggcggggggagacttccagacccggcgctctcccccacacgcaccccagtcacacaggataaagggctgcggggcgcagcgcgcgggggcgcaagcaggagcgagctgggttaagccgcgaaaagccggcgcacgggaccagccggcaggtgcagccgccgctcggcggcccggctcggacgcatccgccgcggtggcctggggattgggggcggccgagacaaaggccccagttcgggggccgggaggcgggggtgctttgcgaggctctgggaatgccagggtctcgtggcctgtggctccgagaaatgggaagacaagaggcccgaggcgggcctgctgtgcccaggtaaccaaatactccctctggttaaagtccctataaccagggtttccggtctctggcagggccaaggcgagccccaaaggtaggggccacagggcaaacggaccaagcgattcgggtgccaggcgggccgggccgggggcgggaagggccgggcccagggaaggtggaagtggaagaaactcaccgagcgaggcgcggtgggcggcgcccccgggcggacggggcctggagtagagctgggagcagggcgaggtgcgcggcaggcgggctcgcgggacctgggcgcggggtggcggcgctcaccagcagagcctgggcggcacgccgagcggccgcatggtgttcagcggaccgcttttgtccgcctggtgggcgacggggccctgctaggatggatgtggcggcaggcaatagacagacttgagcagcgagtcccggggcgacgctggcctcgctaccttcctggcgctcacgctgcctctctctcccccaccggccgcaacgcggctttttatttcgacatcactttgcgggggggcagggggtggcgacgggggcgggagcgccgcagggggcaggagggtacccggggctctgcacccggcctaccaggtccagccgcctggccggccaagggccgctaggcactcagggcgcgcacaccctgtgcatccacactccaggccgctcccaccctctccggagcgcacacgcgcgcccctgacctcagggatgcttgctcagaaagcttgggacacgtctttactgagactctccccggggaccctcaggagctgtgagcacacgcactcactgataatggtacacagacgcccgctcctctgtcttcaacccacttccaggagtgctcacacggacacgcacacatccctgcacatgtgcacacagctgtggccgcgaggacatcctcagacagacggcctgggtcacaccgacacacatggccatacaatcagatgcaactcggcactcgggctcacactcaggacgccctcactgccaggcttgtttagctaagtgcaggcgcagcccctctccctgtcccaccccccctccagttcctaacgctgggggaccccctgagcactttagaagtccactgtctggtgtccccctggcccatctccttggggcagactctcacaatgggggaagcaaggaagtgtgcagagggcttgttcacagaagtgggagtcaggagggggggagaaagtgagtgtgggagtcctcatccccagaaggcccctgggtttgtgggcaaagacagtccagtccttgtgctgccaaagttcttactaagggattcaaccagtcagcgtccccccacccccacccctgattcccattccagcagatcagggagagtgaaagtggcctggggaccttgagcccagagggaaagtgcttgggcttggaaggactgggaaatctgtgctcccgtgcccaggtgtgccccagaggagtgtttctgtcccctggtctttgtgacccctgctgtccataggtctttctccaaatctggtggtgactattgcattgtgtgtgtgttctatgcatgtggctcagagtctatgtcctgtgtgcccaggtgtgtctgtgtgcacttaggagcacacaggagtgtctgcaaaactgggtgtatgagtatgttcatttcttcttgtgggttcctgagagtttgtgtattgggcagtaggtcacagtgtggctatttcatgaccctggaatttggcacaagagagtgtgtctgtggaaatggttgtgcgtccctttggctctgtgtctgtggggtcatcatgtcagagactcatgtaatgaggggtggggatttccaggtgtttgcccatgtgtctgtagcagtgtgtggcatgtctatgaatgggtgtgttttggagtgtgtgtttgcgtgtgtatgtgcatgtatctaggca

SEQ ID NO: 30953 - DNA, 1050 bp, Homo sapiens
aaaaaaattttgacctcaagtgatctgcccatttcagcctcccaaagtgctgggattacaggcatgaaccaccgcacccagcctccatcaaaaatgtattaggcatttccctgtctttatttttaaatatatatatattgtagtctgggcatggtggttcacacctgtaatcctagcactttgggaggctgaagagggaggcttgcttgagcccaggagttcaagaccagcctgggcaacatagcaagagctcttctctactaaaaataaaaattaaaaaaaattagccaggctatgtggtacatgcctgtagtcctagctactcaggaggctgaggcaggaggattgcttgagcccaagagttcaagattgcagtgagctatgagtacaccactgcactccagtctgggcaacagagccaaacactgtctcaaaaaaaaattacatatatatatatatatatatatatatatatagagagagagagagagagagagagagagagatgtgtgtgtatatacatatatatacttcaggcacacaaaaaattagatcgaataatataaaaaacacctatatacccaacacctagcttatatattaagtattaaaatgtcaccaatacagttgaagcaggaatacagttgaaattgaaaatgtagttaaaatacaattatagttgtagttgaaatgtactacatgctagatagaatgtacaactttcttatgactttggggtgggaggtgattttctgagcattgcacagaaagcagaagctgtaaaaagtgaatgcttccttggattccttggactatataaaaatttcaacttctgcctggtgaagatactgtaaacaagtttaaaagataaacaaatagatcgagagaatatttgcaatgtatacagtgaatcaatatctacaatatgcaaagtgttcccaaaaaaaataagaaaaagaaaaaaaaaccagtagcaaaataggcaattcacacaggaagaaatatagtggtcaattaagttatgaaaagtatgcccttattcataatcaa

SEQ ID NO: 30954 - DNA, 1072 bp, Homo sapiens
agaggctttcctgtccctgggagacgcggtgatgtgacgcagcggttgcagcgaaggtttcttgtaaaagatggccgctgcggagttgctaggtgtctcctggcaggcggcggccgcaccacaagatggcggcccgccccagggtcccacacgcggggctgcggaggcggcggccccgagggtccccgccccttgctggccctgtccccgcgtgcggggctgcgacctgcctttgtgtgcgggtggaagtgcgggccgccttggggccgagttgcaacttcgcgacactccactggagtgcgatgagacgatgagatgttacctcctaacacttcgggaggtgggcagcatggcaattcctagtaacctcaacgcgattcactcagacttcctttttcccatcctgagccgcaaaaccaggaactggtgaaataaatcaggccatctttcagaggaatggcctgccaccgttaaaaagagcaaagctgcagtttatgtactaatgtggaaccagctctgagataaattaagtgaaagaaagcaaagcacaggaaaatgtgtatagatatgcctttgtgtttttaaacaagaagacccacataaatgaagatatgaatgtgtaagcatagtatagcggtaatggtaatagcgatcgcccagcctaaggaagggaatggagagatacggaacaaggatgggaggagacagttttcatctaagaccgttgggttttctgagctttgtaccatggacaggtgttaattttaaattttttgtaaatatttaaattatggcttaaagacaagttcttttgtaagggtataagggcagactagcacatagaaaaaaaaagacttttttaacctggaaccaagacatttgataaacattcatgaaactcaattttcaaggataaaaatttcaaggtcaatactgtagtacttacagcaaagaatgccaatcattgtgacagcctgagccctcttgaaagctagtttttgttggcggggggtcagaaaatttggcctgggaagcaggaggcactcgacctatttgctgatgctgaatgcct

SEQ ID NO: 30955 - DNA, 1031 bp, Homo sapiens
ctaggcatgttacggtaaatcctgagagaagtttttcaacttaatcgaggaaagatggtagttggatgtagagttgtgtttccattccgaccgtgtttggggcctctttctgcattcattttaggcttgatacctaatggggtcataaggggaatattgagaatattgacagcaaatatttgagcgtttattgtatgctaggcagcgtggcaagaccttttaacagatcattatgtttagttctttgaacaaccctctgaagtaccactgttgtgcccacttaacacagtgggaagttgaacagagaggctaagccatttggccaaggtcacacagctaataagttacgaagcagagatgcaagcccaggcagtcagactccagagcactgtattaaatttctaggttgtactgctttcacgtacccctgaagcttgctggtttatcttttgctacctggtatctgtacctcagtgcctcccaccacctcctttctttctattgatgtcatttgaaagtctttctggtagcatcagttctcccttaaagccataagaaatgccgtttgcgacttatcacacatattgtggtgtagtgtcaccgaattaggagctcttgaataccggcagggtacttaactgaggtttgaaaaattttgcaggtaggcctggcaaacctgcctagtgaacctttcttacaaccttagttgatggctgtccagccggctggttcttccctattcaaaatactgcatctttggtttcctaaagaacggactcttgtctctttcttgtgacttaagcagctgatgaagcacatgatttctcatccatggatgaataaagtctcctcttagtgtgtttctctcttcaaacttgggaaggtttgttcagatttgagtttaaggactggaaggtgagttaggagtacttcttctgaagaagggaccggctaagttaaagcttagcgttcacaatcctgttgtattcatatttgtcttttttttttttaactttgctacctagcctaaa

SEQ ID NO: 30956 - DNA, 1052 bp, Homo sapiens
tcctatgataaagtatttatctccccattcatttaattcaacaaatacagctgagatagatttgaccagatgttggacttggagctgtaggcaggcttttcctggggaggtaaggattagaagtcctcctgaataaggctaaacagaggttccccttggcattaaatgtcttcttctgaaggcgactgaaactcgagaaatgaactccccgcctccccccttattttttggctattggcttgctgttgatgattcttacctctcatgtaaggaaggctaccattgtattctcaggcatccattcctttgtgttaccacatgcttatctgttaatattatctaatagttctctatgcttctctgtctgcagtttgctgcagaaacatttttgcaatatgctgatcttttcagttatttgctcttaaatcttctattctgtttttccccacactccatatggcattaaagacagaaaaatagtttgtgttttaaaactttttttttttttttagacggaatcttgctttgtagcccaggctggagtgcagtggtgccatctcagctcactgcaagctccaccttccagattcatgccattctcctgcctcagcctcccgagtagctgggactacaggcacccaccaccacgcccggctaatttttgtatttttagtagagacggggtttcaccgtgttagccagattggtcttgatctcctgacctcgtgatccacccgcctcggcctcccaaagtgctggaattacaggcgtgagccaccatgcccagcctaaaacttatttttaaaacatttcttaatggtggtggtcactgcgatttgtgaatcagaggtaaaagtgatgtggcgagtgaaatcaaaacaagttttttagcagtgtctgttaccagtttcaattttagtatcccaggctgtgattacaaaaacatatttaagaatagctacttgcaaaatatctccttgtgggaggaagaaagcttgggagttggttccaatgctgacctacagcattggccttgttcatttgcttgaaga

SEQ ID NO: 30957 - DNA, 1071 bp, Homo sapiens
actttcactttctgcttttgtatatttatagtcttttgtgaattggcttttgttctctaaagcccatgtgaggttcttgtacctcacctctctcccagtttataaactttatatggcaagaattttgatccttttcgtgttgcaaacattattcctggcttgtatctcttggtcttgtttggctgatggcatgtttttgtaacatagagacttttctgtagtcacatctgtcaattcattttctgtgtttcatattatgcttaggcctttcccacccccaggacaataaaaacaatgttttcttctagtaattctagcacttagccaggtataatatgtcggaatcttttcccaaatgtatagttttcccagtattttattgtattatcttttctctttgactagaaattttttttatcacacagtatatttcctacttccatgtctttttttatttttattttaaatagatttatttacgaaatagagatggtgtctcactatgttgcctaggctggtctcgaactcctgcactcaagcaatcctcccacctccacttcccaaagtgctgggattacaggcatgagccaccatgcctggctgtgtcttttgttttttaactcttctgtttcattctttgtctgtgggacagtactgctgtcttatttgcgtctgttttgttttatacgtatatacacagatacatacacgcatacatatacatacacacaaacattttttttttccttggagacagggcattgctctgtcacccaggctggagtatagtagtgcgatcatgactcatcgactcattgcagccttggcctcccaggctcaggcgatcctcccacctcagccttctgagtagctagtatgtccggaattggtgggttcttggtctcactgacttcaagaatgaagccgcagaccctagcggtgagtgttacagttcttaaagatagcgtgtccagagtttcttccttctgatgttcggacatgttcagagtttattccttctggtgggttcgtggtctcgctggcttcaggagtgaagctgcagacctccac

SEQ ID NO: 30958 - DNA, 2055 bp, Homo sapiens
agggacccggtgggaggtaattgaatcatgggggcaggtctttcctgtgctgttctcatgatagtggataaatctcatgagatctgatggctattgagagtttccctgcacaagcgctcctctctttgcctgccgccatccatgtgagatgtgacttgctcctccttgccttctgccgtgattgtgaggcttccccagccacgtggaactataaatccagttaaacctcttggttttgtaaattgcccagtcatgggtatgtctttatcagcagcatgaaaaaggactaatatggtaaatgggtaccagtagagtggggtgctgctgaaaagataaccaataatgtggaagccactttggaactgggtaacaggcagagatttgaagggtttggagggttcagaagaggacaggaaaatgtgggaaagtttggaacttcctagagacttgttgaatggctctgaccaaaagcctgatagcaatatggacaataaggcccaggctgaggtggtctcagatggagatgaagaacttgttgggaactagagcaaaggtggctcttgttatgttttagcaaaaagactggtggcattttgcccctgacctagaaatttgtagaacttttaacttgagagagatgatttagggtatctggaggaagaaatttctttttctttttttgagacagagtctcactgttgttgcccaggctggagtgccatgatgcgatgtcagctcactgcagcctctgcctcccgggttcaagtgattgtcctgcttcagcctcctgagtagctgggattacaggtgcccgccaccacgcccagctaatttttgtatttttagtagagacgggttttcaccatgttggccaggctggtctcgaactcctgacttcaggtgattcacctgcctcagcctcccaaagtgctggggttacaggtgtgagccaccgagcctggccagccaaagaaatttctaagcagcaaagcattcaagaggtgatttgggtactattaaaggcattcagttttataagggaagcagagcataaaagttaggaaaatttgcagcctgacattgaaatagaaagtaaaaacttattttctgaggagaaattcaagcccttacagaaattacaagtagctgaatgttaactcccaagacaatggggaaaatgtctccagggcatgtcagaggtcctcatggcagcccttcccatcacaggcctggaggcctaggagaagatggtttcatgggccgggcctagggtccccgtggtttgtgcaaactggggacttggtgccctgcgtctcagcagctccagccgtggctgaaaggagccaatgtagagctcaggctgtggcttcagaggatgcaagccccaagctgtggcagcttccacgtggtgctgagtctgcgagtgcacagaagtcaagaattgaggtttgggaacctctgcctagatttcagaggatgcattgaaatgcctggatgtccaggcagaagtttactgcaggggcaggactctcatggagaacctctgctagggcattgtggaagggaaatgttgggatggagcccccacacagagctctccacagggagactgcctagtggagctgtgagaagagggccaccatccttcagaccccagaatagtagatgcaccaacagcttgcaccatccacttggaaaagctacagatactcaacaccagcctgtgaaagcagccaggagggaggctgtaccctgcaaagcctcaggggtggagctgcccaagaccatgggaacccacctcttgcttcagtgtgacgtggatgtgagacatggagtcaaaggagatcattttggagatttaagatttaaatgccctgctggattttggacttggatggggcctgtagcctctttgttttgaccaatttctaccattcagaacagctgtatttacccaatgcctttacctccattgtagcttagaagtaactaacttgcttttggttttacaggcttataagcagaagggacttgccttgtctcagatgagacatt

SEQ ID NO: 30959 - DNA, 1033 bp, Homo sapiens
gtgtgagccaccaccccagtgtttgtttttttgttttttttttttttttgagacagagtctggctctgtcgcccaggctggagtgcagtggcgctatctcggctcactgcaagctccgccttccaggttcacgccattctccagcgtcagactcccgagtaggtgggactacaggcgcccgccactacgcccagctaatttttttttgtatttttagtagagacggggtttcatcgtgttagccaggatggtctcggtctcctgacctcgtgatccgcccgcctcggcctcccaaagtgctgggaattacaggcgtgagccactggcccagcctcctgcgtttggttttttaattctgcttgtttgtagtgacattcatcaagaatgaatgactttaaaacaacaacgaaaaatctttagggatttttactcttgggcaagcatgcttctgtctctgagcattagttttctcatatatcagataaaagggtttggagtatatcaatgatattctggttgtggacagaactcttgagggttccttgaacatgatcctttggtagcattggattgctctcggccatcccacgaatagctgtgttttatctgttttttgcttaagatttaacatatgagttcatttgaaatgtttctgttgccacaaagaaacaaaatccctggctcagagttttaaggggacttactgttctaatgctactcactcaggctttggttgagtagtaaacagactacagcttgtttttaagttcagtgatcttcaacttacagcccctgtgttttacaaatgagttaaattaagatcagtatcttctgttcaaattctttttccaaagaaatccaaatgtgccataagctgataggtctctggccatgaaatatggtttcatagttacattgagattgttgagtagctacagggaaactgagaatttacattctgaggcaaatggtttaacctaagaggaataagattaagtaaactgtgtattagctcctcataatgtggcaggaa

SEQ ID NO: 30960 - DNA, 1054 bp, Homo sapiens
agggcatttttgccctatgtaaaaattggtattggccaattaggacttcacaaaggtctccatatcttcctcaaatgacaagggtcttatgctaaatgtgactctctactgccctgtttgttaacatatgatgcagtacaccaatgcagatcacactgcagttttaggtagtatatagctgaatgcataatttgtattagaaatacaacaaggacattagactcatgtctgcattgacatggatacagcaaaaatcttgaagttagtgtgagagattacagtagtgagatttggaagatggaataatacttgttgattaagtgcatatttttcatttaagttagaaaagccctcataacaaagccacccatatttcatgtgtcaaatggaatgctaggagctttctgtgcattatctcatttgtggaggattctcatttttcacatggaagcagaggggcatttaagttcacacagctgccacttggggtagcttatccctgtaatcccagcactttgggaggccaaggtgggaaagaatgtgtgaacccaggagtttgagaccagcctgggcaatgtagagagacctcatctctaccaaaaaatttttcaaaaaagaaaagctgggcatggtggcgtgtgcctgtagtcccatctgttcaagaggccaagggtgggaggatctcttgagccccggcggtcgaggctgcagtgatcatgctctactgcactccagtctgggaaggagggagagaccttgtctgaaaaaacaaaaaacagttcacacagctgaatgtatctgaggtgagattgaaacccatggttgtggccgggcacggtggcttactgtaatcccagcactttgggaggccgaggcgctgaattacctgaggccaggagttcgagaccaacctgggcaacatggtgaaaccctgtctctaccaaaaatacaaaaatcagttgggtgcggtggcacgtgcctgtaatcccagctcctcaggtggctgagacaggagaatcccttgaacttgggaggcagaagttgcagtgagcca

SEQ ID NO: 30961 - DNA, 1072 bp, Homo sapiens
cacatgccagaaccgttctccctcatggtccatccaggctgatgcccgcatgggtggagatgcttgctgtcttcctccctgtgcccttttcccagcctcacaagcagcgtgtgaggtcacctttgatggtgccacataagctccatgggctggctctaagggacagcactgtgttcatggcacaaaggcctgctgtgaccagtagtaacagcaaaagtgactgtaccttctgatacttagccaccccttcttgtgacacacatcagcatgcctctgttgtccatagtaggctctagtaggatgcagggctgtcagcagaatttattgaaacctggaaatggcggggtggggggtgggggaagtgcccaggcattctttatgtcttgtataatctctctagattttgtttactctcttcaactatttattaccaaaggatcacaggtcaccaagcatgaggaagtactgtctatacgttttaagtaagagtccaggtaacacttattgttgttgctgcttcagagaattctccttggccagaattgtcagcccaccttttcttgcttagtggtatatatgaggtgtcataatgggcaagaggttcaaagtcttcatttgagtaagagagtgtcttgtgctaagcatctgcagccctcaggggaacctaaaagaaggcactctcacagaggcagtgacccaaaaatgtatatctaaacaaagacagattggcattctccatcatctcttacttggcctctgggcatgtccactgtccctgcacaattgtttaccaagcccttgcaccacaggcactactgggattaggaatttggggatgaaggagagaataccttcaaggagaatttatcccccgcccccccgccccccacaaacacacacctcccacctgctctatcctcctcctgccctacccccacttagatgagaggcagagacccaggtagtcatgattcaagtatgcttttcaaaaaggtgtctgggccccaggtgctcttgcgtttgagggagtagtatccaggaagacaggctctcaacactgcctagacctcac

SEQ ID NO: 30962 - DNA, 1117 bp, Homo sapiens
gcatacctatagtcccagccactcaggaggctgaggcaggaggtcacttgagccacaggagttctgggttttagggcattataccaattgggtgtctgcattaacttcggcatcagtagagtgacccctcagaagcaggtgaccaccaggttgcccagggagggtgaaccggcccaggttgcgaatagagcagatgaaacatctctcctatgctgatcagtagtgggattgcacctgtaaaaagccactgcactccaacctggacaacacagtgaaacccgtctcttgaaaataaaaaattaaaagaattttttaggctgggcacagtggcttatgcctgcaatcccagcactttgggaggctgagccaggcagatcagttgaattcaggagtttgagaccagcctggccaaaatggtgaaaccccatctctactaaaaatacaaaaaggcgtggtggctcgcacctgcagtcctagctattcgggaggctgagacagagttgcctgaaccctggagggggaagttgcagtgaacagagatcgcgccactgtactccaacctgggcgacagagcaagactgtctcaaaaaaaaaaaaaaaaaaaattctttaaggtatttggtcagctccttgatgtgcttctctcactagatattttcattgtaatgaaagtgtttatcctgcccccctagatccttaatgtttcttttcaaaggcttctgtcttttcctactgagtttcttcctagaggtggtaattctaaatggaacaacagactgacggcctacttcccgagtgcccccaaatgacttcataattccacaaaagtggcttggccagagccatccactcatccccttccttcttccttgtcagactactggtctttctattcttgccccctccccagaatgaatatttttagaaaccaagtgactcctgatgagcttctttttcttcatctgttaaatgggaattctcattgtatccctataggcttggtttgttggaggagtaaacaaattgccccaggaaagtctgtagtacagtccccggcacaaagtgcattctgtaagtggtagtgatgtcttgctgtttcagggggtcttcactattc

SEQ ID NO: 30963 - DNA, 1084 bp, Homo sapiens
atgctcctagaggatcaggactcttaattgactcacacttctaggacagagctggtatgaatctctcatcctcacctcacctacacacatacacctagagatcttcaaaatgtaactacagtttaagcaagtcaagcttgagagtagaactggaaaaccttggcccaagaaattggcaaagcttgtgtctgcagttgttggagattctcagtcccactctccacatgtacagaaatctttgtctcaaaggatttaacataaatccctgtcattcctggcaaaaacaagggtaagaccactctgtagggacatttagtaccgcaggagagaagatgagttcataaccacatgaggaaataatgtaccacaagagatgttcacaatgactagagatgttctaaaaagaaatagaaaccataatggaaagggatactataaaaaaatgaggatatggaaaacttagaacttcaagaagtgaaaacatagtattgaaataagctaaaggaacagttaaactgtagattaaatggagctgaaaaaagcagtaagccgtaagagctgagcaaattttctaaaagaagacttaaaattgtagaagaccgaaaagcaaaatcttaagagcaactatagaaaaaaaagacatgacttataaaggaacaacagactgacaaattctcaacagaaggcagaagggagtagaattacttcagggagctggggtaaaggcccatctgaagattctccatgtgtcacagcaagactcagactgccttttgctgagggaaaatagaacttctccagctgagctgtggttttggtagccatgtgggccagcgaattcagaaatcagagttcggcccctgctgggtcgggggttgtcataacagtcccgtctgtactactaagctgggaccttggggcgctgcactcttgaagtaaaccccatcaggagatccacagcgcactgtgggcttctcaagaagcccaaattccaggaaggataaataaaaagaattctgtgtaagtcataatgaaactaaaaaagaaaaaggcttaaaaatagactgaggaaaacctgacaagc

SEQ ID NO: 30964 - DNA, 1031 bp, Homo sapiens
attttttttgagacaggagtctcactgtcgcccaggctggagtgcagtggcctgatctcagctcactgcaacctctgcctccccgattcaggcaattctcctgcctcggcctcccaagtagctgggattacaggcgcctgccaccacgcttggctaattttttgtatttatttttagtagaaacggggtttcaccatgttggccaggctggtctcgaactgccgacctcaggtgatccacctaccttggcctcccaaagtcctgggattacaggcatgagccactgcgctcagccagtagggtaaataagtgggaccaggacagggctttacattctagcttgggggaaccagaggattcaagacctgaaggtggaaaaaatacaaagtgaaaacttaaaaaatgaaaatagtgaatacttttcacctttggcatttgaaaatacagaaagtacaaatcataaaatgttgaagattgattaatagattacattaaacatgtaaataacaagattcccagactaacaagaacaaaccacacaagcaggtgacaaagatgataatgcctaatagtatccaagcagtaggtaacctggtggatgctagaatatagggagtggaacagcctctggttgatggtaggagtgtagtaatgagtacaaccttttcagtagaaactgccactctgctccccagtgttgaacatagacatatgcagcaatccagagttctgagtctgagtgtatggcctagagaaacttatctctggacattatgagagagttgtaatgagagttatcattgcagccttgcatggggagtgaaaaactgcaaataactcaaatgatctggggaactaagtgagtctattaaagcagtggaatattatataactgttaacttttgggaatgaaaaaagacaagttgcaaaaagctgtacaggatgataatgtttatgtaaggcatctcttcaggagcatttacttgtggtgaagaaggaagaaaatgcaatgagggaagggttaactcttg

SEQ ID NO: 30965 - DNA, 1032 bp, Homo sapiens
acaaatgaaatataacatgctaatcttttttgttgtttaggcaaacttttctcttttttttgagacagagtttcgctcttatcacccaggctggagggcaatggcacgatcttggctcaccgcaacctgcgcctcccaggttcaagcaattctcctgcctcagcctcccaagtagctaggattacaggcatgcaccaccatgcctggctaattttgtatttatagtagagacagggtttctccatgttggtcaggctggtctcaaactcctgacctccggtgatccactgtgcctggctaggcaaacttttcatacagtaaaatgcatagattgaactatatcactcgtgagtcatcacctcacttccctattgaactgtatcattcgtgagtcatcacctcacttccctatatttccattgctctcagaaagttcccagagtacctaagttttatttatagttcaaattttacacacttacctacatgtgaccactacttggatcaagatataagaaatttctagcaccctggagattggactcaatgtcactcgcttatagacagacacatacttaatcacaatatttgtgaggattgtttcagatactctggtgctgaaatttgcttcctgaagtctggtgtcatttgtctttgtgggtggccccacaatctagcctatttcttctggcaccccttgcatacatgctcctggtgctctgcctagcattctcccaaggaatgaatgttttgtctctcacagatatgggacacagcaggacaggaacggttccagtctctcggtgtggccttctacagaggtgcagactgctgcgttctggtatttgatgtgactgcccccaacacattcaaaaccctagatagctggagagatgagtttctcatccaggccagtccccgagatcctgaaaacttcccatttgttgtgttgggaaacaagattgacctcgaaaacagacaagtaagtaccaacgatgatagatattgtcacagacacctgctccccagggg

SEQ ID NO: 30966 - DNA, 1051 bp, Homo sapiens
gccacgcttacccccaaataataatgtttgtgtttttcttaatgttcatataagggaatggaaatccaaatatgtgtaggaaagtgtttcccacctgttccctgttgcctggcatcactgtctgagtttttctcttccatcactactgtccctgttgtctttatgcttttatttttagagctagcccttaagaagttagattgttaaatcggagggtgtatcttattgtaagtcagggtgccaggttgctttccccaaggggaataacatttcagcaatgtgggcttgctttcttctacctccttgccagcaagcaataggtgtcacctgtcactgctgacattgccgatctttgggtgtgtaaattgccaccatcgtgactactggtccctctgagttcccctccctggggcttagccatttggattttctctgctgcacacagccggcacacagcacatggttgggcctctctcagttctcatgagctgttggtgaattgaagttaactctacttgcatcttaagtgacttttccaactctgtggtctttttaagtcctttgaacatagggaaaaagtaattttttatttggttatgtcattttaagtttctatgtttcctgtgtctacctcagatttttctgtaattcagctggaatttgttttggcttatggcagaaaagagagacttgcctttcctctcaagagagctcagccagttgtttgaaatcattcagctatgttacacaagccgtttccctccctgaatagaccgtggcctgtgctaaatgctcgtatgtgctgggatctgtttctggtctctccagtctgttctggtgatgtccatgccatgttcccttatctggactgtgttgatttgactgcctgatgaggcaagtttcctcttgccacagtcttttttttttttttttttttttttttttttgagacggagtcttgctctgttccccaggctggaatgcaatggcgtgatctcggctcactgcaacctccgcctcccaggttcaagcggttctcctgcctcagcct

SEQ ID NO: 30967 - DNA, 1131 bp, Homo sapiens
aggctgagagggcagctcacactcagctccagccacttcacctcgtgcacacactggctgagggttgccagatgtttgagaaaagctagaaatccagaccattgttaaccattggcaactatagggaacatacagaaagcatctgaactggatgtggtagagctcccagatcatgatctgattgagaatgtccatgaacttctgtcctgattgctcagtgcagactgctgcttcttctggcaagactcctctcttcacattgacctggagttgtcacaaaatctgtttttctcttgctactcccctgagcatggcaccttctgccagagcgctcccttaactgtgtgggcaggctctgcttcacagctccccgcccactctgcccaagcagaagtgagcccctcctgggcagaaagtgcccgcaatgagggctgaaatgtttctattccctgagtaaccaacctttctctgtttccttgtccaggaaacggaggtggagctgtacaacgaatttcctgaacctatcaaactggacaagaatgaccgggccaaggcctcggcagaaagctgcagttgctgagggggcagtgagagttgagcacagagtccttcacaaaccaagaacacacgtaggccttcaacacaattcccctctcctcttccaaacaaaacatacattgatctctcacatccagctgccaaaagaaaaccccatcaaacacagttacaccccacatatctctcacacacacacacacacgcacacacacacacacagatctgacgtaatcaaactccagcccttgcccgtgatggctccttggggtctgcctgcccacccacatgagcccgcgagtatggcagcaggacaagccagcggtggaagtcattctgatatggagttggcattggaagcttattctttttgttcactggagagagagagaactgtttacagttaatctgtgtctaattatctgattttttttattggtcttgtggtctttttaccccccctttcccctccctccttgaaggctaccccttgggaaggctggtgccccatgccccattacaggctcacacccagtctgatcaggctgagttttgtatgtatctatctgttaatgc

SEQ ID NO: 30968 - DNA, 1445 bp, Homo sapiens
aggctgcagaagtaatgacagacccgagacaggccgagctcacttcagtgtctgttcggactggggatttgttgatgacattacccagactgcagcgttaggagatgccacctagcagagatctgagtcacgaactaacataagaaaaggctactatgaacactgacaagacatgtggtagaaaattataataatgatgacagtgatgatgacagccatcatctactaatatccctggtttaaaaaaaaatttttttagagataaagtcttgctatgttgcccaggctgaccactgtggctattcacaggcttaatcatatcacactgcagcctcaaactcctgggctcaagaaatcctcctgcctcagcctcctgagtagctgggacaacaggtacccaccagcatgcctgctttaatatccctgtttgggtatttttttgaaactggatttaactcccaaccttgatatctatttttgacagccctgtgaaatgtagtattatcctcatgtgaaactgtagcctcggagaggtaaaatgacctgcccagggtgacaaagcctgtgagtagctaactaagaacatgacctcaggcccacctgaccccaaagtccatgctcccatgggaagtgagagctgcctgagaaagaagcagcccttggctttgttcttgacttgacccacctccccttggcattgttcttgacttcacccaccgctctcacaccccgtgacttccatccccagcaaagacctgacaagccttagccataagccatctgctgcacagcttggctctcaggctaatgcagctacattttcagttttttgttttttttttttttgagacggagtctcactctgttgtccaggctggaggacagtggcacgatctcggctcactgcaacctccacctcccaggttcaagagattctcctgtctcagcctcccaaatagctgggattacaggcgcccgccaccacgtccagctaatttttgtatttttagtagagacagggtttcgccatgttggccaggctggtctcgaactcctgacctcaagtgatccacctggctcggcctcccaaagtgctggggttacagatatgagccactgcgactggctcattttcactttcaaagtttcatgtagcagcccacttagaacttttcttatgttgagcaaagaacatgtatgcacatgcatacatacacacacagaaatctgtttaacatcccacaccgaactggccaaggggccaatttttcttatgacatctatcagtatcctgaggacccagcattctctaggacacatgctggaacgcactgccttagcccactcgctgccctaatcaggagctgacctaggtaacaatctctgcctccctctagaaatccacagaagcagcatctctaacaaatcttccaccttctgatgac

SEQ ID NO: 30969 - DNA, 1989 bp, Homo sapiens
cccgcggcccagggcctacaatttcctccggccagctcctttggccgcgcaagcgcagtggggccggcgggaagcgtaggcgtgtgacgtcatcaggcggcgcgggccagccaggtgcacgtgactaaggccttgggcgcggcaggtggtagccttcccgcccttctggcctctccatcccctgctgcgggggaccgcgcaagcgcagtgagtactgcacgttgtcgcgggccagtaacgtcatcagacgtgtgtgtgtccctgcggcgctaagaaggggagactgaggctgaggctggggaacatcgggcagcatgagcggctgcgggctcttcctgcgcaccacggctgcggctcgtgcctgccggggtctggtggtctctaccgcgaaccggcggctactgcgcaccagcccgcctgtacgagctttcgccaaagagcttttcctaggcaaaatcaagaaggtaacgcgagccctgggcgaacccttgctgtctggctcccgcttttcaccctcagctgcaagactggtgttgaactttgtgagattccccaaacctgccagagagatacaccctgcggccgaggcgtgttaacactccggattcctgagttccaggaaaaccttcccagagaaagggtgagacatttccaagacgggggacccttggaaatgtggtggtgacgtgttccagctaaattttgtcaggggaattcggaaaactctaggctaggtaattaacaaagcagccttcatctcagctggtctggtctggaaatgtgcggggcttcctctctgattcctaaacagcttacaccatgtccctcctcagtcaccttccagcgccctggggcttccttccccaggtgagcccagcgcctctccctgccattgaggttcctcagaaatctggctccaagatgcttcccaagggtggcacaacccagccaatagtaacagtttggttataaaacactcattgtcttcttagagttggaagacttgggtttggtcttggctcgttgactttgaaactcagttgttttttttgagacagagtcgcgctcttgtcgcccaggctggagtgctcactgcaacctccctcctgggttcaagcgattctcctgcctcagcctccggagtagctgggattacaggcgcctgcccggctttttttttttttgtatttttagcagagacggggtttcaccatgttggccaagctggtctagaactgacctcgggtgatccgcccacctcggcctcccacagtgctgggattacaggggtgagccaccgcgcccggccaagactcagttctttcagccttaaaatggagatagtgttgtgtctccttcacagatgtgttgtagagccccagtgagataaacggtgcatggagagtcttcttaaactgtagagtactgtgcagcagaagagagagctggcttcaacacttagtcttgtgaccttggagctgacggctgcacctccctgtgcctcagtgcattcatctacaaaataggaataaacacatttcttgctctttcctttgtatttcattttatcttctaaggaaaccaacagtatacttgctatttcgtcgaggtgccctactttgaacttggctgaatgttggctgatcctgtatcacagaagttattccctggcttctctttggaacgttcctctgaggttgtcaggctgatacctttatagcaagcaactttacagatgaagaagctaagactcagactaaaagcagtttgcccagctagaaagtgcggagctatgtcttgaacatattggaaaaccttttacccaggacctggggcagtgtggtgctctatcctgggacttcctgctatccagcagcatggtgaagaaagaacacagatctttcagatctgtttccatctttaaacctctggcactacctgccctgccctgcctttactctcagctgtcagctttgcttcccattccac

SEQ ID NO: 30970 - DNA, 1026 bp, Homo sapiens
cagagaggagaaagcagtgcgagcatattgatagagtagagaaatctgttggctgattagctgtacaaggtctgaggagaaggttgaggtctccccaagacttctctagaacacttggtgagaggcgccatgaggacaggtgatgcttgggcttatagctctgactcaggacatcactgctcaacagcctgaagcccacatccaaagctcatgtcatgctggcaattgaaggggtagcagagcccaaaagtccagaggggctcagcacagggagcagatgtctgtgagcaggagagacagcggctgtagggatcgatgagacttggtaagcatgatgtgctcttgtcagcatagcatctttgagctcacacaataattgatgtagaattgtccatttcagtaaggagtttccacatccactatcttccacgattctcacaagggccttgagtaaatattacctgcatgttatgggtgagaaaggggtagtttagagagctgaagggatttggtgaaggccacataatgagtaagcctgaaatcaaggaccagacccccaggcttctaaatgttagtcttgggctccttgtttcatgggactattatcatcccttgtactgagaaggaaaactgatgaaaatcgggaagaacctatttgaacaggggagggagatggatgtgggtggtggagcctgcacatagtttctgtatctcaggaaccttgtgaggtttgctttccagttccttcagtacgtcatgtcccgctggccagggtggagtggagcacatgtttttccttcccttttaactgatatttccgtgatgggagtgtgctaaaaattaaattttttagaaaatatttactatttttagaaagaagttttcccatttccagaagttagccaagatgaacttaatgaaatcaatcagttcttgggacccgtggaaaaattcttcactgaagagggtatgtatggttttctttaccattgccgatttccattgtaagggctatttggttgatat

SEQ ID NO: 30971 - DNA, 2055 bp, Homo sapiens
atgtcactcttgggcccttagagctcagcactttgtcacagccacacgcctggaagccccagcctgagtattcaagccaggcggccccacctgctttggtcactgcacggggtgtgagcctgcaccacctctgtctggggcctctgtgcctggctttgtgcgaggcgccctcccccttccacctggttgcatcttcacagcgactctgaggtgggggtggtgttcagggaggtgtcgcactcggcctgaggcacagcctgtaagaaccattgccaggattcaagtctgtatctgatgccaaactctgtgtgtgggtgccatgaggaggggtggttctcctctgacccacgggtgctggcaagtgggggtgccagcttctggggtatttgacctcagcagacacgcttctcacagtgcccacctgtgggaagggtaaggatgatggccataggaaatcatgtttgaaccacagaaatattccagttcattctaataactctgctcttcctcagaaatgactgctgagtacgcctgcacaaggaaacagtttaacaagaggctcagtgaatttggattgattcaggtaccaatggttgagtactgtatttgtgcatttcactgtgtgacatgaacggtgtgttcttttgatgtctctgtactggtgacttctgtggtgatttgggaagaagactagttaaggctttatttgacacgggtcactgggcttgcttctcttgggcattgaggcttctgacttaattactttctctcctgtttcacagatttggctctcagcacatgcaaattgtttcttgtgttttttctgaacactccaggagaaatttgcactgatggctcagaaggcttacgtcatggagagtatgacctacctcacagcagggatgctggaccaacctggctttcccgactgctccatcgaggcagccatggtgaaggtaaccctggcatagccagagagctggcgctggagggaggcttgggaaatctccctcactgtgacctttcaagcccatgctgttgcctgtcatcttcctcctgtcattgatccagtatttatgatgcacttgccctgtgtagcactccagggataggcaggcagcggggagcagcagtagggaagtgtccagtgggccagtggatcagtagtttatagcagaaggagaccgttatgataatatccttttagagtaataacattgcatctggcttgtgtgagaaagacttcttttttccttagtttatggccttcctactttctggtatcaaaactttatcttaaaaactaagcatatggcagggcgcggtggctcacacctgtaatcccagcactttggggggccgaggtggatggatcacctgaggtctggagttcgagaccagcctggccaacatggtaaaaccccatctctactaaaaacacaaaaaattagccgggcatagtggcgggcacctgtaaccccagctacttgggaagctgaggcaagagaatcacttgaacccggtgggggcggaggttgcagtgagccgaggttgtgccattgcacaccagcctaggcaacaagagcaaaactccatctcaaaaaaaaacaaaaaacaaaaaacatgtatgagcctgggcaacatggcgaaaccccatctctacaaaaaatacaaaaattagctggcatggtggcacacgcctatagtccctgctacctgggaggctgaggtgggaagagcatcttatttggttaaggtagatactagaatttgcttttgttttgttgagggtggagggtgtcattttttagctgtaataaaaaagatggccacacttggggggaccctactttgtgccccccacaattgtttttaagctggtctctggaattgagctcttgagagaaatagtgagaggtatggcagcttacagaagcaaacatcctggtgtcggcaggagagtctacctaaaaggttgggatcctgaagtggcaaggtccctaaaaaaataaaaaattaaaaacaaaaaggctgggcatcttggaccgtgtttga

SEQ ID NO: 30972 - DNA, 1028 bp, Homo sapiens
tagttgtccttagtgggggagttgatctgagtttctcagttagccattcctagaagtcccctgctccttccaaatcctagaattcgtgaattacaacctagggggacagattcttctttccatgctactcctttcttacaatttgaagttgaaattctgacctaatgcttattacagggaaagcaaactgttccgtagttcttctgggtgcctgagattctctgctgaggggtgacacctgcaggagaatttggactcagagcaaaagtaactagatgctggagaagtaaatacagtatttaaaaaaggccacagactgaacaactgaagctaaattattggaaaagatgggctaagaatttaacataagaaattgttttaaaataagagtgaagatagcaatatgaagcagaagtaaaactaaaagaaaaagtattgagtatgaaaatagttgaaatagaagacaagagaatgagatatattgcagaagtgatactgttgtagaacgaatgaatgaactggaatatccacttgagatatgctttcagaaagcagtcctgtataaaaaagataaaattagaaactgagtatagaggatggaaataacatccaaataacagaaatcccaaaaggaggggaaaagtgagaacaagaaaatttgaagcaataatgaatgtcagaaaagacaaaacttccaagcctgggtacactattattagtgggatttaagcaaacaaatacaaagataaactctcaaagcttctagaggaaaagagcaggccacctgtaaagaaaaactatcacttgtgatcagatccacaacagcaacaaggtaagttaacttcaacctacaatttcatatccaagcaaactaattgtgagggcttaggtttaaaggccttaggttttacataaaaccctcctttaaaaactcttggggccagatgtggtggctcatgcctgtaatcccagtactttgggaagcctaggcaggcagatcatctgaggtcagaagttcaagaccagct

SEQ ID NO: 30973 - DNA, 1035 bp, Homo sapiens
taaatgaaaatgagaatttcaccagacacctggaacctatagaaaaaataaatggaaatcatagaattgaagaaatcatcattaaagttacaatccagtggatgggtttaattgcagcttggacacagtgttggggaaaagctgagtgttgggaaaaaggctgaggcagggcttgcatgtctgacgtaacgtaaaagagtcttggaacatgtccggcgtccagggtctaaaaccccttgtggcctttggaacaccaagctctgttccaaagggtggaaggctgccctgccgcactacaatctaagcccagggcacaagccacaagggcgtggcttggacggaatccagggaacagcgcataaaacccctcgtggcctctggaatgtgtctcgacttgttggctccttgcttctagcactccaaggctcatagatcgattgtgtcttaaactagaagaatacgtttcccattatctcaagtagcagaacatgttccatatgcttcaaagaaaattctaaaccatcacagctgtagatcatgcacttgatacactgctttctttcaacccccacatcctcaccacctgcttctttgatcaccaataaatagtgtgggcttccagagctcggggccttcacagcctccatactagtgttggccccctggtcccactttatgcactcttgtctcatctgtttgactctgccggacttcatagtccccacagcctggagttgggtctgatcaccccaacattcctggcgcccaatatgaggcaacgaacaccccagtgaaggaacactagagtgtgtgaaagaggatgcatcatcagaggacacccgaggacgactgaaagaagctcagcaggaaagctgagcactcggaaggaccagggtaacaatggcacaaagtgaaagcaaacattctgctcaggatgttttaatacagcttcttacatacaataatgctaatgcagtgtcaaactgctattagacccctgacagggaaggttcagttagctgaatgtattaaggc

SEQ ID NO: 30974 - DNA, 1046 bp, Homo sapiens
gagctcaggtggtaatgctcacttgcccactctcacctcctgttgtgccacccagtttctaacaggcctcgaactgctactgttccatagcctgggggttggggacccctgcatcagaagatatattggttgaaaataatcaggttgaaggatgaaaaggagaaaaaaagactgtaaaataaaaagtatgagatgtataagtaatatcagatgcagatcatggtgaaaatatctaacattggagtcccaggaggagaggaagagaagatgaatataagtaatatctgaagagaaatactgtcctagaacttttaaaacttaaaaaaaatcaagctacagatttaacaagttctagaaacccatggcaagttaaatacaaagaaaaacacacctacaaacatcatcataaaactgccgaaaaccaaagaaaataaaaacaaaaaatttaagcagccagagacaaccaaattatcttcaaaagaacaagactggcagctgaccaacagaaacaatggaagtcagaggacaacggaatgatgtctttaaagtgttaataactgccaagctagaattctaaacccaggaaaaatacccaaaaaatctaatcacagaaaaattaactgatactcacaaacacttctcaatactgaaacaatgaaaagacgagtcacagactgggaaaagatacacatctaacaactcatttgaataaaagtaaaacactgtcaattagaaaaatacaactagatttattttaaatggagaaaataaataaatttgaacaagcactttataaaaggagatatccaaatagccaatcgtgaaaaggtgctcaacattattgagagagagacagacattaaagcctgaatgtggctgggcatggtggctcacgcctgtagcctgtaatcccagcacttttggaaggctgagacaggtgaatcacctgaggttaggagttcaagaccagcctggccaatatggtgaaaccctgtctctaaaaatacaaaaattagccaggcatggtggcacacacctgtagttcc

SEQ ID NO: 30975 - DNA, 1023 bp, Homo sapiens
ctttgggtgacagaattcaaagctagctctgaacaaaactgaaatggtggctaatacgatcctttctgtgcctcccttttctttccttttggatacttcaaatacacagctagtttccttgggacatcctagggcagtcagggtcatttccttctctctccaagactgacctgccacaatccatcagggactatgattttgttgtaaatatttagaaagatggtgcacaacaatagatttggcaaaaactgagctgatggcatgcaagtgtagccaagtgtgggaatccatacttggaataatctaaaggaatgtttaacggtggtaaaagagaagtgcaggagatggggcagcattttcagggcctctcacctaatgaaatattggcatcttacaggcttgagggtcacttgtctgatgatttgtgtgctaattctgttggaagagaagattctcaagaaatacactattgccattaaaagtaaaacacaagattgtttcctcccttgaatatagcaagaactctgtagagtaatcaatgctttggccagatatccttgagaattaatgttttttagattgcagggagaagaaaagaggacagaaacaagtttctgtttcatattccttctgtgtggtgttagagcagaagaaccctagggagtgcagggctggggcctgggacatgtgaatgtctgcacattggcagttcagcaagcttttcctgttggcctgctattcccaggagactgtctatagggctgcttggcagcaggtgaggaaggtgtgtatgtctgaaaaattcaggatagacagacaacatcccaagttttgaacaacaatccaactgtgtgtgtgtgtgtgtgtatgcacccgcatgttcacagctgcacacagcaccttgcacttcctttattaatagaaaactggaagaatgatgcagcaggattaagccccagggtattgactgggactcggggagacctaaggcacaactaaagggtggaatttttctttaatttc

SEQ ID NO: 30976 - DNA, 1046 bp, Homo sapiens
tcgatctcctgaccttgtgatctgcccgccttggcctcccaaagtgctgggattacaggcgtgagccaccgcgcccggcctttttttttttttagagacaaggtctcacttgagcccaagctggtcttgaagtcctgggctgaagtgatcctctggccttcagcctcccaaagcactgggattacaggcgtgagccactgcatctggccacttatatcttaaaagaaaaaacaacacaaaagaaataaaatgcatgatgcttatcagggaatccagaagctatggaagcaagcaaagatattcatatttgactacttaaaatgtttaaagttttgagacaaaagatactatgaagtcaaacgaacaaagcatagagcagaaaaaaagttggctgggcgtggtggctcacgcctgtaatcccagcactttgggaggccaacgcgggcggatcacgaggtcaggagatcaagaccatcctggctaacagggtgaaacccggtctctactaaaaatacaaaaaaattagtagggcgtcgtggcgggcacctgtagtctcagctgctcaggagactgaggcaggagaatggcgtgaacctggaaggtggagcttgcagtgagctgagatcgagccactgcactccagcctaggtgccagggcaagactctgtctcaaaaaaaaaaaaaaagttataatacctacaataaatgttaatattgttagcataccaagagtttctacaaattaaaatccaatagaaaaatgggtaaataatatgtacagataattcataaaaggaaatccaagaaacacaaccttagtcatcaaggaaatgcaaattcaggtaataatgagatggtaatattcttttgtgagattggcataaacttaaaagctaaataaaatccagtacttgcaaagattcagggaaaaaaacccagcactttgagaggcttaggcaggcggattacctgaggtcaggagtttgaggccagcctggacaacatggtgaaaccccctgtttctactaaaaatacaaaaaaattag

SEQ ID NO: 30977 - DNA, 1030 bp, Homo sapiens
ttgcatacccagaaagccctgtttagacaagtcagtttaccctgagacttctcagacattgaatatacttgaagggaaatgaactaggctagaaggtaacatctttggtcatttcttcttaggcccgtgtatttaatgaaactcccatcaaccctcggaaatgtgcccacatcctcaccaagattctttatctcataaaccaggtaacagggtgaagcttgcgggtagggagaatggtgctgggggattggaggggagtggacaaatcatgatcactcttaggctattggacagcctctgtgtggctgtagacaacagctcagctctgggtcccctcagcatccaagtctcatatgttgcccttgagcctctttagggtctggggatctggtgtgggctgatcctgaaagaactgctgtctgaccctctgtcccaagctgagacttctttcttgattaacacagggggagcacctggggaccacggaagcgaccgaggccttctttgccatgaccaagctctttcagtccaatgatgtaagtgcctcaacccagctttccttgagaggtggcagctgtaacaaggtggtgggagggccaaagagagctggccccaccagtcagtgtgggctgcctttgtggagacaggaggtatcttctcccaactctggcccttggtgagcccgggctgatagggcttttcccacctatctcccagcccacactccgtcggatgtgctacttgaccatcaaggagatgtcttgcattgcagaggatgtcatcattgtcaccagcaggcaagtcatggggttgtgggtggctcttctgatgggttccattgacagaccatttttttcttgtgtgtaccagacagtgagacttggttgcatattgccagctgcccaccccgtggcagcttccctgttaccactgcccaccccatggcagcctccaggtgtgctgtttctattttaattctctgaccttgacttggacacaaatgcttccttttcttgatttctcttagtca

SEQ ID NO: 30978 - DNA, 1005 bp, Homo sapiens
tctgtcaaatccagaggacacagctggggtaggaggtttctgctagtttctgctgaactagaaacagctgctggtcctgaagagctcatcatcccctaggagggacaggcataggaagcagacctctgagaatgctatgtaattccctgcatgccaggtcctggaagcactgacactaggcaggcttagaagagatgtgatctcacagcaggcggctctaggctgaattagtagattggtacttgggattagggcgttttctgttgaagggataccatttgcctttgggcacctcaaggataggtacctggtcaagttgctctatgtccccagagtctagcacagtcctcagtgccgagcaagcacctgtggaaagagttgcaggaagggatgtgtggatgagttcagagcagaggcccgtaggtgtgtagatgggtgcctgatttctacctccatctctccagctggaagatctggaagttactgtagctgatcacattcaaaaggtcatgaaactgaacttcgaagcagcctgggatgaggtaggggatgaatttgagaaggaggaaacgttcaccttgtctaccatcaagacacttgaaggtaaaatcctgggaatgccatctctggcctaattactgttcaagatctttggctactattgaagtgctcatcccttttctctccaaggatccagggccatgtctggagcacatatgtcaaatgccacttcattaaaagcccttcagaacatgggggagtggtggtggcacaaagggcagataagatggcttaacaatattgggatttctcattacagaggctgtgggtaatattgtgaagttcttgggaatgcacccttgtgagaggtcagacaaagtgccggataacaagaacacccacacgttgctcctggctggtaagtggcatttctagatggggagggcctggatagcttacagcctggatgccactggatcctgggctaaggactccactgtaaat

SEQ ID NO: 30979 - DNA, 1031 bp, Homo sapiens
attttacacatttatttctgatttcacagctcccttccaaggcttcatagcctcaagtgtaaccctcgtgctccccagcagcctctcccattgggtcctacctggagtggagtcccctacctcccgtcttcatcctcactgctgcgtgcaccacatggtgtccaggggccacaaacatcagcaagaagggtattccagagagtgactcacccatccctcctactccattgaggtcacattagatgacacaagatcatgcttctctgtcctctgggctctcttaccctccctgggctctatggagttcgagaccatcaatgaggcgttgctgacaattgtaaaccatcaagtgagaaggtctcctttcctcctctcacttccccatttttgctgcaatgttacagctctcgctacagacttacctacctggaattctaaccgtgatggaaacattgtgaggtagatgagctcattcaacagacctgggctgggctcagaacagctacccaagtgttctgtgcagagggaaatgctctctgtgctgttgagtgctatggtcagtggcaaataactcctagggacacatgaaatgtggctgttgaacacagtgttttcttgcactctaattaattgaatggattaattaagttagtaataaggagcacctcccggtagtgactgccacacagaagagcgcagcttcagagatataaagatgaagaagacatgattcttctaccctggtgtttccttgcagagtaggtgtctgctctgatccaatcatccatttatgggagcttcctgggcacaggtacaggggccaggccctctgtgaggcctggggatgctgcaacggggaggacagcatccaggtcgagggttcccagcaggggctgcacttgtacacagaggtgaaaagcacggaccagcaaaccctgtccagacaggatcagagcagcagggacagaggggatggggacaacttactgtcttcaggagcccacgctcatctcctctgaccctggatcaga

SEQ ID NO: 30980 - DNA, 1090 bp, Homo sapiens
agatgaaggcattgaggctcagagaacagtgacttgcccaaggtcaccttccacttgccctgtgaataaagtctaaaagtccttaagatgtacagaatgtggcacatacttacctcttaatcctcgtctctcaccagagtaggtgaagaccccgttatttgctgccatggtaccgtgatcctcttccaaatgcttataaatgtggaacagtgtaattaataacaaattacttgttatatgttgcctctctccagtctgttccttcataaagcccaagtagtatgaaaatgcgaatctgatctatcactctttgcttaaaacctttctttggcttcccattgctttaggataaagagcaaggcctctgctgtgtccctgaggtcccaagagatccttccacaacccacctcacccttccctccgttccatgatgactccgctcattccctcagacatgccaggcttttcctgcttcagggcctttgcacatctgttccatccatgtggatgggtctgtctcctctctacatctggctaagctctgctcatcctttaggtctccactgaaggatctcatccttagagaaatgttccctcatctaaattaggtcccccaggagatgttgaccaaagggtagtttcagtcagacaaaaggagtacatttttgagatctattgcacagcatggtgaccatagttaataatagcgtatatttcaaaactggcacaggaatagtttttttttttttttttttttgagatggagtctcgctctgttgcccaggctggagtgcagtggcgtgatctcggctcactgcaagccccacctcctgggttcactccattttcccacctcagcctccagagtagctgggactacaggcgcccgtcaccaggccggctaattttgtttttgtatttttagtagagacggggtttcaccgtgttggccaggatggtctcgatctcctgacctcgtgatccacccgcctcagccctccaaagtgctgggattacaggtgtgagccactgttcccggccaggaatagattttaaatgttctcactataaaaaaataagtatctgcagt

SEQ ID NO: 30981 - DNA, 1064 bp, Homo sapiens
gagcaagacccatgtcaaaaaaaaataataaaatgcctggccttggtgccccagagctggtgtgagtgcagtttctttctgtgggatgacctggggaaaggctcttcggtttgccaaacctcccttcccttctcagatggtaatagcgacagctcagtttagtcatgagatttgcacagaataatgtataggaaagcgcattagaaatgccaacctgtagaaagattaggaagatgagaggggccacacgtgaccacagagtggattttcatacctctctccctggctggccccactcctgcccctgctctgaggcccctccttacactgtggtggacttcgtgtgcccacagcctcccaccagaactgcagcccatttacacactccatttgctccgtctctctatgaaggtaaatactctgggacttgtttttggttttagtttttgatcactattccaaggaggttggttccttttcaatcccccctgcccccacctggtagtctgaatttgagaaatatgtacctacacattatgtggggggtgggggagatctagtcctgattaacgtggcatatttttgtttacttgaaaattgcttcccaagattcaatctggttttcagaaaattttaaaattacattcccacgtacaaataaattgtatgctttctggataagtgacatgtttatatggtgataaagggaattataatgctcttaactcttatgtagtatgttcttatcaaaatcaccaagcatgagaacactgtttagtctcattcatcactcagcacagcctctttctgtccacttcagggccaagtctttgccatggccccagataatgtgtaacttagcttcaggaaagcaaaaagcctttgaatttccagtttgctgagccttgaaggaagcttttagacccagcttcaatgaagtcacagctccctgagtgaccagctggcctaggcttatggctccctctcagcctctcacccttgccgtggtcacccctggtcccctgagcactcactgaagtccctttgaaggacatttctagtct

SEQ ID NO: 30982 - DNA, 1051 bp, Homo sapiens
acctgtgaaataactattcagggaaagaaatttaaaggtttggtagatacaggagcagacatttcagttatttctctacagcactggtcatcctcctggccaattcaactcgctcaatttaacatagttggagttggtaaagcccctgaagtatatcaaagtagttatattttgcactgtgaagggcccgatggacaacctgggactattcaaccaattgtaacttctgtacctataaatttatggaggagagatttattacaacaatggggagcacaagttctaattccagaacaattatatagccctcaaagtcaacatatgatgcatggaatggggtatgtccctggtatgggactaggaaaaaatttgcaatgtttgaaggaaccacttcaagcaggaagacaaagttcccaccaaggtttagggtatcatttttgatcgtggccattgttaagcctccagaacctatacctttaaaatggttgacagataagccaatttggatagaataatggccactaaataaagagaaactggaggctttagaggacttagttactgaataattagaaaaagaacacatagctccaacattttccccttggaattcttcagtctttattattaagaaaaaatcaggtaaatggagaatattaactgacttaagagccgttaattccgttatacaacctacaggggcattacagccaggattgtcttttcctgctatgattctgaaaaatcagcctttaatagccatagatttaaaagactgtttctttactatccccttagctgagcaagactgtgaacagtttgcatttacaattcctgcagtaaacaacctgcagcctgctaagcatttgcattggaaagtgttgccagaaggcatgttaaatagtccaacaatttgccagacttatgtagggcaagcaattgaacctacttgtaaaaattttcacagtgttacattattcattatgtggacgatatactttgtgctgccgcccctcgagaaatattactccaatgttatgatcacttgcaa

SEQ ID NO: 30983 - DNA, 1068 bp, Homo sapiens
cacatagcaaatattattaaatctacagagagagatagagtccaatacaatgatagttgagaacttcaatatcctactgtcagcattggacagttcatctagacataaaatcaacaaagaaacattagatttaagctgcactttagaccaaatggacctaacagatattttcagaatatttcatccagcagcagcagaatacacaatcatctcatcaacacatggaacattctccaggatagaccatatgttaggacacaaaacaaggctcaacaaaattttaaacattaaaatcatatcaagtatcttctcagaccacaatggaataaaacttgaaatcaataacaaaaaatttggaaactgtacaaatacatggacattaaatgtgctattgaatgatcattgagtcaatgaagaaattaagatgaaaatcaaaaaatttttttaaacagaaaatggaaacacatcatgcaaaacctatgggatacagcaaaagcaatactaggaggaaggtttatagcaataaatgcctacaccaaaaaagtagaaagatctcaaataaacaacctaatgttgcacctcaaggaactcaaaaagcaagaacaaaccaaacacacaattagtagaaagaaaaaaaaataacagcagaaccaaatgcaacagagacaaaaaagaaatgcaaagaatcaacaagataaaagttgtttttttgaaaagttaaacaaaactgataaaccactagtgaggctaaccaaaaaaaaaaaaaaaagagaaagaaaggagacccaaataaatacaatcagaaatgaaaaaggagatattacaactgttaccaaagaaataaaaaggatgattagaggctattatgaacaagcatatcctaacaaattggaaaacttagaggaaagggataaattcccagacatacacagcctaccaagattgaactaggaagaaacagaaaacctgaactgactcaaaatgaatagcaggtttgaatcagtaacaaaaagtctccccaaagagaaaagccctagagtaggcttttatgctgatttctacccagtt

SEQ ID NO: 30984 - DNA, 1074 bp, Homo sapiens
gccgaccggttgcaacgcggagttgagggtgtggtggtttgcttttaagttgtctttgtttttccacctttttattttcgtgagcttatttatttactgtgtatgtgaagtgtccaaggatttgcttacttagggtatccagcttttattttggtaacatggggcatttgagagattgaggttctgtgggtgactgagcttgattcagctttcttgaggaattcctgctctcttcagcttagggaatgagagggaagttttcatttcagatagcgtctgtgcatgtttaaatagctatttgaaaggaattactcgaggggaagtggaaatgggggacaaggggatggggctgcatctctgtatattggcgtttcaagcctcgatgtggtgtgtggcaggattcatttataagaaagcaagccatgttttattatgtctagcattggggaaaaaactcattatttttcaattcacaaaaaaaacccagtgaatttaatgaaatgttatgagatgagtgcttttcttaaagttccaccctatttcaaaacatcatttaggaggctgacagcggaacctgtttgttcactgtacactttggacacattagatcgtcattcacatgttacatgatccctttggcctcgttaaaatatttaatgcttttcctacacagcactgattatttttaaaattgttgaacaactgtgaataagtgattttttttccccctcctgaaacaacacttattctttggactgacttctgacttgtgcgtgatcatttttttttcttctgcctttaaccgggctgcaaaatactataaaagatacttaacaaatgacagttttttcctctggtataatttgttttaaaaaatatgtgtctggtataaaggagctgcagtcttgctggctgcttctaatttgtttttccattgttgagaatgtaagcttgattgtctgactaggactagtaattttgaaatgggtgtttcttatagatgcagtaatgtgttttgctctctgagacctctgggctatgtagggaatatgatgagaggcatgattatattga

SEQ ID NO: 30985 - DNA, 1050 bp, Homo sapiens
tcttatatttgccttttcctcagacaagcctactggaaataattttttaagacaagttgcatgaattttttttttttaaccatggttgtttctatttcgtgttacagtgtgcgtgaaggaaaattggagcatacacttgcccgagacttggttccaggtgatacagtttgcctttctgttggggatagagttcctgctgacttacgcttgtttgaggtaaatttgggatctgattgtaataagtgaaaatacgtggatgtagattaaaggataaacattactagttttaaggaattaacacatagttgatttgaaccatttggtattctactttaaaatgtgacatatataaacttttttttttccttaaaatgtatctgtctctactgtaacatcttttgaggtgtttgtttagtgaatcagcagatctttatagaaacctgcatattagggactgtgggagatacaaagatgatatgacagaatacttgtgactagggaacatactatgtgtacacaaattactcaccataaaatagaactcagtaattgagtaagagaagttcaaagaataggatatagacatttaaagaagggagaggttccacctgatttgaatgagatcagaatatgcctcagaccacatggctttggcagtgataattgaagagtagtactggacaaagatggggaagacaatgaagcaacaccattcaaatcactatgaacattccagtgtatgaaactctgttgggacatggtaagggtagaaaacgtgtgatggaatcagatttcagaggccttggatactaggcttaacttcagatttttttggttaggagttaccttttgaggctcctgtgcagttgctaaataatgttatccttaatctggctacagtgtgtagaatagattgaagaactggaaaatggagataggcacctagtttaacaggctttcaaaacccattagtatgcaggtcttatccaccattggaattaagctgtttgttaacacctgcagagcagtcagtctttaaatactatggcc

SEQ ID NO: 30986 - DNA, 1034 bp, Homo sapiens
tatttgttttgcctgttacttgctaccccaaacagacttttgcaactactttgactgcagattgaaataactttccttaaagagttggggatcttttatccatctaaatttaaatgtactgacttaggatatagactgataaagtcagtttctcttctggacacagaagctgctagttttttgaaagtaaattggcttattggagttttgttggctcagtttggctgtggtgatctttggataattttgtaaggctagctggtcatttgatactactgtatgaaataaactgtcattagggtttaaaggaaccagaaaactccttagtcagctttgggatatcactaatttcttccaaagcacatagatttcactttagagaaagcaagtctgtgaacttctgctatgtagttagttctcttacagactaggcctaaagccacagttgcaactttagtgtcatcattttgtaactgtcataaattttagtgctttcagagtttgactgtaaacttgcctgggtccttagcagcttcttgttagcacattcagtgacttgactgttgtacaacttttatctggtacaacttttatcttcataggttgtgtcttagcttgggttgctttaacaaaataccatgccatttatttttcacagttacggaggctggaagttcaaggtcaaggtctggcagggtttggtttctggtgaggactgttgctagcttgagatggctatcttcttgcagagtcctcacatggcggagacagcaatttctctctcttcctcttatacggccactaatggcatcattaggactagcctcatgaccgcatctaaccctgattacttcccagggccccatctccaaatactataacattgactgtagagctatatagcatgtgactttttgggatacatagttaagactgtaacaggttgagactgccattttgtttatactttttaaagactaatattaataacttaaggaattgtgtagtttttcccttgcctgtgtcaggttttc

SEQ ID NO: 30987 - DNA, 1104 bp, Homo sapiens
cacattgtatcaggcttcagggcttagaagtgaaaaagacagtttgagccctctccattggcagacaccagcttgcaaacaactgtgattcaaagaatgatatgtgtctgctcatgaaatgaattgaccatgtgagcctaggcaagccgcttgattttttcaggcctgttttgtcactgtgacacagagttgccctagagcaatgcattccaacttctaatgtgcctaggaatcagctgggctctgttttggtaggtgtagggtggggcctgagattacgcatacttaaccagctcttagaccatgccaaaagcactggtccatccaccacattaaaaaaaaaaattattaaaacagcttttttgagatataatgtgcatatcatacagttcacacatttaaggtgtatcgttcagtggttttcagtatattcacagttgtacacccatcactacagtctaattatagagcattttcatcactctcaaaggaaaacccttacctcttagcattcattctgtattttccctgcctctagcagccactaatctgcttgccactgaaatacatgtgcctattctggacatttcatataagtagaatcatacaatatgtagtcttttatgtctggcctctttcatttaatgtaatgtttttaggtacttcattcatgtatgtcattgttttttactgccaaataattttccattgtaaggatttatatcacatagttggtgaatttaatccatttacacttacagtgattactgataggaaaggacttctgttgttacttgttttctatttgtgttatctttttatgttcctcagtttctcctttgtgcccttctttgttttttttccacgcccctccaattgattttttttgatgtaccttttttattccctcaaattattttctgtgcatactgtttacttattttcttagtgattatatgtggattacaatgaacatcctaatcttataacaatctatttgaagtgatactaactttgcttcagtagcatacaaaatcgtacagcccacacctccctcatctttgttatttttgcaaatgacatctttatgcattctgtgcccat

SEQ ID NO: 30988 - DNA, 1068 bp, Homo sapiens
ttggaattctttatgtcttcatatggctttgagttactttctactttcttatttcagcctaaagggctgtctcttagcatttcttatgagtcaggtctgactagtgatgaactctttttgcttttgtttatttaggattttaaaaatttctccttcatttttaaaagataatgttgccagatagaaaattattggttgacagttttttttttctgaatattataaatgtctgctctttttggcctctgtggtttctgattaggattattaatcttaatgaaaattctgttatgtgataagttgtttctgtggctgttttcaagattctgtctttatctttcaatggtttgattataatgtgtttaattgtggatatctttgagtttattatatttggatttcattgagctccttggttgtgtagatttatgtctttcatcaagttggggaagttttcagccattttatcttcagctattctttctgtcgccttctcttttttccttctgagattgtactggcatacctcattttatcatgcttcaaagataatgcatttaaaaaaatatattaatagatttgtggcaaccctgtgtcaggcaagtctgttggcaccatttttccaacagcatggtgcttactttgtatctctgtgtcacattttggtaattctcacagtatttcgaactttttcaatattatgtctattatggtgatctgtgatcagtgatctttgctgttactgttaaaattgttttggggcatcattaacgatgttcatgtaagactataaatgtaatgagtaaatgttgcgtgttttctactgctgctctgcccgactgctctttccttctccttgggctttcctgttctctgagaaacagcaatatggaaattaagccaattaataaccctacagtggcctcttaagtgttcaagtgaaaggaaaaattgcatgtctttcactttaagtcaaaagctagaaatgattaagcttactgaggaatgcatgtcaaaagctaagataggctgaaggctaggcctcttgcctcaaacaattagccaagt

SEQ ID NO: 30989 - DNA, 1023 bp, Homo sapiens
ctctgttgtaggcatatgaaatatttcaaatattagaacaaaagtcaatgtctttcaaaaagaaaagtcaaatagattacaaggaatcagaatgaataagaagtaaaaagatatttgtgatatagtgaaagaatgtgtttttttttttctcaagggagggggtgaaaatgcaatttgaaactcttggtttaaatttgtgtttaaaaacgccatgggttaaatataaaatacatttaaaatggggaataagtttgagatattaaacattgacatattatccattggatcatttttagtttttgaggatttgggtttttttttttttgagttctgtttgtacagattgacatatcataacttctgttctttcttcaaggtcttccaaaggacaagatacttaaaaattttcaaatagaataaaactcattctattttgcaattctgttttgcagtatggatccattggaatcttttataagtataagctacattatgggacctttaatgatcctatttttcctctttcttgaagtattttacaatttcttcaccctaggaattattttaacaattatttgcaagagtgctgaagatgactaaaacaataagaaagcagaaaaatgatggaatcattgagaaggttgatgtaataataaagtaaataatcactattctcttattctttagttttcttattgtgttgcctaaagtattgcatcatttaagaaggtgtaaaagaagtctaaaggcacaatctttaggtttgtttgttacagctttcattgaacaaaaatgagaattcagaatttttcactttctactataatggcaaagagaataattgacagagaagacttttcacaattattagacaaatcagaagatcagtgcaaagagccaaatagaagcactgtaggccgtaatgatgtgggtgaaattaataatataagtgaaatctcaagactgagtctttggatgatgatactctagatcttctcaaacaccttaattttgatgagtgag

SEQ ID NO: 30990 - DNA, 1091 bp, Homo sapiens
tttccttggcagaaaagcacatttctgtatcatttggtctccttacaactaaaacagcatagtactcaaaacatgaatccgttatcaagtatttcctgtgttatgcttataaagatattagtttctttgagggataaagaatatgaaactatctttttatgggcagagacctcacattttaggtagggaatttatattgacattcttgagacaaaaggcagtccaagacagcagacactgaaatcttaaacactgagtcacatataagataagaacaatgcaaattcagagctgggatatgagggctttgaaggataggaagggtttagatgagataagctagggaatgaactaaagtagaagtagagaggaataaaagagcatagagttggttgtggctaatgagttggccaaactggatgaaatgaaacgtatttgcacgaccaggaggatttttatagacgctgtatgtggtgggtttctggagaacctttaaggccaagaagagcctgaacatgtttcagtagaaagtagaaagcaatacatggtagaattttgagtagtttaaacatttttgatatttggaagatattttttgatatttttgatatttagatatttgatattgatgcaaacgctattaggagggaaaacaacaacatgactggtagtattcaggatataaagtggcagagggtaagggactaggatgataacaggtgagccatttgagtccctaagaagtgagagatttaatctaaaacttctattgatcataaaaatacatgctcagaattggttgggtacttttatttatttatatcctgcttcctttcagaatttgagtgggtagagggattaatacagtgtgtatgggaggtttagtcagcgtacaatccagaaaacctgccttagactatatctacatacctgggctttcatgttgaaaatgtatgctgatgtgtagggaagtacagtatatatagatggagcatttactatttcactattaactgaaaaataatccagccaacctagttacaagtggtgacccttgttctttgttaaaggaaaaaataatcacatatagg

SEQ ID NO: 30991 - DNA, 1378 bp, Homo sapiens
tagaacccttgccagtattgaggtgttaagttttagttggttaattggccctcaaaagatggaaatttgagaatgtagcaaaatatgaatcactggttcttttagatctccagaggtctctgagtagctgatagaaattttattttaaacaagtttatcttatgagaagggaaatggatcgaggtaaaatggtgttactctctttttatcactttgttttaaagacaaaaatacttttctaaaaattgagtctgaagcctctaatatatcctttaaggtgattgctaacttgatctgttactgttcaccagggaggtaaagaagtccccagattctgcttacttatatgctgctgactgagcagtgatggggagagggtctgctggacacacacacattaggccacctctcctagggatgtcatgtgtaagactcgggggttggtggttggtgtcctaacctgattcttaccttctggatagtcatctggcttctgcagaatatatgtagttatgtagtctctcacagcagttggaagagttggcttccttaattttattattttaatgaaataggagtctaagcactacaatttctgggaggaagaaaaacaagttatgtgaaaaatgtttttatttgttgttcacttaagcaaaggctttttttgagttttaaacattttgatggatttatagggcttctgttcttaaaataaactaagtttggaaaggtactcttaccagcagagaacattgctcccagcctgctgccattgcccttctctctgaaccttctgtgctgctgaaccaagatcactcctcatacccctgcccccagagcctggtgcatctcatctgggatatgggctgtattgtgaccatcttaacacttcatcccctgtctccaaggaaatgggaggcagagactcatggctgagaagttattttgcaaatggatattttggatggaaaaaaatttaaaggaaaacaacttttccttccccctttccccttttaatgtaagaggctttgatgacaggttctagagtttctggggtttcatcccaaaggcctgaatctggaacatgccctggatccccccacctcagtcctcaagctttctggacccctgaagccaaggcagattctttctcccagcgtcatttctggggcaggaggaatctcttttctggtttacctgggccagacctaagaatagcaggatctctgaaaccacagggttttgatgtgtttttatcaagccaaatgtacaattgccaactgacactctggataattgagcacagggggtgccctcgtacattgtaccgtcactcccttctgaacagttggcagaccaaactgtttggaagctcaga

SEQ ID NO: 30992 - DNA, 1035 bp, Homo sapiens
ttgcttgttattaagtcatctgggaattctcagtgttttccatttatgactttttctagtgtgtcctacattttccattgatccattgatagaagtggtcatcctctttcattcttctttttctgatttttacagcattacttgcatttatatttctactgaatctattcaccaagtccccatattattatcacaattcatatagtctaatttttaataggttgtaaacctttatttcaatcacttgttttttcttcagtgcattagttttctttaatctgtcctagaagatttgaggatcttcggtaggttattctaatgcaagacacatcttttccattaatctctcctttaatattttcctttctttttttttgtaacttcctttccctagtacatcttgtctattaatttccatcaaaagaactgtgagtgctgaccacaaatgtgacactgaaaaggaggactcataagaagagaaaaataccccttgtagattgcttctgaaaatatgtggccttgttctactctctttgatgatttttatctcttcctccaaatctaaaatcaggccaaaatacccaactgtcacaactggatcaagccagctgcaccttttaccaccaagtacaaggctcactgcaacccacggatacccatctaacttcgggacagccatgatccccaataggcagggatgacacccacgaccagcaagaagcagctacagaaaattgatcctcagtgcctctgcctcccataaagatttatggggatcatgtctctcggagaaatgaggcagaatagggaattagggtaatcaagggttaaggcataagtaaaagaacagtagatgcagccagttctaggcaagattaggcagcatttaggccacatccttaatcctgtgataacaagacagtagtctccacttcagcctctgattggctggggaccaagtctccacttcagtctctgattggtcacaggctaatccttcatagggtgtaaccaattggaggcctctaaatggca

SEQ ID NO: 30993 - DNA, 1050 bp, Homo sapiens
aatttctgggttcagttttattatctaggttctactgtcagttttagagactttgggaaagtattagaggacctgagtgtcataacttttttaaaaaatttaataataatggggtagttgagtgatagatgtcatttggccactccagcaaatcatcccagttaaaacctctttatatgaaagatatttcaaaattcagtcggtaggtcatgtatttcacaccgtatttgaaataggtaaacttacatgtaaatgaattggatggttttttgaaagttgattatctatcccctatcaaattgtgccaaacaaataaagaggagagaaaaagtgacaaaatcagtggttatttttgcgtaatcagccagcgttttatgatgcaacattttgtttctataagaaagcatttagtttgccgaataattgaggttagtgaggttgtgaaagtaacaaatccagaccttaaaacttgaaagtaatttatttttctgtttgtttttaagccttggagtagaaccagtggataaagatgtcattcgtaaacctcctcgcaactggaaagacagcattttgactaaaaacttgatacttaaaatacttgtttcatcaataatcattgtttgtgggactttgtttgtcttctggcgtgaggtatattcactggccaagctgctatattaacatgaattctgtatatctgataggattcttagttattttgatgggttacccagaaggctgggaagttaagggagctcttttagtgaaaaatataagaacattttaaaagagtttgatttccatctttatggataaataaaattattgattcatgtattagaataaatctgcagagaagtatcagttacaataaaaatacatgaaaatttagagagaagttggaaaatctgagtcttaaaatcatagagccactttattatttttaaataataacagtattttaatatctaatacatagttcatgagaagttttttttttactttttattatgtagattacagctattcactaggtgatttataggaaat

SEQ ID NO: 30994 - DNA, 1044 bp, Homo sapiens
aagggcaagttcaagaggatatgaagatttgagaactttttaactattcattgactaaaaatgaacattaatgttaaagacttaagactttaacctgctggcagtcccaaatgaaattatgcaactttgatatcatattccttgatttaaattggcttttgtgattgagtgaaactttataaagcatatggtcagttatttaattaaaaaggcaaaacctgaaccaccttctgcacttaaagaagtctaacagtacaaatacactatctatcttagatagatatatttttttttatttttaaatattgtactatttatggtggtggggctttcttactaatacacaaataaatttaatcatttcaaaggcattctatttggtttagaagttgattcccaggagtgccatatttcagctactgtatttcctttttcttgtaatgtaagcagctcagataccatgtgctatcatttttgtatcaagttttttgcacaggatgtgaccactgtcagatcactgttcttttctttctttttgtgattgaaaagcctatactacaatttgaagtaaatttttgtttttcttagtaagtgtaaatggttgctttatttttattttaaaaaggtatgtctttggtttggcagaattcatgcagggctatcaagtggtgttctagggtaacagtgtccataattaacgcttagtcatagagtcaaaaacatttaagactgattgggttgaagtttataataaattatattaacatgtcttcctttttgaggtaaagatatatactttgtcaaatatcattttgtcatcctctaaatataaatccaaatacctcagctaagtaattctattttattatttttactgttatgtatgtttttaatcatatttcttaggaagtataggctactggacttagaataaaaagtccccaaacccaaacaaatggtttatgaaccagagtatatgtggaagattctttgctggtcttgctctgtgtgcatctgaagcttctttggcctagattttagcac

SEQ ID NO: 30995 - DNA, 1033 bp, Homo sapiens
tacagaaacttcatataatagagtatcacatggctaatgaacacatggaaatggaagattggaaagaacccaaatgctcataagctgtgtaatgaaaaaaaatgttcttaagtgtataatggtaatataccaaaatagaaaaatgttacagcaatgagaaatgaatgatcaactactcacagcaatgtgaatgaatctcatgtggaataaaagccagatgaaagaattcatttctaaagtaataattcagttaaaactattgtgttgttaaacaggagagtgattatagagagttgcagagcgagtgactggaaccagacactaggagaagcttctagggtggcgataatgattcatctggatcttctttgcatggatgtatagaccttgcaaaaatttatcatgctgtacgattatttgggcactttactgtgtttatactcaaggaagcatgaattgcaaaggaacaagatgaaactttaggggttatggatacattgattattttaattgtaggatgacttcacagatgtagacatctcaaaactcatcaaagtacacactttatgtgcactttactgtacactacttatttctcagtaaagccattacattttttttaaaaaactccccaacagcaccatttatgcttgagtagaaatgtaatttcagcaaaacattaataatgtagctagtttgaattttattggtgtgggtaaagttttaataaatcccttgtttgagactgacttacgctccactttctagttttgtacccctggaaatgtgctaaaggtagattgtcagttgtgttaccaagcattataaaaatgacttataaaattgcatctaagcttaaactatatataaatgaactataaacacctgatggggacaccatatcttggggcttccctgagtgcagtgtcttgtaagtaggatgtcccttgcagggacctagctatgtttatggaattattataagaaagactggatcctatagggaacggggcttttaagctactgaaacctt

SEQ ID NO: 30996 - DNA, 1075 bp, Homo sapiens
taacccaagctaacaaagatttacttctttgttttcttctaagagctgtatagctttaattgcgttaatttttgtatttggtgtgaagtagggttctaaattcattcctttgcatgtgaatatccagttgtgccagcatcatttgttgaaaaaactgttctttccacttgaattgtttcgacacccttgtcaaaaatcagtttaccatgactgtttagttttttcctggactcataattctgttctgttgatcctgtatgcctaaccttatgccagtaccatattgtcttgattattatagctttgtgctgttttgaaacttagaaatacgagtctctgaattttatttttcagtattattttgggtattcctggtctcttgcatttccatatgaattttagagtcagttgttaatttttttttaaaagacagctgcccggcctgaccagcatgatgaaatcctgtctctaccaaaaagtacaaaaattagttgggcatggcggcgctcccctttagtcctacctacttgggaagctgcagtgggagaattgcttgaaccctggaggcggagactgcagtgaacagagatcatgccactgtactccagcctgggcgacagagtaagaccgtgtctcaaaaaaaaaaaaaaaaaaggcagctgacagtttggtaggcattacattgaatctgtagatccattagtggagtattgccatcttaacagcattgtcttctgattcatgaacatgtgttttcatttatttacatcttttaaaatttctttcaacagtgttctgttgatttcagtgtatacaccttgaatcttaacttctccctgaaagagtttacattttccagatggtgatagttatcatttcattgggttatatacattattaaatggcactgagactttttattatacttacctattttatatggccaattctaatctaggtttaaagtactcatcagcagtgttaatgtaaaaaataaatggccaacattaaaattttctgttgtttcagaatagttaattgaaccttgtctctagaaacatgtctacgtacaaca

SEQ ID NO: 30997 - DNA, 1053 bp, Homo sapiens
taaaatactcgtcatgggagtaggattatgggtttataaaggcaagagtaacctgaacatttataagtaaacatattcaaagatattctggcctattttaattccaaattaggcatgtttcacaaactttttaacaaatttttaagtagtcataaaatttcacttcccagttcttatcactttttaattttaatttctttggattaatgtcatcattaaaataggaatacatattggatttttctgactaaaaacctttaaaagaattttttacagaattactgtaagacacaatttctagactctattttataaaattttgctgatttaatcagtgattatgaaattaaagtgacaaaaataagcattacattttactgtattatagtagcaccagtcaaaatttttttttttttaagtggccttatggagacatttgcagcatcagccctgttggaaaaggacaaggaacggagttcaacctcacatttcgtaaaggcagtggaaaaaagtcagaaactttaaaattttctacagagcacagaacagaacttcttacagaagcattggtaagaagattccatgttcataaataaaatttctttcttctctttttaaaatgaagtagttacatagaagtagagaaattaatgttctctgcccctgtacccactatgattatttttttcttactgacctttaacttgaccctgtgaaacgttcacttttctctaacaggctggaaaatcttttatatttgcaagtttattagttttttttaattgcatatgcaggagaaagcattgtatgtttatcttgttcttcaataaggtttcatactctttttattgaatattcttaaactataacttgaataacagtttttagtgtccaggttaccaagtcaggattttacttgctttgagtagaagggagtgagccaagttttccttaccagtctgttgtcataaactgtggttatgttttctctttcagagatttagaactgatttttcagagggaaaaatcacaggaagggtaaatatttaacat

SEQ ID NO: 30998 - DNA, 1706 bp, Homo sapiens
taagattcacattttaaattcaatttattgtgcgtacttaaattttgtaatatttgtttctcaaatcaaagttagatctaaaacagttttagtctcattcttcagcatgcagtgtgttctacagaacctgattcagtaatgcattcttctatctataatgggtttggcagtggttgagtatgaattgagatgtcctgtagaagcaatcttgatctcagtttttgttgatcacacatacattgtttctccttaatcttctccttacttatggtagctattgccatattcaaggaaaataactttaatatctttctaaaacaagtgggtttcttatggattaccagaatacgtaagcatagcagaacaaatattatagtcttgtgtatctatctgaaattgggatcaatgttcaattctttagagctccagaataatagattactgctaatttatataagtgatatattcaatataaagaatcattaggctttcaagtgactatgtagtatagtaaagagaatactgaactttgagttggttaacttctgagcctagtttcatcacttgttaatccaagttacggtttttagaaccttactttcctctttcataaatcggaataacaatacctcccttctctatcttatagggtttttttgatatacaagcaaaataatagtaaaggcactatatacatatatggtcaggataatactggtatagcatttgaacagttgaaaaatctacagatatgaatgattttcacagttattaaaaattacaagctcctggcttcaggtagttaaaccgatttctaaaataacagttctttcaagctgttgaatataattatcatactgtagataagtttttggcatcagacttcatatgtaacatttatccagcataagcatgaacacaaagctctagtcttagctaaaactatggataaaaatctgctattttaaaacaattgagagggaaaaggatatttttaatataaaagttttactggtttgttggtatcatttacatggggtattactaaagttttgagcaaataatgatgccagataaatgttggtcaagaagatcttttggttagcatcaatggcttatcccctttctgcgtgggtactatttttaacagtaatttctttagggaacagcaaataatctttgtgactattttattaatagaaacactaacatcaaagtttggaatgatcttatgctgtagttagagtctgaaaactaatcattgtcaagattaactggcgattcttgaaacaatctgcatttcttatatagtcaatgtttatgaagtcagttccatttgcagctgatgctctgtgctggattagtagtaacctttggctaatgtataaggttgctttttctttgttattttcagttaagggatttgtttagctagttagagctgttagcctgagtctccaattcagtcacttagtttatggagagctttttgtcctttttctgtatagcatttacatttttattactctggactgccagccttttgtcctggcggggaggagggattgaagaaagtacttcttaattagaaagtttaggaaaagatttgtcattaaaccaaattttgaattatttatatattttattcaagccactttgcattagttttcatgatagtgcacagaattaaaatttgtaggaaacat

SEQ ID NO: 30999 - DNA, 1050 bp, Homo sapiens
tgaaactgttgctttatgccacatgtatttttatgccatcaagttcaggaactataactgttaagattggggtgactagagatgctcctaaaattaaggcttttcatagagtgatagtctgaggaactaaaattacattaaagactttattaaggcttagagatgcttattttaaaaatacttcattacaggcttagaaataattgcatacttcctagatggaaatggagtcttaaaagaggcagatgataacataagacttgtgagaagtgagtgtccaagttagctgataggaggaccttccctcctatcaaatgtggtaacctcttccctctttttatctaccaatctcacccttaccctgcacccccttcctggacacacacatacacacacacaggacagggaaacagtcattttggggagtttgcaaagcttctttaagataactcacagtactcactctggaaactgacatttcaattataccttggccaataaagaaaaatatgtcctttgaaaactcccccacactacttttaaagtatacagtatgtacatagtatatccttaagtatatgccttggatttctctctcagttgtgttgcgccccatagaacttccttggaactctgaaatgagactttctaggaggattgcagacttgaaagtaagcatatgtgaaacccattcatccccagttagacttgtgcccaaatgttttacaataattactccaagcatatgaggaagatactttgaaaatgctcagtcatagcttggcagtttgcagtattctttcttgggtagtctgtaaagtcctaacatatatagattgttgctgattccatatgctttacccagaagtccagcagttcttatctccccaacctaaagttttgtatctgacaagagaattgtggtgtttttttttgtttgttttttgttttttgagatggagtctcaccctgtcgcccaggctggagtgcaatggcgtgattttggctcactgcaacctctgcctcccgagttcaagcgactctccagcc

SEQ ID NO: 31000 - DNA, 1029 bp, Homo sapiens
tctgcctttctagggagattagacaagttatataaagaatgtaattttcaggattcattaaggaattgcaataattgacagatttctatgatttttctccttaatgtttataaaatggcattacttcttatgggctgttggtttattttgtctagtaatagtaataccttaatttttatttctattcacttctgaccagattctcatttatttcaatagtgcacagataaacttgaacgagataggttgattctcttccttaacaagttgatccttaataaggtacagtagtttcgcatacatacattgttatttccaagtcatataagtatgtaagataaactcacagtttgagttgattatccagggagtgttcttttctgtcttctcctttttagacagaaagttctgtgtgctctaatctcctggagggagaggtttttgtcagtattccctgtatagtctgtcttaatattgtgggtgcagaatgaattaatgataataaaattctgaatgacgaataatggatgacttttaatacattaaaatgatttttaataataaaaattagcttatttttctttagggactctttagggttaaattttaagtaaaatatatgcttgacataaaatggaaagtctttatcagtgtacattttgttgataaaaagtaattggaagttataagattagtcattttactctgtattttctttttaaagacattttaataggttcatgctcatttcaaacaagaggaattcacagttgtaatatataacattaattcacaatttatgttgaagtgtaagcggattttcatttcttaaaactttgatactaataccaatttgcatagttttattcttaagtaatgcaaatgttttaaactgaagtgtaattataagtacaaagaaattttaattgaaattatagtctcttaacttctaagaaattaccagttaagtttatgaaaacaaactggaacattaaaagattttttaatatagcagactttatttctgat

SEQ ID NO: 31001 - DNA, 1047 bp, Homo sapiens
agtcatatttttcattgggaaaaaatatataagaatattaataaattagcaacacagttcttctgtgtaatatttttctcctgagattggcaaatataaggccccatctaaaagacgaattgctctatgtgctgataagtttctgcttagctgaggccagatcctagactacagtaagttaattgaaataaataccatctagcgagcttctttggataatagccagtttcagtttcctagctacaccctcatgcattcagatgctataccatttgcccttctaatggctgattttttaataggaaggactgggattatcagcccttttctctatgatcttctttacagatgagtatcatagataagttttttccatgtttgtacaataaaatgcccaaagtaccatatttaaaagctctcattttaggataatcattgagttattctatagatgattcatgtaactatcttacatgattatgtatctcaaccttctctttaaaataatacctcataaagcttgaatggaggtttttatgattgtaggcgcctgatgatagagaagattgctgcccatctcgcggatttcacacctcgtcttcagagtaacacaagagcactttatcagtattgccccattcctataatcaactatccacaactcgaaaatgaactattttgtaatatttattacctcaaacaactgtgtgatacactccggtttccagattggccaattaaagacccggtaagtcagcagtttaatttgtgccaccttaagccataaaaatagcctctaaacacttctgggtattttgtcctcctgcagtaagatggttaatagctttcttaagtattccttcttaagcactaagcactgtgtgactctgagtatagtttattatatttgggtagatctcacactgaaagataattttttaagggagtattaagagtattgcaatcttgatcttttgtggcaaagacaaaacaaatttcatgcagataacataattatatatatatagtattatatactataatacc

SEQ ID NO: 31002 - DNA, 1028 bp, Homo sapiens
cacaaagaccatgaattaggaattggccagctctttcaatatagcagccacatttaaattcacatatgcccctcgatcatttttttgccatgttcaaaagtgaagctctttagtatgtttatgaaccaaagttatagagatatctatattgagaggatgctatttctaacagttacagaagcctgaaaagaaggtttttactgtccatctctaatgaatatgtaattttaaggagaaacctgtgtgttcggtgttcctctgagagtgtgttctgtttgggcatgtgctgcactctactttgtgtatatggcagggataaccctagtcaaagaaattgacagaagagtagtaactatgtggttgaatcctgtatctgtggctgaggctgccaggaaagcaggagtgagtgaaaaggtaactttggtcttgggtttggcaagccaaataccgtgatagtatataagattttgtttttcaaagtcttttttgttttcagaaggtttaagattttgttgagattgaagacagttgacctacatgattgttgtttaaacaggctggctacagaataaggtgattaagagcctgagtggtgttatttgatggttccagccataccactgaccaggtctgtgaccttgggcagtacctcatgactctgcctcagttgctgcatttatagaatagtcatagcagctgcctctgaggcagaggttctgatgagttaatacatatatagaatgcttaacataatgtctggcacatttcaagtgcttagaaattagttactatcattagcttagtaaaacatatttttaaaacatgattagcttgctgagtatttaccagtgctactttccatagtcatattcctccaataggatttctactacatacatagtttgcttggaaaatgcagtcctcaaaagctaaaacttagggaaagcacatagcagtttcctcctatatcacctttctttttggacacattccaattttaatgttaatttaagatgcattttattatg

SEQ ID NO: 31003 - DNA, 2130 bp, Homo sapiens
aagataaacacatccccctaaattatcattagtatccttagatgagagaagatatggtacaaatgatacaggaacaaggtgcaaagtatttagatgatcaggaattcttgcaaatggagatggtaatagaaatgaaaatcttaatagaagtgttggaaaataaagttgaaagaaatcatccagagaatagagcagaaaactaaaatagtagataactggagaaagaagataaaggacaaatccagatggttcaacttccaaataataggagttccagatagtccaggaaaaacaaaccaaacaaggaagtaaccagattcttcaaggacatttcccagaactgaaaatgtgagttttcattttgaaagagtccactaaaaactcagcacaagggatgagaacagattcacattaaggcacactgtgaaattttacaagctaggagacactggagcaataccttaaaatgttgaaagacaattctaactttagacttctttaccaagttaaactatcgattaagagtatatgtgtagcttcccacaattatatgccctttgctttgtcatttttataaagaatataattttgataaggaacattttcagaaatgaaagttctcaaaatttacctttgccgtaccctttgcaaaactactggaagatgttcttctaaccacagcaagagagtaagtttaaaaataattgatgacagtgttttaaactgtcatgtgcatcagaattactggagggcttgttaaagcaaattgttggactccacattcaagatttctgattcagtgggtgattatagggtagggcctaagaaattgcatttctattaaattctcaggtggtcctgttgttgatccatagacactttagaactagtgagctatagcatacaggaaacagtggattaatacagaataaagaaattaagagactttgtagtataatgatgaaggaagagcctaggaagggagctgtatgtgcagtaagtctagagacaatcatgtcagattctaggagatacatctttaagaagatgaaattgatagaatacctcatgaatatgaatgtatctagaggaactttagataactagtggaaagttggcggttgaatttgtgaaaatacataggaaattaagcatcaggagaaacatacttattaacttcagggttgggagttagaggaaagggtaagttttaatatattgcatggcccagttgtgaagagttaacatctaaccaagatgactatctaacaatattgggaagttggtgggatggaagatgtctgcgtgcagtggggatgaatgctaagagcaaaatctgattcacgtaattgactaaaactgaaaagaaataacaatgttagcatgttgtttaggaatatgatggtaatggacttaaaagtgagggagaggaaaatgggggtggaggctgaatttcctaacaagcctggtggaactatttgactccttaaagtgaagatgaatgggaattaaccatagacttaaactgcagattaccagtaactagttaaagcacctcttagagtctttggcatacagtaggtgcttactaaaagtatacatcatctattgtgggcagaggcaacaagagaatggaattccagccatgaatttactctgatgatggagatctgagtgttaaaacattaaatatttacatattctaccaaagcatagaaaaatgttgaaatttaactttgacccttaacatttaagtagtagtcgcaatcttggctgcaaatcagaatacatagcttttaaaaaccaatcttgtttcatatgctacacttgggagagtttttttaaacggtgcctgggtaatttagtttcatctggtaaaaaccagcctgtaagcatcctcctctttgaaacgattagtaatgattatattttggtgtttattttctgtgatgatgtatgtctatttgtattactaatacctaaaagactgtaagctttaaaacatatttttctttgttttaagccgcttgatggcattgaaacgaatgggaattgtaagcgactatgaggtatgataaaccctttccaagtttttgtaagattaattcagtaaattaaaataacttctgg

SEQ ID NO: 31004 - DNA, 1031 bp, Homo sapiens
aacagggtttcactctgtcacccaggctggagtgcagaggcacaaaggcacaatctcggctaactgcagtcttccaggttcaagtgatcctcctacctcagcctcccaggtagctgtgactacaagcacccaccaccacgcccagctaatgtttttgtattttttgtagaaacaaagtctccttgttttccaggctggtcttgaactcctgggctcgagcagtctgcccatatcgaccttctaaagtgctaggagttacaggcatgagccactgcacacggcctatagtacacattttttaaagtagaatttctgaatttacgaaatatttactaaatttctcctgcaaaaggattatacatttgtatcatagtttaggagtacctggttcacccatacctttgataactttgagtatcatcaaactctgtaatctgtcattctggtgggtaaaaaacaggcatttaatttttctttttatttgtgaaaaaggttgaacacttacattcttctgtgaattatctgctaatagttgttgctcttttttgtcttgtatattaagaatgtgtatttgcaaatatttttgtcatttatcttttttatgtgattttctctgtatagaagcttttattatgttagtgcaaaggtaattgtggattttgccattacttttaacaaaaactgcaattacttttgcgccaacctaataaaagacatcagattggccgggtgcagtggctcacgcctgtaatcccaacaatttgggaggccaaggcaggcggattgcttgagcccaggaatttgagaccagcttgggcaacatggcaaagccccatctttacaaaaaaaaaatacaaaaattagccaagcgtggtggtgcttgcctgtagtcgcagctacttgggaggctgagatgggattgcttgagcctgggagggcgaggctacagtgagccatgatcacgccaccttactccagcctgggcaacagagtaaaaagtatcagatttgactgggaagagggcaggaggg

SEQ ID NO: 31005 - DNA, 1035 bp, Homo sapiens
gagctcctaaaatgcttgtaatttcctgagtaataggggtgcttattaacgctatttctttccccctctcttcttgctgtctcttgtttttttttaaattattattatttttatgataaaagattgttttgtttcaacagctttaggagtacaagtggtatttttggctacatggatgagctgtagagtggtgaagtcagtctggatttagtgtaactgtcacctgaatagtgtgcattgtactcagcaggtattttttcatccctcacccccatcccaacctccccgcttctgagtctgtagtatccattatactactctgtctgccttcgcatacccatcttgctgtcttttgaattgataagtctttcttcctcactccaagtcccccctacctgtttagaggttgtttgctctatgtctgtctgcttccttagtagctgctcctgctattttaacaggcatcctttaaaaaaaaaatctctatttgaatatgctccaaaattcaaagacatatctctctggcttttctatttttcctccacaaattacacatttttcttatagttttaaacaatgtttttcttttcccatctgtttatcaatatcttctctcattgttactttcttccatttcgaggttttcatctgctatcgtttttttttttttctttctttctgcagtacgtactttagaatttcctttagcgggtctttctctcttctaatagcaaactccgtaatagacatcagtgataacagagataaataaggctcactcccatacaatatgtaattgcaatgtaaactaagtacaaaattagaggttaggacaaagtgttgagagcacagagaggggagactaactctagagagtgaggagagcgtctcaggaacaataagtgtacattaaattatggaaggctatgagtatattcatggaacattcatcagctcagtgggctggagcttaggcgcgggttggtgccagatggagctagagaggtgaattagctagatggtgggctgtgacga

SEQ ID NO: 31006 - DNA, 1050 bp, Homo sapiens
tagctgataacttgctctttaggttttgctaattcaagttctgatcaacatttcttaaaatagtatgtaagaaagtcttgtttcttaagcagatatttcatgtttctgtagagaagaggcaagaaaaatcaagaggaagagagtttgagagtataatgaaaagtagagaaacaaaaaagaaaagatgaaggggtcaaggagttatgacattttgagaactaaatgagtagatttggagacttctctgaacctccgaacttctgatcacttatctgtaaagtgggaggcttagactaggtgatctccattcttgcatacagtgttcaaagaaacataaaacaccatatgtattttccatctgcagttgattgaatgtgcagatgtggaatctgtggatatggagggctgactgtactacccaattttatataaaagacttgagcattcataaattttgatatccaaggggaatcctggaaccaatcccttctaggtacagaaggccaactgtattatgtgttataagtaatcaagaaactatttgaagtatacaagaggatgtgtgtaggttacatgcaaatacaatggcattttattgcaaggaacttgagcatctgtggattttgttttcttcaggggtcctgggaccagtccctcaagtataccaagggttgactgtacagagaaacctattacagttgttgttttactcaagaaataccatataagacaagaagagtggtttggtggcagaaacatttgtctgagattcagaaaagatagattctaatactggctctcctaccaacttgttgatcatttcacctttctggacctcagtttacccatttataagaagtctcagtttactcacctatataaagtgcatcaagtgatctgtaaggttgtttcaactcttcctagtctctgattctagaattcttaaatggatgtatgtttttgccctaaaaaaacaacaaaaattagcccagaatgtcatcagatctgcacactggaatcatataacatgggaaaagcccaccaaaggcc

SEQ ID NO: 31007 - DNA, 1051 bp, Homo sapiens
ataagatatcttccctcctggagcatatagactagttagggaatctagacaatagtaaaaaaaaaaaaaaaaatttattatcagcatgagatccctactaagcagagaattaatggggttactatgatggcatgtgattagtagctagtttgggtggtcaagaaagcatctcagaatcgatgacattaggttgctttgtgaatgacacctgccaaggtgaatagaaaagaatttgcagatagaagaacagcagaggtaaaggccctgaagtagggacctgcctgagattgttgaggaatagaaagagggccaattgtggtcagagcatagtggtgagagagaaccagtggaatgagatgaggtatgcatgcagttgggcagcaaaagtaagaagtttgggttttatcttaagtgtaatgaggagcccattggaaaattctaaacagataaataacatgatattctttatgtcttgaaaagatacctgactgctttgtggagaattgattgtaggagtttaggagtggaagcagtgtttccagttaggagttgattacatagtcaggcaagaagagatggtgacaaattggactaaggtggtagtcatggatatggggcaatatgagaatcaggaaacatcttggaagtaaagtcaaaaggattcgttcatgaattggatgatatagagtgagagaggcaagttcagtcaacccagagagtcaacagagtaaaagatgtcctaaccagataggttttaggtccaaaattgctcattataaagaaagagataatgagctttttgtgacctcagtgctgatggcaacaacagcatcatatgtagatcctgttgtggttagaacacacggacagtgagaaatcacaaggacaaaaaactagggccatctctggaagtggtacctgtttcattcatttattcattcatcaaatatgtaatatctgctaggcatagataagtgttctgaatataaaaagataaatttctacctcagatgctcacactcttattccttatgggaattttcacaaacag

SEQ ID NO: 31008 - DNA, 1041 bp, Homo sapiens
tgtaattggagaggctgatgactcatatgcctacctggcaagtagtcagcatgaaatgaaacatcctgagagcattttgtgaactataaagccccttgtcaggttgagttgttattattgttatctagaaaggccctccttacttttcagaagagcagaagtgtgcagtgacttgcccaaaagcattatttggtaaaaccaggcttggaatccaagatgttccaacctccagtccagattcttcctgatcctgtgggacattgagagagccaggagggagatagtgagtgcaatgttaaggccaccactggcttctgggcaacttggttacattactttgccttgtaatttcatgggaaaacgtaattacaggccagaagttatgatgttggataagcaacatcagcattgcagctgggcccgctgaagaaaagaaaacccacatgttggtggggtacacagttcaccaaggccccctgaatgaaaataatttgttgccaaaaaacggtaacaggactgtctattggggaacaacctctcttactaacatgaaagagctggacggataactttaaaactgagaagggctcttgtccaaattgactattttccccccaaaaaaagtatccttgtcttgttttcattcctgctgtttctagcatgtctaatgtctgagtgcatatctacccttaatgtctagttcaaacattaggaaaagcacccccctttttttgttttggttttctcttagtcatgtttaagttttctaaagaattttcctatatatcaaaggcaggcaaaaaacaaagcagaagtaatagaagaatcgttaaagctgtcaaattggtggagccaagatttaaatctcggagtatctgcccccagagcccttgcttttttgagttcattaaatgcagaataacatttgcattcttaaaacaggaattacacacacaccagagtcaaggggcttagaaccctcatggggatttatatttatgcacaaagaaatcacatgtttttccctgtgttcccagaccc

SEQ ID NO: 31009 - DNA, 1024 bp, Homo sapiens
ttaatggggaaggaagatctacttagaagaaacttaaaattatgaaaaaaagataaaattctatttttatgaattttctgtgtaacaaatatgccttgtgtgtatataagcaattttaagagaaagtgtgtatgtatatgtgtgtatatataatttttgttatatatatatatatatatatacacacacacacatatataattttgtggtttttatatacataatttttattctaccaaacaatggagtgtatgagatgttaggattggggaagaggagagaattaaatcaggggcttccagtccttttattgtactactacaagctcccccggttacttgcaaaatgaatttaatttactgggttgttaaaagaacaccaaatatgtcatacagagccctggaatagagatagaaaaaaaacaagacagaagaaaagtcaagagaccaacaatagagaatcagttctccaaagatgtgaatcattgcttttgaatggcagagccccctggggagatgggtagagcagaacaataaatgaaagtagtcgagagcatagactctgcagccaagctgcctaggaacaaattgcagcttgccattccccagctatatgaccatgggcaagttcctgtacctctctgtgcttcttttcctcaattgcaacagggagctaataatactacctgcttcatgaggttgctgtgagaattaaatatgtcagtacaggcttagccctttgagcagtgtatagtacatattagccatttctcttttcatcaattcccttgttgcctttgccagatgcaaatgtcatgcccaatatggactgcaggcagccaaccaaataaacagaaggaggaggacctttccttcccttgggtcctgagctcatgtatgcattggaattttcagtaggaggagaccttcttgtgatgtctggacacccatcaatatgtagattccaccccacaacaattgtccatattcagacacgttttaaaaatcggttccacatttcaagc

SEQ ID NO: 31010 - DNA, 1056 bp, Homo sapiens
attggagcaaaaagaggttgattacagcggcctcagggttcaggcaatgcaaataaggtatagtctggttacaaatgtgtttagataacctttgggatagatattggatacaagttaggttttcctttggccccaaagcagcatcatagtagccttgtgctctagatatgcttattaggactcaaatgggttctgtctactctttctcactccatggaggcagcccttccgtgtgctcatgaaattagctgctgactctaaaatcctgtgagagcttgcctacttccagttctggttaggacttttcatttgagacagctaaagtggattttgtcgcttcaaaatttttacttttaacatcggtgattgtacttagttttggtttcaaaagtaatgtggatgtttttcacatcctctccaataagcaagtgaatatatgtttttgtaattgaagtatatcatacttacagagagatagaggttttatgtgttcacacagtgcaaccaacctgtgcaataagcaccaggtcaagaaactgagtattactgatacagaacaaggttcccctcctaacacatactcactgcattcaccttcaacataaccactattctaacaccataattttttctaaaacttcataggaatggaattatatttgtaaacatgttattttttaaagttcaaaaaaatagtaatttttaaaaattgggtagtttagaagatttgaaattaacattttgtcaagtccagtctatggcagtcaactttaaggttgatgttaagtaagtgctatattttggagggttcataaagtaggaaaaaacaaatgaagatatggttctgctgtaagatgaaaaaatcctttgctcccggtttaaagaaataaaggatcttgataaactgtctccagtttgaaggttgcattttataggcaatgccagtgagtgcgaggcacagtggaggaaatactttccttaactgaaaactgtcttttgacttctctggatgttagtatctatagctttagataacttactcaaaaagcagggtta

SEQ ID NO: 31011 - DNA, 1072 bp, Homo sapiens
caagaccagcctgtccaacatggtgacaccccatctctagccatttagaaaaatacaaaaattagccgggcatggtggcacacacctgtagtcccagctacttgggagtctgaggcaggagaacccaggaggcagaggttgcagtgagccaagattgtgccactacactccagcctgggcaacggagcgagactctgcgtcaaaataaataaataaataaaataacaaataaataaataaaatatagaagtctgtaacaagtgaataatatttattaacaaatgaaaacatatgctgtatttccagatggaaagactaaatatcacatacttgcataccctcccaaagttaactcataaatttagtaaaagtttaatcaaaatacagcctttttaaaagaatcaataaaatatttataaaattcttgagaaaaagtacatgcatgaaattttaaagttgtattatgaaaaagaaaagtagcaggggagtggctgagtcctacctaaaactataccatatttaaataacagtgatacacaggacaggatactggcacatatatagaagacccagaagagaacaaaattcagatacattgtcagctttctgtatatccattcaactacctaattatctacgtgatatgatatagatgcaaactgtgatagacattagggcacgagggtcctaggcttaataaatttaggtaagatacaagtagatttgttctttaaatcaaattaaattgaatttttatttgacaaataataattgtacatatttatggggtaaatgtagtgttttgatacatgtatactagatttagataagtataataaggcaaacttgccaaacaaatggctgagaaaggagtctttagttggacaactaggtagccattcagaaaaataatcaagtgagcttcttaatccattcaccaaaataaattcccagcttgactcaacttgattaaaagacatagacataactagataaattacaaaagtagacaaatttggaaatgtaaaaaattttaaaccatgacaaagaaatgtttttaaaaagccctaag

SEQ ID NO: 31012 - DNA, 1028 bp, Homo sapiens
cgtgtctttggccactgttacatccccagaacgttgactagtgttttatgagtagaagatgctttgtgaacatttgtttggttaattaggtaccagtttggtagccaatatatgatactaaaggtttatattgtgaacgtggaactgtattgaaacgttaatgttattgctgccatccccagggcaatagtctgaccttgattgaccttcccggccatgagagtttgaggcttcagttcttagagcggtttaagtcttcagccaggtaagaaggaaagaagtgaagtgggcttgtctaggtctgtatctgtatatcaaagccactcatgtgatttgctctggtggtgtttgggaggcagcatggtatcctgtggtagaccttgaggtgaccttggggtcagccagttctgggttgcaagtccaccttcacctggatgatgaggattttatgggattaaaatgcttaaaaagtgttttttagtgtttaggaaatgttaacccttcttgtcattgttactaaatgtttgcatttattctgaaggtgaatttaataatgtatatgactattaaaatctgaaaaaagaattttaaagctgggatgaatcctagcagtttttaaatgccaacatcatttatatatatagtgtttttttgttttttttttttgagatggagtctcactctgttgtcctggctggagtgcagtggtgtgatctcggctcactgcaacctccacctcctgggttcaagtgattctcctgcctcagcctcctgagtagctgggattacaggcacgcaccaccacaccctgctaatttttcataattttagtagagatggggtttcaccatgttggccaggcttgtctcgaactcctgacctcatgatccgctggcctcagcctcccaaagtgctggaattacaggcgtgagccactgcacctggcccatatatattctcaaattacgtaaaattgatgtttcaagaagtacagaacaatatttccatatttcttttagtgtgtgctc

SEQ ID NO: 31013 - DNA, 1374 bp, Homo sapiens
acttggagaaatggctggctaaaattgcctgagaggcagctctaaagcacaagacctggatgtgtgacacacagttttggaaaaaggtctgtggtagtctggagttgatgaggaaggggtacaagatgtggttagaaacatttctttgttctggaaacaaagtactgttgaaaccagcttggaattttttttttttttttttttaagttcagttctcccttatggctgcctttcaaacaagtaccttttatctgatgcctgtatcttccctttgttaaggtgtaacttgatgtagggtcaaggtttttgtgacaacaggcagactccacacagagaggatatgatgagaatatggccatcacctgaaaagttttcttatcttctgtgcttttggtccctggaaacaaatccgcctatgtatgaagctagttgatttccagttgcactatttccagttgcctctgaagttcacaggcaatacattgtctagtcctttgcgaatttctctgatttgtgggcacagttatgaagtttccccacatgtgaagacaggtacaaaatagcagagccaagcagacagtgggtctattcttcattagctcagtgacttgtccacactcgtcttagcacttacgtttcaaaagcttgtcacaaacccttggagtcattcccagataatagaactggaaatgataaatcccctaatgccaagggtctagtgtgttcttagtggttatactgggaagtgtgtggagatttaggtgctgctctgctgctctggatggctgaaggctcctgggccatcttcatgtgctgcttgaagagctcctattttgtactcctggctagaatgctgtggaacaaatacaaagtgaaaaaagttctctgtagatttctgaagtgcatattcattgatgccaagaaaaaaaaaaagttgcctttttgaagtgatgttttttgctgtcttcttaaacacaaggcttttttgaatgattagtatatttcatggtaaagaaaacagcctgtctggctcaaagcaattaaatagaatgtaatggtgagtacaaatgagtgcacatgtcaggactcaggtctaactccttgtctcctgagcctaaagattgcaacatacacaagaacacactcctattcctaccccacacactcagggacaagcccaactaaagcttacaaggagaccagggtggctctgtccaggggagaagccagttatggaacagtgcattgagagccatggtaggagaggcccacagttctctggagcatgcagcaggggcaccccacctggccttgaggatcagggggagtcaaaggataaagcatggggctgatgacgtctgagggagtgtgatc

SEQ ID NO: 31014 - DNA, 1048 bp, Homo sapiens
agcatgatcttggctcactgcaacctctgtcttctgggttcaagtgagtctcctgtctcagccttgcaagtagctgggattacaggcacacaccaccatgcccagctaatttttttgtatttttggtagagatgggatttcgccatgttggccaggctggtctcgaactcctgatctcaagtgatccccccgcctcagcctcccaaagtgctgggattacaggtgtgagccaccatgcctggcttattattcccatcttgatgtctgtgtgtactcaatgtttagcttccacttgcaaatgaaaacatgcagtatttggttctctgcttctgtgttaatttgcttaggataatagcctgcagctgcatccacattgctgcaaagaacattttgtttttcttttatggctgtgtagtattccatggtgtatatgtactacattttctttatccagtccaccatcaatgggtacataggttggtttcatgtctgctattgtgattggtgttgcgatgaacatgtgagcgcatgtgtctttttggtagaattatttattttccttcgagtatatacctggtaatggaattgctgaatcgattggtagtctcattctatttttagttatttgagaaatctccaaactgctttccacaggggttgaactaatttacattcccaccaacggtgttgccttttctccaccgcctcaccaacatctgttattttttgactttttaataatagccattctgactggtatgaggtggtatctcattttggttttgatttgcatttctctgatgattagtgatgttgaacatttttcaagttccttgtagtttatggatattagccctttgttggatgcatggtttgcaaatacgttctctcattctgtaagttgtcagttcgctctgtcggtagtttttttttctgtgcagaagctctttagttaggtcccaattgtcaatttttgtttttattgcatttgcttttgaggacatatctttttgagtcataaattctctgcctaggccagtgtccagaa

SEQ ID NO: 31015 - DNA, 1143 bp, Homo sapiens
ctttcagtgattcagtatataccagtgctgtatgatcatcatttttttaaacatctaaataaacttatctatatccattaagtagcattaatagttgtcatcatcttgtcaatctttattttaattatggtaaaatacacataaaatgttccaccttaaccatttttaaatgtatagtatagtaatgttaactatatgtacactgttgtgcaacagatctctagaacttttttatcttgtcaaactgaaactctataccattccctacttcttatttttgggtggaatattacagagcaaatcatagatatcatcttatttcccaacaggtaaggacttaaaaaataacaatatatcagtatcacattaatagaataataacttcttaatataatttaatatccagtctgttcacatttctccagttgtccagaaaactatctttttacaattgaatgtttgagtcagaatccagtcaaggttgatgtattgcatttggttgaaaggtgggtcaccattgaacaatgacagtagaaaacctgggaggctgagtaagtggatattaacctaccctccattaaaaaaaaatctctgtataatttttttcttatatgtttttaacatctaaaagtataattcggaaacaacttctccttctttgacatatgtttgcttgaattcatttcttttaatcagctattaaaattacataatacatgcttattttagaaaaatgagaaaatgcggataaaatgagaaataaataaatcacccataattctaccgttaagagatttacgatgaataaaattttggtgtaaatttcttctgactttgtgtatgcttacatacagtgtgcagtacattcatgtacttttgataggaaaaacctatatgcactgtgaatgggaaaggaggggtagttgcaaactttaaaaagtcctgagagtagcaaagtgttgataatttttgaagctgtgtgataggggttcatcatcttactctctctatatttgtgtatgcttgaaattttccatgaaacaataactttaaaatatatagaatgcttactaagtgacaggtactatgctaagcacgtcacagctttaaaatttttcctttttaaatatgacatgtcaacag

SEQ ID NO: 31016 - DNA, 1043 bp, Homo sapiens
cgtgctcggccaggaaggtatttttttatattatgtatgtgataaaatttacctacagtctgtgttcttagttggaagaatgtatatgaaggacttagcatatagtacatagtacctgacacttagtaagtatgcaatacatcctagatggtggtattattattattattattattgttaatgattattatgtttgttatctttttagaaagtatattgtctttaaaataatttaattttaattttatttctacaagatattcacataataaaatattttagaatcttttatatccaaggacttttagtaggtgctataatgaacacaggctgaataagatagcattcttgcctttaagagagattttggatcagctgcaattactcaaattactctagcctttaagagactagagtaatctagtagcaaggataagaaatgcatacaagcttctgtgaaaccagagagaacatgattagccaacagtgaattacagtatagatgctcttttaactgttttgttacaaaattcctataatttgcaaaatgactcatctattctgacccatcttttcttggtgtaggtcagatgtctgaaaattgtataaatgcttttttcctgcatttccagagagtattcctccaaaaagatatatggttccaacatgctccctgtttgctctgaaaaattctaatttcacaatccaggattgtggatactggggtggaagaacatgcaaaagactattatagagtaccttatttcaactggaaaaatgggggactatttttgtaatctttcagaagggtaagattctccaaacatcatgacgccatagaggattttacaacataaaaatgtgaagtttctggatggtaaaaggccctattaaaaaagactaatagggagaaaacagtttataatcagacaaaaggttaatgtaaattattaatatataaaaattccctacaaagataataaggaaaagataatctagtagaaaaataggcaaagaatgtagatagatacctcacagaatta

SEQ ID NO: 31017 - DNA, 1066 bp, Homo sapiens
ctaattaaaatattttgtcattagaaaaaaaatcacccagactaccattttttcaagtagtgtcttaccaggaaacacctagaattgaagagcaataaaatttatgataccagatcagaatagtaattcccactatatacttgaatcctgctttatcatgtccaaatttatatatgagtagataccaaagttgtagaaaagtgtttaagattagagattatttatttaaaagttgtccctgccagccagaagatttttctcacaactttttgttcaaatttctttccttgaactaggtctccgttttctttcattagtattctggggctattcaaccttcaccttcttgcagaagaaacatggctgctattttccttcttcttccctgtttctgattccctcttacagctttcctccatcctgattccatccttcctccaccttcttggaattccttgccacacaaggaagcccgttgtgcttctagtgttccactaccatttacttgaagaattctttatctctgttagtcttaggaggcctaaaaacaaagcttcattaaagccatagattaactacttacaactaaaaaacactgaattttccaaccagcagtatcacagatcacaggtattcttgtacagattaagtgactctagtattcttttttattaggcaaaagagatttcactagcagacctccaggagaattatattgaggcattaaataaattagtgtctgaaaatcaacaactacagaaagatttgatgaataccaaatctcagctggagatttctactcagatgtgcaaaaaacaaaatgacaggatctttaaaccaacacacagcagaacaactgagttcaagaatacagagttcaagtaaaattttttaaaagtttatttaaaatgtgtattggtacaatataattctcatttctttgagaataatttttgacttacagaaattaaatcttcatcaaaggactctatgtttaattctgaagtatagtgtgcacaagtaaagctatgatcatgttaaaaaatggctgggggaggtgtatagc

SEQ ID NO: 31018 - DNA, 1032 bp, Homo sapiens
ttacttattcatcacttcataccagtcagaatggctattattaaaatgtcaaaaaaaaaacatattggcaagggtgtggaggaaagggaatgcttatacactgctggtgggaatataaattatttcagccattatggaaagcaatttggtgatttctcaaagaacttaaaacagaaataccattcgacccagcaatctcattgttgggtatatccccaaagggatattaacttttctaccataaagacacatgcatgcgtatgttcattatagcactattcacaatagcaaaggcatggaatcaacctaaatactcatcaatggtagactgaataaagaaaatgtggtacatatacaccatggaatactatgaagccataaaaaagcatcaaatcatgtcttttcagaaacatggatggagctggaggctattatcctaagtgaactaacataggaacagaaaaccaaatatcacatgttatcacttatatgtgggagctaaagattgagcacaaagaagggaacaacagacactggggcctacttgaggatggagggtgggaggagggtgaggatcgaaacacctattgggtactatgcttatcacctgggcgacaaaataatctgtacattgccaaaccaccatgacactcaatttacctacataaaaaacctgtacatataccccttaacctaaaacagaagttgaaaaaaataattattcacaggcaacatgattgtgtgtgtagaaaatccaaaaggacctccctataaatgattagaattaattagtaaatttagtaagataattggatactaggtcaatgcatgacaatagttctatttctactcattagaaataagcaattagaaaattaaattaaaaatttatatcatttaccacattatcaaaaatatacctgcaaatacccagaaacatatctaataaaagatgttcaagactccacaaaaatctaccaagcattactaagagaaagcgggaatttgctcactctagagtggaagatggga

SEQ ID NO: 31019 - DNA, 1053 bp, Homo sapiens
ctggtgctgcccctggatctggggaaaggctactgcatgcaaggctcctcccaccccatccagttccctgaggccaggcttctggcccctggagtggctgttgcacaagcaaggtgggagcctggcctgtttcaaggttacccaaggcaggcgggcccagggctgggcttggacctggatcacagtggtgacagcaacctgtttgtgacagtacagtttgcactccccaggtggtcgctgaaaagccaccactgagggaggggcctccgtgatgaaaaggggcctctggccaaggcctgacagccatctgttcccggccgccagcccggagtcctccaggaagggtgaagacaggggaagagagagaggggaaacagaggacacacacacacacacacacacacacacacacacacacacacacacacacagagagagagagagagagagagacagggacagagcgagacagacagagacattgagagacagacaaacagacacagagacatagggacagacagaggaagaaagaacagcagaaaggcagagagacaaatatggaggaaagatagccagaggaagggaacaaagacactaagaatgaggatgagagaagtcgaggggcagaaagagacagagaccgagacatagggaaagaaacagaaggacaggaaagtcagagagagacaaagaaagacagagagaacaacagaaacagaatgaagggaaccaaagggatcaagagacagagagagtgagacagggagagatgagagagagacagagagacaaggaaattccctgagacagattgagagggtgcttgtgcgctggctggcatcaaagtgagggtagagagacaaagtcctgggcaagctctctgatggaaggaggaccctcatgagccaaatcccttccagcctcagcacgttcagaaggaagaagccacacgggatcacagcctctgggcccagggtcctgacagtggttttcagaccttagtagtcagcagactcacctgcggggcatgtgcaaatgcaggtgcctggg

SEQ ID NO: 31020 - DNA, 1008 bp, Homo sapiens
tgatatgttttcagaaagagagtcacagatctcagcattggaagagagtcctgtctttggacaggcagcgaattaggtccatttaatggatgtggcagctgaggttcactaaggaggaatgactaccacaagatcaggcaggcaattggaacatgccaaggagagatgagagctcagggcactgctgcttcctagtccttgctcacatactgcatcctgctaagagagacccatttgtcaactattgtgagctttcaacataatggaagttttaacataggtatgtgactctgttgatctgaggtcctaggagataaatcttctcacctaaccagagcacaagagtaactgcccaagtgagtatgcaaatatgtatatcacctggtttctctggtttttggcaattaacattctttccattcacgggcttgaagcgtgggtagcacaggaggagtgtgtgtgtgtgtgtgtgtgtgtgtgtgtgtgtatttatgcagatgatgtagacagacagtgacactggaccatttagcaaattagaatattctgccctgagtaggtggtgctgcttctttaacagcaccaggcctccaccaccagggctcactggcatagaacagcctggcaaatggaagacgctattcaggaaaggacaatgagaacaacgctcattctacaggaggactgacctttgcaactcccacttcacgttgttattaaatatctgggaaaagactgagagaacaattatagtattgtcataatgtatcagcgtacaaagcaagtgtttccaaggaggctctggttcagctgagcttgacaaagccggggactcagctatagcacttactaatttagaagttgtcttcattacttacaccagctgaaaactccgaatgttttgggtgcagttctgccatcgtggactccagataggaatggaaagataagatgttgggagcaaagggtgggagtctttgggtttctatgtgtctctctgctaggctt

SEQ ID NO: 31021 - DNA, 1030 bp, Homo sapiens
cccacagctgggcagacttaggaaccagcagatactctcgggccatggcctttcacactttctcatcctcactttctccagctttctttcctcaagttcacaaaatttagggacctttctgccctgtctgattccaaaaaagtaatagaagtttgcttctgcctatcccacccctcggatgcctcctccttcccttcaaacatctccatagaagttcccacaagctgccgccatgtcctcaaagaccttttctccactttggttaggctgactctcgatcccttcactctcctaaacattgcttctctgcacatggaaagacagctgctttccctgccttcaggccactgtggcttggcccagtagctttttgtcccgttttataacatttattgccttttcctctggttacagaagcaatacgtgcttctgagattttctgatttctcaaagaggagattctatattcttccttggttcaaccctattgagggagaactgaacctgtttggatatttctatgatacgcttgagagaatgtggggctgctactctgaaaaagaaaaatatcaatgatgctttcagaaattgtccaattgtgccaacgtcttgtgagagcggcattgttcagtgtcatggcagggtggggttgctggataaaatacaggattgccaactaaatctgaattccaagtaagcaatagatactttttagttttaggtattttaagcacaaaatattgtgtgggacacacattgacatattgcatgcggtatttgaggcatacttattctaagaaaattattcattgtttatcaggaattcaaatttaactgggtgtcctgttgtttgttggcttgctgaatttgacaacccaacatcaacatgcaagacagagctggtcaggctgtagagggccttcaacaggggtgcacaagggcatttgtgagtgtaaccaaaagcctcacagaatggagccaaagccaggctgggagcaaggcaatggcaaacagaactgagaagaaatct

SEQ ID NO: 31022 - DNA, 1103 bp, Homo sapiens
gattcccttgtgcttgtggcctgaacatcttgctgctctgagtgctattaaggatttgtaatttagactgggcttagaactgaattcaccccacccattccccaagtaagagaaaactcttctagtgtgtatctgacaaatttatatgacctagatggtttggggattcctgctggatttatcagcattctaatagctgacaactgtaattgtctttttacctagtctgcatctctgcagtaatagtgtatatatttattggggaaatatggctgcggggacttgttacacgctgttgttaatttacaaggttcttctttgagctgtctgtcatgcaccgagttgatggtcttctccttagtttgatttaactccaaaccctgcttgctgcccttctagagaagcagggtttgcacggtagtgccatgggccagagggccctggccacgcatctgtgttagcaggtggggtcagatggcatgtcctgtgatgatgttaagaagggaagttggtatgaggtttagggcaatggaggggtctccagtgtgggttggagaacaaaaaataaatgtgaacaagacgtgatctctcttctactcaacttcaggttctagttttggtggagtaatcctattgtgaggtcatggggcagtagtttgtcactcaggttagcaaggagagactgagaaaggagaatggggaattctcctctccacaaaaatgttgacataagcagaaattcagctgcttccttgggttggttcttggtggaaacttaaacatcagcagagctggacagactgtgttcaccagggtggctgagtgggcctgtggccacaagatgatcacagaagcaaacagacagaactttggatattctttaatgtaatctcaaaatttgggttttttgtggaatactatgcagccataaaaaggaatgagatcatgtcctttgtagggacatggatgaagctgaaagccaacatccttagcaaactaacacaggaacagaaagccgaacaccgcatgttctcactcataagtgggagttgaacattgagaacacatggacacagagagggtaaaacaaacaccggggccta

SEQ ID NO: 31023 - DNA, 1060 bp, Homo sapiens
acatataagtatggcaaaaaggaataaagataataggcaaacagctgatatttgaaaagaatgctgatgctctgtttacctgggctaggagagcagcttatgcactcttcagtgtagccccacattccactgccactgatggttgtatgatggttataacctgggtatggagcacacttctggattggcttccatcttgtgtcgaaatgctaatacagtgtggctgtcatttataaagcagtgacggtgtgctagatgctctgccaaattctttttctgcattaactcttaaatcctcacagagctttatgaggtacatgtgattattagcctcatttttccattgaagataccgaggcaccgagaaggtaagtaattttctcaagatcatacaacacaggacttggaggttctgctggtaaccactattctctatgcctcccaagctaaagaagagccaagatttgtaatttttgatgggagttggcatcagcattccgtttggactaagatgtaagccttcactaacatgcacaaagaaaagtcatcagaatttgatctacatttggggacttcacggatagtgttcatttcccattggtaagggatgaaccaggaaattcatggagtgatcatattcaccagtgagagtgaactgaagtcactgtcactgcacctgtcacctgcatcatcatgcccagctcacattcccgttcctctactccctaagctcctcaggggcagtggccatgcctgatgcatctctgaatccctacttgctctgtgccatctgttaaatgaaaacagaacaaaacacactgaaaacaaaatttgtggaaggagaatatgagctgagaagggagagtctttgcattaggatgtataagaaaatatcccagcagcattgagtagagggacctccgaagaaactggggaggaatcgggcacaaggcatgcacttgtggaagtgatgatggcagaaccagatggaggcagtaaccagtgatggcagaggccttgtctgtctgttgtccaatatagtgacacattgtgcacaaac

SEQ ID NO: 31024 - DNA, 1043 bp, Homo sapiens
atttccctccagtgtttgaggctgactgatggactccccactgccagctccaccagccctggcccatcctcatgtgtcacctgccttgtgagcttttctgaaagcttctcctgagagtgcacttgttcccaacaggcatctcaaagtccagaatgatgtcctgcctggttggaaggggtcctgttccccagtaatccccattaagaggttgctagtctgcagttcttgctctgtctgtttctaagccaaaacagcacaggcagttggctgccctgctgccaaagcaaggcctgggaagcaatccagcctcatcctgatgttagacgagcaagtcctggggaaacagatagatctcatcctggcctcagaggggacagctaaattgtcaaacagcacactaatgggggctgctgactgcacaggtatctctgggttataaatgcccagcaccagagagcctcctaagtcaccagaggacaactttatgatccagaaagtaaagaactggaacaagatcagcttgtgacagggatcaattgatcggggactggagagagcttggcccgggagttcagaactccataaaacttccaagctcagcactttcttgggggacctgcactggccccagtacaaggagcccagaaaactgactgagagctctggagggatgtacagtgttggcctgcagcatagatgagggctaggaaggagcttccctgaacttccccagttcattctgtcactactctcagcccagttgattatgagcctcctttttggaaaagatttcagtggctccccatcacccttaaatgtcagactagtctccttggcatggcaatcaggacttcgtgagatcttaggttgatgagcttgccagcttcattcacatcttacagggtttctacctctgtgttccagccacatttaaagtcttgggtttccccagttgtgatgtaaactgtcacctctgggctgtcatacaagctgttgatttctttagccttgaaggccattcttccccactttctattcatttg

SEQ ID NO: 31025 - DNA, 1034 bp, Homo sapiens
aatttaacaccgtaaaggttgagatacatgtacattctcatagtcaaagccaaaagccaactctacagacaaaagatgaggagcataccatggggaaacctaaaggttatatataactgccatttcaggactgaacagcagggacatgtttttgatccaaaggctatcggtcatattaatagatatataatacacagatcatgatagatattagttttattctaatctttgctgctcaaatagtggaaagagaattggattcacttccaagccccaagcctaaggagaatttagggaacatggtctcatttggaaaagagccatcttgggtggcatgtaatggtcatgggagaaatatttgactatttttttttcagcaggaatagctcaaggaagatctaactagtttccttagatatttgacaagacattttgtgggagggggaacatcctttcttacttcagttggtagaaaggaaaacagtgggaagaagataactttcaaataaagatcggaagatatgtaaattggtgagacttacctaagtatagaacagcagctcctggaggcaagaagtctcccctctctgggggtacagcaggagcttggcagcaaattcccaacagggaagttgtagggggaatcaaaactacattaattcagaccctccatgaagcagacacaaagatgggattagatgtatgaaagatttactggggaaatgagatgggagtcagaggaggctgggaaagccatcagaccataagaaaggtctgatctctgtaaaggagagagggaaggaaggaggattgggtagggtaggaagagctttagcttgctgtgggggttataaggtagtgttggaaaggccactggggagtctctgattggaagttgcccatcagagtagtcccatatatcgcaggaatgggtctgccatggcatccctgctgctctcattcattggctgggagcagcctgtgggaatcagggcctctgtgtgaatatggtgatggactgcagagtgcaggaa

SEQ ID NO: 31026 - DNA, 1085 bp, Homo sapiens
tacagagaaatatttagtaacatgagaaaaatgtccagggcatattgtcaagtgaaaatcacaagatacaaaatagtttgtacagtaatataacataggtaaaaaataaatataaacatggaaaagcaactagaaggaaatgcattaaaacattcacaataattactgtctctttgaatagtgagactagggtgatttttcattcttttttttgttgtattttctaattctctgcaacaaacatttatgtttgtaagtaggaaatgtaaggacagtagttataacacttaaggaaagaatgaaagcacctcctgggaattcccaagatgtttgggactgttcaaaatggccacacagacaaagcgcaggaagaaatgagtgagaaaaagacaggggagaggagtatagatatctcttgagttcttctcctttacctctgaggaagaaacacaagaccagagaagatagacagccaaatcgcttacacttgggtatccgtagcaaggttctcaacttgaaaaagttgagcctttcctaaactcttgaacagcataggaagtgttcagcagagaactacatagactcaaaagcctggagatgctctactaaataagttcctttgcaaagagggacagtcttggagtagctcctccaggaccaatgcctgtacattagaaaagggctctgtttgcagggctgcacagtaggaatcgtgcaacctgagccacaggtgactgctggctgcctgtgatgttacgtctgcatctctggctgattcacccttgcctcagagccaggccagcattagaaaatccctttatcctgcctgttcccagttggcaggtccagcagaaaaattaatgcaggattcattcaattttttatcaagatgcttatatagtgtactaataattaaaagggtgggcaattcttttaagtgtcaagaacttcaaagagagagtggaaacgatgtcagaatgtgagaatcaggcacaaccatgagccaggagcaatgaaaatggctcaaaggcataactgggccctccactgcactgctctgcagagggttggtggccctgtgttcc

SEQ ID NO: 31027 - DNA, 1048 bp, Homo sapiens
tctttatattgaagaagagtcagatggaaagaaagcattagataaaggacaaaagacagagaatggacctagtcatgagttattaaaggtaaatgaacatagagcagaatttccagaacatgctactcatcttaaaaaatgccccaccccaatgcaaaatgaaattggtaagatatttgagaaatcatttgttaatctacctaaggaagactgtaaatcaaaagtttctaaatttgaagagggagaccagagagattttacaaattccagtagccaggaagagatagataaattgttaatggatttggaatctttttcacagaagatggagacctctctaagagagccacttgcgaagggtaaaaactctaattttttaaatagtcacagtcagttgaccggtcagacccttgtagatcttgagcctaaatctaaagtctcttcacccatagaaaaagtctcaccttcctgtctaacaaggattattgaaaccaatggacacaaaatagaggaagaggatcgagccctcttactgcgaatcctggaaagcattgaagactttgctcaagaactagttgaatgcaaatcaagcagagggagcctatcacaagaaaaggaaatgatgcaaattctacaggaaaccttgacaacttcctcccaggccaatttatcagtctgtagaagtcctgttggtgataaagccaaagatactacttcagcagttttgattcagcagactccagaggtgatcaaggtaagacccaacaattttgagtcctaggaactctttaaaaaatgtttagtgtttgaaaattttataaagaaaaacttttttgttagccattttttgttctactaaagctctgccctacactaggaatgatctcactcagctcagagtcagtaaaaagcaaagattatacaagatgatagaggaaaaaaaaaaagcaaagactttagactcagactggttcctactgccctccccatacccttcatcttcttcccagctctgtgaccaaagaaaaattacttacctttaatatcc

SEQ ID NO: 31028 - DNA, 1059 bp, Homo sapiens
aatagaaagtaaattgagtatccaaaagctcaaaataaatgcattattttaatgttattttccttttaaatattaacatcagttttattaaatatggaattgaccagtggattaatagttgcctatcagtgaattgctctgtgttaagtacactaagaaaagcagaacagaatattttataatcagatattttcccattcaaataaaatctttggcagccagtgttctgaatatcacttatttctgtcaaagcaaaagcatagagttaacattgaagaccttgctgtaaacctttcccactagtatgtattcatgagactctcaggtttcatccctgctggcaccagtggtcttaattctatgggcataactgccctagatgtgacaccacagaaaacattggtgattgtacacctgaacctcacaaatctctttcagcatagaataatggaaaaggaatgacactaatataaatggtctaggtaaagcccctgaagaattctgtgccttactttagaattttaagaacactttgaagaataataataatttattgacttacgggactgtgtaatatttacagatttagcattaaggcagagagaaatgtttattgaaaatggattgtcaatttgttaactcaaaagtggtttgtaaacttcaaattgctttacatatgcaaatgattattttattattgaatctgaaagattatgccaaattatgcttcatctaattttttgagaatctcatcctttggtcttgtcattcatcttcttacatgatagatggatctctgcccagcactgttctaaaccttttacctatattacatcttgtaatttcctttaatcctcacaacaaccttctaagaagtagacattgtaatttctgttttattattgaaattccaaaaggttaagtaaccattttgaggtcacagagtagtaagccatcagtgttttaagtttttcatatttcattggtatcacttccctttgttctgtttcttccttgactattgctttatatgggtgacatcctgatactgtagcaaag

SEQ ID NO: 31029 - DNA, 1045 bp, Homo sapiens
gtcttgatagaagacttcctaggacagaagtgtttaaagtttctccttgactattagtgtagcaacttttttttttttttttttttttgagatgcagtctcgctttgtctgccaggctggagtacaatggtgtgatctcagctcactgcaacctccgcctcctgggttcaagtgattctcctgcctcagcctcccaagtagctgggactacaggcaaccaccaccatgcccagctaatttttgtatttttagtagagatggggtttcaccatgttggccaggctggtctcgaactcctgacctcaggtgatccacccacctcggtctcccaaagtgctggggttacaggcgtgagtcaccatgcccaggcttagtgtagcaattgatggcaagtctgctatttaagaaataggattttacaccaggcacagtggtgtatgcctgtagtccctgctactaaggatgctgaggtgggaggattgcattatgattgttcctgtgagtagccactgcactccagcctaggcaacacagcgagactgtatctcttttttaaaaagaaaatgaaagcggggtttgggggatgaaagaagatttttccttagacacagaaagcacatgaggagagatgggagggactgcttgatgggcacagagtttccttttggggtgatgatattattacagaactagatagtggtaatggttgtacaacattgtgagtgtactaaaagccactgaattatgcactttaaaattgtttaaatggtgaactttattagtgaattttacctcaataaaagaaatgggtttgagaaattgatacccttgaaaaaagaaatgagatttaaatttttttattctgaaaataggacttttataataaacatatacctatacttttagatgtcagggaaagttttttcctcttgccaaaacagctcttgatgaaatttaccagatttgtttatttttatgtaggcaaaataactctaagagatctgaagaggtgcagaatggctcacatcttctatgacactttctt

SEQ ID NO: 31030 - DNA, 1074 bp, Homo sapiens
aaccaacagcagatctctgcagaaaccctacaagccagaagaagaaagtggggactgatattcaacattcttaacgaattttcaacccagaatttcatatccagccaaactgagcttcacaagcgaaagagaaataaaatcctttacagacaagcaaatgctgagagattttgtcaccaccaggcctgccctaaaagagctcctgaaggaagcactaaacatggagaggaacaaccggtaccagccactgcaaaaacataccaaattgtaaagaccatcgacactacaaagaaactgcatcaactaacggacaaaataactagctagcatcataatgacaggatcagattcacacataacaatattaaccttaaatgtaaatgggctaaatgccccagttaaaagacacagactggcaaattggatagagtcaagacccattggtatgctgtattcaggagacccatctcatgtgcaaagacacatataggctcaaaagtaaaaggatggaggaatatttaccaagcaaatggaaagcagaaagaagcaggagttccaatcctagtctctgataaaacagactttaaaccaacaaagatcaaaagagacaaagaaggtcattacatgatggtaaagggatcagtgcaacaagaagagctgactgtcgtaaatatatatgcacccaatacaggagcacccagattcattaagcaagttctcagagacctacaaagagacttagactcccacacaataatagtgggacactttaacaccccaatgtcagtattagatcaacaagaccaaaaattaacaaggatattcaggacttgaactcagctctggaccaagtggacctaagcaacatctacggaactctccaccccaaatcaacagaatatacattctcctcaacaccacatcgcacttattctacaattgaccacataattggaagtaaagcactcctcagcaaatgtaaaagaacagaaatcacaacaaactatctctcagaccacagtgcaatcaaattagaactcgggattaagaaactcactcaaacctcacaactac

SEQ ID NO: 31031 - DNA, 1116 bp, Homo sapiens
ttcaagttgtggtagcactgagagaacgtgccagtggaaggaagaaagaggaggcagggggttgcagacagaagcacaggtgaggaggggtcacaagaggagacgcagagaccagctggagtgaaattcaaccgttgtatatgagaggctcttgctgcttgctggataccccacttctgttgtgggagataagataaggcctacacagaacacatgtgggttatgaggtcccaaggggcaaggaggcttacaacagccacagtctatagagcaagcactagaatgtgaacaaaggaaaggaaaggaaaaagcccgtttacaggaataacaactgaccaactcgtgcaaaagcaaggccagacctaaattcccaaggctaaatcaactagggtttcatctcaagaaagaatcacagatatgtcagggagagtctaattgtcaaacagaaattgccagactcaggtatcagaaagggaggaatgttagtaccacagaaagaccagaggcttaggagccagacagatctggtccactcaccagctgggcaggttacttgactcctgaggctcagtttcagaaggcatcagcatccacttcctgaggtggttgtgagaatctaagatattatatgtaaacacctggcacatggctcatgataaatagtagctattactactccatataggagaaatacaatgtaacatcatgggcccactgcagtggctcacgcctgtaatctcaacactttgggaggccgaggcaggcagatgaggccaggagttcgagacctgcctggccaacatggcaaaaccccatctctactaaaagttagctgggcgtggtgatgtgtgcctataatcccagctacttgggaggctggggcgggaggatcatttgaatgaacctaggaaggaggtggaggttgcagtgagctgtgatcatgccattgcactccagcctgggcaacagagcaagactccgtctcaaaaaaaaaaaaaaaaaaaaaaaaaaaattatatatatatatatatataaaaaacatcatggttaagagcatgaaatttgaagttagacgaacctaacttcaaatccttgctttatcacacaagctgtgta

SEQ ID NO: 31032 - DNA, 1025 bp, Homo sapiens
cgcatatctacacatatacatacatgcatatctacacgtgtatatatgtatatctacacatgtgttcacatacatatatacacatatgtatatgtgtatatatgtatgacaagtaaaaagggaggactttattagcagatggggctacccttagttttctttccagcgtagagctttttgcgaagttgggcttgatggacacatggcctgacccaaggccaaacctcagcccaggagtacgtctcagggtcactgtagcccctggctgcccacactgggaaggagggaatgaaagcctattggagagaagaggttggagaggggcaagttgctgggtcctcctgtagagtgggagtgggctctggcttagtttttctgctgagacacttggatgcaggaggaaggagagagtccatgagcctgcatgtgacaggttctgtggtgattttgcccagagggcctgcagttttgctttttgaaggagctttagcagattaacctaacagggaatgtgaacccacagtggtttatgcagagctctgcctttgcatttccaagtccttgttcttttaatgttccaggaagttgggctgggctctcccagggctgtgtcttgttcactataatgtccttcagtgccctacacggtacctagaatgtaggaggtattcagagaagataaatgaaagaataacgtttagaggaataaactcattttttcctctaaaagagaaccagaagatcttttggattgatacttgtcccaggttcagttaatatggtggttaaaaaggaatgactctttggtgactgctttgtaagcccagcagggacagaactggcccagtccctatgacgtgtcaccccatttcctttcccaccccattcccacaaaaggtaactggctcttcctatgttgactatacctgccttttttctgcctaaagtgaccgtctggttcctgagcttgacacaattgtccctttggaatcaaccaaagcctacaacatggtggacatcataca

SEQ ID NO: 31033 - DNA, 1021 bp, Homo sapiens
actacatacaaagaaaatccaataaaattaatgattaattcttatcacctggctcacaatggaggccagaaggtagtgggatcacatggtcaaagtgttgaaagtaaaaaactatcaaacgagaatcttacatcgctcactgtaacctcaaactgctgggctcaagcaatcttcctgcttcagcctcccaaaatgctgggtttacaggcataagccacccctgagagaatctgttgctatcagacctgcctactaaaggaagttagtcaagttgaaagcaaatgtcaccacagggtaatttgaatttacatgaaaaaacaaagagtgccagtaaaggtaatttgtaggtagttacaaaagtataattacatatttacttatcccttctctcttaactgatttaaaaagcaaatatataaaacaatatgtatgttactgtattgttgggtcaataacatagaaatgtaatatatttgacaataaacacaaaaaagtgagtgaaagagaagctgtatttgaatataggaatgataccagatggcaattcgaatccacaggaagaaatgaagagaaccagaaaaatggtaaataggaagattaatataacaaactctataaatacatactggctttcctttcttttctcagtttctataaaagattatctcaagtataattataacaatttattattgggtttctaatatatatagatggactaggtataacaagaatagccaaaaaaggaggaaggaaatggatttatatagaattaaagtttctgtatttccttagaataaatcaggatagaccttaggtaaattttgttttgttgaggcggaatcgcactctatcgtccagggtggagtgcagtggcacgatattggcttactgcgacctctgcccctggggcccctggggttcaagcaattctcccaccttcgccttccaagtagcttggattacaggcatgtgccaccatgcccggctaatttttgtattgttattagagatggggttt

SEQ ID NO: 31034 - DNA, 1035 bp, Homo sapiens
aactaggtcatcattattaagggttgcataatattgatctgtgtggatagaatgtaagttttttaaacaatcccataatgaacatttatgtccaattttttagacttaaaaaaattattgtggaaagaatatgtaacatgagatctatcctctgaacaaaaaaaaaatttttttttgagacattgtcttgcttgttgcccagactggagtgcagtgacgtgctctccgctcactgcaacctctgcctcccgggttcaagggattctcctgcctcagcctcttgagtagctggccaccgcacccagctagtttttatatttttagtagagacagggttttaccatgttggccaggctggtcttgaactcctgtcctcaggttatctgcctgccttggcttcccaaagtgccaggattacaggcgtatgccactgcacccgggcctgccttcttaacaaaattttacgtgtataatacattattgttgatatgtattgttgataggtgcaatgctgtatagcagatctttagagcttatgcatcttgcttgactgagactttatgcctgttgattaataactcctgattttcccctgccctccagtccctggaaaccaccattctactcctcgattctatgactttgactacttcatttttatttctatttatattaatttttaatttttgttggtacataggtatatatatatttacggggtacatgagatgttttgatatagggatgcaacatgtttaataatcatatcatggtaaatggggtatccatccccttgagcatttatcctttgtttttataaacaatccagctgtactcttctaatgattttaaaatgtaccattaaattattattgactatagtcatccttttgtgctatcaaatactaggtgttattcattctttctactttttgtatccattaaccatccccagttttccccacacccccaactctctctcactacccttcccagctctggtaaccaccatccttctactctttttcttttttt

SEQ ID NO: 31035 - DNA, 1051 bp, Homo sapiens
ggagtagaattgtgctgtctttatctagcagtttttgaatctgcttgatctggccctctatggctgatacatagtagtttcctggcatttcttcctttctgataaaactagcgactccctttgtctttctcctgtgttaaatcttttttttccctttccatgaatcatatagtgtttttgtttgttttgttttttgtttaacctctccatttgatggagtatatcatacaatagattcctgtggaagactgaaatcttgcattaatgaaaactttttttcatgttcatgcttgatttggttggctaaggattctaggttggaaataatttgccttcagaattctgaaggccttgctgcattgttttctagcttgtcatccttttgagaagtctgaagacattctgattcttgattgtaaaaatgttttgcttttctggaattttgtgtttcctatattctgaaatttcataaggttgtagcttggtgttacgtctatttttaacaatttttcttggatatttgtgtaccttctgaatctgtaaaattcattagttctgggacattttctttaattattttattgacagatgtattagtctttgaggactgtcataacaataccacagtctgctctctgtttgtctgttattggtgtataagaatgcttgtgatttttgcccattgattttgtatcctgagactttgctgaagttgcttatcagcttaaggagattttgggctgagacaatggggttttctagatatacaatcatgtcgtctgcaaacagggacaatttgacttcctcttttcctaattgaataccctttatttccttctcctgcctaattgccctggccagaacttccaacactatgttgaataggagtggtgagagagggcatccctgtcttgtgccagttttcaaagggaaatggaaaacaaaaaaaggcagggattgcaatcctagtctctgataaaacagactttaaaccaacaaagatcaaaagagacaaagaaggccattatgtaatggtaaagggatcaattca

SEQ ID NO: 31036 - DNA, 1081 bp, Homo sapiens
ttatagccttcaaatctatacatgagaaagaatgaaggctaaaaataattgaaaggacttctaaataaagatggctgagtgaaagacacatttacttttactccctttgatagcccagcaaggtgacagtaaaggatacttttagaagatttgaactacacaggtaaagagaataaagaaaagacggcaacaataaaatctggaaactggaaagcgagtgaactgatgggaaacttcttagtggacttaaaaatgttcaatcctaagtggcgggagcaaaagtagaaaatacttcttaggctcaggaattggcagcatcaggtatttttggcagggaggaggtgagggtggtgctaaaaacaggaggatttcttgaaaatctgtttaagaagcagctcagtcataatagccccaaagtagaagcaactcagatgtccatcagctgataaatggttacatgtaatgtatatccacacaattaaatactatttggcagtaaaaaggaatatagaactgatacatgttataacatgatgaaccttgaaagcattatgctgtgaaagaagccagtcacaaacgaccacagtattgtatgatacatgctataacacagataaacctttaaaacatgctaagtaggccggacatggtggctcacacctgtaatcccagcactttgggaggccaagacgggcagatcacttgaggtcaggagtttgagaccagcctggccaacatggtgaaaccccatctcaactataaacacacaaattagccggatgtggtggcaggcacctataatcccagttacatgggaggctgaagcaggagagtcgtttgaactggggaggtggaggttacagtgagccaagatagcaacacagcactctagccagggcgacagagtgggattctgtctcaaaaacaaacaaacaaatgtgctaagtatactaaagaccacattgtatgattccatttgtatgaagtatccagaaattgtgtatttgtagagatagagtggttgcataggactgggagtaggggaggttagagggaaatgggaagtgactctagggtatgg

SEQ ID NO: 31037 - DNA, 1063 bp, Homo sapiens
acttccaaataacagaagtactagtagacatcagagaaaagaaggaattatcagtaaaatattcaagaaaaattcccagaatcaaggaacgtgattttgcagaatgagaggctctatgggtatcctggaaaaatgaaagaaaatagatatacgctttcaattaaagcctagtcaggaaaatggagaccacaccaattactgtaacagaatctaaaataaagagttgtttagccagatattatgggttgagttatatcttcctcaaaaagatattttgaattcttaatccctagtacttaagaatgtgaccttatgtgcactattcacaatagcaaagacttggaaccaacccaaatgtccatcaacaatagtctggataaagaaaatgtggcacatgtacaccatggaatactatgcagccataaaaaagaatgagttcatgtcctttgcagggacatggatgaagctggaagccaccattctcagcaaaatatcacaaggacggaaaaccaaacactgcatgagttgaacaatgagaacacatggacacagggaggggaacatcacacattggggcctgttggcgggtgaggggctgggggagggatagcattaggagaaatacttaatgtaaatgacaagttgatgggtgcagcaaaccaacgtggcacgtgtatacctctaacaaacctgcacgttgtgcacatgtaccctagaacttaaagaatattaaaaaaaaaaaaaggctgggcacagtggctcacgcctgtaatcccagcactttgggaggctgagatgggtggatcacgaggtcaggagaatgagaccatcctggctaacacggtgaaaccccgactctactaaaaatacaaaaaaattagccgggtgtggtggtgggcgcctgtagtcccagctagttaggaggctgaggcaggagaatggcgtgaacccgggaggtggagcttgcagtgagccgagatcatgccactgcactccagccggggtgacagagcgagactccgtctcaaaaaaaaaaaaagaatgtgaccttatttcgaagtgg

SEQ ID NO: 31038 - DNA, 1014 bp, Homo sapiens
cagagtttggaactgtcctgtagttacatgatcagtcttttttttttttttttttcctatctttctttttctttttttctgagacggagttttgctcttattgcccaggctggaatgcaatggcacaatctcatctcactgcaacctccgcctcccaggttcaagcgattcttatgcctcagcctcccaagtagctgggactacaggcaggtgccaccatgcccggctaatttttgtgttattagtagagacggggtttcattatgttggccaggctggtctcgaactcctgacctcaggtgatccacctgctttggcctcccaaagtgctgggattacaggtgtgagccactgcacccagcccctatcttttatattgtgttttatttctttagaaatgaggtttcactgtgttttccagactggagtacagtggctgttcacaggcaccatcataatgctgtgtggcctccaactcttggcctcaaacgatcttcccaccttatcctcttgagtagcggggactacaggagtgcaccgccatgctcagcattttttttctatcttaacataaaatggaaaagttactgttgccttttctcctgataaatagcagcctaagtaagactggtagtttggaataaaggataagttaaaagggcaggaaggtgaggaaagaagtgtttaaaaatgaaggcgagaaggagaaaaagaagttgagagataaagtttatattttcctgtgccttagtatcgacttgcagtgaattagttgaaagttgccttgccagttacatataattggtgacttttaagttatttgtcacctggaacagacataacttctttagcatacaattcagatacaactgtcattgaatttatgtttccataaaattggtggtagaatttttagcattaggtaggagaagaggacagggaaagacagctgtgtctcaggcactgtactgttttacctattttgttaaatcctcacagcaaccctgtaggtag

SEQ ID NO: 31039 - DNA, 1119 bp, Homo sapiens
acttttgggttttgtgattaagaccattatttttagtttttcaatggaagacaaatcagaaagagattttccttcagtagcagaagagaccagggttagaatcagcaatactggttttgtaaatactggaatttatttaaagcatgatgattagagatattgggagaaattaaggtaatttctgtcaagaaagtatgcctcatagtgatacgtgcacagggtactaagacatacccagttagacttttttgttccattttaagaggacactggtatcttgggattagagtgaatgtgacagtaattaacaaaatatagtgaaaaaactattatcatagagcaaaggggggaagtagtccagtattaggtattactgtatgtaaatctaaaatcccatttaaatataatttttatttgttaatactccaggatgcattccgtactacagtattctgatgttattgagacagttttatcaagattttatctctatttaagtcttaggaaatctctgttaactttattactgtattacagttattgctacctttattccagggtgcttggaaacattgttttgagttagtgatctgtagttaacctgtaaagagatataagtccagcttttacattagataaacttttcccttttctcataatttctgtatccctttttggtaacttaaatatccggtgtaattaatggatttgtttcgcaatggttgtgctggtggagacattgtttgaaagttgagaaggaaaaggggaaaacaaaaggattaattcatgaatatattttaactataaaaaatatatatgctttaaagcatcttccaaaataagtctgaataataaggtcatatttttggccatgattatttacttgttatacaggctgtgttataatttagaggaaaaaaaagttttggaaagagaagcctcagaaaaattttctattgcctgggtgtgggccaggtcacatggattgggtgtgggaagtttcagtgttgcagaacagacgaggaagctcactgagaattatcctgagctgtgttaacaaactgacagaacacagaatttttactcaaaatggattggttaaacgtctttaaagatttt

SEQ ID NO: 31040 - DNA, 1033 bp, Homo sapiens
ctgtggctttgtagtaagttttgaaatcagaaagggagagtcctcccacttgattttcctttttcaagattgttttggttgcttagggtccaccttgcagttctgtgtgaatattagaatcagccttttcatttctgtggaaaaaacaaaatggttgaactttagtaagaattgcattgaatctgtggattgttttggatactgttgccatcttacacagaatatctttccgtttatttaagtcttctttaatttctttcagcggtgttttgcagtgtttagtatatgagtctgatacttggttaaaattattcctatgtatcttattcttcttaatgctgttataaatggattattttcttaattttgtctttgaattgttcattgttaacgtatagaaatacaactgattttgtgtgttgatcttgcagctttgctgaatttttttattctcactctgtgtgagtgtgtgggtgtgtgtgtattctttaggattttctatttataagatcatgtcatctgtggatactttttcccctccctaattgctttgactagcacttccaatacaatgttaaataaaagtggtggaaggagagcatccttgttcttgtcttgttcctgttcttacggtggaaaactttgtctttcaccattgagtgtgatgtcagctccacagttttttgcagatgccctttattatattgaggaaattcccttctaatcctagtttgctgagcattgttatcatgaaacggttttggattttgtccaatactttttctgcatcaattgagatagtcatttgttttttcccctttgttttactaatatgaggtgtcttatattgattttcatatgttgaaccacccttgcataaatcccacttactcatatacagtccttttaatatgcttgctggatttggttttcctagtacaaatgatccttatttttcacagattctgtatttgtgaattcacttattggctaaaatttatttataagcccaaagttgataattgcagtgttt

SEQ ID NO: 31041 - DNA, 1050 bp, Homo sapiens
tacagagcattgtttctggttttcagatttttaatttgactaaaatggtattttatcgaaatgtggaacatttaactacagaaggctattctgaataaaccctgattctccattttaagaggagttttttggggggatgtcaggtagaaaaagataactacaggaagaggacagtttggccgacttaagggttctaattgagcacactctaaggaaaccctggaggttaaattcctgatgaccagacaaacatttgggaggaaattgaaaaactgaagtatttcagaagtgaaaaaggaatgcaggagccctgaaaattagattctaaaaacgtgtagaaattctacctggggccgggcacagtgactcaggcctgtaatcccagcactttgggaggccgaggcggggggatcacatgaggtcgggagttcaagaccagcctgaccaatgtggagaaacaccgtctgtactaaaaatacaaaattagccaggcgtggtggcacatgcttgtaatcccagctactggggaggctgaggcaggagaatcgcttgaacccgggaggtggaggttgcggtgagccaagatcacgccattgcactccagcctgggcaacaagagcgaaactccatctaaaaaaaaaaaaaaaaattccacccggaacagtcttggtggaagcatgaattagaagagtctaagacaagtggaattccgctatttaaattccctgtgttacttctaaaaagaaaaaatagagacacagtgaaatccaactaaatgtcagaagtgctacaagacagaacatagatatctaagaatcttaatgcaaagggaaggaactattttgtgttaagtaggggaaaggaagattactggactgtaataattgaccacatagttcattcaaggacacagggcctatcctggacttgcacaaccctaagagtgagtgcctcagattttgcgccctaggtgcttcccttaattttagtcctggccctgcagggcacagagagcttagggttctcttccttggccacaaaacttcccat

SEQ ID NO: 31042 - DNA, 1034 bp, Homo sapiens
tcaaatatctttagtttttctgaagtgggtacatattagaaaaaagagctagtcagtacccagcttgaatgaactcacagagagaaacttggaagaggacagctatttaatgagggagggagataatcctgcctgctcattggcttttagggaggtgcagagtcctttaggacagagcctgtggtccgggtattgctcataggcagattctcaagctccccaaagttacattttctctggaactctcctaggccactccctgctgatgcaacatctgggtttgggcagaaaggagggtgcttcggagcccgccctttctgagcttcctgggccggctctagaacaattcaggcttcgctgcgactcagacctcagctccaacatatgcattctgaagaaagatggctgagatggacagaatgctttattttggaaagaaacaatgttctaggtcaaactgagtctaccaaatgcagactttcacaatggttctagaagaaatctggacaagtcttttcatgtggtttttctacgcattgattccatgtttgctcacaggtaagtatgaattagaatacatccaatagtttgggccttgaatataggttaagaaggcaaaaaatactttcccagggcctggggttgaaatatgtgtatagaatatcgtatatctgttttacaaaagatttatcacctcctaaacctctattcccacatcccaaagaaaaggcctgcattctgtttggaaatctctcttcttaatgtccacacaacaatctagaaagagaaatcatcaaaataaataaaagcagagctctgtgcactttgttacttatctcatcgtctggttttatatagtgcaatgtagttctttcagacttactgtgtgtgtcttggagatgttaactgtaagaacaaattaaaacaaagattctagcaaaatacacatgaataaaaagacaatttgtgagcttaacattggatacgagacttataaaaattggatttctctactggtcattgaagaaaaggta

SEQ ID NO: 31043 - DNA, 1058 bp, Homo sapiens
caaaaaaaatttttttttaagtcatttaaaatcattttggaatggtaaagattgtagcaataaggtattaaaactcatgtgagctattatgtgtgggaattgtttctgaagagctacaattttttacccagagtatgccagtaatctcctagaaggtgtactttgttcacagaaagggcattgtgtagcaggcctgggatgcaaagctaggttatctggagatccaaacaaactacaaagtaaggtgattgtgggtctggacacaggcaaagtggaatagacagattcgaagtggcctgcgatattgccgtgattgtcacaggccacaatgtgggtgacaggtcaggtctgacagatcttgagtggtactgtaataggaaagtgaatgcaccagctgctgcaaatgatgggctgagtctgaggcaagcaccatggatagctccaaggcagggctattactgcctgtaagaatctgaagcaaataaagcccttttttatcaggaaggcgcctggcctgtctgaacaatactacttcgaaggtgtgccatgaaagatggtacccaggatctctaagtaattacatgacagcaattttgaataataatttcaactattcttatgggccaggacaacacctcacccatatctgaatagcctcactttgttatgtgaggattgagaagttggcatttaaatacatcctagtggacttcttgggtcatcttatcaccttgggaggcatataaatgaacctcaaccaatccagaggatatctcagtctttgtgaaactcctgatcatttttgtaaccttgcatgtgctttccagagatagttcttgctcccttggactttcagattatgctgtctcacacagtgggttcttatctcatttgctctatccagaggtatcttttattgaccctccgtttaagcattctcatctacagtgaagagtaaatgaattgaatttaatagtgagaagaaaccttaaagatcttctagagccagatagctctttatgatttataccatattttaaaagggaaaacatcatagt

SEQ ID NO: 31044 - DNA, 1026 bp, Homo sapiens
aaggaaacaagtgaagttgattttaatgttatttaaacaagtaaagcaaaatattatttcaatatatctgtgtaataagttattactgaaatttgttgcaaaaatagcaagtcttcagtatctgatgtatagtttatacaatttggatgctaaatttttattggaaatacttgattcatatttaggtgtcataaagtttatagttgaaaatgtaaactcatatacccaagtagttccaaatcattcttaaaagttttaaaataactgaatccagtattggttttttaattttaattaaagtttaaaatataaacaaaattcacttcctagccacatttcaaatttcaattgccatatgaggctagaggctggcttactggacagtgcagctctttaccatctggcgcctgttctctgcctcatctcctgctgctttctcctttgctcattctgctccagctataatggcctcctattctttgattatggcagatacttctcattttagggcatttgaatttgctgttctttttgcctaaaaaaagctctacccctaggtaggtgcacagtctgctccttcaccttctttaggacttcgctcaaatgtcacctttttagacgttctttctcttatcaacccatttaatatctgtacaaattgccttctctccctacctcttatatttctaggctgccttctgaaagaagagagaagaggactgggaggggagaggtgacctgatctacaaggagcagtgaaatatcagaattgtcctatacagataaatgaatacattagacaaaagcgtagagtaagataaggttgaataagtgatcataccccttcagcttgcttgctgtctgagcaacttatatgattatttttgcgtatacataacaatttcagatactaagcttcttaaatgcaaggctctgccttaatgtcctcttataccttctttggcatctagcatgtaactttgaccaaaaggcagtgtgaaatctccaattgtggtccacctattg

SEQ ID NO: 31045 - DNA, 1048 bp, Homo sapiens
tcatgttttaatctgccacatattttaattttgaaaatacagggttataccttttttctttcatttggcttctttctagaaagactgcttgacattcatgacgtttaatattttaccataaagaattgtcttttgaatagttgttaactgacatggttagcttcattttttgtagaatacttgtttcacattaaaaaaatgttttctttggagaatgcttttgcttctttaatatccacaaaagcaggagaataagattgatggtctttcataattggaatgcagtgaaagaatagaccagtagggttttttgttttgctttgttttgtttttggttaactcattaactgtcaccaagattgagtctcctgttgatgttttaaatttcgaatttagaaagctgtcagaaaatttaaactcttaataaccataatgcctttttttctccaaaatttcatgtttaatgagaggaaacatttttaagcaacataccagaggtaattatgctcttaaaaaattaagagaagcaagtaggataagatttcagatttattccctttcctttgagtttcagattatcatactcttagcgcattagttctaaggaggaaggtctagactaaggcttatcatggggttgggaaatgtgaaggatccacaggcctgaactgtgtctatgggaagaaagacacaaaaaagggtcaagatacatttgggtaatgatgagggcgcccatgagggaggcctctttctttttctctaatcccataagcattgtcagccaaatagtactttaacttgtgcttagccatggcaaggctgggatgctttgtttatacaagtttcttcggactgcagttcttaaagcctctctccccaaaggcattgtaggctttggagttgtgaatttataaagggaggtaaaataaaagtgctgtaaaactgcttggctattcaaattgagctggaagggaaggtgggaagctggttaggatccaccgagatacttgacgcttattttcacggcttctcagtttacaaaaaacgg

SEQ ID NO: 31046 - DNA, 1043 bp, Homo sapiens
cacgcccagctgatttttgtggttttagtagagacggggtttcaccatgttggccaggatggtctggatctcctgacctcatgatctgcccgcctcggcctcccaaagtgctgggattacaggcgtgtgagccactgcgcccggcctcttctagctatttttcaatatacaatagattattgtaaattacagtcactttacatggggctttcttactgacagttaggccaatatttttaaacactcttattcacagttcacagcaagaagcatattttccattgcctcactatacatgtcagtttgtgtatgtgtgtgtatatatgtgtatgtatgtatgtgtatgtgaaagaatcctgagacaagtttcatgacattgttccacagatgtaatgccctctggtttctatgctatcatttttcattctttaaaaaaatggtggttgtaattatctgagctaacacaacgaatcatattgtcaaattgtacacacaggagtcagagatcttatccagaatcaggctttataaatatttcaagactgtaagtaatcgaggaataggcaaagcaagcatggagaggagacatgtcacatggctccctagtctgtccttcctacatcagacacatactcctctggcacttaatgatacataaggtggtcagtaggtgagatttatgggtcacctcacacagtagggagcacctaaattatgaaacattttattttcttttatttatttttaagatggagtcttgctctgttgcccagcctggagtgcagtggcttgatctcgactcactgcaacctccacctcccaggtttaagcaattctcctgccttagcctcccaagtagctgggattacaggtgtgcaccaccatgaccggctaattttttttgtatttttagtagagacaaggtttcaccatattggccaggctggtctcgaactcctgacctcgtgatccacccgcctcggcctcccaaagtgttgggattacaggcgtgagccactgcgcccagcctaacatctttattt

SEQ ID NO: 31047 - DNA, 1047 bp, Homo sapiens
ggactgtagatctacttccctcaatccctacttctccccctcaaaaaccaacaaaaagtttgtttgtttcaggagaaaaacatgaaatgttcagttggtctgccatttaaattaaaaatgagaacataattcaatacattcggtaaataacatgtattctagtgccctattatggccagttaaggaaaggaggcagaatgaagaagagaaaataagcaaagtagagacaatgagaggtatacacagtagtaaaggagaaggacgctggcctctcttcatataattgtgtctcttttactgcttctaaagacttctaaaggtctgctgtgttttcatttcttgataccttctctttgggccagagaatattaagctgaagatggaatgtgacttgtagatcagagatttaccacccctgctttgaagcagtgttggtgtattcccactaaaataaaccaactgtataacattccctggaacttaataagcactcaataaatatttgttgaataaatatagaaatgaaaatgcagaaatcgtacacagagtgactttttctttaatttgtttggacctttatcctgcatggagcaaaattggtattctaattccgagtgttgcatcctttattactctatggcatacttgaaaatttcttaatttattgtggtgtcctgtcagctagagtgaaggaggatggtgctggtggaaagagttgtgcaggtgagagtgaaaaatactaccattgactgtgacatgaagagggagaagaagccccagaaaagatggaggatcactgagcctggcaacagttgtggcctggccgtgttaaacttagaagaattcaagctacctgtaataattgatcctgactctgaatggattttggttagagagagtaagagcataggcaggaattgagagctcagtggaagaagggtccagaacacattagcagtaactgcaatgacagcaatgccaagtaaaaattagctctcatctctgccaaaaggaaaatctagtttctaatgatagcctttaccatat

SEQ ID NO: 31048 - DNA, 1024 bp, Homo sapiens
tagataatagatgtcttaagaaaagtaaggaggccaaaatctacctaactttgatgacctaattgttactgcttatggttgtcatggatgtcatttcttcagagtcatcattcatacaaaaccatatcccaaaaatatatgttcacattttgaaccaatgtaattttttctgtattttcaatgctgtaagattttaaagcatatttgtaaatttaggtcaatctttcttaatatctttctgctgtctctaaagattgctggctgggcatggtggctcacgcctgtaattctagcactttgggaggcttaggtgggaggattgctttagctcaggagttcgataccagcttggggcaacatagcgaaactccgtctctacaaaaaaaaatacaaaaattatccaggcccggtggcatgcacctgtggtcccagctatttgggaggctgaggtgggaggttcacttgagcccagaaggtcgaggctgcagtgagccgtgatcacactgtcacaccactgtactactgcactacagcctaggtgacagagtgaaaccctgtctcaaaaaaaaaaaaagattgctgagcatgcattcactttgaacatttttatttattactagttgatcttctgggtaacagtataaatgtaccgtgaatttatattgttaaatattttgcaaagtttaatgattctaaatgggcatttaaagggcacagcatcaaaattttgtatttttgtctaccgtgaaatcaggcagatgcaagggattatttctaagccttagcctgcatattgaaacaaacaccttgtacattttgaaggttttccatggtaccacagaagtagcacccttcaggacttggctctgctactgaatagcagcaaattcattcggatttcataattccttgcctcaaactgtggttaagttgttagttaccttcttaaagcaaatccaccaaagaattttatgtgaaccttgcaacattcattcacaatggtaagtatttttaaagaaataac

SEQ ID NO: 31049 - DNA, 1045 bp, Homo sapiens
tagcttgggattaagctgggttaacccatgatacaaattagagaaaaaggagcaaaatagctactagccacccgggattactggtagctcagacacacctcctaccctctggagagcttcctgtgtgatacagcccagccatgccaacacctaccatagtattgtgaacacaagagatgttttcatgccagtaaagttaagaaaacccactgcttattttcttccgtgagtactttgaaatcattctcaaaaggcatggcacagtataagcattaatagtcatttcgtgtacagcaggcaacttgataaccataaagatattctcaaaagtgataaatgagttttgtatttatttgagaagtcttaagacattcaaatgtctgtacctaaaagtggtcacattcctcatgtagaagtatatctaagagtaacagttacgtttctcttgacggacagaaatataggtgattaacaagaatcaagaaaatagattgatttatccttaaagattttctgcagattctgtttgtactttgaaaattatcagagttggccaagcctggtggctcacacctgtaatctcagcactttggaaggccaaagcaagtggatcacgaggtcaggagttcaagaccagcctggccaacatggtgaaaccccatctctactaaagatacaaaaattagccaggcgtggtggctcgcgcctgtactcccagctactcaggagactgaggcagaattgcttgaacccgggaggcagaggttgcagtgagccgttattgtgccactgcacaccagcctgggcgacagagcaagactctgtctcaaaaaaataaaaaaaaattaccagagttactattaaaatataatttaataaagtaaatgtagacatgattcttgcaacttctttaatcctttcagaatatggcatttcaggctgaacaaaaaataaaagcagatattttacgaagcttgagtactgaacagctattccggttattatcagattcagatttgaatgtgctgatgaagacattgggact

SEQ ID NO: 31050 - DNA, 1027 bp, Homo sapiens
agtagagacagagaacaaatcaaaggtatccaagccttaaaggttgggggcaggatttgactataaagggatagcacaggacaatttagggagggaggcagtgatagaactgctctgtaaatgctgactgtactggtggttttaagattctatatatacatttggtaggccaggcacggtggctcacaccgtgatcccagcactttgggaggctgaggcaggcggatcacttgaggtcagaagttcaggaccagcctagcaacatggtgaagccctgtctttactaaaaatacaaaaattagccaggtatggtcacgcacctgtagtcccagctactcgggaggctgaggcaggagaatcgcttgaacctgggaagcagaggttgcagtaagccgagatcacaccactgcactccagcctgggtgacacagcaagactccatctcaaaaaaaaaaagattctatacatttggtaaataaaattactaccaaaagagtgaattttactgtatttcataattctgttctcatttctacaaatgaaatgccacttgggatttcgatcgtattgtatttataaataaatttgggaggacgtgacatcttaacaatattgagtcttccaattcatgaatatatcttcccaattatttaggtcttctttaattcttcttatagcagtgttttgtagtttttgatatataggtcttgcactcttggtcagatttattcctatttcatatgtttgatgtttttgtaaattttatttttaaaatttcgatttccagttgttcattgttagtatatggtaataaaattttcgtatgtcagtcttgtatcctgcattcttgccaaagtcactttaagttattttgcgtgaattacttaaaattttcaacaaatgatcacatctgtaaataaaaatagctttatttcttactttccaatctatatgctattttgtttttcttgtttcattgtctagctagaacttgcagtgtaatgagatgaggatgaacatatttgtt

SEQ ID NO: 31051 - DNA, 1033 bp, Homo sapiens
ttacaggcgcctgccaccacgcccagctaatttttttgtatttttagtagagacagggttttaccatgttggccaggctggtctcaaacttctgacctcagatcatccacccacctcggcttcccaaagtgctgggatgacaggcgtgagccaccacgccgggccctgatttgaatttttaaaagatcactctggtgacttacagagaaccatctgtaggagggcaagaatggaggcacagagaccagttaaaggccattgtaataatgtcggtaagggagtggggggattagtattggaagtattgagaagtggttggattcaggatttaatctgaagataagcaccaacgggacttactcacagattcagtacaggatgttaaagagaggaaaggaaaatgtctagggttttagcctgagcaactggacagagggtgttgccatataccaagatggtgaggaatatagaagtgggttgcggtagggagcatcaagagttcttgtttgggtatgccagcgttaagatgcatattagatatccaagggacttggaagagcagggctataaatctgaatggtatttaaagccatggagctggatgaagtctcttagagcaagtaaaaagagagaaaggaggactaaggaccaagatctagagtccctccagcatttaggcagtgatgagaaagatgcagcaaaggagcagaaggaacagctagtgaggcaggcagagactcaggcgcataaggtgtccagaaaacaaaggaaaaagatgcctggacggtggccgtttatccttcaaaactcatatcaggttgctatgtcctccaaaaagccttgcctgacccactctccaccctcccctccaggctttgccagggatgccttttgtgctcctgtagcatctgtagaacacgtcacactgtgtcttggctgtcaggttgtctgctccactgaaggggagaggaacttaactaactcctctgaagtaaatggctcttccagattgtgaagcacacaggacaggcta

SEQ ID NO: 31052 - DNA, 1029 bp, Homo sapiens
gcaaaatagtaagctagcatcttactgccgtcaatattagcaggtacagagccttttttcatcctaattcagtaagttctcaggcttccaagtcaaatggagaagtaaagtgaggcaacagattcaccataggctttttgaagcatcaaagggaaatataactactgatagtgaaagcccagccatgacccagatgggcttacccttgacaggaactggggaccaagagcctcccaattgccctaactcctgtcattggtattagcaatatctggccagatttagaaccagtcatggaaacttgtgctcaaactaaaagtaggtcatcacttcccagaaacagaataccttgtgcttcctgaaacagcatatatcactgtgaaactaaagaatattctacagacacccctgtagaaagaaacaaagaacaggatagtttagaaagctttctgttagctgtattcagcaaatttcatactagttgctcaggactgctagttggtatgcttttgtaaaacgagattgaaatttaataaaagatgcaactaaaatctttcctgcatgaagctaaaagcactcaagttgagagaggggcaagggaatctccccaggatgactgaagatgacttctttttacagcaagtactgttagcctttctgcaccccttagcttggcccctgctccaacttctgggtcagcagcaaggtgaactcaacagaagttgctcttgactgtttgaaggtagaagcagcctaccttttctctttgctaaaagaaggtcaaaggcttcgcaaccaggatgcaaggtctgcggtccagaagcttgcggtgagtgtgtgccactgatggagctccaagcccacccaccagccactcctgatggggttgctcacactgcagctgccctatcaccaccctgcacgttccttggaagatttaaatgtttggttgcaaatgaatgttttaaaaatgtatttaatgcaatttttcctgctctcaacatgaccacccaagattcaaacacagag

SEQ ID NO: 31053 - DNA, 1008 bp, Homo sapiens
gtttacaggcatgagccgccacgcccggccttctctccgttttaaagctgaatgatattccactgtatggatgtaccatgttttcattatctgttcatctgtggatggacacttgggtggtttccacctttttgctgttatgaataacgctgctatgagcatggtatataaatatctgagtccctgctttccttctttcgtcttagagttcttgtgtgcctattttttctgttggttagggatggaaggctgctaagcccctcactttacaattgtggaaactgaggtacagatggagaggtcactagtctagggtgagacctagctagctggagagccaggttttgggcttcttgactctgccgagcgtgtcctccaccctgtcccactacctcctgctttggcccaggccttgggcctttaaggtgggatgctgaccaaatcctctcctcacttacaacagggcagatgtctctgggcctccccaccctctggctcccagccccgccctctgcccagccagcctctggaactttgcatctttcttccatcggtggagaacagcagtgggccctgagtctccagacactgcttcctaccttggggttcttgggcccagctccgcaacctctctgtctccgactccccagcaagtgcccagtgttttcaaagagcaaaagcctggctcttctcctgcaccatcagaagctgggacatttccaccctggcttctgcccaaacctcagacacaagtgctgttgtcttctcagaggggcctgaacctggcttttcccccacacacttgaatccacattctttctggggacgaggaggagaggaggacatttgaagggcagggagaggaaaaggaacgtttactgagtttttttttcctgaaccaggggctttaccagggggctttatgctcagcaggccttaggccagcttcagagtgggcactctccataggccccaactaagaatggggtgcaggcagagctggcctgt

SEQ ID NO: 31054 - DNA, 1048 bp, Homo sapiens
ccacacccagctaattttttttggtgttactctgttgaccaggctggtctcgagttcctggcttcaaatgattctcctgtctcagcctctcaaagtgcggggattacagggatgagccaccatgcacactccaaggagtaattataacagtattttataattattaaccatttataaaaagatttttttagtgttttgcttaaaataatggatagcatgaacaagaaaattgaaatattactttgtattaaaacaacattttatttaatcagagaaaaactggcaaagagagtaacaaattttatattgatttgttacttggtttaagaagaaacatcaattttgatatatagttatataagtagaattagaatgcttcaaatttgccagataattgcttcagtacttactcttatctttgtttataatcctctcctgtcatgtacacttttaattattggagaattaaaaattgctattttttaagtagtccttaaataattgttgaatgcctgaatgattgttcatagtttagagaagaaaaaatgttttaatgtgatcatgatttctaatctttcttataattggtggtattgccttttatacttctccatgaaaaggtattataattaagatgttgtatcttagtgtgatttagtagtatttggaattccttataatagaaaacagagcaattgttttaggtttgaatacctacattactgaactttctagagtctctgaaaattgaagagcaaaacttgaatagcacccctaaatacattctgatttacaaaggatgccttatcaaagtttatattatgctgtttggcttattttttatattatatgtatgtataatatgtatatattatatataatatgtatatataataaatataatatgtatataaatatatatatagtatttatatgtactccagactgggcaacagagtgagaccctgtctcaaaacagatatgtatatctatatatatctctctctatctacctatctacctatctgtctatctatatctgtcaccc

SEQ ID NO: 31055 - DNA, 1030 bp, Homo sapiens
acttcaaaatgatataaaatccatttaccatcttcagtttagagcgtacagaggagattagggcgaacaaagaggaagatgtagttaagagaacaggctttggagccagaatcctaggtttaaatcctacctctgccacttaatgtcattgtgaccttaggtaaacccttagcctctctaagcctcatctgtaaaataaggatactaatagtagccatctcatggtgattctatgagttaatatatttaaagctcttagaacaatgactgatacatagttatcacttaatagctgttagctatgattattattactgtaataaatgatacttctgtcaaagctaaaaagatacaccaatatcaaaatattaattagatattatgtattatgtcattcacataggatatattaacatcaaaaatatatgttgaagtatatgccagaaatctctgacaaaccaaaatcctttatttatttcttatttttgagacagtctcactctttcacccgggctggaacgtggtggtgcaatcatggctcactgcagcctcaacctcctgggctaagatggctctcttacctcagcatcccaagtagctgggactccaggcatgcgccatcacgtgtgactaatatgtttgtagagacagggtttcaccatgttgtccaggctggtctggaactcctgggctcaagtaatctgcccacctcagtctcccaaagtgctaggattacaggcatgagcccctgcacccagcccaaagtcctttatttttttaaaataagatttcctgtaataatgccaagaatatttttcataacatttaaaaattatttttatctttattatagggcatttcttccatgacttttttctgtcttagtataataaattagaacctttttgttaaaacaaatccctagtgcgagtttaagtatgggaggtttggagagttcttgttttagagtgattagacctgaaaaagagaaataaaattaattaccatggtttttacatgggagctggtg

SEQ ID NO: 31056 - DNA, 1061 bp, Homo sapiens
cattttatatataagatatcttaagccaggttttatagtgatggatttgaggattataaatttaggttttaaaaaaatgtaatattgccaggcgcagtgactcatgcttgtaatcccagcactttggtaggctgaggcgggtggatcacctgaggtcaggagtttgagaccagcctggccaacatggtgaaaccccgtccctactaaaaatacaaaaattagcaggacatagtggcacatgcctgtaatcccagctactcgggaggctgaggcaggggaaatcacttgaatccaggaggcggagattgcaatgagccgagatcgcaccactgcattccagtctcaaaaaaagcaagactccatctcaaaaaaaaaaaaaaaagtaatattgatgtagattttggtattatttggtatttctctttataaatatatcttaaaggcagttggaaatttaggatttatcagtaagaaagcaatattttcctagataacaataggcttaggactgcatcagatcaaaattatcaaagtctaggactttttgaagagttttttttgtttgtttttctaggcttttctgtttgggtttctcttttcttatgggaagcagatatatatcttttctttgcccatattcctatgtcttttagcagttttactcgtgttctctattgcttggaattcttttcattcttttatgtttttgagacagagtctcactttgtcgcccaggctggaatgcagtggtgtgcatgaacatggctcactgcagccttgtcctcctgggctcaagtgatcctccagcctcagcctcccgagtagctgggaccacaggtccatgtcaccatgccaggctaactttaaaaaaattttttgtagagacagggtcttgccatgttggccaggctaatctagagctcctgggctcaagtgatcctcctgcctcagcctccaaaagtgctgggattacaggtgtgagcagctgtgcccacccttcttttcattcttaacaacaatattcttggaagtctgttgccctcctgttctaagtatccaag

SEQ ID NO: 31057 - DNA, 1050 bp, Homo sapiens
caatgctctacaaacctgaggctcctggggctcaggacaaggaggctggtaggcatgaggggacaaggaatacaggccaagtgtgcctggtatgtagaggtcccaggtgaacattctctcaaccaatgtttaactttctttctaggaaaaagatttcacaaagttttatataagcaagtagataggtttagagtaattatgtttcattaagaattatgtccttggaaatgacagtgctgcatataaataaatgaataataatgatgaatagcctgaatatctggcatatagcagttacctttaaattaattgaaaaaaaatttaatgtaaaagtgaaatatctggagtgacaaggcactgcacagtgtgattttcatcaaattgctttattcctctttcttctgaagcatttgtcagttcaagttgatctaagggcattactgaatttgaattcaaatgtactccaagtcccaaggtttaaaaatgaattcctggggttctgaactcatgatatgcttttgtatctgaagatgatcatccaaaacatattgagtagcactacgacaggatttttcatttgatgtcaaagcaacttcacattgatagtgtttgatatagtcactaaaatccaaataaagctattgtctctaggaagaagaaattgtttctttagctaaatatggccatactttggtgcatctgacactgacaatgaatatagatataactttatcctaaaagggtttatatataaagtgtaacattcactttatatacatacatatagatagacgaatagacataaataaagtcaatatctgaaagaagtagaagattataagtgattttatttgtattttctatttttctattatatagtgtgtaataaaaaaacaaagttatttattttttgagatgaagtctcgctctatcactcaggctggagtgcagtggcgcgatcttggctcactacaacctctgcctcccaggttcaagcaattctcctccctcagcctcccgagtagctggttctgcaggcgtgtgcctcca

SEQ ID NO: 31058 - DNA, 1123 bp, Homo sapiens
gaaaaaatgcaaagatacagagaatatttgaaaatgcaaaaaaaaaaaaaaaaaagacaacaaatgcaaaaatacagagaacgagaaactcttatatattgttggtgggaatgtacattatgaaaaacagtatggaggttgccaaaaaaaaaaaaaacctaaaaatagagctaccacatgatccagcaatcccactactgggtatatattcaaaggaaaggagatcagtgtgttaaggagacatctgcactccatgtttattgcagcattatttataatggccaagatgtggaatcaaccaaactgtccatcaacagatgaatagatgaagaaaaagtggtatatatacacaatgaaatactaatcagccataaaaaagaagaaaattctataattcgtggcaacatgggtgaatttggaggacattatgtaaagtgaaataagccaggcagagaaagacaaataatacatgttctcacccgtatgtagaagctaaaaatgtttatcttaaaaatgtagagaggagaatggtagttactagagacgaggaaagatgaggtagtgggagatagccagaggttggttaatggatacaaaattacagctagatcagaggaataaattatagtgttccatagcactgtaaagtgatcataattaacaacatttactgtatattttcaaatagctagaagagcagattttgaatgctcccaacacaaagaaatgataaatgtttgagatgatggatatgctaattactgtgatttgataattacacattgtatacatgtattgaaatatcacactgtacctcataaatatgtacacttattaaatattaattaaaaaaataaaagtagaaaaatgggccagatttcagaaggcagagataataatagcagttggccatatttcacagagtttgatgcttttcattcagcaaccctgaaaatattcccactttattactttttctttttaatttttgtgggtacattgtaggtgtatatatttatgagatacatgagatgttttgatataggcatacaatatataataatcacatcatgggccaggcgtggtggttcaagcctgtaatcccagcactttgggaggctga

SEQ ID NO: 31059 - DNA, 1938 bp, Homo sapiens
gagccgagatcacgctactgcactccagcctgggtgacagagcaaggctccatctcaaaaaaaaaaaaaaatcacataatgaagaatggagtgttcatcccctcaagcatttatccttgtgttacaaacagtccgattatactctttagttattttcaaatgtacaattaaaatttttaaacttttaggttcagaggcatatgtgaagggttgttatataggtaaacttatgtcatgggggtttgttgtatagattatttcatcatgcagatattaatcttagttcccaggggttatcttttctgctcctctccctcctcccaccctccatcctcacgtagacctcagtgtcttttgttcccttttttgcattcatgggttctcatcatttagctctcacttataagtgagaacatgtggcatttggttttctgttcctacatgagtttgctaaggataatagcctccagctacatccatgttcccacaaaagacacaatttcattcttttttatggctgcatagtattccatggtgtatatataccacattttctttatccaatctgtcattgatgggcatttaggttgtttccatgtctttgctattgttaatagtgctgcaataaacattcacgtgcatgtgtctttatggtagaatgatttatattcctctgggtatatacccagtaatgggattgctgggttgaatggttgttctgtttttagctctttgaggaaccaccatatggctttccacaatgattgaactaacttacactcccacaaacagtttatgagtattccctttattccacaacttctccatcatctgttattttttgactttttaataatggccattctgactggtgtgagatggtacctcactgtggttttgatttgcatttctctaatgatcagtgatgttgagcttttattcatatgatttttggccgcatgaatgtgttcttttgagaagtgtctgtttgtgtcctttgcccactttttcatggttttttttcttgtaaatttgtttaagttccttgtagattctggatatttgacctttgtcagatggatagatagcaaaaattttctcccactctgtaggttgcctgtttgctctgtagcagtaccatgctgttttggttactgtagccctgtagtgtactttgaagtcaagtaatgtgatgcctccaggtttgttctttttgcttaggattgccttggctattgggctcttattttgttccatataaattttaaaatagttttttctagtcctgtgaggaatgttgttggtagtttgataggattaacattgaatctctaaatagctttgggtactatggccgttttaatgatattcattctttctatccatgagcatgggatgattttccccatttgtttgtgtcttctctgatttctttgagcagtgttttgtaatttttattgtagagatcttttacctccctggttagctatattcctaggtattttttctttttgtagcaattgtgaatgggattgccttcctgatttggctcttggcttggctgttgttggtgtataggcatactagttatttttgttttttttatttttaatttttttctatttcaaaagtttttggggaacaggtggttttttattacatggataagttctttaatggtaatttctgagatttttggtgcacctgtcacatgaacagtgtacactgtacccaatgtgtagtcttttatcccgtactcccctccccaccttccccccaagtccccaaagtccatcatattattattattattttgcatcctcatagcttagctcccacttataagtgagaacatgtgatgtttggttttccattcctgagttacttcacttagaataatggtatccagctgcatccaggttgctgcaaatgccatta

SEQ ID NO: 31060 - DNA, 1063 bp, Homo sapiens
aacaccccactgtcaatattagacagatcaacgagacagaaggttaacaaggatatccaggacctgaactcagctctgcaacaagcagacctaatagacatctacagaattctccaccccaagtcaatagaatatacattcttctcagtaccacatcgcacttattctaaaattgaccacataattggaagtaaagcactcctcagcaaatgtaaaagaacagaaatcacaacaaactatctctcagatcacagtgcaattaaattagaactcaggactaagaaactcactcaaaactgcacaactgcatggaaactgaacaacttgctcctgaatgactactgggtaaataacaaaatgaaggcagaaataaagatgttctttgaaaccaatgagaacaaagacacaacataccagaatctctgggacacatttaaagcagtgtatagagggacatttatagcactaaatgcccacaagagaaagcaggaaagatctaaaattgacaccctaacataacaattaaaagaactagagaagaaagagcaaacaaattcaaaagctagcagaaggcaagaaataactaagatcagaacagaactgaaagatatagagatgcaaaaaaaatccttcaaaaaaatcaatgaatctgggagctggttttttgaaaagatcaacaaaattgatagacctctagcaagactaataaagaagaaaagagagaagaatcaaatagacgcaataaaaaatgacaaaggggatatcaccactgatcccacagaaatacaaactaccatcatagaatactataaacacctctagtcaaataaactagaaaatccagaagaaatggataaattctgggacacatacaccctcccaagactaaaccaggaagaagttgaatctctgaatagaccaataacaggctctgaaattgaggcaataattaatagcttgccaaccaaaaaatgtctaggaccagatggattcacagccaaattctaccagaggtacaaagaggagctggtaccatcccttctgaaactattccaatcaatag

SEQ ID NO: 31061 - DNA, 1067 bp, Homo sapiens
caaatgttattagttaagatgaggttgtaatgaggtagggtggacccctaatctactatgactggtgtccttatacagattgacaaagtgtcaatctctgatgggatcctgcttcttttcaaaaagtcattttagagacaatcaaggatatttgaatttaaactggatattataaactaggaattattaattttcttaagtattactttattattagtagtattattattgtagtagtatttaataattagtattattaaagtatttagtatgactaaagtatgtaagtattgccctttcttaggtattaccattctgtaggagaatatccttgcttttaggagatacgtgtttaagtgtttaggggtgaggtgtactgatgtctgcaacttattctcaaataattctgaaaaatgtgtagtctactgagtacagtaaatgtggcaaaatgttaacagttattaaatctagatgtatgatataagtgttcctctttcagcattctgtatctttgaaattttttaaaatgaaaagcctgaggaaaaattattcctataatcttattttatatcctctatttattgaggaaaacctcccttcttttatttccataaaaatgacaaaggccagttccatccaactgaaatggtcacacaacccagagttcaggaactcacaggagcagtataatgggtattaagcctggatctgtagaagatggtcaggtgtggacagtagggctccagcccctgcatagctgggcttaagtcccagcttctttactttttcctcatttagtggtcttgggcaaagcacttaaaacttctgggcctagtttcctcaactgtaaaataaggatagtaatatgttatttgttgtgagaatcatatgttacatttgtacatgttatgtaatatttttgtgtgtaacacctacatgtaaagcaataggcccaccacaagcagtagctgttgtgttaagtaccaagggccatcttgtgagcccctgcaggcaattcagccctattggagaatgcagagaaagttacctcaaggaagcagagttgg

SEQ ID NO: 31062 - DNA, 1050 bp, Homo sapiens
gtattgacctatctctagttagcatctgctcaccaggacccctgagactgtggagggggtaactcagcagaaggaccagggctaacagggactgaatccttaccacataccagggcccgttccaaacactttgcatgttttaaattgcttaatcctcacaatgacccagtggaggagatgatagttttgtctcttcttcatattatgatagaggaaaatgaggacagagaggccaaatgacaggcccatggtcaaccagctaagaagtgaaggggcaggacttgaattcaggcctcctggccccagagtttgcagcacctggcatgtggcagtagttgagaagttacactgagtctgagtagacctgtagttagtgaccccctccacagcacagggctgatggacagtgggctggcttgggccaagagcagctggcactgcagatctgttggaatagctctgcccaggctgcccagggcaagttgcagactgggaggcatatgtatcctaaaatagaacttttgagaaataatgtgcatccaaaggaatgagtctcagacgaggatgttcaagaatcagtagcagatgctgtgcgggccacagaatgtttctaggtaaaatgccctcctccccaccccccatgtcccccacaaccaacaaacaagctaagaaaaaagaaacaaaataaaataaattgaaacaaattaataaacatgcaaaaaccacacagacagtcatctcttctgtctgtgggtaaaactgacagctctagaaataaacggagatccatataaagggtttcaaaatatgggagtaatttttgtttttccatttaatgctaggtttcaaaggaggggaatatgtctatcactgctacataggcattctgtttaaaacccacccagatgccttaatggggctctgtcaagagtgggaaggtccccacagctgtttctcaaagccagtagaccactcagtgtgggcagtggggagcttgtgcttggcaggcctcccacgtcgccatcatttctttttgaacacttgacggca

SEQ ID NO: 31063 - DNA, 1066 bp, Homo sapiens
tctttctgcagggctaactgctgactggagaggggagaaaatggaacacggagagacagaagaaaggtaggagtgtgttaacacgtggaattcattaagggctggaagggtgatttattttaggaagaacaagttctctaccatcaaaggtcacaaaggatcaagtcagagaggacaggcctgcttttcaagagcccacaaccaaaacagaaaggtgagggaaaatgaatcattttgcactgattgggttggaacagcagagtgatgcaagaaattctgagatcaattttcctagcaattctggtgtccaatgaattggcttttcagccagatggttcacaggttcagaaaaggcttgttgatccattatcccctcagggaggggttccataagtggacattccagggcccagaatcataagttctcatgccaagagtgctctggtggaaaaatttccatcatgctttatatttccctacttttctttagcaaagaacactaaatataattcaaccttgacttgatggctgagattatcaatgctacaggacaacttgactgagaaataaagtgtgtccagctctcttggcttttaattgtcaccaaataataataacagcttttcctccccaccccaggagaggagtcagagcttgtgcccattgctttcggggagagttgagacctctgacttctaatgaactcctggaaggacagtgtgagagtctctgggtagtggcctgaccttgggaagatcaggactcatggtgaggggggcagggcagggcagagggtgttgcttgctttgttgtggcacttgaagggctggccctttgccgggggtgggaaggtgacagcacagataccttgggtcagagtactcagctctgtcctccctcagtttgggagataggacagaggttccagtggctgaattggcccagagggaaaggatgctttgaatattcatactgcccagccttgtataaaatgcatgggcatagacagtgaacagtcaattgcaaccatgaaaaatgacaagccgggaaccttcccaaatctctt

SEQ ID NO: 31064 - DNA, 1082 bp, Homo sapiens
gcctgtaatcctagctactcgggaggctgaggcgggagaatcacttgaacccgggaggcggaggttgcagtaagccaagattgtgccattgcactcctcgcaatagagcgagactccatctcaaaaaaaaaaatccttctttggtcactattactccccttttccccaaaatcaaggagaggccgagttgaacctcactttgggtcagcaatctgaatccacaacagaatcacagctgcatgagaaagggccctgggtacctttagactctaacttgtataaagtcagatttgagcctgacagaacaattttaagtaatattagctagccagaaggtaaaaagattacatacctgtatcctaagttgaaaagagaagtaagttcaagttggcatgagctgctgcacaaatgccagtgccttgctcacctctcattctctactatttgttgagtaccttccatgtctaggaaccagtgggtcccaaagctagtttcctttctggatcacctgaaacaatgaaaaaaatgcagatttctgggtcctatcccagacctagaatctctgggtggtagagctcagtgatttcagattttgaactttgtccataggaggctgtttggaaaaagacttctatggtttaaaaattttgaaagctacttactgttaaagtgcctacttttcatgtcagagatgatgaagtaagacctagagaggtcagtctacttgtctaaatatacatggctgatacagcaattgtagtggcttggtaattggatagatgtgtagagagattgagttggaaggaagaaacagttgttctgagcttggatgatcaagatgagagccagggaataaaagagggaactagttttatggggatacatagtgaactgaattttaggtaaggtgaatctgcgagccatgctgtgtggactcttggtaatatttggggtggcaattaagacacgctttgtgtctagggatggtgtccctttgtgtctagggatagtgtctagggatggtggctcagggtgtaacctcccttgggaaaccttcctcattttattcttcaaataaaccc

SEQ ID NO: 31065 - DNA, 1036 bp, Homo sapiens
agttatgtttaaccatccttattttacagatgagaaaggatcatggaggttaaatcacatgtctaatcacaacttgtaagtggttgagccaggattcaaactcagatctgttgggctccaaatccttttcttcaacagtgtgctaggtcagctttgaaagaggtttggagcctgacttaagagaccaaatctctcttgcttccctgtggaagcaaggtgccctgtggacttcctagcagcagggtgagacatgagaaaagtgttttctgggaacatgattctgctaaaagcaagctgagcctggagggagtccagatggaggcagaggggtagtggaatgttgttttaagatccaaggggaaagctgaggatcacctggatcaaagtgggggcatagctggacaaggacccttggttcaggaatgttctccaaatgggctgtcccaatggaaatgggtttagtttattgctctgacactctattccaagatgtggtgtctgagaagtgactgtgaagaatggaggtgtggcctgagacagatataccatgagttcccaaagtgagacctattttgatgatgacactgcagctctcatatatgtatccttgtgctgtgaaatctaagtaaatgactctgtgtgtggtacgagggatataaaacagcacatttatctttcagtaaatacactggagttaggaagacagagtgaaaaatggcccagctgttgtcaaaaggccaatggggaaaggtaaggggtgagaaagaaataactttaccacaaatggaaaatgagtggaggaaggagtagacagataagaaaccttggagattcatcctgtgaagtccagccagaagctgctgtagactgagcattcagcctcctgggctggagaagtagatagtccctcccaggtcaaattccagggcctccaccgtccctcctgcctgcaactgaggcctcctaccccgtaggcctctcctgtaagaatgtgtaatgagaagctggcctggtaggggaaggggctgggggcaag

SEQ ID NO: 31066 - DNA, 1035 bp, Homo sapiens
tccaagctgtgctgtccctctacacctctgggcgcaccactggcattgccatggattctggagatggggtcgcccacacggtacccatctatgagggctacaccctcccccatgccatcctgcatctggacctggctggctgggacctgactgactacttcatgaagatcctcatggagtgcagctaccgtttcaccaccatggctgagcaggagattgtgtgtgacatcaaggagaagctgtgcaatattgccctggacttcgagcacaagatggccactggcgcatcctcctcctctctggagaagagctacgaggtgcctgatggccaggtcatcaccatcggcaacgagtggttctggtaccggaggcactgtttcagccttccagggcatggaatcttgtggcatccaagagaccaccttcaactccatcatgaagtgtgatgtggacatctgcaaagaactgtatgccaaaatggtgctgtccagtggcaccaccatgtatctgggaattgccgacaggatgcagaaggagatcaccgccctggcacccagctccatgaagatcaagatcatcatgcccccagagtgcaagtactcagtgtggattggtggctccatcctggcctcactgtccaccttccagcagatgtggattagcaagcaggagtatgatgagttgggcccctccgtcgtccaccacaaatgcttctaaatggactgtgaacagatgtgtagcatttgctgcatgggttaattcagaagtataaatttgcccttggcaaatgcatacacctcatgctaccctcacaaaactggaatagccttcacaaagaaattgtccttgaaggttgtgtctgatataagcactggattgtagaacttgttgctgattttgaccttgtattcaagttaactgttccccttggtatttgtttaataccctgtacatatctttgatttcaacccttagtacatacatgtggtttggtcacttcatggctgaggtaagaacatgcttgtggaagacaag

SEQ ID NO: 31067 - DNA, 1040 bp, Homo sapiens
gtgtggagccaaggagggggactatcacttaaacacaaatgacagggaaaaggaaataagtaatgttggaaggtgaatgcctaacaaacaatgataattcattttcttgtgacacaaagtagaacttatgaaaacaactttccctaggacccaataacttattccatgacctccctctgaagtcagcagccagctgtctttgctagatcaggagcagtgaacattcggggacaaggattcagccagatctgaaagggtcgttaaatggtcatttaatctggtttcctagattaatccaattaatcagggtctaatggaagaatttcaggtaggaagatattcctgatgcttttcaagtcccacagaaaaggcaggtggctgtgggggtggggtgaacatgggtacaaaccaaaggggctagacaatgctgcttcccccaacccccacatgggctctgggaccgccttagaaatgaagcccagacaatccaagagcaaccaggagggatggccatcttcagctcacctcctcacaagaaattttcatcccacagaccacccaaaagtctgcaaatgggctggaactagggaagctggttggaaagtgaagccagtctaacttttctattaaaaactaataataacccccatcactttggccttgccggcagtttacccagagacatgtgccaacagatgaatgaagacatctttgtaccactatgacaagggactgttacttcagaagccattttccagctcctctgaccacttagaaaccccagccgtcactgctgcatgggagagtgacacaaaaagcccagctcccacaggcagcctgagtgagtgtctcccagggatgtttcaaggcccacttgccccacttaggtgacttatactaggagtgccagacaattcccactaaataagccatctcttggcagtgaccggtatgacctgcaaatggtaggaactctatttggtatcaagaaacttgtgacattcattaacactcccatgctaaaacaccactctcaagag

SEQ ID NO: 31068 - DNA, 1062 bp, Homo sapiens
ttttgatatctgcaggatctgtaatatctgccagtttgctcctcatgttgataacttatattttcactatttcatatttagtgcaggtttatcaagtttataaatcttttcaaagaaacagcttcttattttattgattttctttattgcttttctgtattatttccttcatcctacttgtatgggcttattttgcccttctttacctagatgtttaaggtgggagctttgattattgatttgagatgtttccttttttaatgttataaattttcttctcatcactgctttagctgtatcccacaaattttgatgtgttgtgtttgtattcagttatatgtactagcttatttccactgagacttctcttttggcccatgtgtttagaaatgtgttgcaaagttgctaaatgtttggagattgtcctgttatctctctattattgatttctagtttaattccattgtggttcagaaagcatattttgtatgatttcagtttttttgaggtttactttatattccagtatatagtctatctcagtagatattctgtgggcacttactacaaatgcatgttctgcttttgttcgggtctataaacgtagattacatcctgttatttgatgttgaacttttctgtatcctagctgattttcggactagttctatgaattattgaggaacggatgttgaaattttaaattacaataatagacttatttcttcttttagttctaccagtttttcttcccatattttgcagctctgttgtttagtacatacacattgagaattgctgtatcatatttgtgaagtggccctttaatcattatacaatgtcactctctgtctccagtaattttttttttactctgaagtttgctttatctgttattaatgtagtcacaccgctttcctctgattattgtttgcatgatatattcttttttttccatttttttttgttttactttcaaactgcctctgttgaagtaaattttttgttagcagcatgttgggtcatgtttttcaatctactctgctgagatctgccttttca

SEQ ID NO: 31069 - DNA, 1035 bp, Homo sapiens
cagtcatcgtggaggttgccgagaagggaaggggaaggaggagacagtgactcttcagagtagctcagtggctgagacattctgtggattgtagggaaatcattcagccagggtcttcgaccactatggtggcatccaccccatgaattggaaggcttgcttcatttcctaggaggttgacatcagagtagtggagtgctgaagatgcaatgcctttcctcctggggaagggaacatgggaggcttcattctaaagtaaaatagcaaaacacagcatcaattttaaaatgtgcatgcccagtatatccacttttaggaattcatcatcattttgtcattgggtacaggttaaatatgtttgccatatccgtaggatggaatattatgtagccaccaaaataaagcttgtagggtgtctttaataagctacgaaaatgatcttataatatgaaatgaagatgcagggtacagaattatacataatgtatgatctctactatttaatgaaagctcactgaaagaagactgtggaagtaaatatgcctaaaagttactaccaattgcctccaaaaaataggattaccattccttttttgcctttttatatttataaattttatctactgagcataaaaattgacaatgaaacaaaacccaccaagagatactactataagtgatactgaatccaaagacattgactttctggtggaatttcagacaacaccaggggaaattgttggaataagagccatctcatgcctgttgaatgaccccagccagacagtgatctgtagaatggaccattgagccagctctgacaacactgggcttgaggaatgcccaaaaatgtgtgaggggcagttgggagtgtgtgtctgtcacagagtcaggagaccccatcataatcaacccattgtggggccctggtggaaggggaggcagggcttctactatgggttagccctgttccctgagcaaaacaaatggtgccctcgtgtgtgatctaagactgtccagccaggtataaattgg

SEQ ID NO: 31070 - DNA, 1034 bp, Homo sapiens
caagaatactctttcttaggttttacagaatataaaatcaaaacatgtacatgtttattatagattttgggcctgtttgtgggttttatgttcaataaatttacaaagtaaatacactaaactgctaaaaagaaatcaggcaaagacaaattgaattatggtttgccataaatagatcactgttatagtgtgaatatggtatggactaacccacaggttcttctgagtcctacattgcatatactccaagtatactgtgtgatgatgactcatgtcttttaccacttagctctcaactcttatctaagtaaatttatggcttctatttaagattcctcttgtggcctcatatataatgaggttttaagactatttcatggctgtttgaaaatatcttttccttgtttattgagtattgaggtttctaagttctacttaattttgtttcagatttgctataatcctactactttttgtctaattttgttgaaatctgaccgtataattgtggtttcgacattttttggggggggggttaaattttttcaactgcctatttaaagctatgagtggaatttttttgaagtgttaagcttatttatgattgaatgtttcacataatatattcagccccaagtagttcatatattaagaattcttactggttttcacatatttttcaaatcagatttgtcaaggtatcgtttacatacagtaaaatctaccctttgttaaatgtatgctgtttattgacttttggcagatgtataaagtcatttaaacactaccatagtcaggatattggctgggcctagtggttcatgcttataatccccgtactttggaagcctgaagtgggaggattccttgaggctaggagttcaagaccagtttgtgcaacatagcaagaccctgtctcaacaaaaaaattttaaaaaatttaaaaaatttagctgtgcatggtggcatgtgcctgtagtcccagctgctagggaggctgaagcaggaggactgtttgaacccaggagttcaag

SEQ ID NO: 31071 - DNA, 1725 bp, Homo sapiens
ccaaaaggcatttaggatatctcgactttttctgcttttcatagctgtcctgctgtgcgctccacctgaagttagtgttcctttctcactttccacatagaaattaaacttcaaagaaacaagatagaaaatagaaccaaaggactaggaaggatgtcagggcttagaacagggttgaagaaagggacaaaaagtctaaaaacctgagaatttgtgtatcgttgaagggcagtaagtgatgtacatggcctttaccataataaaaaggaagctattcaaggaagatgctgaagaggtgtcaaggtgataaggataaagaactatggtgtgacaaacaggtatcagtaaccatctaaaaggatgggcatggcaccatgtgtaggtgcaaaggaccacatagtaagaccattgtgaagtagtttttaaaaaagtcaaaagacagagaacaagcaaaggaactaataactaaaggaacaaccaaaggaactagcagttagaaaggggaagatctggaactcttaaaactaagtcattgtttggcttatgggacaaaccaaacagatagaatggttgcagtccctattaagccaaaaggacatgaaaacataacttcgtcatttttctctgacaccattgcatcttagattgttaacctcttccatgatagaacactgtataaagttcatatttagagtgaaaatgctttctgtatccaaaccatgtaccagatccatgtcttgttatttattacgtttcaactttttatgggttcttttctctctttaagaaaatatccaaaattgcatcctaattataaaacaagttaaaagaaaaaaaacaccattaatagacagttcatgtatattcttccagtaatttttctcggttatcatatacataaaaacatgtatactttattgtgctttacataaactgaataatactaaatgtttaacctaatctaactgaagtttttccatgataatatgtggggtgatttttttaaaattgtatagcattctagcactaataaacatttccttattatacatttagattatttttagattttcattgtataaacaatggttcagtaaacatacctcaacctttatctttgaatactttaggaagtatatttttttaggatggtcacctaaaattagaatttctggataaaagggcatatgcatatttaagactagtgaatattgaccgggcagagtggctcacacctgtaatcccagcactttgggaggccaaggcgggtggatcacaaggtcaggagatcgagaccatcctggctaacacagtgaaaccccatctctactaaaaatataaaaaaattagccgggtgtggtggcggtcgcctgtagtcccagctgctcaggaggctgaggcaggagaatggcgtgaacccgggaggcggagcttgcagtgagccaatatagggccactgcactccggcctgggcaaaagagcgaggctccgtctcaaaaaaaaaaaaaaaaaaaaaaaaaaaaaaggcatactggatttttatcccttatccatagccttaccaatgctggctactgtccatcttttttaaatacttaccaaatggactaagagggatttttcactgttttaatatgatttatttaatttttggtgcagtcatactttcttgtaatttgtcatttgtatatctctcctgtgaattgcctatatatatttcatggc

SEQ ID NO: 31072 - DNA, 1071 bp, Homo sapiens
tcttctctcctcaatttctgttagtgccttttccctttttgctgcatgttttggcttctgtctgaaatgtgtcggcaattcttggtaaagtattcattttgtcctgtgctcaaatgctgaaatttttgtgagtgatgtattattattgacaattcagttactatgtgtattttttaaaattgtttattattctacataattcacactagacagcacctgaaatttagacactggctatgtgtacatgcttactatagaaatgtttccaggaactctctgtttctgtcatcactgataagtatatatgattctgaattaaaataactagttttaggtctttaccctgccataaagataaacagttggtttgaccaatctggttctggaatcatttgctgctatgcatgttagacaaagccacgaactttgattttccattgaaaattctccctaatatctgagatttattgtatatttactcatatctcacattttcaaattatgctgtaactttataaactgtagctgctttcatcagctattgatcaataaattgaatgtcaattatgtgcttaataatgagtgccttaaactgttaaacacttttggtttagaaataaagtgaatcaatttgacctatatacttcatgaagtaagtaagtttgaaatacaaatttctgaaaggtcaatagcccttatcgtattacaaattgtttttaaggctttttgtatttattaattgtcagttgattcactgaagctttaaaactggaagggacaatccaaaggtcaaaagagtgaaatacaatcatttaccaataaggaaaccttgggcaaattatgtaatttatgtgaacctctcttagcttacccatggaatgagtcaagtggtctacatagatttggattttgagaattagttctttcatttagtgttatagagattatcttgttacaactagaattatttttaatgtaatttttacagatgttgaatattagtagataggatttttcccctacgaatttggatgtaaggtaaaggttggtggccagtgacaaaccttataa

SEQ ID NO: 31073 - DNA, 1551 bp, Homo sapiens
tattctcaatttttaaaatactaataatgtaatcattgaatgtttcctacatacgtagtgggttttatttgctcacagcatacagttatttttcaatttatgtttttctattagacttaaatttcattataataaaggcttttactcattaaatacaggtattgtcttgcatttatgaaatattttttaaaaatattttatttgtccatggcagttaattcagccagatggatggttggacagatgttttgtgtgtttgtgtgtaaacattcttcctgttttttgttttgtagaacacaagaaattaaatacaaaataatgcaaaatatttcataagtatggatgtgcaatattactggccatagtgcaaaaggtgaaaggtactattgtagcaacgtattctttattttattaaaaatttatataaatagctccaaaatgaagttacttgaatattctgttggtttttttttttttaagatttattaagtaggctgattgttaaaggatagaaattgtgttttcatctccttaattataatagataatagtggtaggaaaatgggagatgatgatcccctctaaatattcccttttgacaaggttagcattttttctttaaggcagaattgatcttcttttaggtaagtatttagattctgaaactgctgcagatggcaggattttcagtactcggtacatttttttaaatggcccattttgatattcctttcttttttttaacttaaaattttcaaaaaagttagatctcacagtaaatatttctcaaatccttccaataggattcaatttgtacacatgtttctgatgaggtcactgcttgttgttatgatacagaaaagcctgtgtctattttaggcatttactgtacatttctcccgagaaaagagtgagatcgtgtcatctcatgctccccatccgcaggtcacttcctgtagaaatatggactaacttaaacctcgtgagtactgatctgagcatctcttgcagcctgtagtataagaaacccaccctgggattttatgatagctgtggaattagaaggcgggaaattaacttttatttcctgaatttgtgtgtgcattgctaagtctgattcctttataatattccttctagaaggaagaatgaggtatttttcagtcatcatgtaataaaagcctggggtcttcagcttggccataacagccttgacctccaaagaatgtaataacaatatatatatagctgtaaatggtattatactatcttaaaagttttagataaaatcatagttctctttgcttagcataacatatttaaaagcctaatacaatgctttccattcttttttgtctgttgatacttggctttcttagaactcttttgcaaaaaaaacaaaaattaattactttgcaaataaatgcaggataagaatatatgggatcttagctgttttagttttaattacttttaaaagtggtgttaatacatttaggaggttaggtgggctttgttcttacagaagttgaaataaaaagtactgaaaat

SEQ ID NO: 31074 - DNA, 1070 bp, Homo sapiens
ctagtacataatactttagttttaaagtaaactagagctgtcttctaccctgagtttattccatgtctataaaagagggaacttccaatttgtgactttttgaacttttgagtttttgtatgtgtttaagtaaatgacgataggcctgtcctattaaccctaacaaaaaccttactgtgatacggttattttaacagtattagtatgtatatatgtagaaagtattcatggggccaaacaacagtcttttccactatataatcaactaaagatcaaactattggtaaaatttgacatttgtgtagaattcattttgaatgtagtgatttgggatgctaatcaaaccccaggtaactgttttttttagctggttttaaggatcccaagtgcatgctttttagccgtagaatacacaaaatgtctatgtgtttgtagagatggatttctgaattcagcttagacagtagagagcaccctaaaggatattctaagtaggttgggaaagcaatttatattcattttgcttttaaaagaatctgttagttaaggacagaatttgagaattcatatagattggaagtgaagacaaatgtttgtcgtatgtgaaaagtgtaatatatacataaattagtagtttatttatatacattttcttgaatgtagatttatctaatttttaaaaccttaaagttaatagtgaattcttcatttttaccagagttcattttaaacatgtttgtttaggttttactgcaatcacagcaaccaaccccatttggcttataaagactcggttacagcttgatgcaaggtatgttaattccttaaaataaaattggttaaagtggatttaactaattttttttctacaaagtttttctttcctttgctgctgaatttgtttgttgttgtagtttaattttgaaacttgggtctgccatcagaaaaaagataatgtaagagttgacaatatgaacttttccaggtgaaaaaagtatattattaatatgtgttgttttgttttgttttgttttaaaaagagtggctagaaagataccatagagaaacag

SEQ ID NO: 31075 - DNA, 1165 bp, Homo sapiens
ggttttttgaacccattttaagctgaggaaccaatcggtgcaaacctcagaggttctaaagtgtagggcctttggtgttctgggaactgagagtaggccaaaagcagtgctgcgtagggtcttgccatctcaactctcctactggctttagaatagagactcttaagtaacgagatggtcctatcttatatgttacaataataatgttaatggttttaaactattttagactttcagtctggagtaggttctgtgtataacatgtttctactgtttttatattttggtgtttgggaaatagtgttatgtcctataggctttaggtaaaactgatctaataaatcattaacaattatgcctgcttaaatatctgttttccatcttctgttatgttgaactatatactatttggaaacttgaaaagaaatatctaattgtttcatctgaaatagatcttttaatgaaatcttaagtgttgtagcaaaactccaagtttatttcttaaagccacatatctgaaaagtagtggtagctaagacttattccaaagattagaaagtacaagatgctagtccacattattctattgtaaactaccagagttaggtttcactatgtttagcgttgctctatgaggaatccaggaaaagcatgacttaaaactctttaatattatttttttccacttataattgtaacacaagctggcacaattcttaggcttgtggggttggggaattggataggggtggggtaataatgaaaggttgacttgaggattctggtttataaggctgagggctgagcgcagtggatcatgcctgtaatcccagagctttgagaggccagggcaggaggattgcttgaggccaggagtttaagaacagcctgggcaacattgcaagacttaatctctataaaaaatgcatgcctataatcctagctacctgggaggctgaggtgggaggattgcttgagcccaggagtttgaggctgcagtgagccatgattgcaccatggagactccatctgttaaaaaagaaaaaaaagaaaaagaaaaaaattaataaaaaaataaaaatagggctgatatgtcacctttcaggatttgtatctcttttaactttcttgtgaggaaggatctttaatgaaactagttacagtt

SEQ ID NO: 31076 - DNA, 1063 bp, Homo sapiens
ccgccccccgcccctttgcccccctgggagcagccctcaatcactgtctggagggttggtgtacacattctccagccccctcaccctatcccttgtgttggctcaccctgtagctggctgaggacaagcctctcctgcctgtgcttcccttgtctccgagacctcatccattttctcagtggctgcactgctcctcccagagaacatgggagatttagaagtacctcagagaccactagggatgcattgtatcatatgagagaaaaggctccactggctggcggtgtattctgctgccaaacggggcgtgtctcgtcggtccctatttgagttagaggtggggaagaggccgaggcaggccaggggtaggggtgaagaccgcttcagccaccgtgcagaaaggtgcctgcgtcctaggtgtgcgggtgatgccgcagccctccgcagtccccggagagttgctgtgctgccgagactgcggagagcatgttcaggaagggatttccgggctactgcgaggcggaaaatttgagactataagctcctcaacagctgtgtcctctgtattgtttgggtcgctgcctggagcaccatggctacggaatgaatacaaatgcataatggaagaggctgtcctggggcgcagaacagacttattcattccccactcacccacctgctcccttcccggctcccctgagactttgctgggacttggtgttgtcaaaagtcatataaatcctaatgtcatctggctctgttgtcccccactgccccagacatcaggcagaagaagggagtttttacttttctctgtgagaaggatggatgaggagggcctgtgcccacccaaacttcctgggaagctgccaggacctggaccccttgtgtcctgtcccctcggaacattctggaaaatctatcccagtgctttctgcttatgaagctgggcctgaggctaaccagggtggagctggcactgtgggcagaggtactgtcccaggatgagggaggcccagggaggagatgtggcagagattattggagatcttggatccagact

SEQ ID NO: 31077 - DNA, 1067 bp, Homo sapiens
cccactatgtgtccatccagggcaaggacagtattggtgaagacatgtttcaacaatgccttcaactcagccctgaagaagaaaggtagtcccttaggtttctgagtttccttctgggagtctgtcttgcatgtgaatatcatcctgtaactattgggacagccttacatcccctctgctagtctctaaaattgacttgaagatttttatttgtgcccaggcacagtggctcaggcctgtaatcccagcactttgggaggccaagacaggtggatcacctgaggttaggagttcaagaccagcctgggcaacatggtgaacttttctctactaaaagtacaaaaattagccaggcatggtggctcaagcctgtaatcccagctacttgggaggctgaggcacgaacatcacttgaacgcaggaggtggaggttgcagtgaaccgagatcacaccactgcactccagcctgggcaacagagcgagactctgtcttaaaaaaaaaaataaaataaaagatttttatttgtctgcggtggcctctttcgctgttctgtcctgcttgggctaatgtttaaaattccagatagagtgtccaagtgggcagggccttagggactctggtgcaagccccttctgctgtgaatgggggccagcgagggtcagagtcttactgaattcacagagctagttaaatcaccgagctcaggagcctctgcctggcaaccccttctcgtgggagtctcgttaccacagggttcccaagcaggcagacagagaggcagccaaggtgaaggccccgatgacacctttgctatgaataacccacaaaatcaattactgcagtgggcagagcagcagccaggcccttcactgtgtgctgctgggcgcatgtactgagatcacttcttgctgcagggcttcccttcctaattgtattttgctcaaactaatgttaaaaattaactttcccagcattcagatgaggccaaagcaggaggtggaataagagaaaagacttaatttttagtggatagaccaccagggagccacctgggatagatgttct

SEQ ID NO: 31078 - DNA, 1048 bp, Homo sapiens
tctgctgtgatctttgttatttattttcttctgctgagtttgagtttagtttgttcttgtttctctagttccttgaggtatgaccttagattgtctattcatgttctttcagctttttgatgtaagcatttaatgctatgaactttcctcttagcactgctttgactgtatccaagaggtttttgtaagttgtgtcactattatcgttccattcaaagaaattttacatttccatcttgatttcattgttgacccaaagatcattcaagagcagattatttaatttccatgtatttgtatagttttgatggttccttttggagttaatttccaattttattccactgtggtctgagaggatacttgatataagtttgattttcttaaatttattgagacttgttttgtggcctatcatgttgtctatcttggagaatgtcccatgggctgaagaaaagaatgtatattctgcagttgttgggtagaatgttctgtaaatatttgttaagtccatttgttctagggtatagttgaactccattgtttctttgttgactctgtcttggtgaactgtctagtgctgtcagtggagcattgaagtcccccactattgtgtagttgtctatctcatttcttatgtctagtcataattgttttataaatttgggagctcctgtgttaggtacatatatatttaggattgtgatattttcctcttggagtgatcctttcattatgatataatgtccctctttgtctttttttttttttttttttttttttttttttgagacagagtctcgctctgtcacccagcctggagtgcagtggcatgatctcagctcattgcaagttccacctcccaggttcacaccattctcctgcctcagcctcccgagtagctgggactacaggcacccgccaccacgcccagctaattttttgtgtttttagtagaaatggggtttcaccgtgttagccaggatggtctccatctcctgactttgtgatctgcccaccttggccacccaaagtgctgggattacag

SEQ ID NO: 31079 - DNA, 1030 bp, Homo sapiens
tggtgatgtgtaaaatggtaaaaccactttaagaaattctttatgaatgtttaaaacttgaacattcatttaccatacaatccagccattccactcccagataatttcccaagagaaactaaaacctcttcacagaaagacatgtcacaaatatttatagcacctttacttaaaatttctccaaactggaaataacccaaatgtccatcaataagtgaatacataagcaaaatatggtgtatctatagaatggaattctactcagcaataaaaacaaatggaatactgataacatatagcaacatggatgaatttcaaaaataatatgcagaatgaagcaatcatactcaaaaaagtatatactatatcattccatttatgtaaaattctagaaaatataaactaatctataataacaaaaagcaggtcactgattgcctggggctaggatggaatgcaaaggggtatgaaggaactttgggtggtgatagaaatgttttgtatctggattgcagcactggcttcattggtgtgtatacatctgcaaaaagtgaaactgtacactttaagtggatgcacctcattatataaaaattatacctacatagagttgattaaggagactctaatatttgggagatttattttattttattttattttattttattttattttggttttcttgttttttgttttttgagacagggtatcactctgtcaccctagctggagtgcagtggcacactcgtagctcacacagcttcaacctcctgggcttaagtcatcctcccaccccagcctcctgagtagctgggactacaggcacacaccacaatgcctggctaatttttttttttgtagtgatggggtcccactatgttgcccaagctggtctaaaactaactcttggtctcaagcgatcctcctgccttggcctcccaaagtgctagggttataggcttgaaccaccatgtctgaccaggatttctgctttcacttaggacctagaaagttgcaagacaattcc

SEQ ID NO: 31080 - DNA, 1058 bp, Homo sapiens
tgctcctagggccaccatgcctccagaatgtctcttgactctcccttggcaagctaaagatattaacttctctccctactccttcctaccaacccaagatatggctttactttaagttttcttttcttttctttttctttttctttcttttttttttttttttttttttttttttttttttttttttgagacaggctgtcactctgtcacccatgctggagtgcagttctgtaatcttggctcaatgcaaactctgcctcctgggttcaagcaattctcctgccttgacctcccaagtagctgggattacaggcatgcaccaccatgcccgactaatttttgtatttttagaagagatggggtttcacaatgttggcctggttggtctcaaactcctgacctcaagtgcctcacctgcctcggcctcccaaagtgctgggattataggtgtgagccactgcatccagccttacattatgttttcaagattgatattctgttctacaactccaatcaaggtttatgttctttgtttacaggctgaatctaacaactgaaaatcaagaagcaacgtttacacattacgactaggcaaatattgatggcagttcagccgatacagtaaagtactatgagcacactgcttttcttgcaaactttttatttctcctggagtttctatttatctttcttttctcttgtcctatttgcttatatcacatcctcacttttttcaaactttccatcatatcaaatattctaagaagcaaggaattatactaaaaacatttaatcaccaaccaacccaatttaattccatttatggggatcacttatagcagagagcaatcagaatagacagagcccttgtcaccaaagcaccaaggaagggtgctgggagcccctggttgtgccagccatgaacttctcagaatccggatcatggcaaggtccaggagatcctaggaaggggctggccaatggaagaatggcggctcatgttagctgctatttacaaacccactcagaagcacttaaactggcacatcctggctagc

SEQ ID NO: 31081 - DNA, 1072 bp, Homo sapiens
ggatgcgactgcggtcgggcttggcagtaacttaccctcctcagaggtgttggtgcccaatcgggacatctgtgggaaggggatttatagcagatggatcaaaaggcctcgggcgcggtggctcacgcctgtaatcccagcactttgggaggccgaggcgggcggatcaccagaggtcgggagttcgagactagcctgaccaacataaaaaccccgtctctactaaaaatacaaaattagccaggcgtggtggtgcatacctgtaatcccagctactcaggaggctgagacaggagaatcgcttgcacctgggaggcagaggttgcagtgagctgagattgcgccattgcactccagcttgggcaataagagcaaaaccctgtcaaaaaaaaaaaaaaaaaaaaaaccctcgtggtccctggagagaggtgaagatgcacgggacagcctgaaagccagtgtatgaatctgccccatcccttctcctggctttcattaagtcttggattaaattaattgcttatctcagagaaaggatgtgtagggggaacttctctgttagggattggctcctggccagcccatcctcactgatgccttgggaggctgcgtttgggcaccaggaacagcgtgggccacctggcctttggagcacagcactccgagtgtttgtggaactgcagtatctgtaactcttttttctattgatcagcttgaatagttagctcaatattacttcactattgattagataagtagcccaaggacatactggggctcagtagggtctctctgtccagaaattcccgtgggcttctccttggccctccctacaccgctctgtgatgagtcgctgtcagatgccccactgtgcaggagcatcttcagggatgggtggaaggaaccacctctgtggccccaggtccctgcctggtcccccctgtctaccacataggggtactcagtgtttgtgaggaaaaaaaatggatgccccggtgaattagtctgagttcacaaccaatgttttctacactttgctacactgttcaaaatgttacccttaaattcaaca

SEQ ID NO: 31082 - DNA, 1049 bp, Homo sapiens
acacaattaactattttgcaatctccctcaactatcatgaagtgaaatttaaatataatgtaaccagccaggcatggtgcctcatgcctgtaatcccagcactttgggaggctgaggcaggataatcgtttgagcctgagggttcgagagcagtctgagcaacatagtggaaccccatctctacaaacaattttttaaaattagccaagtgtggtggcatgtgcctgtagtcccagctactcaggtggctgaggcgggaggaccacttgagcccgggaggtcaaggctgcagtgaaccatgatcatgccactgcactccagcctgagtgacaaagtgaggccctgtctcaatgaatgaatgaatgaatgaatgtaatctttctatgcagttaattacttaaaagttataccagggtccccagcgataacaaatgaaaagaaactaatttactacctaattatatgtgtctctgtataaatgcttaagaacagctacactagaaaatagaatgaaatcttcaaatgcttgtacctaaatgtgactctgacaactacaaatgcagatgattgatggatgctgtattgttgactcttaataccacatgtcaggacatggtttttctgaagttctgatcaaaacaaaatatagatgttccttagtttatattgtatttctggaaaattcagtgaacattaatattatacaaaaatggttttgtgttctagacacaaaaacagaattagattctacagtctaaagtattcaaatatgttttgcacgtgatggaatgtctcatgctgcattcaaaagttgtgtgggacagagacacgtgtcccttctggagaccagccccccagcccctacccactaggtgccaggaatgcctttccccatactattgtgataactccacccccaagccctctctgaaggcagtagcactcttgctgagaactgctgcttagattctctggttaaaaataacagaaaacacctcaagcaaaaaaaggaaatttattataagaattcaggaatgactcacagactc

SEQ ID NO: 31083 - DNA, 1029 bp, Homo sapiens
ccctggatttgctgcagtttgcgctaggaaaccatgacagttctgaattgtctgcttccttaaactttttcaagaggtgagtttggttgtttgatatcctaaggttgtcatatgaacccttgataaaggaaattaggggtgtactcgactccattcttcggtctgcactcctgtgtagcgagtagcaagtatgctagaacacctgaaacacatttgcatgctccctcctcccctcaaaaaaaaaaaaaaaaaaaaaaccgtattcaaacagaaaagagggattggggcttcctcctttatgtatcttcaggcttcatgctgttatttggtgacctcctttttgattagcacttgttaagtttcctcttatccaattacattagattgtaaaaatgttgcggagagcacccatgccaccatatgtgtgggcttatctactcaaggaataccagatcaataagagagccaaatgggaaaattttgtgtgaattttcagatgtgtggtacagtgcgagatctgtgggactatgtgttccaaaactcacttagtttctctggtgtcttcagaccaagaatagcctagggttatttgacagagtagggaagatctatagggtatggttaagtgcttgagcttagaggctgggtgaaaaagttagttacctgggtttgaatcttcacctaatttccaacttttgttaatgtctttgggccttcatattctcatatataaaatggggatagtaaaaatacctatctcacgggttgttatgaggtttaaataagcctccctccctactctgcccctcctcatctctgcctgctctttctcactccccaggatctgggtcatacaccgaccatctcttaggaaggagtaaagtaggagataaaaactaatcttcatctgatgttcttgtccaatgtatactggagtttccaggtgtacaaagctgattaaaatctgaagacctatattcttctttaaacgttgttaattaatcttcatatggcgttagccagctcact

SEQ ID NO: 31084 - DNA, 1023 bp, Homo sapiens
agaatcattatatacgttagagggagagaaacattataaaagttaacagtaggggaatgtgagtagaaaatatggaaatttttagtgtacggttcttgtaacttttctctgtttgaaattatttcaaaatacatctttttttcttttttccagcactaatggcttgggtgaattaaaatattttttaaattaaaaaaagtgtatggtgtggtgggggccttaatatattcacagagttgtgtaactgtcaccactaattccagagtgaaattttaagcatagtttgtgtttgttttcctgttccttccttttcacttgatatacaaaagttgacgtatcttgacagaaaaatttctttacaattttcttaaagttttcaaatgttgaactaaaagaccaaggtatatcataagtacaaggaaataaagtagaattagggcgtataaaatgaaaattcttacttgacaaaagaaagtgaactgcttttaactttatatatcctttgttgaaacttttgtgtagaatcctggaataaatcattagtcttatgcaaaactgtgtctacttcttaaaacttgaattgaggaaggaaatgctttgtaccaagatggcaaatattttattataagaacatttctgtttcttcctctcatactactatgttcattgtactgtatcttcctctgagagggtttaaactctttagagaactgccttaatttttgtatgtattggagcaacataatcagtgtttgcaatgttttgataaaagtaaattcttaataataaaattgttataatctcccataattttcaagtcagttttcactgttgttaatgatgtatgatattgtttttccttttctcttaattggaatttataaactcttactaaatgcagatacatctgctcaaaacttgtcatttgttcttagggtcaaaaaattgggaagattagtttgcactaccattgtaccttgctttttataatgagtgtactctgggtaaaaacatgaatctgaa

SEQ ID NO: 31085 - DNA, 1050 bp, Homo sapiens
agtcacagaactactaagtagtggagccttgattccaaaagagatctgtctgattctaaaactcctaaccacagtgcctttactacctttcaccattctgtactattagtcattaaaaaaaatagattaggagtatcacttaagtaacatctgagtgtaaggaagagaagcctgctcagatttgctcaaagaaaatgggagaggccattggaaagctcctaaagagtttcttggaatgtcatcataggaactttacattgccagtgtgagctagaaagttgtcaggcatttgcagaggagatgcatcttaagtggaggctagattcttagaacaacagacattaaaatttgcctaagttcatctgtaaaatgagtatacaaaatgaaaagttaaaaatttttgcgtaagttacaattatttttgaaaagagtttagtttcttataaaatacactaaggtatttgggtggtttgtttgtttttggttgactaccgcataaaataattggcttgcattctgggccatggtaaatgaaaactatatactgtatctttaaactgtagacctcccccctgccctgactcagtacagcaatagatactgcaagtggcacatggaaactgagacccactaatcatttcttatattcctatgttcactgtgcttattgagcataagttctcactgtttaaatattgttttttttctttccctttcatgaagtgaataatgttttctctcagtctttccctctcattttaataactatttgctttgcaaaatataaaggaaagaaaaaaacaccattttgagatgccattgtattctttttgtatgtatgatgagacatgtctcttcctctgcttctctgtaaatctactccagtctctttttgagacctaaaagacgccacaccaatttttgagtccatgtgaccatacagcttcctcacctccaacatctgactcagttttctgccacaatctagagagaaagtttggctaaacttgggtcagatgtctacttcaatctaatttgatatggttggag

SEQ ID NO: 31086 - DNA, 1039 bp, Homo sapiens
actctggcatatttctgaatatatttaaaactcaaaaacattcttttaagccattagcaaagatttgagtgtcccttgcttataaaatattatataaaagagaatcagagagttccctactcatttaaaaaatgatcttttcaagggatgggtaaaacaacaacatgttgtgaagtctttttttttttttttcaagtagacatagatgagatattttgtctatggggatttcttatcctgcaaagaaaatccaaggaaacaagtttagaaagtatggcaggagtgaacccttctggagttcttaagcatccaaaaacaatgtatgcataaaaatgagtaattggtatagcactaccctaattcctctacatagaacaatgctatgttaagactgtaggcctggtaattttcagttatatgagagtaaagagggatgtcatacccctccctcagttatttggagctaaaggaaataaagttgcgctctgagcaaaatttctgtagtaaaaaccaaaacagagtttgttttgactgtagagttcagagacactgtttaagatggatagggatggtcccagagaggcagaaccagttgtaactgagtaagcagtaatacaagtaatgttaatctactgtgcatggaaaacattagttcaataggaggaaaagattcatctagagtaataaaaaaggattccaaagaggtaggcatggtactgcctattcaagcacaattgagggggtaggggattctggtccagaagaattactgtttccttggcaagactgttgtcttagctgagagattcttaaggctgcataaaactccttgtcatgcctctgtactcaccacaacgccttttgataatttgcctttccaaatagcctaccaacaggtaaaaaaatacagtgaaagatatagatgaaaaccctatggtaaatggtgataattgttgtaaccaagtgacaagcacatgggggtggtggtaagaaagggtgttcattattactattatcactcttctccctacttttgtaa

SEQ ID NO: 31087 - DNA, 1049 bp, Homo sapiens
aattttgttttgttttgttttttaattttagattcaggggtataggtacaggtttgttacatgggtatattgtgtaatgctgaggtttaggcttattatcccttcacccaagtagcgaacaaagtaccggatggttttttcaatccctacccccctatctccctccccacttttggaacccccagtgtctattgttaccatctttgtgtttgtgcatacccagtgttcagctcccacttacaagtgagaacatagggtatttggttttctgtttctgcattaattcgcatagggtagtggcctccagcagcatccatgttagtgcaaaggacataatttttttctttctgtgactgcgaacaagattagtcttcagttgataattgtttaagctagataatgggtacatgagcgttcaatattctcttttgtttgtgtttttaaattcccatgataaaaagctttttttttttttttttaaactcttagatttctggttttggtcctgcaaatttctcttaagttcaaatttttggaaaaagaatttactttaaaacaaggttacttacgcattctgatatgtcttatctacttttttttttttgagacgaagtcttgctctgtcatccaggcaagcccagactggagtacagtggcgggatctcagctcactgcaactccgcctcctgagttcaagtgattctcctgcctcagcctcccaagcagctggattacaggcacctgccaccatgccggactgatttttgtatttttagtaaagacagggtttcaccatggtggccaggctggtctcgaactcctgacctcaagtgatctgcctgcgtcagcctcccaaagtgctgagattacagtcatgagccactgcacccggactgtcttaattttcagctaaatgcctctttcttaaatttagttggtaaaaatttatttttgataatacattggattttaaatgtttaccttttattatcattttttctaaacctgcaagctaatcaaactcttgttcaactcctttgagatcttaa

SEQ ID NO: 31088 - DNA, 1096 bp, Homo sapiens
aggtaatccaaggtgccatactgtacaaaacaacttatatataatattgataaaattatggcttttggctggtgccaaaaggctcatgcctgtaatcccagcacttcgggaggccaaggcaggcagatcacctgaggtcaagagttcgagaccagcctggccaacatggcaaaactctgtttctactgaaaatacaaaaattagccaggtgtggtgtcaggcacctgcaatcccagctacttaggagactgagacaggagaatcgcttgaacccagaaggtggaggttacagtgagctgcggttatgccactacactccagcctgggcaacagagtgagactccatctcaggaaaaaaaaaagaaaaaaaaaaaaaaaaatatatatatatatatatatatatatatatatgacttttaaaagcaccacatctttaataattactttgggaagaattgttaattatatatggtttctttagtctcttaattccttaggctggtgagttgtacccagccttagctagattttaactgtgtgtgttttgaacgtttttgagtcattgttttacagcaatgtagtccatttactctattctacttttttatacaaactattttcttgaaaacttagtagttttggtcttttttacattctttaggatgcacagacaattagaacattaactctcatctcaaaaactatacaaactttgggaagctgggggagtctgtccaaaagcaaggtaagtccttacatcttttattttgtttttacacttctaaatgttgttacatcctatgatcccttatccttgacttaccttcttccaaattaaaaacaaaacatacacacacacacacacacacacagacacaatagctgtcttttaagtagatactctcttagtcacctgttaaagaggacagtttcagaagctgggcatagtgacttgtgtctttaatcccaggaagccgaagcgggaagatgacttgaggccaggagttcaaggctgtggtgcacaatgatggcacctatgaatagccactgcactccagtcccagcaacatagcaagaccctgtctctagaagtttt

SEQ ID NO: 31089 - DNA, 1023 bp, Homo sapiens
tgagaccctgtctcagcaacaaacaaacaaaacatatgaggctttaaaagtatctagtttatttgccagcaatacagctgcccctacccccacttaggaatcataatttctagtttgggaagcatttttaactgatccaggagactctttttttttttttttaagacaagtttcgctaaacattttatctcctaaataaatttcctttagtttaaaggaaactaagctttcacttagttcctttccagtttaaaaataatgttcccaaagggtattttcaaaagatttgtctcccaaaaagctatttcctccccaaaggaaaaacatttaaagagtaagtggaaatgtataacctgaaataatgattgaaactttgcaacaaataaactttactgagagattttaatgtaggtcaaagtatagactataaatgacacatttcatcataaactttctaattatagcaagtattctgctactacaggatcagtcttgcatatttacaacagctgtactttgggttcaggaaattattctaggctagacctttgtattttgtttatgaggtgttaaaacccacttagaggtcaggtgacagcagaaggaaattttttttccagacttcctagtccttaccctagcatcattctaaaaggtgttattgtactccttagaaatgtgctgttttagattctaggaagatcattaaagcaattttttatcttttatctgaaactttaggaatttgtgtagatttgggtcagttttgataatctacatcagagctataagtgtaatttagagattcctaaattcagcaacaagaacccacttagttccctttccttagtatttggaatttgtctcacacacttgtgatttattatactttctgctcccaagacttgcctgtcagcccattctgatatggataacactctcttcgtttccactctcctcccttcattcagaaaggagtgatgattacacagtgagcaagtgctgatgaaaaggggaataggt

SEQ ID NO: 31090 - DNA, 1034 bp, Homo sapiens
caataccagcctcgatgacataaggagaccccatctctacaaaaaataattttaaaaaattagctggctgtgttagcacacatctttggttccagctactcaggaggttgaggctggacaatcacttgagcctgggaggtcaaggctgcagtgagccatgattgtgccactgcactccagcctggttgaccgagtgagaccatacctcaaaaaaaagaaaaaagacattgtatgagatagtttcaaatgtaactttgaaattacaaacaaagcctacctatataaatgctttagaatgggaggcagcaagattcaaaggaccacgttattgttggctttgctgaccacacggtgtttgttgcaactacctaactccattactgtagcttgaaattggccatagaactaacgggcatggctagcattttatttacaaaaatagcagcagccgtggtttgctttagaagttagagttggtgagtggtcagtgtagtctgactcaagaaatctgaactggtcttaaatgggatgtggactcttggctttgttcttttcttataacaaaagtaacaccattatttttacagtacagatgtgaatatcagtaagtccaacatcatcctcagcttcttccctgggtaacccccgttaagtgtgtaaatgctttttaaaaggtaatatgtggcatatccataaaggtccggcagtgtcttataaaggtaaatatatacccaccccctgagccagcagttctactcttaggtgtgtttatccaagagaaatgaaaacatacgttcacaaaatgctcttgtacaaaaatattcatagtagccctattcataatagttccaaactgggaacagttcaggtttttatcagctaggcgatagataaacttgcatgtctacacaatggaatactactcaatggtaaaaaggaatgaactacagatgtacaaaatgtgatgaatctcacaggttgactgcgaacgaaagccttaccaaagagagtacatactatatggttttatttat

SEQ ID NO: 31091 - DNA, 1055 bp, Homo sapiens
ggtctcgaactcctgatctcaagctatccacccgccttggcctcctaaagtgctaagattacagacgtgagccaccacacccagctctctttattcttgatgttctaaaattttacctttttatttctaggtataggatgttttccagtattttttaacatttccaatctagacacaagcttgttatttctttgagagttcttgccccaccctcttttcctgtggagttcctattagatttgtttgtatttctggttctctccccaatgtctcaacaatttttcatatactccttctctgttagcccactgtcatagaatacctgacttgatctttagctcactgaatttttcttcagcttgaccagttctcctgaggttaagtttttgtttgtctttaacagctttattgaggtataattaacatacaataaactgcacatatttgaagttttggtatacactcatgtatatgtgtgtgcatatgctgtattcatgaaactgtcactgtaatcaagataatgaacatttatcaccccaaacattccctcttggcactttgtaacccatctctgttcttaccttcccaggctccaagcaaaaatctgctttttgacagtctgtattaaatacagccatgccttctgagaaatgtgcttagctgtgttcattgatttcattgttgtgcagacattataaagtggacttacacaaatctagatggcatagccctctagacatataggccatatggtatagactgttgctcctagctgcaaacttgtacaacatgttactggatgaatactgttagcaattgtaacacaatggtaagtatttgtctgtaaacatatctcaacatagaaaaggtacagtaaaaataccatgtaaacataaaaaatggtatacctgtatagggcactgaccttgaatggagcttgcaggactacagttgcagtgagtgagtggtgagtgaatgtgaaggcctagaacattactgtaccctactgtagactttataaacactgtacacttaggctacactaaatttattaa

SEQ ID NO: 31092 - DNA, 1029 bp, Homo sapiens
tgtagtcctagctactggggaggctggggcaggaggattgcttgagcccaggagtttgaggctgcagggagctatgattgattgtgccactgcactccagcttgggcagcagaacgagaccctgtctctaaaataaaataagtaatatgttttgttgtaaaagttcttcatatattctagataggagtgagtcatttattttatgttttgcaaatattttttcccagtctttggtttgctttttcattttcataactgtctgggttcttcttcagttttgattcttcttcagttaagcttttctactaagttttttatttcaataatcagaatatgatatctaatttttaaaaattatccttcaccttctactgttttaattatgcttatttttctttgttctatttgctgatacagcccagtgttttcaggcattgctgtctttgttgagtttggtacttttctttatggattagttttattttgaatgtgtgataattattggttttgtgctcctcttctgtgtgtttagactttcctattacaacattcagggatggaggtagcctgtatagccaagagcagcctgggtgtggaggctgtctgctcctgtaacctttcaccaacccattcagaacatggcccacttttccagcccaagctccctgttcccacttcaagcagatgctgctgctactgttgctagttgcttggcaccaggggctcatgcatactgagagaagcaaagctgtgctcacctgactgctcctgctgtggtactccatctcatcacctagtctttgacccagagctccctcctcctctccatctttggtgagccaactaccttatttctgggtggccttctctgatgtcccttttcttcctcttcctgctagagaggattctttttgttttttttcctagcatccagtatctataattcattgtttacatatttgtcatttgtaataactgaactcttgtagagaagcagcagatattattcacatgtgaatttctatcacc

SEQ ID NO: 31093 - DNA, 1025 bp, Homo sapiens
gtctcccaggttcaagcagttctcctgcctcagtctcccaagtaactgggactacaggcatgcaccaccacacccacctaatttttgtatttttagaagaaatggggtttcactatattggccaggctggtctcgacctcctgacctcaagtgatccgccagcctcggcctcccaaagtgccaggattacaggtgtgaaccactgcacgcagctgatctaatgctttttaaacaaggaaaacttacattaaagttggaagcctgattgcttgccttatcttcattagtaagcttaagcaacatggtctgtattacatgggtgtcaacttctgataggaaattgttggtggttatactccaaattcagtatgtgaaaaccacattttaattacagagcaatatctgctattgaaggaagaatatttgccataaagtttaaaatgcatagacctttttcattgaaaaggagttagctgtcttatgaatgtttccatacaatttaaatgacaaaagtacgtaggctttgatttgctcaaatttttttccttgtattaatggcacattgacaaaacctaaaaatgttatttgattttttaaaaatgcatatagaaagttcaaagtaaaattgcatcttttaaaaaggaagattataattaactgtagataaccaaatttagggacagtttctaatcggtaatgtctgagatggttttgaaggtttgagttatttttaattttagatgtctatgccttcataattagaattgggaagttcttgatagtttcagcatactgtcaacacaattttccatgtaatttgctgagatctgctttttagagataagaggaaggaaaagaagagaaggaaatttgataatctctcccttttatgtctttataggactcatggtttttccaaaaccagtgaccgcattggaatatacattcagtaggtctgatccaacttcgtatgcagggtacattgaagaccttaagaagtttctaaaacgtgagtatgttttctt

SEQ ID NO: 31094 - DNA, 1091 bp, Homo sapiens
gcaatcaagatgagcaagcttcttctcagaaatacacttgtaatgataatatagttggagcagcattgtagtttctgcaaactgttcatgattgatattcctttaattataaacatagtttttacaaattctttttgtgacctaaagaggatttcttttgttttcaacttcagaatgaagatataccaaatgtagcagtttatcctcataatggaatgatagacttaaaatatttcccatattatgggaaaaaactgcatgtaagtattgagaagttcttatgtggtgattactcttttgggaagctggagcatgtgttgacgtaccacttgtctggggtaggtagacgccagccctgtttaatttgtgcgtcatctattcaggttttgttttattttaatggtgatggtaaatggagttcccacatttacaattcagaacacagaacccaagcagatacgttaaagttagatgattatttctaaaatatcattttctttttcattatagaggtagtagtaggtgcttatgtagagaaagtagaaaagtacttaaaaagaaaatcaaggccgggtgcggtggcttactcctgtaatcacagcactttgagaggccaaggcgggcgcattacctgaggtcaggagtttgagaccagcctggccaacttggcgaaaccccctctctactaaaaatacaaaaattagctgggcgtggtgacatgtgcctgtagtcccagctactcgggaggctgaggcaggagaatcgcttgaacccaggaggtggaggttgcagtgagccaagattgtaccaccacactccaggttgggtgacagaatgggattctgtttcccccaccaaaaaaataaatgaaaagaaaatcaaggccaggcgcagtggctcacctgtaatcccagcactttgggaggccgagtcgggcagatcacgaggtcaggagatcaagaccatcctggctaacacggtgaaaccccgtctctactaaaaattacaaaaaattagctgggcgtggtggcaggcacctgtagtcccagctgctcgagagggtgaggcaggagactggcatgaacctggga

SEQ ID NO: 31095 - DNA, 1075 bp, Homo sapiens
ccaaacatgtaggatgggggtcttgtcctctttttatgtggtttaattgccaagtgtctaaagcttaatatgccgtgctatgtaaatattttatggatataacaactgtcatattttgatgtcaacagagttttagggataaaatggtacccggccaacatcaagtgactttatagctgcaagaaatgtggtatgtggagaagttctgtatgtgaggaaggaaaaaaagaaaataaaagtgtgtttgaaaaatattatcttgggttctttgtaaaatttattttttacatgctgaattagcctcgatctttttgattaagagcacaaacttttttttgtaaaacatgtaaaaaaaaaaactgggattaatttttagtgttggaactgcctcttattttaggctgtagataaaatagcatttttaggttagccagtgtgactatgcacctaattttttatgagattaaattcataagacttaatttgtacaatagtttgtgaaatatcttgttactgcttttatttagcagactgtggactgtaataaagtatataaattgtgaaatataaaaacttggaacttattcaaagcttcaaagcaaacaacagttttgtgtaagcattctttcccctccagtattaggtgtattcttggtaggattatttgtgataatttgggctacttggctgagaaagttgtgcttcccatatgatctgtgttgcttcttgttttttcttaaggctgttgtttattgttacttttctccttttttaaaaaaaaaaaaaggcagccgggcgcagtggctcacgcctgtagtcccagcactttgggaggccgaggcgggcggatcacaaggtcaagagatcgagaccatcctggccaacatggtggaatcccgtctctactaaaaatataaaaattagctgggcgtagtggtgcgtgcctgtagtcccagttactcgggaggctgaggcagaagaatcgcttgaacccaagaggcggaggttgcagtgagtcgagatcacaccactgcactccagcctggtgacagagcgagactctgtctgcaaaaaa

SEQ ID NO: 31096 - DNA, 1084 bp, Homo sapiens
aaagtaaaaaatgtctccagacattgccagatgtcctctggggatcatagtcatctcctgttgagaatcagagccctaaactcacttctgtgctggtcctgcctaatgaagcttaaaagcaagacctaagggtcaaactctttccaagtaatttaactgcatccaagaataaagatcaagaatggttatagggtttccccccacctacagaaacagaaaaaaaaatttaaaattttggcctggcaaggtggctcacacctgtaatcccagcactttgggaggccgaggcaggtagatcacttgaggccaggattttgagaccatcctggtctcatggtgaaaccccatctctactaaaaagacaaaaactatcggggcgtggtggcaggtgcctgtaataccagctgctcagggggctgaggcgggaggattgcttgagcccaggaggtggaggttgtagtaagctgagattgcaccagtgcactccagcctgggcaacacagtgagaccctgcctcaaaaaaaaaaaaaaaaaaaacaaacaaaacactctgaaatataaaatcctggctgggtgcagtggctcatgcctgtaatcccagcactttgggaggccgaggtgggcagatcatgatgtcaggagttcgagaccagcctggccaacatggtgaaactccatctctactaaaattacaaaaattagccggtcatggtggtgagtgtctgtaatcccagctactcaggaggctgaggtgggagaattgcttgaaaccagaaggtggaggttgcagtgagccaagatcatgccactgctctccagtctgggcaacaacagcaaaactctgtctcaaaaaagaaaaaaaagaaaatctcaagcaaccttgaatatccaaagcaatcttgaaaaaaatagagagtgtacagttcctgctttcaaaatatactacaaagcagcagtctgatatcaagatggtatagtactggcataaagacatatatatagaccaatggaacagaatagagagcatgtaaataaacacacacacacacacacacacacacacacacacatagagggagagtca

SEQ ID NO: 31097 - DNA, 1032 bp, Homo sapiens
cttgttctgtcacccaggctggagtgctgtggcatgatcccaactcaatataacatctacctcctgggttccagcgattctcctgtcttggcttcctgagtagcttggattacaggtacatgccaccatacccggctaatttttatatttttagtagaaatggggttttaccatgttggccgggctggtctcaaactcctgacctcaggtgatccacttgccttggccttccaaagtgctgggattacaggcatgagccaccgtgcccagcctagagcaggatcttaaacagatatttgcatatccatgttcattgcatcattagtcacaacagtaagacgtggaagcaaactacatgtccacttgcaagtgactatatgaaggaaatgtggtatagaaatacaatggaatatcaggcagcctttaaaagaaggaaatcttgtcatatgctacaacatggacgaacctcaaggacgttttactaagcaaaataaaccagtgacaaaagtacaaagactgtatgattccactcatgtgaaccatgtagagtagtcgaaatcacagaaacaaattagaagggattgccagaggctgggagaggagagaggggaaattagtgtttaatgggtatagagtttcagattggcaagatgacaaagttatagagaactgttgcatgacaatgcaatataatcaacactactgaaatgtatacttaaaaatggttaagaaggctgggagcagtagttcacacctgtaatctagtttcacaactgtaaagcactttgggaggccgagacagatggatcacctgaggtcaggagttcgagatcagcctggccaatatggtgaaactctgtctctactaaaaatacaaaaattagctgggagtggtggcaggcacctgtaatcccagctactcggggggctgaggcaagagaatcacttgaacctgggaggtggaggttgcagtgagctgagattgcgccattgcactccagcctgggcgagaagagcgaaactccatctcaa

SEQ ID NO: 31098 - DNA, 1053 bp, Homo sapiens
cagattatgagtggtctgttgggaagaccagtaaggtttttctcccttagctggggtttgcatcttttgtagtctgcctgttcatttttctttttctttttcttttcttttttttttttttcttgagacggagtctcgcactgttgccctggctggagtgcaacggcacaatgttggctcactgcaacctctgcctcccgggttcatgcgattcttctgcctcagcctcccaagtagctgggattacaggtgcacaccaccatacccggctaattttttgtatttttagtagagacggggtttcgttatgttgaccagactggtctcgaactcctgacctcatgcctgttcatttttcaattcattttttcagccaattggtacctattctagaaagccttccttgaatcttctagtcagatgattctttctttcctacttatttcattctagactgtacaggggttctagttcattttgagagctgactctctagtaggggctgtgtggaggactgtgttgaaaagggatcctgaaccactcaaggctcagtgagaaagaactgcaattggtgagggatgtctgcagtggataagggagtcatgtgtttgccattgctgtcatctttggttcattgactcccttactaagttgtaaactctttgagtcaggtctgtgtgtgagtcaccatttgattgcctccaacacttggcacaacacctagcaccttagatgttctcaataaatctgttctgaaatgaaatgagggcaatgaaggaaaaaattcatggtggaatttgagctttgctttgagtgggggtaaagaacggctgtgagagaatagagtttctagggacaggaaatggcatgaaggaaagttgtagaacaatacggaagaggcctcaggagaaagaggaggcctttttcaggatgtagtgggaaatcaagattgttgaaaggtttggagtctataggtaaaggtttaactaaaattgttgcggctgtgatctcatgaaggaaattgaagtatagtttaatggaacaaactaaaaa

SEQ ID NO: 31099 - DNA, 1026 bp, Homo sapiens
gtatggatatagagcaaaaatatgggttctacttgtatgaaagaagtaaagagtgtgtagattctgggtaggcaagcagtggtggccactattcaagctgagagagaaaacaaataatttgttcaagtactgataagtggtaaaaatcagttcagaccaggatgtctgatttcatctgcagtgcgctattcactataatttagttgtccatttttagcttgccttggtggtaacttaaaaatggagagactcttgggcattttagagtcagactgtcatgggttctgtatttactggttgtgtaaacaagtcatttgagctatcttaactttatattcttcatctttttttaaaaaagaattcctttactatcaagatgctagggtttaaaaggtggattaaataaactaaaacatgtaaaacaacaagacaatgtctttgtaagtgttagttccctttcactatttcatttttctttctgaaaaatattaagggaaggcttttggattcatggtctaagaaatatgtgagtagaatttataaaattgttaattaaaaattcatctattccctttcaaaagttttgtattttttacagaatggacactatagttagcatacttaggagctatcatgtccacaaaccttattcagatatggtgacaactctatattatatataaagattcaaggaaaagtatattttaaagggtttatttatgtgtgctggttgcagaaaagctgaacgttaggttaagtacaaagaatttgtagattgccttcagttatatgatcagaagagtctgaaaataatgaaaattaaaggtcagatgtttatgaatgttcatctatgctttattttctaggataaatctataagcacaagtttacctgtcctagatttaatagatgccattgcaccaaatgcagttcgtcaagaaatgatcaggagagaaaacttatctgatgaggacaagctgaacaatgctaagtaagcctttatggtttatattacaatacatggcc

SEQ ID NO: 31100 - DNA, 1048 bp, Homo sapiens
tttgtttgtatgtgtgaatgtgtaattaataaatgacagccttcctaacctctcctcctgcttttgaaataggattttatttacatgattttttgaaaacaattgacatataaacaaagtccacctatgtctgtggttgagccatttttatgttcttatgtaatagtattaaataatattatgaaagcaatattaataatattgttaaagtacaccatggacacaactttgagcagtctttgagatgtaaagaaacagaatatacatctacaacgtcacaaaaatagggtctgtggattatgtaaaattatttagtattgctggagtgggttgcctgagttctcttccctcaaaagttctgagagaggaaggggagaagattgtgttgtactaaaatgagtaagtgctggctccatgtattccagctcactgtgcaatggttattttaaagcaaacagaaagtatgtcaagaaaggaaatttgatattcctgtcaaactgaggacagaaaaatatcagtggaatatggttgagcaagtatttgtgcattgtgtatatttaggattattgcatgacatatctcaaacaaaagagagttttaatttatgatagttgtatagcctatttagtagtaccaggtgaaataccttgatattctttgtcagttttttattttataacataattgagatgagagacttggctttgggggggtagggtggaaattaaatatgcatattttccccatatataaattagaaatttttaaaacaagtgagctaaaatgggaattttctgtttcaggtatgtctaaacaacttcttgagttagatttggaaaaatagcataattcttacgcatacttatggggtacatttacatttaaaaagtaactttgagttataggaatattcttttgattacgtgtttgtattcgctaatattgttagactttttaaaatgttacctaaaccagtctaaaagtgaacaatttcctgaagtagctatgacttccaccattacactggagccttcctcagaccaaatgt

SEQ ID NO: 31101 - DNA, 1039 bp, Homo sapiens
gtcctctctcattgagaattagtgtcataatgagcctcttttatttgtaggcacctatggtgtccctcaggtctgttaacaggagaaagggtaaataagtttatttagaaaacacctaaactaagtgtagttcatgttaattttcctctaaaaaaaaaaaacttgttgagtagatggtagcttttagtatatatttgtaaatataaacctgcataaactgtttgatttgctgatgatcattaatcagttcatgtggaggaaagaaagtatgaaatgattcagtccctgccaactctccatggagagtattttcaggaaatctgatgtgcggtaaatgagttagaagccccttcttgaaatttcagcatggggttagggggagggatggagagagcaggttttcacctttatcagtgggctcagcctagtctcagtgtcctgtgtcacctttgtggtaagatttgctgtgttgtaaggaaaaatgttttgatgactgtatttctttttttttttttttgagatggagtttctcttgttgcacaggctggagtgcagtgcaacctccgcctcccgggttccagcgattctccggcctcagcctcagcctcctgagtggctgggattacaggtgcccaccaccacgcccggctaatttttttgtatttttagtagagacagggtttcaccatgttggccaggctggtctcaaactcccgacctcgagtgatccacccgcctcggcttcccaaagtgctgggattataggcgtgggccaccgtgcctggcctgatgactgactttctccataagctttgtgtacctttgggctaaggatgctttaaaaatgtgcaacaactccagagagaagccagagtcagaagaaaaaagtgcagcatttctgagagaagtaatattaagctgctgttttttaaacaccttatttatatataatgggcctttaaaatttttttacttatttgagaagagattttgaagtctggtattagagaggatggtggtgggaagaaacaaaaaatgc

SEQ ID NO: 31102 - DNA, 1060 bp, Homo sapiens
atatttccagatccagcaactgaacttgatcatgtctttttattttttcacatcatcattctttttcctcttaataaaactttctgttttaagcatcattggtaatatttcagttagaatgttgcaattgccacactcaggtttgttacagaaacttggtttgaaaagctttacaaattttttgacattaaattctctcacacttcacaactaacttcaaatttggttaatataaaattaaactgaacaacattgatactctctttgccataaaatcaaacgagatgctaatgaggaagaggtggaatcacctgttcttaatcagtattgtaacatttctccattgtatttctcaagggtttattacagttggccagagtaaatttgttgctaaggatctatgggatcactctggtattttgtatactagttcattttttttaaattgctggttaggactcactaaattgattttatgactgttaatgggttgcaacctgcagtttggaaaacattggtttggaatgatcattggctgagccgcagagaggcacaagatgaattcagaatgttaacaaggtctaactaagtcctatagggctttgtaggccacagtagaaatttggcctttattttaagtgtgatagaaaaatcacaaagtttgtaagcttgatatgttttgattttttttttttttttttttttttttttgagaccgagtctcgctctgtcgcccaggctagagtgcagtggcgtgatctcggttcactgcaagctccgcctcccacgttcacgccattctcctgcctcagcctcccaagtagctgggactacaggtgccccccaccatgcccggctaattttttgtatttttagtagaggcggggtttcactgtgttagccaagatggtctccatctcctgacctcatgatccgcctgcctcagcctcccaaagtgctgggattacaggcatgagccaccgcgcccggcttgtgttttgaatttttaaccgataactctagctgtggagtgcagagtggattgaaggggtggggctag

SEQ ID NO: 31103 - DNA, 1155 bp, Homo sapiens
ggttaaggagagaatcttggtcagcagctgtgttagttaagaggctattgcagagtccaggaggaagatcatgggggtttggactgtgggtagcagtatacatggagacaagtagatgattatgggagatattttagagagggggctaagaagacgtgctgttgaattggtatactccctgtggaattgattgaaaatggtttctttttccttgactgaaaaagactaccatctagccaaaaaagtaaacagattatgttgcacttccttctatgtgttatattttaaaagacaaaagatgtaactcttgaaagcaacttcgttataaaatgaatggcatttatatatttgtctgtcatacacaggcattttgaattgtaatccttgttctataactagctacttgctgtctattttaagttttctgacctctttttacatatatactcatcctaaaaattaagagtgttctggtctttttttttttttgacatagtgcattgttttaaatgaattgcaaatataaacttctctgaaatgcttagcaaccactctaggtttcctgtaggttctgtgactataatgtgatttttcatttgcatgactgtgttagctgtagcagggtggaaccttttatttttagggatgaaaattatttatttggttttgatttttagggattttctttctttcttgtatagctccttgactacaatagaaataatctttaaaaccttagggctgggcacggtggcttatgactgtaatctcagcactttgggaggccaaggcgggcagatcacttgaggtcaggagttcgagaccaggctagccaacatggtgaaaccacatctctactaaaaatacaaaaattagccgggcgtggtggcagctgcctgtaatcccagctactcaggaggctgaggcaggagaatcgcttgaacccaggaggcagaggttgcagtgagccaaatggtgccattgtactcctccagcctgggtgacagagtgagtctctgtcttaaaaacaaaacaaaaactttaaagctggaatatatgatatttgtaatgtactttcctttttaacagcaatctaaacttttaaacatgtagcagttatttttgtctatttgctatacctgaaatttataaaat

SEQ ID NO: 31104 - DNA, 1074 bp, Homo sapiens
cacatgtgatctctgagggagctgtatgttaggatgataattaaggcttataacaatggtgcagagtcagtaaggaagagttaaattatattcagtacctattgttttagaagaaagactgtatatatgtgtgtttgtgtatgtgcgtttgtgtgtttataagacacaaaagcagaagacttccatcaaaatagtttaaattttaaaattaaacacttaaaggcataagcttcagttacctagaaaataagggtagaaaaaaattcatacgctgattctggataaaagaattactatggtattataattttgtctttttacacatggttatatacatgtaatggttttgcagtatacatggtgctttcatatacttgatcacattcagacatcacagtcaacctatatagatgttacattttatagattagaaaactgaggctcatagactttaatgaatttctcaaagttctaaaattagtaaggacaagacaaagatttaaatataatcttctgattgcaaatctcatgctctttctagttcactgtgttctgtccaggttacctgtgtcttattttatcagtccacaaatgtccagggcctttggttgggtatgattgtggaaatgaataagtaaaacatgggttctgtgtgataggatctttaagacaaattggacaattaaagtatgtatgaattacaagtaaattaagtaatacaaaggtatatttggtaagtgttgagtggtaataatatttgaccattttatattgctttgcatttataagagctttcatgtatcttgtgctatatcagtggttctcaaccaaatgattttgtcaccataaggggacatttggcaatgtctgaagatactttggtttcacaattggagggcagtttactactgttatctagtgggtagaggctcctacaatacccaagacagtccccacaacaaaaaattatttggcccaaaatttcagtagtgctgctattgagaaaccctgttttatgtttaaacttttgtggtttgatatacattatttagaaatatagaataggttggggct

SEQ ID NO: 31105 - DNA, 1034 bp, Homo sapiens
aattgacaaatcttagtgaatattttgatttggagtgggaaattgaaaaggagtccaggatgatttggaaatcttaaacgtgggtgactaagagaaggaagaaaggaaaacattaagttcagaagctaagtaaagcttggggcaagggaatgtgaattctggttttatccttgttgatttggcagctatcaggcagtcctcatcagacaaacacagatgaacattatatttctagggagagatcaggctaaagagatacagtaagctgtcagggccatgggaatgcccatcaccattgtgagagtaggtgaaatcatggagaagagcaaagggctggtgcagattcattcttaaggaaacatctacatttaataaagagcattacatggaaagagtttcattaaagaccaaatgaattgttgaagatatcagaggcagttaggataatgcaacattgtgaaagccaaaagaatagtttttaacatattggcttagaaattaagaaaaattagaaggtagaaaaagtaattggacttggaaactggcatcagtagaattggagaaatgatacactttgatttgcaaagtttgacacaatgaaaggaagaagaaaacgagtggtaagagaaagatggaattaagtcaagttagcaaagagctagtaagcaagttagcaaagagtgatgaaggatttaaagttctgggaggtgggagattagactggtatttctgcaaatgaaggaccagggttctaaagattggagagcatcaaatagaatactaaggtggaaaatgtagctttggaaaggaaatacgtaacttttttactctgagcttaaaggaaagagtatgggaattgttgaaaagataaattctaaggtaggaaggaagataatgatctcataaatatgtaataagtatatattgaagagcttttaataaagaatcgtcaaatatctgagaaattggaaagcaaaactagtgaggattttttgtataactatgtatttttaaaataatttaaaacatttatt

SEQ ID NO: 31106 - DNA, 1938 bp, Homo sapiens
tgtattgtggtacacagaagtactcctaaggcaagcaaatgtactatttgtacagtcaaaatttttgaaaaattttgtattactgtatataatacagtttaaatttttaaaaagttttatttatgaattagtaaaaagaagtagtttacctttttatcttccattttcatttttaactttttttttttttgaagtctgcagatgcacttttggtggcaatcgactctgaagtagtgggagctgttgatatactacttaatcatcgaccaaaacgatcatcaagaccaactatagtagttagtactcttaaatatttattaatttggatttttaaaccaaaatagatctcttgccccattgccattttttccttccctcaaatttattttgttttttcaaaaaatagatattttttctcactctgtaaaatattaaaagtggacacttgcaggaataattagtatttctttcaggaaaactttttaaatttagttgatatttccataattttgtcactgtggaccagtatttaccatttgaaatattctgcaggtaatgttgaaaatatagattagtttgcagatagataagaattaaatgtaaacaatgaaaccaacaaactggaagaaaatgtaggtgaatgtttaactgatcgtgagtagaaagactttatgtgcataaaagcaatggacagaaatcacagtggcacagtttttgctgttaaaaaagttaaatttttggaatccagacatcagacaaaatttagaaagcagatgaataactggcaaaagatatttgcagcatatatcataaattaataatcttaatattggacaaattggtgaaaaacatattagaaaaggacatagaaatagcagaaaatacaaaatgttaaatcttaatgataatcaaatacagtaagatactaattttaaacttaccaaatttacttattaaagttgaaaatttaaaaaaaatcattgatagcaagggagtattacagtctcatgctactagtgaggcaggtattttggaaagtgttttggcaggatctgtcataagaaaggtgttcatatgctttaacttagtgctttctcctctgggaacttatcaaggaaatggtcagaaatgtggacaaaaatgttggttgtgatcttatttgtagtaatttttaaaagcccatgtgacataatctaaacattccaaaatagaagataggaaatataaatgattacatatatgtacaatggaatattatgcagtcattaaaacagtacttttaaaagaatagttaggaacatggaaaaatataacgtagtaagtggaatacttactatggttaaaatacttaccacggttaaaaatatgcgtagaaaagggactgtgtggaaatgcaacaaaatgttacctaacaatcatcatctctcattgactaaccaaattatggatttttttgtactctttttatttttctttattgcttttgtaattaggaggatagtcactactaaataaatgctaattttattgttttttaatcaaattttaaacatgataacattcattattggtgacgataccgtgaaacaagcagtttaaataactgctggcaatataggctggctataagcagaagaaaaatactgttttaagagagaattataaattggttgttgactctctgccatgtttgagaaatgtgagaggctctgctaaattgcatactttgttatatagtaactgaaaaatcttactcattcagactattacaaaagtgtgactttctccagaggatagtaccatctagtttaagtggtggtaagaaatcaacaggaataaggaacaaaaggctaagaatatagtccctatccaaagcatcagaaatatctaaaataccattcaattttctgccacttatcttgcagttattattatatt

SEQ ID NO: 31107 - DNA, 1031 bp, Homo sapiens
acctttgatggatttgagatagtgacagatctctaatttgggaaagtctcctgggaatcaatctgatgtttatttgcagaggtttacctggaaattttttctattttcaagtctattttacaaagagatctgtgtttctctttgataagatctggttgatagcgatggctacatcacttaactttttagttttaaaatgactagtttataaaatgacaagcagaaattatctttaaggctttttccagttttaaaatcctttattagtattaagtgaaggggtggcctgcccctccacacctgtgggtatttctagttgggtgggatgagagacggagaaaagaaataagacacagagacaaagtataaagaaacaacaatgggtccaggggactggcactcagcacaccaaggacctgcaccggcaccggcctctgagttccctcagtttttattgattattattttcattatttcagcaaaaaggaatgtagtaggagagcagggtgataataaggagaaggtcaacaaaatacatgtgagcaaaagaatctatatcatgattaagttcaagggaaagtactatgcctggacgtgcacgtaggccagatttatgtttctctccacccaaacatctcagtggagtaaagaataacaaggcaatattactgcaaacatgtctcccctcccgccacagggcagcttttctcctatctcagagttgaacaaatgtacaatcgggttttacaccgagacattcagttcccaggggcaagcaggagacagtggccttcctccatctcaactgcaagaggctttcctcttttactaatccacctcagcacagaccctttacgggtgtagggctgggggacagtcaggtctttctcatcccacgaggccatatttcagactatcacatggggagaaaccttggacaataccctgctttcaagggcagaggtccctgcagctttccacagtgcattgtgcccctggtttattgagactagagaatggcaatgaccttt

SEQ ID NO: 31108 - DNA, 1046 bp, Homo sapiens
ggtcttgaactcctgacctcaagtaatccgcccgcctcagcctcccaaattgctaggaatacaggcgtgagccgctgtgcccagccatatacatgttatatcttcctgatggattgaccctgttattcttagaaggtattcctctttagtaactttttaaagtctgatattaccatagccactaaaattttcctgttgttgctgtttgcagtatacatctttttccagcttttaattttaatctatttgtgtccttcaatctaaagtctgtcttctgtagacaacatataattgaatttttaaaaaatctagtctgacagctgctgccttttgattggattaagctgttcacatttaatgttattgatagttggatttatgccttccattttacttgttgttttctgtgtctgctttttgtttcttatgtgtttcatgtcttttttgtttctctgtttcttcattagtgctgtcttttgcattgagtatattttctaatatgatttataagactgtttgcattgttagaatacctgaggctacatagtttataaagaaaagaggtttatttggcttattgttctgcaggttgtacaagaaacatagtgccagcatctgcttctgttaaggaccttaggaagcctccaatcatggcagaaggctaagggagagcaaagatgtcacatagtaagggaaaaagagcaagagagagagaaggtggtgccaggttctttttaaaaatcagatattgtgggaatgaatacagcaagaactcacttattactgcaaggatggcaccaagctgatcatgagggatccacctccatgacccaaacatctccaacaaggccccacctccaacattgaggatcaaatttcaacatgaggtttggagggaacaaattccaaactatatcatgtagcatttttattaattattttttcactgaattttttgagttctttttttgactggtttctctaggacttgtcatatatattgtaacttgtcaaagtcagtgtcagattttttgtttgtttgtttg

SEQ ID NO: 31109 - DNA, 1861 bp, Homo sapiens
tgcttttttctcggttttggatctcactcacttccggcctccctcagtttccctccaaggaatgaataacctctagggtcgccagctgtgaggggaggaccactagggcaaagacacggagtgggaaatgcagaggcgggagcagctctcctttgcagtgctgcatagccaaggttaatgtacagtctacacgtggtctttaccttaacgggaagtaaaaagcacttttgagggtagaggactcgtggtctctttctttatgttgaagaaacagtgaaaagagaagctccgtagacttgtaagctacatacgattagtaaattgcatttgtgtttacagggaaccctgggcacgtattgtgaaaccagtgagctgtggtagtagttaagcattagtacggttgggttcttagttgccatcttgggcgggacatttaatcgttttttggtttgggtttctggtctcgaatatattaaaagtaattggtactgccacgaggtagttaaactttccgatgctgatgcaagaagctgtgtaacactttcaggtgctagggactgttaaatcttaaagagtgtgtgactgtaaatcggctattagaaagttaaatttacggtaggagagaagcttgcgtttacagttctgagaaacatcataactcgttttctacttgctttctctaatccgactgtttatgccatttggtgaacgatgtacaccaaaataattaattcataattagtaatggtcttaacagacatcgtttagttacatagaaactttggtgaggggccagtttcggcttctttacaaggtattgtgtcagttttttttccccctcctcagtacattttctcgtctccctctctttgggggcgagctctaccaactcttctcaacagactcctgacaagaacataccgttagggagctattactaaagctagctacgttcataacaagtcgtgcataagcctcacaatttttgtttcttctcaaagtaatattttaagtattccctacttgaggtcttggatacattgaaaacatttcaatgtctgtgttcaggcttccttctaaaatagtgcttctcatgactgaatgtatggctgttctcaataaataaattattggattatccagtaatcttttctgtttatattgccttagattataatctcttgatgctattagcagatttcttactgatgtctgtgaaaggaatcagaatatcttaactaatttggaggctgcataatgtagtgggaagattatgaattttgttaacaagagatttgggttcaaatcctgacttggtaattaattatatttgcgataataaggcagattgcttaaactctggagcctcaattccctcatttgtaatgtagatataattctttttttacatggttgatataaggatcaaatgagataatgtctatgaagtacataataaatcttaatttctttcccctctttttgtttttagaggaaatcaaaagttcttagctttcaaaatgtcaggataaattttaatcctgtgatttggaatctaagtcatcagctgtcataatgactgcccagatagctgctttttatttattttatttcttttttttttttttttttttttttgtgaaagagtttcgctctgtcgcccaggctggagtgctggagtgcagtggcacaatctcggctcattgcaacctccgcctcccgggttcaagtgattctcctgcctcagcctccctagtagctgggactacaggcgcccgccagtacgcccggctaattttttgtattttagtagagacggggtttcaccatgttggccaggatggtctcgatctcttgacct

SEQ ID NO: 31110 - DNA, 1793 bp, Homo sapiens
tattaacatttcttaattataaaaagattaaattagataacctctacaggtcttctagttggggtgttttttttttttttttttttttttttttgagagggagtcttgccttgtcgcccaggctggagtgcagtggtgcaatctcagctcactgcaacctctgcctcctgggttcaagcaattcttctgcctcagcctcccgagtagctgggactacaggcgcctggccaatttttgtatttttagtagagatggggtttcatctgttggcctcttgaccttgtgaccccccccccccgcctcggcctcccaaagtgcggggattataggcgtgagccaccgtgcctggcttctagttttaaaatgatactttatgtatgtgtatgtacttgaatgacttacctttattcataattgtccctaatgaagagacccctgtgcactttaattttctgtgtaattttgttgtgctttgcattttagagcctggcagatgtagacatttaacaaatgttctagaaatgagctaaaattttcctgtgcatttgtttgtttatcactagtctaaaatattgcttggttggggaggggtgttgatgttatgtagtagctttcattttgagaggagagagagagagcctgtaattgtttacttataaaattgttaagcatatttccttagaatttaatttataaaaaaattactgtttttgactgtcaattgtttgcttactcagcaaaattaggatatgaagaaaatgtagtattttctttccttctgccatctcctgtgctggtaatattgctaatgtaatgtaattgtgtgccctgctatttcactctgtgactatggctttttttttttttttcttttttgccgtatcgccaaaaattgagttaggtgaatggataaaacaaaatactacaggcttccttggacatccagtgctgaattgctttgggaactgttttgattgactgcctttgctgattaacaaaaagtatcacttttaagaaataagtaaactgaggacctgttcaaggcttgtgaaccttaggtatttattactgccagttttcattttttgtggtacctgaaagtttatgaaaaagtccaaacaaaatacaaaccttgaaaatcaggctttcaaacagtttgccaattttaaactgaatctttattatggtttatggttgtaaccttatcttaaaatgtaaggtagtttttttggtagaaggttttgttttggtctggaaggtagaactgaacttccttccattttctcgattgataactttttcgaaacttgaacctgcagcacgggtgctagaatatgcctgttggtatggttttaaaaataattcctatctttctggattgaattgttttctgaaagtccagtttttattttcactttttgttttttatttctgaagctttgttttccttggaaagtaaacctaagaaagatacccatttgccttactgggtatcattgagagaagagctcatttagtatgccggttgaagtatctacccctctaccctccaccctttttttcaaggagccatcatttttggaataaaaagaaaaacttgctacaagatattaaaatcaaaaatagtaatattacaaactatttgcctcattctagtataggtggttttaacattttattgcacatcagctgtgagctggatattttgctgaaataacgtttttgaaagcaagatacatttgtcagtagcacttgaggctaacggtagtgttagacatatattccttgagtta

SEQ ID NO: 31111 - DNA, 1086 bp, Homo sapiens
tatggagtctctgtcgcctaggcggtagtgcagtggcgcgatctcagctcactgcaagctctgcctcccgggttcacaccattctcctgcctcagcgagtagctgggactacaggcgcctggctaatttttgtatttttagtagagatggggtttcaccaggtttggccaggatggtctccatctcttgatccacccgcctcggcctcccaaagtgctcggattacaggcgtgagccactgcacctggcccaggcagttgatttttttcagtcccttcagcctcttgcctgaacttgtttttcttttgtaagagtagttatttattcttttggatttttaaatttctagatatttgtaaatttatgcatttcaagatatgtttcagggtgtgtttcatagttaataaatactaaaaattttcttttataccaccttgacatttaagaaagattagccgctagaagaaaatcagggtggacacaaaagttggggacagaaaaaccatggacagaaagagtgagatggggccgggtgcggtcgctcatgtctgtaatcctagcactttcagaggctgaggtggacagatcacctgaggtcaggagttcgagaccagcctggccaacgtggtaaaactccgtctctactaaaaatacaaaaattagccaggcatggtggtgcgtgcctgtactcctagctacccaggaggctgagggaggagaattactggaacccgggaggcggaggctgcagtgagccgaggtcgcgccactgtactccagcctgggagacagagtaagactctgtctcaagaaaaaaaaaaaatgaaagaaagaatgagatgggaggggtcccagtgcttggttgtcctgttgtcctgggctgatttttgcctatgctaatgcgcaatacagtggagttcagaggagtaaattgattcagtgtaaaaatcttaccagctgttcttagccttatgtctggacaatgtaaataaaacaatactgtatggatctttgctcttttttaaataacatgaatcttcagtttttctcttaaactaatattttatcttgtactttatatgacat

SEQ ID NO: 31112 - DNA, 1048 bp, Homo sapiens
gtctatttcccactgatttgagatgctccttttattgaacactaaatttccacatgctattcaattttattctgtattttctgttatgttccattggcctttcttctgttcatacatgttttggggacatttagaataattgaaaatatcaagattcttctgagctttctttatatcaagattcttctgagctttccttaatgccacttgtcagtagatattgctgcttcaacttctaatactcatgtttttggtgatttgaaaaatatttatattcactgaattaaatcatcatgccttggaaacttggtaaacattactagcaaaatatgttttcatatagtcagttgtcatataatttgatgcttgagttgtctctagacaaatttactaattaatctatacttaggggttcttttctagttctgcaaattgccggtagaggagcaaagcctctcttggtttcattaattaatacttaatatcttctaaagattagacgttattacttgttaggactgcttaacctgggaagggagggttttcgtccatattattccttgatgaatttagccttgtgtacattaacaatttttgtattgtgtaatattaatattttcatgtgtatttaggaggatgaaaaggcagctgctgagatttatgaggagtttcttgctgcttttgaaggaagtgatggtaataaagtgaaaacatttgtgcgagggggtgttgttaatgcagctaaaggtaagtttataaagtataactgctaataaagcataactgtattacagtttttgagcgagccccatcttggttgaatgactgcaggtagataattatgaaaggaagtttggttgcttttgaattttacattttctatcagcaccctctagtggttattattaattagcaagataaatggccaagtgtcaattaatgagatgctgaagacagatagcttttaaacatatttagttcctttcaagttttaagacagcagagcacttgtcacaaattttaatatgtgtcatagttttgctatgaa

SEQ ID NO: 31113 - DNA, 1052 bp, Homo sapiens
tatatactgttacctgttttctctgcatttgattacatgggtagttgattgttagaacagatgattagatactttttttcttcattgtcaatacatatttcctctttaatttaaatgtactaaccatgcctgcttgaaaaatgttactaaatgcctaaacaaaccatcactataaaacatcttacttagatccaggaccttaaaacaaaggaagatagagagtaaaaatgattttgatttcttcatccactgaacttccccaccctggcatcttaaataaaccagaatatttatagtatgaaatgatttatgaatgccccacgcgggattttacttgtgtggcgttcctggtacttaaatggaaaattgaagcacgttgctatgttgctttttattttgtaaaaactactttgttttctgaaaataattttttcttttcccttttttgcataataaaaatcttttaccctttttaatagatgaatgaagaaatgctgtgccaagaatttggaagatttggaccgttagccagtgtgaaaatcatgtggcctagaactgatgaagaaagagccagagagagaaattgcggctttgtggcctttatgaatagaagagatgctgaaagagctttaaaaaatttgaatggtaagaacatttttattatccatttatacaattcagatatttctttggtttggaaaagtatttataaaaactaggaaggattggacctgaaatggagaggttaaaatgaaaattatttcaactcaccagaaaaattttgtttggaaacttttgagagttaacaaaatgacctttcatttctttcttgtaggaaaaatgattatgtcttttgaaatgaagttaggttggggtaaagctgtacctattcctccacatccaatatacattccgccttctatgatggaacatacgcttcccccacctccatccggactgccttttaatgcgcagcctagagagcggttaaaaaaccctaatgctcctatgttaccgccacctaaaaacaaagaggattttgagaaggtaat

SEQ ID NO: 31114 - DNA, 2047 bp, Homo sapiens
cttgactgagcaatggttccttcccagtactttttgcggggggatgtgtgaaatttaactaacttttgtatactttgcaattttatgtcagtatctttttttgtttttattgttatcactgtagggaatgtttatagtttgactagttagagtgtatttattagctctgatttggagtcagacaatagactattgtcatgggaaaatagatgttttaagtgtgtcgtaaatttcagataacgttacagtttgacccaatctgttgttatttttttcttgttttctgaattatctgcatttaatatataaccttggtttgagttctccttactgaaggcatagctttgttttttgttttttcaattgattttaagaagaaattcctattattgtcatgaacactggacatactagaaactttcttttcatggtaacaaaggtatttggaattcttttattttcctttcttcctttttttctctttcaacacactattaaagcagaagaattcatgctgtaggtatgctcttgctcagtcaagctaagccttttcccaaacacaggaacacaacactggttgaataataaatgaacacaaaagaataccaaattctctttgacattggccttggtgagcaacaccagctgaactgtctgcggcagcgggggaccaggaaaacatcatgggatggattgggaaagtatacagtttttgaccagacattggtacgatcgactccaataaatgtggttttattataactgagagacaattttttgtttttgttttttttttggttattgttgcccagaataagataattaccattttaaaattaaataatgcactttaaatatatcatctttttgtactacactgttttattctaatagaaaagtcaccatttttaaaataaacacaatccttaaggaagaagaatgtgattacagttctttagtaatcttgacatcaagttaataacaattaattgtcagattttgattttaaataatcatgaaacattttaaaaatacttataaacttttaattttctaaaaatagatttatcagttacaagcctgtttaaaactatagtgggtttttcaccactgataaaagcattcacaggatagtatttttgtagcattcaaaaaaagcacatatctagtggtagctttacatgtatgtggctcagcttatttctaaacaaaattttgagtgtgcgttttgccgaaagtcttcactcaccattaggatgaatcctttgtttttaaacttgctaaacaattttcctctatcttaaatgctaaagtcaagttgcttttgacttaattcacacaagtttctggatgtataacatttgtccacctagtaattagtcttatacataaaatttcccttagctttaatttggctcctatcagtggggagttttggaattgaatcataactttacattatcgcccttccttcaaaataatgtcattaaccatatgaatgctgaagaactgcatatttgcagagcaattacttctgtgaaagagaaataatttttaaatagaaaattaagcaatgtttttagttttttgttttgacaatttgaggttgaattagtagttttaaatgcatgatttcccctttgtaaagatttaaactgtgatgcaattttttttacttcctttaggcttaaatttttttcactatggagagatttcattttaagtaggtttgtttgaaagctatgagaaaataattatagtcaccttgagatagattattttattgttcatgtactctgaaatagggcattatagagccacaaaagtctgtcttgttctataactatatatttatttacattctagcagttatatgaacgtaatttgagctgggaatgctaaaggtgtaatttagtgtgtgctttgtaccaagagccaatatccttttgcttttcccaattgttatttgccagctgtgtatggatggggactggtgaaatgaggaatcaaaagcagcttataaataacctgagtcatttttgcccga

SEQ ID NO: 31115 - DNA, 1048 bp, Homo sapiens
gttttttttcttttttacctcctaaataattactgaatccttaatgtttaattctgccatgctagtcaagctattatgttttcactttcactcctgcaggatcttcctaattggccttactgttgcaacccacgtggtccttgtttcagtttcttaaatgtgtgtttccacctaccattggactttgtacatgtccttccctctttctgggacttatcttcacctgagatccttcagatctcagctcaaacataaccttagccttctctgacctctttaagtgaaacttagtatgctaatagtatgatacgcccttttgctgtagcagttaccatagttacagataagtatatattgttgtgatgatctgatttcctggttcccccacccctgcaaaacaacagcaaaaacctttaccaggctctataacagggggaccaaacttgtttttgctcatcattgcctcacaaggtacctggcaccagtgagcacttggtaaatattagataaatgcacaactgactgcttctttagcaaactggatgatagaatatgttcttacattgtacctcagattgtgggtatccagttatgttggcttgtactggattacaaattaatcttacaagcaatgtgacttcagcaagcaaaggaaaatgttataatagtacacatttccataggatgttccagatgaccttgatggtgcccccatcgaggaagagcttgatggtgcacctctggaagatgtagatggaattcctattgatgctactcccatcgatgatcttgatggagtccctataaaaagtcttgatgatgatcttgatggagtgccttgtaagttcagatttcaaactgattaaatctagctaatacatttggtgaccaaaactctaatttccatacatgctgatatggaaaaaggttatagtttctcatgaacgtatcaagttattaacttttctatttctgatttttttcaaaattcatatacccagtaatacatttatttgtatgctatgtatataaaaggccaagaagaagc

SEQ ID NO: 31116 - DNA, 1050 bp, Homo sapiens
acggggcggctggccgggcggggggctgaccccccccaacctccctcccggacggggtcagaagccagttcttaatctttcacataccactgagagcagtgcctaggctggagtttccttttcttattctactattgtccccatttctaccaacaaggttggaagagtagaatagtgggtggggaaccaagtggagggtcttctgtcttgttggaagagagagatcactttctgtcctggtccctgaggaaagagtgaacagttgagttggaaggtgatacctgtctgttgcctgaaggcaataagggctggatagttaagaagccattgcatgggccacttccttttgtgttgagacccttgatcatctgttttctgtgtgtcttggacttgtgcttgagcctcagttagactgtatcagcaggaactataagtagggattgtatagtgatttttaaaatgattatcttaggaatcccttctctcccctaagtaacatttgggtctgttgtttgactctttctaacgcaaactgatttactacaaatacattctgtggaagagtcatcttggtcacgagaggcttcacacagcgatgaacttagctatttatgttgcccaccccacccccttgctttctcagccttacatcttatctttttaaatgcagtcatgattaaaacacacgaaaaatgtagacttttagagagctttgaaagaagagaaggagagaacatcaaagctctgattataaaagaccctgattatggaagtgaaaatatgtctgaaatcccaccactttgggaggccgaggtgggcggatcacttgaagtcaggagtttgagaccagcctggccaacatggtgaaaccctgtctgtactaaaaatacaaaaattagtcaggcatggaggctgaggcaggagaattgcttgaacctgggagactgtctgggaggcggaggttgcagtgtgccaaggttgcagtgcacctgggtgacagcgtgagacaccgtctcaaaaaataattaattaaaaagtgaaaatagatgg

SEQ ID NO: 31117 - DNA, 1822 bp, Homo sapiens
atgcccttgaatgatactgcagtagttgtttgcttcaggatgataaacttcaaagctgctgtgttttttaaattttgtgcatgatcttaggtgcaactttgaactttatcttgtagattaaaggttcaaatttgggggttatcagtcacttatggagcttgttaaaaatgcaaattcttagttccatcctccagagattttgattcagtagagcagtgataaggcacagaaatctgtctttataaacaagcgctctactgatgatcattgatgcagtgcatagtaagtacaaaataatctgtgtgtgtgtgtgtacaatagagtttaaattttagaagttcatagtcttattgcagtgatttttcactgtgccctgttaaagatcattttcgatcgtttaaggataaacagttttgatcacatgagtactttatcaattgggatttttttgtttgtttccttagatcaccatctggttcaaggacacctaaaaggtctaggcgatcacggtctagatctcctaaaaaatcaggaaagaagtccagatcccagtccagatctccacacaggtctcataaaaagtcaaagaaaaacaaacactgacgtaaatttttaagatgctgtcacttattggaaatgcgatttgttttgtgcctgaacggtctgttttttaaaaaaacaaaaaatcaaatgaaagagcattcctggggttttttgtttgtttgtgtatgcatgtgtaaactcatgagcaactgcatctgtagatctgtcattgttttatattgtgtaaattactttcattgtggctatttctcaagatgaaatttttattgttctaatggatttcatcagaaatgtgtataatggatctgctgacagtagtagtattttgttttaggatgttgtgacttagcaaaaataatacagatgtcttccccccttttgtagctttgacaatttgaattagatttcaaataaaatctgaacagaaaactataatgttgtttttttgccccaccggtgatattaagtcccttaaagtcctactgagtttcacactactgttgtgcttcttatacctgatgcactttataagccccagtgttcaagtagcttaagttttatatttactaagatgactatccaaattaagggacctgagactcctatttggtggtttgctaaccatttgcttttgataagtttctcttgggtaatactaatacccagatatcaaagactaggtagatatggcatggcgttttgttagtggaatgcctggctaaaacatttttttcacagaagcaatatgatttccatacatccaacccatgttctgagcaactacttacttttagggggaaattaaatatcttttcatttcctcttctattatgaaagaagtttatttgtaaaacaaattttctaacaaggtttggccatagaattctcttgtatgatcgttgaccttttataatcttctgtaggctatctttcaaacactggcatcagaatattttttataagtttgtgtttaaacagcttagttggtccccccccactcccaagagacttgggtttagttatagctttaagtaaaatttaaaaataaaatgtttttcaggaaacttcgtatctaatggtttgtaaattcaaggtgcaaaaagttgatttaaaccatttgcagagttgaactctattatgaaaataaatttgctacggtatgaggaagaaataaaacttgtgtaatgttggtcataatactgctataaatataataaagggttatgtagaattgaactgacactattatttgtgaatc

SEQ ID NO: 31118 - DNA, 1087 bp, Homo sapiens
gataaggattaagaagtaaaaggcaaatagtttctttttttctctgtaaatcattattatagtttagtaattctatttagtacattggtaaatggtagtacaaaaaaacaggttaagtctagaccttagactctgagacagaatcttaaaagatttgtaatctgaagtaagtatgatgcttcagtgtcttcgtattttttctttctaatgcttttttgggggttaactctgaaatgaaaagatctgacagtaattatgtggaattggtcaatagtgccaggaactgatctgtatatacccctgggacacagtaagggtcagttgagactagtaaacttatgcatatttaaaacttgtgaacaagtgaagtgttttttgttttgtgtttttttttggtgggggcagcatttcttaagcaatttattctaaaagataatctatttctattaaatttagtttttaaaatgtgttttgacatcagtttccaattttagatacagctgttggacatgatattcagtaaaataacacaaccttactattttcaaggcattgtttaatattgttggaatttgaggtgggtggaaaatggcattcagaaaattatttcatgaaataaatgggacatatgctaggacttaaaaatcttgaaattgttaagcttctacagtatttgcaatggattttggctgctatttagcagtataaattaagaagctaagatcttagagaaattttagcaaaaattcagtaaccattaaatcatccccgtaattttactatatctcccctccagacagttcaccaaactgtgaacacattagtctgtcaccagtacagttgactaatctttatgaacagctgttataacatgcgttactacaatgggatttcattcaaatttgggctttaaaaaataattttaaaacttaagttagctctttctttcttttctttcttatgtgtctgtctgtctttattttgatggagtctctgtcatccaggccggagtgcagtggcgtgatctcagttcactgtaacctctgcctcccgggttcaagcaattctcctgcctcagcctcccgag

SEQ ID NO: 31119 - DNA, 1050 bp, Homo sapiens
gtgtgccaacccaaagaagcgctatggcagattccaggctgcaaaagaactgcgtgaatacctagcacaattaagtaacaacgtgaggtagtctatggtgaacttttctttttttctccatttaaacagcactggctaaaactaaaccaccaaaaaacgatctgaaaaaatgaaatttggaagtgttacattcagaggatgataaacttgcactgatagatcttaatgttaacatccatcaaaataagacattacttcaaaaatcacatgatgcttctgcaaataagtatgttcttatactttggaggcttgagctgtcatcagctgctccccactaccccggaatgcttgagtggattaatgaatattgttaagctattggaaatgagtctgatagtacattggcttgtgtatcaaagggtacttggtacttagtttgcatttactatcatgattttgtgaatctcttgcatttactttgaatgtcaagtcagattggtctgttttataggccgctttttccttctgatgtgtagggttttttccccctttttttttttaattaaattttgaaaattcaggttactgtaggtgttcatttaaatttttaatagttgtcattcagtgctatttggtacatatttactgttagggcaggattcccaggtttactgtgttttttttttttttttttaaagaaagctaaatattacattatgtaaatacttcttttcaccaacttctgtagtttcaccattgcatggtgtcatttcaggttatttaacagttatatccctctatgccaataattagaagtgtacactaaacatgaagtttggcatatgttgcaaaatgtcattttatcttttctaaaggctttaagaagaatatactagaatctatatattgatgttaattttgattcagaaaaaaaatacaacccagtatctaaaaagtgttaactagtccaagatagtaatgcatatgccaaagaaatattacacctaatctcatgtttagaatttaaaatagaattggtcagctacttat

SEQ ID NO: 31120 - DNA, 1021 bp, Homo sapiens
aagctgagtaatattgacaattatagcaaagttgatggcagataatttggtataaataggtttactgcaatgtcgaatctagatgcaattgcattttaagaccaggcttattaacaggtatttttaaaaggatggaatatgttatgaaattgtggagatagaatcacattgatattttccgtggtgtgaaaacaacctgtcttgatttttcaatatacaagtaatttccagcgtacaggagacggcacacattccctaattatcctgaattgactttagcctgctttgaattttacttgtcaatcttcttaatgggaataggattagaatatcattgatgtagaatcaatgtaatacgtcattcatgatgaaataagtatatatctgttgaataaataaaagaataaattaattaatgaagattatattcaaccctatttcaatgattacttaagctactatttaaggagcatctagatagttaagatggtagattctacaaaccgctcatgaaactcttcacatttctttattttcgacttcactctacactttatttctgagttcatctttccaggtacttatagaacattttcatatgcatgccccacaatcagcgcaaacgtaaatatcccaaattaaacctacttgtcattgtgatcttcttcccatctcttcactccacttttcagttggtggtataactttctcccagtcaccaaggaatacgttcttcatcgtcattgactttttcacctttaccatgtgtcttagccatggagtcctacttattcttctttacagtgctcctccttcctagtctcatggctatagctatcagctcactcgttgtagacatgtaacccttttttcagattctatttacccccaatttaaaccaccctacatattttcccatactttaatctttctaaaacattgttttcactattgctttctttggcttgaggactcacagtaattggatattgcttgaagtttgaaatccagttgtattaga

SEQ ID NO: 31121 - DNA, 1036 bp, Homo sapiens
attctcctgcctcagcttcccgagtagctgggactacaggcatgcgccaccatccctggctaatttttatgtatttagtagagatggggtttcatcatgttggccaggctggtgttgaactcctgacctcgtgatccacccacctcggcctcccaaaatgccgggattacaggcgtgagccactgcgccgggctgggagctgatattttctatcaggttccctgctagatgttagtgataataatatgaccttgtcctgctctccagttattcaagtgaagacaattaaccatagtacaagccagcctgtggtaagtaccataatgaagaagcatgcttttttatttttaacatcctgaacctcccaagaaaattttgctctttatcaaaggaaacaaaagagtgaaaatggacaaggagaatagaggtagttgaggagtggaggtgggggctgttttggccttgtggtacttgagatatgtaatttggaaactggcaatgcacctgtcagtatttggccctcttttgaggcctacaagaactctctggtttgctacccaatgcctataaacaatttagcttgcaaaaaacaccagctctactattaaaattcctctttagctttgaatccttgttgtgtcttggttgccaacacttggtggtggtttagtgatatgattcttaaatgtttaaatgtggtgcatactgttcaattttaacatgattgatgaaaataaaagttaacaactctccccctgtacagtacttagttgattaattgattgagccctattaaactaaattaccaatagaagtaggtgtttgagagctggagtggcctctggcaactttaagaaataaacaaactttgcagcctcatccctattacttgggatgcttaagaagcctctgagtcctcaaagcctcccgagttcaggtattagcatgaaaaatccctgattattgcttcctttacatctagactttctcatgctataatccactgtagttttctcaatctggctctctccatctc

SEQ ID NO: 31122 - DNA, 1048 bp, Homo sapiens
aactccaaaataagtgggagtaggtgggagcgaactgaaatctcaggcacagatatcatactgtccttaaattttctcttttgagaatttacattttatttaaatatcctttcagtgttaatgagtgttgggtgtgcatgtattcttgtttttaaaagggtagtttcttatagtttagtacagtttgcaggggtgagatctcaaacctggttttaataacaggacttataaaaacatttacattgaactgcagagggatgatttgaataatctaggaaattaacactatatatgaatctttctaggttttttttaaattataacaattttatttttattttcattcccatagcaacacactaaaagactctatagaaagtctttgaaactagaaaataatcgttttaaaaaaaatttacttcaaagagtttagctctttctatagataactttaaaaaataaaattctcactcattattaaaatgtttattgcagaaattctggaaaatttagaaaaatataatggagtaaacagaaaataacctgcagttctattactaaaagttcaacattcatttctctgttattatctctttagttttttttctctttttatatataaatgtagttaaaaatatttgagacagccttaaaattctgattttccttttcttcctcttaatattatacaaagtttctttttatattaatagtcagtattcctctacaatatgaaaagtgtacggaaccaaggccaagccattaataggttatacaaaaccatagaaacttggaaaacaactgtagccaagaagtattcaatttcaattggtctatggatcattatatgtataggtgctcaaaaatatttgctcaacgaatgttgaatttcaatgtaaaataataaaatatgctaatgagaaaaaagcataattttttcctctttttccccatttattattttgggtcctctgagaagcagatatcaacatgggagaagactgaaagaaatctatttgagggaacacttgtaagggaaaaatgggag

SEQ ID NO: 31123 - DNA, 1029 bp, Homo sapiens
gtgaggaaaaaggggtgagcaggcattaatatcagaatggaaagagccatttcttagtgaaaggtcactagattgtaggtacaggttagaattattcttactagaacatacactttttgtcctcacttcagttttgtttttatttaggaaaagccattgctgtagctaagacaatgacattaatctttcctcctgttgtagcttctttggatgaactagcttagaaatgacaatctttggagcctatgactaatcatgaggtgtggcaattagattttatagaaagatgttgtaaagaatgaaatcaaagatatgaaaacataaaattgtaaggagaatcctattactatagtaggtttctttataaatctgagtacctcacttttcctggttttaaactttatgaatatacctgattagtgaaggaactgtggatttgtttttagagaaaaaacgttgtgttcaattttaaatattaaaaaatgctcatgatataaagtcaagttaatagtaggggttactcttgtgtaagataacaagagtacctggaagaatttatatcttattccaccattgctgaggtgaaaatcaaactggaacatcagcagtttcttcacgtattaatgtggtatagtcagctttggtgtaaacgaaactctgccatttgccagctgtctggttttgcaagtcatttaaattttctgggcctcaatttcctcagctttttaaaaaaggataataattatctgctatggtttgaatgttttccctctccaaacctcatgtggaaacttaatccccatgtagcagtattgagaggtaggatctttaagaggtggttgggtcatgagggctctggattggaattgattaatatacattcatgggttaatggattaatgcattatcattggaatgggactggtggctttataagaaaaggaagagagacttgagctagcacattcagcccccttgccatgtgatgccctgtgccacctcaggactctgcagagtcctcacagcaag

SEQ ID NO: 31124 - DNA, 1025 bp, Homo sapiens
tccccagattataacctaaactgttattgttttcccaaaatagcttgctgtaactaaaatcagagaagttttcttgttgtctggtattcaaaataaatattatgtgtacttgcctaaattgtgatattgatttccatctttaagaaaaaaaacaaactccataatgatatgaagctttgagctgatctttatcgtgggtctaatcatattttgctggtttgtgccagatgaaccaggaaattgggaaatgtattggctcctttcctgacctgaaggtgcttcttgtgagtggacgacatggctgcctcagccaaatatagggcactaaaattttatttctatacataatcagtttccagatgcacactgttgtgagccaatatcatcaccccctatgcatcataattagggatagtcaataattagtgagcaaaaactgtcaaaaatctacttgtacattcttaaaaattgtttaaggtgtttttttcctggatagaaatatatatgtagattttttcaactgatgattaatgttacattttatgagatagatattgaagcaacctgtttattttatgtcatctattataacaatgtaaatttgcctttaactttgaatgagcaatacattcatatagttaaatacttaaaatgtagaagaatttacagtgaaaaaaaaatctttcttccaactctgaccccagttttcaagtttcctttccgactaggaatcaatataattagtttttaaggcatccttcatgagatattttatgcaaatatgggaaatgttagtatatatatttttgcttttcttgagcaaatagtatcatattatgtgcgtttgtttagactgtgcttttttgagatatttttacgtcactacatatatgagcagctcagtctttcctttttctttgcttttcctcagatttatattatttatctatatgaattcagtacactattttttaaccaatattttgttgatgaacacttagacatctatagtcttttgttttaaa

SEQ ID NO: 31125 - DNA, 1029 bp, Homo sapiens
tcatctcagaagccaatttgccttaacaaaaagcttcactaacttccagtaatggttcacttccaccctggaatgtttggcctgtctatatatttggagtcagcaatccacttatgacaggagagagaagtaggagaaaggggaattagtaattccttccatcctacattttttttttttgactaagagtatcaccatttttctccacatttctggaaagcatgaggagtaataataatgatcataatagtgataatgataaatatgtattaaacccttaatgattctttgccaagaactttacatgcctaactttatttaacccttacaaaaccttataaattaaaattgttatctccattttatagatgagaaaactggtttagatgagtaagaggcttattcttaggtgctgcaaattcaatcctaggtttaaatctagagaccacatccttggccaccaaaacttcttccctatccaaaaaacaacttgttatcccttttgagaggaaaattcacctcctaaaattaagatttactggcttcctggtggaaaacacctaactaagcagctgtgactacatccaccctgagtctctctctccttgggagtgatggctgccaccacaggctgcttttggttgggggagtcctcttttctctggaaagtttcaccctgggttaggctggcatgcaaaacaaaaaatataatttagtcaatactgagggagaacatgagaaaagcaaactaagaaaaaacacaaaacacagaaaccatccagctggcagttttatgatccaccctttgcttgctttcccctgggcttgtgagcctggcccccttctccatcctgcagggcgttaacaaaggaataggacatatttctgctcaccttataggtgccttttaggaagttgatttttccagtccatgaagttcctcttcctccagcagttggcaagattttctggtgattaacagaatgttctgtccctgcacgtatagacacttgtcctgagcctgaaggc

SEQ ID NO: 31126 - DNA, 1064 bp, Homo sapiens
atatctgatttctaaatttatgtagtctatggaatagtctctatttttatattaatattttagggagaatagcctgagaaagtcccaaagcatttcccttgtatcagaacaataggtttcgcttcatggtattggcagtgttgaataggaagatcttgaacttgtatgtgtgtatggcctaccttgataaattacaggaaacctctccaaggagctaagtgattttcttttttgccctttttttgcattatttaatgaaaaatacttattgatcacaaactctagaaactgacatttcctgcagagaaagtctgtaaggaaccctgactccaggctgtttctcgttaaggtgctgtgcttcctgttttgttcattatagttttgaaagattcatattatagccaattttcccagaaaagtttagtttataataacctagaatcagcaatttatttctagttaaaatgttactgccttccacagtctcactgggagagggtctggatcatttctcctcaggaaatcactgccttgagctgaaatatactggaatcctgctacttcccttaattccagccttccaacccagtatagttgttttgactttttgccttccatcactgagtacttgaggatggttcttgctgttttggggtataaactagtgcattgagtatgatatttttgaaagctttctaatttaggtcttcttttttggtaaattctcttctaccttgtccaccatttgtggcacaaccatcaaagctaagtctgataaggatttcatacaagggaaggaagacaggaagaaaaagtaaagaaaagctccttatagcagcttcagtaggattggggaaggaggaagagtgagaggtaagagagacaagagtggacagaggaagccccatttcctttctctggcttggcctgtgcatggtaattatgcaaaccgaagggaatgctgtggacagagttctcctttgatttttttttttttttttggatgctatgagaagactatcttgcagcctgccctcctgttaacctggaacaagtcacaactg

SEQ ID NO: 31127 - DNA, 1702 bp, Homo sapiens
cctgggggaggccctttcatttctctgtgtacccgaagtactaaggcaggcccaatgcttggggcatactctacagagattgttgtctgaataaatgaataccgagtcacttgcatttactcaggggggctttatgaaagcctgaccagtgtctagctttgattctctctcttcctctctttctatttatctatctgtcttacagctactgacataatcttgctgagggcatgaaagacattagttaattcctgggacatggcttgaaaatgggaaccatcagcacataaccagtaattaaatggatgaccttaaatctttatttgtttgttttgtttgagacagggtctcactctgtcacccaggctggagttcagtggcaaaatcttggctcactgcagcctcgacttcccaggttcaagtgatcctcctgcctcagcccccaaagtagctgcaactacaggcgtgcgccaccacactgggcaattttttgtatttttagtagagttggggttttgccatgttgcccaggctggtctcaaatttctgagctcaagtgatctaccttcctttgcctccagagtgctagcattacaggcatgatccactgtgccctgcacaccttaaacctttaagtctcttgagacaaacttattcttcaagattttaatgagattgttttgaactccaagcctgttgcttttctcaacatctccagagatctcggagcttagtttttcttgaatcactttagttttgagtccccacttctgaactgtcccttttctgctgtaaatttcacgtgcagtctgtttgcactcaacatcatcacgctgaacattatctccagccctttattttccaaagcagaaggaagtatgccttaagtagcagccttcctgtggggaaactgaggtacaaagtgatgaaatcatttgcccaaattcacacactagtaagttagaagactacaatgtgtgccatgttatcagagaccttgcagtctgtgacaaggcaaactatgaccatgcaaactgatgaaaagtgctgcaatgatggagaatggagggtggtggcaagtcactctccctggcagagcaagaacgccttctggcagggaagatcatttcacatttgattcaagatttgaaggacaaaccggtacttaaatgttggcgggtggaggtggtactggaacatggtggtatcctgaagcaccaaatatggaaagagggaatgataaatagaaggccacttagataaaagtgtgctatgctgaggagtttgggttttattctatgggcatcaggagaccatggaaggattttgaatgggggtgtggcatgattcgacttgcaggttgtactattttatgagtcccctgctctgtggtagtattcttccttctgcagcctgttactgatgcaaatatataacctggttctatgcactcaggaactgtttagcgcaaggtgaatcactgtgaagtaagcactgtatctagcatgccatcatttcctcctcaattataaggaaaccactttcttctccttcagatctctgggtgtttggctattccaacccacagaagacagcttcagagcattgagccacattctttccaactttatccccaatcttcctttggaaacagaatcacagctcatggaaaagaaagatcacctcatccaaaccacaggcc

SEQ ID NO: 31128 - DNA, 1044 bp, Homo sapiens
tgtaatatttacaaggtttataaaatggaaataaaattatcttagtagtcttaacattcatactgaatttctgaagtcacagttctcttccaagattggtgtgaagcaaaatgatatcgtaggaaatatttactcataccgttttcaaaatttctatctcccttgatgtttgctttgggattttatatcttttggtgactgtacagacatgcattacctctcccagagtcattttcattttgaaactaattgctacttcacagggttcagatttaccctgagacctggatgaacacaagcgggtgggtttgggtgaactctgctcttctttaatgaatatccataggtattcattaattaacctagggagtgataaataaatagggaaataaagtcctgatctgtgtttgtgatttacttttggacttctatagacattctcaatggatgtgggggccagggagcctgacatgaataatcgtaggattctatatgtatatgattatttgatttctgtttacctttcccataggactgttagctacatgagggtgaggactatgtctgtttttttctcattatatttccaaacacagcataggggacatatgtataaatcaatatttgtggggagaataaaatggcctagaaaccacttcacacacacagacacccccctgccccccacaacacacatacacacacacattgatctaaagggaagagtagagttcagagaccgaaaatctgtggcaaattaataatttagttatcatccatatagtcttagatagtttaaaggttctaagacttagcttccttatatgaaaatgaagataataatacctgtccgcaggctcataagactaattaatataaacacaacaattgacacagagcttgcccatagcaggagctcaataaacaatcagctctctttattgtcctgtggtgctatcttgggactgtcttcagatgagactgagacacatctgataaacactggttgggtgggatgctcagaaggttcttctccatgggagc

SEQ ID NO: 31129 - DNA, 1048 bp, Homo sapiens
gttacttctgcttgatcatttctgctgtttaagataattatgcattttcagtatgtcaattccatttttcagctccagaatttctgcttgacccttttcaattatttcatctctttgttaaatttatttaataagattctgaatttcttctctgtgttatcttggattttattgagctttctcaaaaaagttatttcaaattctctgtctgaatttatatctctgtctttgggattggtcactgctgccttatttagttcatttggtgatgtcatgttttcctgaaagatcttgatgcttgtggatgtccttggtgtctgagcattgaagagttagatatttattacagacttcacagtctaggtttgtttgtacttctccttcttgggaaggctttccagatattcaaagaaacttgggtattgtgatctagtatttggtcattgcagccttgctgccttaggaggcaccctaagcccagtaaggctatggattttgcagactggctgaagcacctcctaggtggtcttggataagacccaggagaattccctggattaccaggcagactcttattctcttctcttacttttccacagacaaatggagtctctctttctgtgctgaactctctggagctagaggaggattgatataagcacccctgtggctaccatgactaatactgcactgggttaggactgaagccagcacagcaatgggtttcacccaaagcccactttgacaactgcctggctaccacttatgttcactcaaggcccaagggctctacaatcagctgagtgtcctccactttaaggcaagttcttcttggcctcgggcaggtctggagatgttgtctaggagccagagcctagagtccgaaaccttagtaatgtacctggtactctgttctactgcaactgagctggtacccaagccacagaaaagtctttcctactttttcctccttttattctaagcagaggagtctctacccatggctaccacccaccctaggctcatggtgtgtacttcctggctacca

SEQ ID NO: 31130 - DNA, 1045 bp, Homo sapiens
aagataattatatcacaggatatttaaatagtttagaagtatatcatcacaaaatattagttagaaaggaatttcacagtggagaaagatgggtggtaggtctcatgttaatctagtgatcaaagtgaatgccattatcaatgagacaaattaaaattatgtcccaattttaataccagaaatgtataagatcaggtaaatccagattggagaacattacaaaataactggcctatgattggcaaagcatcaaggtcctcaaagtcaaggagaaagtgaaaacctcttgcagcctaaaggggactagaaattcataaaagtaaacacaacacgtgaatctgaatgcttagatcactttgctataaggacactactaggacaactggagaaacttactgttgtctacagattagagaattttattagtgttaatttcctgatgttgatagttatatgattatataaaataatgtcctttttttgctggaaacagaaaatttgggattgagggacaatgggacatgatatcagcaatttattctcaagtggtttaggaaaataaaagattttgtgctgtacttctacattttttcttagtttatgattatttttaaaatattacaagaaatgcctcttgaattcagtgtaagaaagtgtgaacaaattacttaaaataaatttcagaagttattcctatcattttatctaatgattaattaatgcatctacaagtgttgtcttcatacaaattttattaagttatcctcttgtataaacctagaaagagcaaattggaaatgttcctcttgaatatttttagaactggcaagaatatttcttcaggtgatagagaatcagaactatctgaaattctctggaagcacatttttaaaaatgtttacatcacattttgattggccatattttaaataagaattctcattagtattcttattttctgatcataattgatcccactcttgattagttaatataattcttttaaacatcaactatttttctgtgctgtgataacaagtgatag

SEQ ID NO: 31131 - DNA, 1030 bp, Homo sapiens
ttgggtctctgttgccaacatgttggacattcaggagggaaaatagctagacaagccttggtgagctgggctccatgctgttgggcctatccataacttcctttcttgccactctgacttactgaacatatttttttgagctatgtctgtacacttatcatcccagaggcaggcacttttcagttgaccaaaccattccgtctgttttgttatttattgcctcttccaaggaggttaattttgatgagcactagcatgtaatacaaaaatataaggatcttcacataggctcattcacattcctttttcctagaattacttgtctttgatacttcagtatttctctttttcagacttctgaccaaccaactgagctgtttgcctctttcagtgaatttgtaaatattctgaccttggcacattcatttttcaataaaagtagataatcactaaatgcactgtcctaattctgtactttaggaagatttacgccactgctgtctggctagcctgatgaggactgatgtgtagttacagtttatgaaaatactctacatgtctacatgatggttcacctattgggaattgctacaatctctaaattggttcttttcccattacagatatttttagtatcatagggcactccagattgtgtggtccaattgataaagccactggtagcatcacctacaagtcttttcctgctccgagccccattaaaggctggcagccttcatttcaactggtaaatggatcagaggtgcttccaggtgtagattatgttgcctccagaatgtgaagatttctatcagatgttgtggggtttttttttggtgggagttgaaagatgttataatttattcttactttgtaagaaacatcacagaatatcccagagcacaggaaacaaaaactttattaatgaggcagagttctgcaactttgtacagtccatctccaatcttctggacgatgtgtgtcttactaaggccaccaattcagttgctatttcctgctcattagtcta

SEQ ID NO: 31132 - DNA, 1026 bp, Homo sapiens
ggaaaataaataatattatcttattatgtgacaaataagattaaatactcattccagattaaaaaacaaaaacaacaaacatcaatctcctgggaatagaaagaaatctttttcatctggtgtagagtataaatctacaaaaagttagaaagaggacaaagatgcctgctattaattgctaatatttgaaattatgtaacaatttgtaattaatgtaaaaagttaattgttgttattgaaaagagagaaaaaactgtcactacttacagtgattatgatcattagactagaaaattcaagagaatcaactgaagcacttagattaaaaatgcaataagtttactgagtcaatttacaacaatcattcattttcttatacaccagtgacaacaactgaaagctataagaaaataaaatgcagctaagaacagcaaaataacaataataaaaattctaaaataccaagaaacaaatcttttaaaatatatttaagaatacgattttccaaatgaaactttactgagttatataaaaggaaatcttaattaataagtaatatatacataagtagaaaaattaaaataatattgcagaattttgaaaggatatggaaagctagaaaaaagtctctctcatcctaagaacaagaaaaagccagaaaatctacaaaatcataatttttctcaaaaccatgagttcaagaatgagactcaaatgagattcaggacagctagcaagccagaaatctaaggaaagaaaggcatctccaggaaacatgaagatgtcaccactgtctcacttgtagaacaaggaaaacaggtccaccataaaaaataggtaagatgttttcagctaagctttcaaaaaattcccacgcattaagtatgagtttgcatgcatttggaggctcttcttagattatttcacagggttttcaagaggaacagtacttctagggtaggagactagagaaagcttactttagcgggggcaggtttgtataaaggtagtggctgctgctgtgag

SEQ ID NO: 31133 - DNA, 1084 bp, Homo sapiens
tagtgattcttaatatttctgtggtatcagttgtaatgtttccattttaatctttgattttatttgagtcttctcattttttcttaatctggctaaatgtctgatgattttgttaaacccaactttttgttatatcttttttgtattattgtagtctttattttatttatttctgctctgaacattatttctttacttttactatttctattttactattttatattgcttatttccttaggttcaacattaggctgtttatttgagctctttctacttcttttttttaaatttagccatttattgccataaacttttcccttagaactgcttatgctgtatcccataggttttggtatgttgtatttccatttttacttgtcttgagatatttaaaatatttaaaacttttcttctctttttttttaatggcctatttgttgtttcaaagcatgttgcttaatttatatgtatttttacagtttacaaagtttcttttattattgatttctaattttaggccattgtcagaaaacgtacttgatataattttgattttaaaaatttgttacaacttgttttgtagcctcacatatggtctgtcctgaagaatgttccctgtgctgttgaaaaaaaaagtgtattcttcagatgttgaaaagacttttctgtaggtaactgttaggaccatttgatccagagtgcagtttaactccaatgtttctttgttgattttctatttggatgatctgtatgttgctgaaagtgggatgttaaaatcacttacgattataatatcgcagtctatctctccctttaggtctatttctatttgctttatatgtttaggtgctccagtgttgagtacatatataattgttataccttcttgctgtattacctccttaattattatattatggccttctttgactcttctaacagtttttagacgtcctcacttggtctaattttgtttttacaggtgaagtgagtttcttgtagacagcatatagttgcatcttgcttttcttttttttcattcagccattttatgaattttactggacaatttaatccattt

SEQ ID NO: 31134 - DNA, 1044 bp, Homo sapiens
caaatgggagtgccccttcaagcatgtttctgcacaggcaagataggtctctgactgtagcatgaagggctggagctatgactggccccccttgagaactgctctgggacagaggttaatgaacccatcccctctctcaaatgggtacacatctctcagtatgtccctgcacaggtggggcaggtctctgactgcagtaagactggccagagctgagattggatcccctaaggatatgctgtggaatggagatatgtgagcctgtcacagaggttcagaccctcaggcattgagatatggtcaagtttacctatgggtcctttggcaagcagttctaagctaggacctcaactgagaggtctggagccatgctacaggaaaactttcaggcctctgctgagacaaatgtcagtaggcacctgaaattctccactgaggcactagtgtttgtgattactgctggacctcttggcagatggttttgattataggcttgaggacaaatggggttgtagccaagctattttagaaatgggactgtttctgggtttgagcctggaagaatgatcagtgggtctgctagttggatgctgctcttgcattccaaatgtccttcataggtcttgggtgtcactggaatttcacaacttcctacctgaatcctgaaactcccacagagagacttttgtctgtggatgggtacagaattcttgttgtggggaaataaccaggttgcctcccatttcaacttgctggcatcattccagctttattctttatgctcacgatttttctgctacttgggatcttttgtgagcttttatggttttatacaaattaaaaaatgttttttctatttctgtgaaaaatgctatgggaattttggtggagattactttgactctatatattgctttgggtagtatggatttcttaataatattctgatatctttccatttgtgtcatcttcagtttctttcatcagtgttttatagttttcagtgtgtagacattttacctccttgattaaattttctttagt

SEQ ID NO: 31135 - DNA, 1060 bp, Homo sapiens
gttattccatttgatctaatgagtaatagaaacaagcaaatcaaagtggaaatgagaatttcaagttggtgtaattagtgttatgaaagatgtttcacagactaatgtgggaacatatttttttttgaaattgcagtccataaaagcttcttgtgcccaggcatggtggctcatgcctgaaatcccaagactttggaaggccaaggcaagataatcacttgagcacaggagttcaagaccagcctgggtaacatagtgagaccctgttccttaaaaaaaaaaaaaaaaaaatagctgactgtggtggcacatgcttgtagtcacagctacttgggtgactgaggtgggaggatcacttgatccagggaagtcaagcttgcagtgagccataatcatgccactgcactacacccaaggtaacagagcagagtgtgactctctgactttaaaaaaaaaagaaaagcttcttgaggaagtgacaggctgatatgtaacccatctcttgaagggtagatacaaggtgaacaggtgaagaagaagaaggaaaatgtttcccaggcagatggaagagtatatgaaaagttcaaaatttgaacgaaagtatattttcagtagatatttaggatagttgaatcacaaggagtgaaggtgatagagaggaggatagaaaggtaagtgtgagatgaggctaaaattttattttataatcagaacaatgggaagccattgatcagttttgagaaattaatatgatcagagttccagtttaagaagtaccttaaggttacagagaaggaaagactaaaagcactgctagaatgtctgtatattacattacaatattttagagtaatcaatgtaatattatatatataccagttagtttaggcttcagatctgggcctgggtatctaacatacatcatgattgcacagccaaagaaggtggtcaactagcctcaaatcaaacacagccacatcccaggggctaccactgaaagcctttctctagtcctatctccaacaacaaccaattctttgataaatagcatactgaatgt

SEQ ID NO: 31136 - DNA, 1028 bp, Homo sapiens
tgtagctttgtggtaaggttttgaaattgggaaatgtgagttctccagctttgttcttctttttaaaaattgtttggcctgtttagggccccttgcaattccatatgaatttgagaatcagcttttccatttctgcataaaaggccatagaaattttgataggtaatatattgaatctgtagattgctttgggtagtattgccatcttaataatgttaagtctttgagtacctggatgtgtgtttgatatccttcagcattgtttttgtgttttatagttttcggtgtacaagtctctcacctcctttgttatatttattcctgggtattgtattcatttggatactattatacatggaagtttttcttaatttaatttttggatagttcattgctggtatgtagaaacacaatggattttgtgtgtaacatttattgcctttaacagtcatttactttcttttttccatgtgcaagctgaatcacgtgggtaaataagaaagtggaaagtggaacactaaagaacttgatctgtaagatgtctgatttccctgaatgtgaaaactatgaaatatgtttttagcatagtgttgaactattatcttactatacttgggctattccatttctggtatcacgttacatatatttggtcattattaaagaaggtagatcatttcattttctttaggtttggagagaagtgtcaatacgtaattcattttcaaagttacaattattttgcaacttaattttgatgttacacagaaagcctcagggataaaccatatttatcgcagagtctggtacagagatccatgaataataaagataaaattagaacagaagctaatttgaatatgtaaattaccattaatatacattagtttttctgttttttcttgaagtttccaaatagccttaaaatttcattatgaatagaaatgtgaacaatttcaacctcataagtaattaaagaaatgcaaatttatgcaatacttggatgatttgggaagggcagtatttca

SEQ ID NO: 31137 - DNA, 1026 bp, Homo sapiens
attcatttattaaatgaagcaggaatatagcatttcatttgatttagaaaataattgtttcatcatggcaaattatcacttagagaagaggggagataaagacacacacacacagaggaagtcaaaggaggctcaggtttttgatttcataaatcaacacactcccttcattttctcattgcattactgggcatcttttttgttcacttagtagtttttactagattttcttagtggctttctcagttcaatatagctaattttttattcttctgctcatgaaaaaatatttttctcattagaagagtgatacatgctcaccattaaaattaagatgatatagatatgaaaaagaatatggctcatggagtagaactggtataattaaaatgaccatactgcctaaagcagtctacagattcaatgaaatttctttcaaaatgtcaatgtcatttttcacagaaatagaaaaaactatcttaaaatttatatggaaccagaaaagacctcaaataaccaaagaaatcctgaacaaaaagaacaaagctggagacatcacactacctgacatcaaaatatattacaaggcaaccaggtgtggtggctcacacctgtaatcccagcacttggggagcccgaggcaggtggagcatttgaggtcaggagttcaagaccagcctgaccaacatggtgaaaccccatctctactaaaaatacaaaattagccgggcatggtggtgggcacctgtagtcccagctactcaggaggctgaggagaatcattgaacggagatgcaggttgcagtgagctgagatcatgccactgcaccccagcctgggcaacagagagagactccatctaaaaaaaaaaaaaaatatatatatatatatatatatatatatataacgtgtatatataatgtatttatacataatgtatacacacatatatacatattatgcacacacatacatataacaaggctgtaagaaccaaaacagtatggtactgatataaaaacaggc

SEQ ID NO: 31138 - DNA, 1055 bp, Homo sapiens
ttctcacttctgactgtccaacaataaacactagtagcaatggcaataaacataactcttagtatgtgccaggtaatgtttaagcactgttttaagtgtttttcatatattaaattatttaatcctcagattaaacaataataaatgtgtatattgtaatactagtaatgtagacattaaatcacttgcatgtctaataaaagtaggatttgagcccaggtcgtctagttcccagagtctgtacttttaactaatctgccattctgcctttcagtaacactcttctttaagtcaagtcactatgttttttgttttgttttgttttaaatgtgtcttttaagataccatttgccctgttgtagctctcttcttcccatatgaaaaaatatccccaccttttcccactgttaaccagaatttcctgtttttattgaggtgtaattcaagtcttataaaatctgtcataggtatttcatcccacagcctttttccctctaagtttctatcagctcttcacacaatattttaacacatttcttcttggcttgtgttgttttgtttataggttttattttgcccacaagattttaagattaatgttatctgcatcttgatgctttctcagttcaattcctctttctagacatttgtaaaatgttacataaggttaatgatcctgagcctcatcctgatccattgggcaaccccatgcttctctatctaacctgacaaagcagtgtttaaatctcagctctgcctaagtgtgaccttagggtagttacacttacctatctttcctcatttctaaactatagaaaagaatatctacattgtggagttgtattgaatattagagataacatgtataaagcactagcacacagagatttctttttaaaaggtctctattcatgatcatctcaaaagcataatcatctctattataaggcatgttttattagtgtcagtattataaatttgttcaggctagaaataagatgaattattgtgttgttcccagggttccttttagaacctgtcttattgaagacttt

SEQ ID NO: 31139 - DNA, 1044 bp, Homo sapiens
cacattattttcatctataatagtgtgaataattttgataattatttgacctgacaaatttgtgaaaaccttatgagagaaggtatatgagaaaacccatgcaatggcagagtgagaggagcctagatgaggagtcagaagcctccagtttgagtccagactgtgcaaatatctaactgtataaccaggtcaagttgttaatatctctgggtcattttttttttcctttttttctttgatttctttcttcaacaaatgcattttgacagcctaccctgcactgttttaggcactgtgactataggaagtaatgatgcagtcagaggctctgccttcatatctttcattgaggtagtagagtgcagtacttaagagagtactttccgggtactgcttgttagggtttgaatcccagctttaccacctagtagctgtatgaccttgggtatattacctaatatctatatgcttcagtttttctgatctgtgaaattaggataataatagtacctaagttatttagttgcgatgaagattgaatgaattaaggcctgttaagtgtctagaggacttcctggttcttagcaatcatttaatgattgttcagatattattattgtgattattatcattttattgcattctagagtaggagagaagaaatgaacacataatcaaatagatgtgctataatgtcaagtagtgataaatgctatgaagaaaaatatcagcataaggggatatagaatgacagagatgaaaggaaggcagctattttagatagggtggtcagagaaagcttctgtgaggcattgcaatttgagcaccgatctaaagttagaggctgagtcatgcagatttctgaaggagggtattccaaggagacggaacaacaagtacaacaattcaaagataaagcatgcttggtgtttccaaagtgtggcataaagccacaatggctagagtagtgaacaagggagggagtggggggataaggttagagaaggagccaggggtcaaatatgatgggccttgtcagccatg

SEQ ID NO: 31140 - DNA, 1048 bp, Homo sapiens
aggtactaaagaaaattgacattccatctgtctttattggtgaatcatcagctaattctctgaaagatgaattcacatatgaaaaagggtaagtaatggatataaaaaatcatgttgcttaaaattcttctttatattaaggtagaattatataatattgtaatcaagattatgtttcagaatgaactctgtagtgctaaattatccctttttaaatcattatgcttttaagacgtagtattttaaagtattttactactttttctttgtatgattatgttgaaaatatattcatgctagtgagagtaagtcacccttgttgctaaaaagataacttttcattttgaagtttaatcaaactactggtattttaaaacaatgcaatttatgtttatatgacattttctattaagaaatgtttgtatattactaaaaagatattttatatattataaacacagaatccaaaacattgtgttaagggactaacatttacaaaggcaaaaagtcagttttcaagttttagaagcttgatttgaatgagaacttttatatgaaactcttctcccctacccccacaaaataatctcattacaaagataacatacagactgaaattaacttaaggcacagctgtctcagctaatatagaaaacagagaaaacggtacaataaacacttcagaacttcttccatgacacacagatccccaaaacgtagttgaccagaacagactttggtctaagaggaacaacaacaaaaataataataaaagcagctaatatttattgagcatttagcaaagctgggcactcatgaaagcaagacttctacattttgttatccatttaatcctcacaacaaccctctagtggttgttattattatcacttattatctacatttgccagaagaggtaactggcacaatgaaatccaattctaattatttagggggaaaagaaatccacgaatatttctgtttgaaaatgcataaaaagaagagggcaaggttttctgtttactgttattgttagttccccactaca

SEQ ID NO: 31141 - DNA, 1033 bp, Homo sapiens
gagggattgctggggtgtggcctttgggagggtatttaatcttcatggacatattttctcttgaaaatgaagagttagaacaaagaatattgaggttcctttaagatttctatattctctctgatggttagggattctattttttcacatttaatccctagcaccaggcccattgactgtatcacagtagacatttagtaaattctaatgaaattaaactgcttttatgttacctcagaattcctcaagaagacagagcagtgcactggcagtaaatggggacacagagcctgtttattaagtgatgtaagatgtttaatgaggcagctgtgagctttgtctgaaaggagcaagttcaaggaagtagtcagatgaaatagtggggatatccagcagttgggctgaatacaggttattgcctggaaagctgatctataggacagaaggctctgctgtgtggctgtaaatccactgaggcttagtagtttgattggtgggggttggatgtcagaaaagaacagacaagacttcatgtgtcaacagaaggatggggaaattagacaggttattattatcaagcttaagcctaggcagctggtttgaaattagcctgggaagtcacacaaaggaaaataagaccctattttctgggttgcttaggactctgcttcagtgatcaaatcttagctgcagagctcataagatgtgctgtatttaggcatggacatagaggcagtgtggtaggataattacctgtttaaataccttcttcctcaaatacagattaatctgggactagggcaaggatgaatctgcaagttcagctgtgggagacctgggctgacagaagaaatagaaatggagccagaggactgaaattccattgtagttctgttgtagttccctgtatcatcactatcaccacatccactgttagcaatttggttaagaaaaaaacagtatcttgagtgtacattgagcttttgattcaagatgctcaaaacctttttttttttttttgagacaaagcctc

SEQ ID NO: 31142 - DNA, 1056 bp, Homo sapiens
gcattttacatttacattattattatacagtgatttacattatcattatacagtgtggattagttaatagtttttttttgttttgtttttaagagatggggtctcactgtgttgctcaggctgaacttgaactcctgagctcaagtgatcatcccacctcagcttctcatgtagctaagactataggcatgtgccactgggcccagcctggattaaagatttccacatagaccagaactagtttgaagattaggaattacttttttaggcttcattttgtgtgtttaaaaatatgtttaaaatggccaggcacggtggctcacacctgtaatcccagcacttagggaggccaaggcagacagatcactaggtcaggagatcgagaccatcctggccaacatggtgaaaccccgtctctactaaaatacaaaaaaattagccgggtgtggtggtgcgtgcctgtagtaccagctactcaggaggctgaggcaggggaatcacttgaacccgggaggcagaggttgcagtgagccgagatcacacgactgcaatccagcctggtggcagagcaagactccatctcaaaaaaaaaaaaaaaaaaagaaaagtttaaaaaatggtgatactgtcctgggtttaaagggaaaacatgtcattggcttttcctctgagtaagatgggtagctgtagtaggatttggaacagaggagagagagaatgtctcagttaactgttaaaaggatccttctgctgacattaagaataggttattagatggcaaagggtataaacagagagaacagacaggaaagttattgtagtaattcaggtgtgatataaatgtggcttggggtgatatcagtggaggagaagaaatctttaaatactggctgtatctggagatggaatacacagaatttactgatggactagatattggaagaggagacaaggatgactccagattttttggtctgaacaacaaaatggatggtctatttaaggacagtccttaaatagcaataaggatggttaatgtatgagagagcaggtttt

SEQ ID NO: 31143 - DNA, 1045 bp, Homo sapiens
gagtatgtagaatacatatttctagaatcatccagttcaagagatagaacattactgccaccccaggagctgttatgttcccttctagataaataatcctttcttgtcctctggaggtaatcactatcctggtttatgataatttcactgcctttctcaagttgtaccacatacgaatgcatacctaaacagttggcttaattttgcctatttttgaattgtatttttcttacctctgattaattttttaatgaaatttatacacttagttgcatttaggtatagttcatttactttcattctgtcttttaaagattttacttacccactttactgttaattgacattctttttttttcagtttagggctattataaatcatacttttgagaatatacttgtacatatatcctggtgcatatgtccatgaatttctttagcatatatacctagaagtagattaatttgatcatagtatatagctattttcaattttattgggtaatgcaaaatcatttccaaagtgattgatggtaccaatttctactctcaccaacagtctataggagttcctgttgttctatgtatttatccaatactttgtactgatggacttttaaattttagcattctggtgggtttataactcgttgttttactttttatttcccttcttgcaatgaggttaaatatctgttcacattatttgccagttggattttcactttcacgaagtacctttcatgatatatgcccgtgtgtctgtttcatatatgggaggaattctttatatgttcctacaagcctccagagggaggcgtagagtatggcaatttagttcttcaataattcttgtgttttaactgtctttttctagtttatggaccagaattcttgcctttcatggtagtattcttctatttttgttttgttttgtcttgatttgtttttttgaggcggagtctcgctctgtcccctaggctggagtggagtggtgtgatctcagctcactgcaagctccgcctcccgagttcacactattctc

SEQ ID NO: 31144 - DNA, 1051 bp, Homo sapiens
acccgtggaatgtgcctcctactgctgctgatccactgtccctctgatttggcatctcctttggctgagatgaagagcagccccaagtttcctttgctggagttgctagccctacttccacgtttgtccatagctgtcttcagattttctcccaacaggcactagcaatgcttcctgtgggttgaggcaggaacagctttcctgcatagtaaccctagacggtagggaaactggctgtctaccttagtctcagtttctccaggataggaaccgtaagtcttgggagacttttttatccagtgcctaataacttaagggaggggcatcatggatagagaagtcgaggggcatcatggatagaaaagtccattctctcttaatttttcacttttttgtgacaccaaggattgtcacagcctcagttttgagttctggaatattgatggtgataatgttgtcactgtatagttgtttttcattttctgtacgggaaaatcaactcagattgcttctactctgccattttggtaacatcactgcattttacaaattttgatatgttgtatttttattttcacttagctcaaaatattttaaaatttctcttgagatttcttctttgacctgcttgttactcagaagtgtgttttttaatcttcacatgtttgggaatttgccagctatctgtatttatatattattatatatttctagtttaactccattgtgctctgcatggtaatattgtaagacttatttttaaaaaataaagtatactttatgtcccagaatgtggtctctccgtggatgaatgttccatgtgagctggaaaggaatgtatattctatttcttgttggatgatgaagtagtgtgtatatcaattaaatccagttgactggtgctgctgttgagttcaactgtgtccttactgattttctgcctgctggatctgtacatttcagatagaggggtgttgatgtctccaactataatagcagattcatctgtttctccttgcagttctatcaatttttgccttatatattttgg

SEQ ID NO: 31145 - DNA, 1075 bp, Homo sapiens
agacccagaaaagcaaaaacaaccattacagttcagctctcaggaagccacattcctaggggaagggggagaacaccacatcaagggagcaccccatgggacaaaagaatctgaagagcagcccttgaatcccaggtcttccctctgacatagtctacccaaatgagaaggaaccagaaacacacttctggtagtatgacaaaacacagttctttaacacgcccaaaagatcataccagctcaccagcaatggatccaaaccaagacagaatctctgaactgccaaaaaaagaattcagaattaagctaatacaggaggcaccagagaaagataaaatccaacttaaagaaatgaaaaacatgatacaggatatgaaaggaaaattcttcagtgaaacagatagcataaataaaaaacaatcgcaacttatgcaaatcaaggacacatttagagaaatgcaaagtgcactggaaagtctccgcaatacaatcgaacaagcagaagaaacaactccagagcttggagacaaggcttttgaattaacacaatccatcaaagacaaagagaaaggaattttttaaaataaacaaagcctccaagaagtttgggactatgttaaaccttccaaataattggtgagtaattggtgttccagaggaagaagagaaatctaaaagtctggaaaacatatttgcgctaataatcgatgaaaatttccctggctttgctagagatctagacatccaaatacaagaagctcaaagaacacctgggaaattcatcacaaaaagaacaccctctaggcacataatcatcaggttacctaaagtcaagacaaaggaaagaatcttaagagttgtgaggcaaaagcatcaggtaacctgcaaaggaaaacttaacagattagcagcagatttctcagcagaaaccctatgagctagaagggattggggacctattttttagcctccttaaacaaaacaattatcagccaagaattttgtatccagcaaaactgagcttcataaatgaaggaaagatacagtcttttccaaacaaacaaatgccgagaga

SEQ ID NO: 31146 - DNA, 1021 bp, Homo sapiens
tcactctgacccttggttcctccccaggcaaaatgaggggcagaactgagtaaattcctcccaacactaacatctatgattctattttcccctcccagtgaccacttcctctgaaagtacagctgactcacgaccccaggcagcttaagatgtgctccaagccctttctcatcagtaaagcctgactaatatcagcctgaatttaaggctgtttagcaattgtcctgcctgcagttgggggtgaaggaggtgagctccccatctgtgcaggctggaggctctgcatttacccactgtgatcattgccatggtctattgctgcttcgtctttaaacactgtttactctgcctttcctctctcccagcattcttctgaattgggctggatgatttctccttttccttttcagaagtttagtttacctttagctttagcttggagctttggtgatgaaagaaaagagatcgtatttcctctagtcagagctgtattttcagggcacagctgcctggacccactagaaatataacaagagtacatatgaggtcatggtcaaatcccatccggctccctcctaataggagaagaacgcaatgagagtttagtctccggaaagtcaagcttagccaggcttgtgggctggatgctgggtgctggtgtcatagtagatcagttgaagggacggtgtttttccaggttctggatggagctccaatcttttctctatttctaaattctcatgactgcctaagggctaggagaggccttaatctttgattcatggaatgttggaaccagaaggtctccaagtgctgtcgtgttgtgacactgaagcactgtttattgattccctggaaagccctaacaaatatgactggtgcagaatgcactttggaaggccatctagtcgaattaggagtcttgtaattccatgttcatgtcacctgtgcgtgtgaccagtgtacatatatgcacagatttgcgcatgaagcaggtgactggggaacgaatgacctattt

SEQ ID NO: 31147 - DNA, 1026 bp, Homo sapiens
aagagtagataggaaataccatatccatttaacttcagatacttcagcttatgtttcctaagaagattattctcttaccaacaatataattaccaaattcagggtatcttatattaatgtgctattatcaaatatgaatatacagtgcatattcagattttgtcagttattacaataatgtccttcataaccattttttaacctgttcgaagagccagtataggttcaccaattatacttaattaaacagttgtctttttcccttcctgtcttgtttgaatatgtaagtacttgtgttagtcacctaaaggattatttaaaatttaaatatttaataaaaaatgcagtattaatgtttttggataaaatactaggaaaaaaatgtacttgcttagctagtttgtactattgggagtattcgaaaggcaagggagtactgcctaaaatccagctgaaacgactactagagttggtgaagttttataaggggaggtcttttattgctcagagttgggtggtgggtggcaagagtaggagaacatttggatattaatgtgtcccttagaaattgaagtatattcatgtacttccctttctgtactgtgatttttatatgtatgtattaaattgggcttttaattattttgagttggaaaaaatagtgtaatttgaagacattttacatcaccacttgggtttgcaaattatgtattgctatcctgtatatactgttgtatcctcttagttttattctggtagttgtgttaggtggcttgtctgctgcgagatttttaaccacaaatctaaatctcattattcgaagtggtgtttcactggaccctaaacatctcttctcttagcttttctatggctagctgaagtgggacactaaacattctgacatctgttttcgacacattaccaggtttcagaattggcaaagagaaattatttcttaactgctcacccaccattatatatgctttccacccatatgtttaccaccttcctctttagtaaatttaa

SEQ ID NO: 31148 - DNA, 1033 bp, Homo sapiens
atgttccatttcttttatgttagctattattaagctcagagtcaaaaaataggagggttttttgttttttttttttttgggacagagtcttgctctgtcacccaggctggaatgcagtggcacaatgttggctcactgcaacctctgccttctaggtttaagtgattctcttgcctcccgagtagctgggattacaggcaccaccaccacgccctgctaatttttgtatttttcataaagacagggtttcagcacgctggccaggctggtctcaaactcctggcttcaagtgatccaccctgccctgacctctcaaagttctgggattacacatgtgagccactgtgtccaacccaaatattcagctttctgttaacaaagcatgcagttccttattatacatatatttgagtattatgtaactggcttccacttcctttgattttccgtttttagagggagctctacctttaatttcaatatctttttcctttgccttctttctaagctgtttctactcctttgaaaggatcaagtgtataaatcatttgagagtaaacatgttaaaaataccaatagcctgtcttcttagagctgtttttcaaaggtgtattaatgaaattctttaagctgtgtatttggtgtttcttctaccaataggtgcatttgctataatgcataacataccaaacactttatatatgtgtatatacatgtacttatgcttatatatgtatgtgtatatatgtacatatgcttatatatgtatacatatatatatttagtttctggcatagctaattgtgtcttaaattatatcttggctcaaccacagatatatgaagtttcttgtcattgtgtgttatgtgtctttttatatgtgtctttttatttatttatttattttgagatggagtcttgctctgtcacccaagctggagtgcaatagcacgatctcggctcactgcaacctctgcctcccgggttcaagcaattctcctacctcagcctcccgagtagctgggattacggg

SEQ ID NO: 31149 - DNA, 1079 bp, Homo sapiens
cttctaaggactgaatgttgtccacaagagtgtcatcaggtcataaattggtaagacttaatggcttagattttatgtattatacctgatgttattgtattgagatgaatatttatgaacaaaatgagcacattgtgtaagagtatagtattaaatataagttaaaacttggaattttaaatacttggagtatgtaagcctttcgaagtctcttgaggctgaaggccgtatctttgcagtggtgtttagtaaatacatcagtttaaaaaaagaaagtgaaatcctgtattatagtaagattattaaaatattgctattgcatctgctgtagatgcctacaatatagtgaagaacccaaatactttttaggtgttataccaggagatatttgagaaataatatattcatcttttctttaaaaaaaatccattttcttaataacatacagcttaattttattgctttggagattttatttcttaataaaagacatgtttcctctaaatgtctaaaataaagccaagaaaattttttcaattcttacattgagaatacctaagatgccaatatcatatgaaaatgatatattagaagtcattgcacattttttatattccccgaaaattaattttctctcagtattctgcttagaaaaaaactactttgttttgtgcagtttcttattttgctttgttttacacagctgtattttgtagggggaccattggaaggatagagtttagctcaggataagaccttatatcttttaatctcaagattatagtattttgcagatgaagaaaaggagtctggattatttgtccaaggtgatataattgtagaattcatattttcattaaagtgtggtatgcatatcctgcatgtcagtcaagaattatttgaaattatttattttccaaaaaagccagaaggcatgggttgatatcagctaaacaggccactatatatattccaactttatccttaaccagagatatgttattttatcctttgcccattctgccttttgaataatattctaaattgtttctgatatagtattccatgacttcattaca

SEQ ID NO: 31150 - DNA, 1418 bp, Homo sapiens
taaactgaaacgtagacaactttaattcttcagggcctgtatttagagtgttgcctttatatttgttgaaagtgaaaaatgtaatccttggctgggtacggtggcacacgcctataatcccaacattttgggaggccaaggcaggaggatcacttgagcccaggagtttgaaaccagcatgggcaacagagtgagatctgtctttacaaacaagtcaaaacatttttaaaaagaaagatgtaattctttgctcaaacccaagccactataattttaaaaaacattccaaatggaaaacattcattgatttattaaaaataaagactaggctttccccccacccccaatatgatatattctgttcatttcattaaggaatgatggccatgcttgtgctctccctttagtctaaatcagaatcaagcaactgtctctttaaaaaccccatgatattcttctgagtttagccctattttgaaacggtcccttgacaacctttatttattactgtacttggactttaggagacagattaggaaggagacttggtagcaaagaaaaattagttaataactttggagcaaattctagtcacgaaatcccagtgactagcctaatataattttactttgtcaaatatattgttcatagaattatgctttttctagaaagctattttaactaacatttctgcactttcaagaaataggcataaagaaaagaaataggcaaaatgaaaagatgagcaaaaattatgtgcttttcactggtatttggcttttggtatatacatataccaaaggggatagtctcatttttactttagtcaggcctcactgtagaaatgggattgagaagatatttaaacaaggcgtctaaacaagaatgactttaataaaaagaaataatatgttgaatgcttgagaaagaggaggcaaatgtgaggccattagatgaaaagaataagtagcattcctaagaatagtttcttcccaagcccatctttttccatgactctttacatgttagtgttctccagtgttttggccccacttgtcttttcattgtttatgcaagtttgttttctcctatggtttgagtcgcctactgcattcttacaactttcaaatctagacttctaggccagagattactctggagttctcaatacctatatccagcagccttctctctatatttctccaacaggattctacatttccatgtctccaaattcagtagtcccaagtgaaacttaaatttcttttctcgtctttatttgcagtgctttatttgcaccacctactccccaccccacttcatccccccaccaaatctagccacctttctgtgatacaccagccaactcctagttgctccaagaataaagccccaggcatccttagcattttctttgt

SEQ ID NO: 31151 - DNA, 1073 bp, Homo sapiens
aatctgttttggaaaatagtattacattatagttttaatttgtatttttattttatgattcagatgttgagtattttttcatgtctttcttgttaatgttcagtgtgaattctccccatttttctattgggcatctggtcttaacagattttaggaaaatttattagagactttttaactttaaaaaaaaattagacatgcagttacatagtcctttcccaccaaagtattaaagaaattctaattaaatgtgtttatttaaagttcttagtacagatgataagactgactctagacaaagggggtctaaggtaggagatggacttcatatagattgcatgctctttaatctacgctttactggctagccatttgactgaaattaacaagataaatataaaatatgctgagggcattggtgaacaaggtttttgtagaagatgctgacaataaatatcaatatataaatatttaactgagtttttaatagttccttggtaaaggcattcatcacaccattgcgggactggctacttgagaaaaagtaacacttaagttttgtaagtagaaattttacctgcttgctcaggatgaataatagctttaaaataacttattttgtgttactgctaataataatctctatggggcattttgggtttttttttaatcatgaaattaaacattatttgttttacattggtagaactgatggtcaataattagaataacataacattttgagttcttagtttaatttattattaacttcacccaagttttattcttaaccatagaggtttgcattcagccagaggttgtctatatgaattttatttatttaggcccttttgaaaggaaaattgttatttgttcttaaattaagctgtaaatattttttagtctcctcttacagaagagtggtggatttttaaaattatatttaacctcacaagtttactgaactgtagattgattagatttattcctttgtaatcagtgactcgcattttcttaattttctttctaaaaaaataaaacatgcatttgttagagaataggcaaaatgttac

SEQ ID NO: 31152 - DNA, 1072 bp, Homo sapiens
acgaaagcaagtagccatgctttggttgtgtgtttggccttttcagtattagacaatcattctacaagagcttttcctctctctgagatgtcatgcagcgctgttgatgtccagttctatgtcatcagtacacaaggagaataatagatggggtttattaaagcgagcaaagtctgcattttacctggtgcgcatgagtggggtctttaagagttttggtggctctcccatgtttcctattacccatggatttaccctgagccttcctatcacattataaataacagttcatctaaagagccacttttctttctgattcagtaacatttgcctacataagttttcatttatttgtgttttatttattacagggctgctattttcataatgtacatgaacaatgtcacagaacttttttaatttttttgaataattataagtatcagtaaaggaagtgaaagacaggattgcatttaatagataaaacgtttaggcaataattgaacaaaagaatcctggcatatttctaacactaatggcaatttacttatggtatttattttcagtagtaaagacccagcttgaatgtaaattttgtatagtgtaagtatgaagaacatagtgcaactgtacaggtagtcaccagttattgtgatatgataaataattgggctattttgatgaagaaaactttgttcatttgtttctactttctaagagaaattgccacgattcctctgcttttcaacatttcgtatgacttttttttcgggtgggaataaaaagctgtgaaattgttcaacctactttgtaaccaaagaagcaaagctgtgtaatggagtttggtttttttttgttgtttttttttttttgtctttttttttttttataatgcacattctttatgtatttttatttagtgttttctcagtcacaattttctttactgtctagcatgatctgcatgacctataatctttgaaccactttcgtacctcatgtttttatccagcactcttattgtaatatgtactagtctgtgaacaatgtcaaataaaagagaacgaacagg

SEQ ID NO: 31153 - DNA, 1033 bp, Homo sapiens
aattctagctagactagcagttagtcttctactttttggttactcccttttagaaattggaagctatgaagctatataccctgtccatttgaaaatgcacataagcaaagaactttacaaataggttataaagagaagctcaatctcagcaaaataagggaagtgcacattaaaacacaagaaaccatctcagatccaactaatatttagcgtgcatacaaatcaaaagctggaaagggtgtggaaaaacaggaatacattgctagtgagcatacaaattggcacagcctcttttaaagacaattgtgtatcacccattaaattttaaaagtcacataccctgtgacctaacaattccaacttttaatgtcctaaagaaacatacatgtgttcacaagatagcctgtacaatgatgtcaattgcacctttgcttgtacagtagacccccttatctgcattttcactttttgaggtttcagtcatccaaggtcaaccacaatacaaaaatattaaatggaaaattccagaaacgaacataagttttaaacttcaaacctttctgcatagtataataaaaatctctcactatccctctccatcctgcctgggacaggaatcatccctttgtccagtgtatccacaatgtatacactcattatatacccattttataatgcccattagtcatttctattatcagatcataaaaaaacatagtacatagagggtttggtattattcatggtttcaggcattcagtgagggtcttggaaaatatcctccatgatgggggagctactgtaatactatgaaattggaaaaaccaaaatactcatcaagaggatggactatggtacacatgatgaagtattaagtatcaatgaaaaagagagagtcctacatgtccggcatggaaggatctccaggagacaatgttaaaagtttgggggaaaaattgaaagacaatacctgtaatacatatgatactagtgatgttaaatcacatcacacacacacacacacacacacaca

SEQ ID NO: 31154 - DNA, 1216 bp, Homo sapiens
tttgtacatttctaaccattacacctagaactggctaatttttcaggaaaccctgtcgcctttttggtgtgctacttttgaatagctattgatctctgaaattgaacaaagaaaaagtattagctcttgatctcattgaaggaaacattaaaaggtaatagggtttcttgaaaaattggctgagtctagcaaaaaaaaaggtatttaggttctagagattcttatttgctgttgcattgatcattgtttctaggccttttttttctatttaaaagatgtaacaatcataattttatttaaattaaagttttatacgtatagttttatttaaattgaagactacaaggtttttatttaacttctatcttatttgtattgccttctgtcaccaccaagaatcttgttactctggaataccagggatgataatttgagaatatcacattcacataagtattcatttggtttgttccacattatccacaaggtattcttacaatcttaataccaaaaagtaacactgttactgaaaataattttttaaaaagggtttgcagttcttttgtctttagagcatcccattactgattgtacagttttgagtatatcatagttagaataggaattggtaactttgttcacacgtaccaaagatggcatgtaggctgattttgagcagcatccaatcagtatagttatgcattttattttcctgtgtttgaggcgcactgtcacctcactgtttctgggttagcttgctttcttgtcttattctcctctttgtgagcatgtcaaatgaagagggatcaccactttgacagtttggtgtgctgcttttgaaaagccattgatctctgaaattgaacaaagaaagtatattagctcttgatctaattaactagagtggcagttttattaataatagcatggctcagactgcctggaatagagtaagctcttaatatcagccattgttactgtggttgtgatcatcattatcatgcatctgtttatcacattaagttacagaatttccatatccacattctgcagtagcaggccaaggttgatcttttccttctaataggctctaagaccactttatttcagcgattgaagagaggataactgacatttatcaaatacctaccatgtgcctggcactcttctcttaaaaccaattactgagagttgggtggtataatcccattacttg

SEQ ID NO: 31155 - DNA, 1044 bp, Homo sapiens
ccgcgcggtgccctcctcccggcggcgtcccgggccccgaaccccagcggtgcgcagagccctggcccacccgcttctggaacagccgctgacgcaagccccgggggcgcgcgcggacgtgacgcctggacacgtgtgcggccgcccaggcgcgcggggactggcagagccaccctgcgccggggcgctggctccgcccggctccagctggcagcgcagggggccgcctagcgccggcgcttcctgctcgggctgcgggccgggcctgcgccagtgagcatgcctggctcgctgcagccccgcggggttgtcttttctgggttgaggaggggggctactctcggggaagcgtcgccgaagtcctctggccacaccccggggtgcctggctgacgcgtccctcagctcaaacgagaaaggcaacttcaggcggggcgggagcgtggacggtgggtgggaccggacgcgggcgggcaggggcggggcgcgggcgcccctgcactagtcggaaaaaaccgagaggtttctcttctcagggctgagtcaccagcacgcaggagaagagggcgaagcggccacccgcgttctgtgttcggagtcaggacgagaagcattgggtgggagcagggcgaggggctcgagttgggtctgcagcgggcacaggacctagttttgtacagttaacggtggggttgagtaaagaggggggcggtggggaggatgtaagctccctttattcctttcccagcggaccaggaggaagcttcgttgaattgagcgcccctggctcgtatagcaggccgaggagggagctcatgggcagcgttggctaagagttcgagatcatctagaaatgtcagaaacgtaggttgggtcgtgaggtctctgaagacagtgggtgaaactccagtgtaaggcgctgcgtccgcttggtagagagccggccgaagtccgagtctttgttgcgaggcgtagggccaccctgcgcgcccagcagaagcgctagagggcacggttgcccggggtgaaccgcatgtccaaatgt

SEQ ID NO: 31156 - DNA, 1024 bp, Homo sapiens
ggtctaaaaacagaggggctgcagttctctctggccaggccccgttggccagtgtgacaaagatgacccaacttacttgtgtaacatttactttccaatatcagatattatttataatgagattaacctgacacataattacatgtgctgttgtgctgtctagtaactagaaacagatggtaaatggtcctcataagtggctgccatgattattattaacataatcaagcatggtttatagtttttctctttgtgctttgctagtattctatatttgtgaagaattcctttctttcctggcactttgttccatttgattgctatgatgacagtgatggtgatcatcatttagacacacacattttatacacacattcaaagatagaggccctgaatcattctttccaacagggttaatgttcttaccctgactgccttgtactttgtcccgggtttagagcttccctgtgaccacctgcccacccctaacttgaggtagactaatcctctttaaagctccttccctaaatctcttcttgccttatgaattactagaccatcatggaatcagagattccaagatgttctaagaagacatttctatcctagaccaactaacagagtagtagactcttggttctatcatgtttgccatcaatttcttagcatctggcatagtgcctggtatgtagtaggctcaaaataggtatctgttgaagttttaaagttctaatttggctctttcattttacagtgaaaggactagaggcctaggtcagctaaatggcacatgtaaggtcatgtatatagtaaatggcagtgccaggacccaaatgcaagcctttcaacttgtaccagccagcgtcccagcaggaaacagatggcattctcaagtcagataattaatttgaggaacatttaagacagagactatttataaagatgtgggctcggtgtggggacaccacaatggctaatgcagtgtcccagcaacagtgggaagtcattatgacccctagacctg

SEQ ID NO: 31157 - DNA, 1034 bp, Homo sapiens
ctacatattgatgggttttattttatttgatcttgagctgcctacttgatccctaagtaatagtactttgcacggtgtcattgcacaataattaaaaccagagggaaatggctggtttaaaataacatagtaaaatgagtcatccagacaaaaacaggcactctgtatttgtccccagtgttctacaggtaattctgttagaggaaaactttttaaaagcaaaaatgtatttcagtaatgtatcacgctgtgtcatttccactgtgtaccaacagcccatccccacccctcctccttttctctcttttcctgctctccagccagagaacctgatttaactatctgatcattcagcagaacccagcagtctggccagtggtctgactctgctggtcttgtggcactgaggcagcagttttcatttgggctatttatccaggcagccaatcagtgcactgactacttttcattccccatgtgaacagtggctgagtatgggattttggattttctgtggctcattttatagggtacaactgattaacttttaaacccttttattatgggacatcaaacatgtacaaatatagaagtatataataacacccatttactcttcacccagctttaaccattgactcacagtcactcttgtttctaccccttatcctctctgtctccccccacctgtgaaattatatcatttcctagtgttttactttttatcagtatggagtaatcttttcttttacttcatgaagaaataatcttttacttcattttattggtagttaagtacttcaagaagacattttaaatatttgaatattaaaaaaccagctttattgatataattgaaatactatataattcatccatttaaagtctacggtcagtgttttttagcatgttcacagagctgtgaagctattaaccacattttagaacattttcgctacccctgaaaaaccccatgcccatgagcagtcactccccatttgccttcagtagccgcaggcaaccactaacctact

SEQ ID NO: 31158 - DNA, 1017 bp, Homo sapiens
ttgtacttaatttcatatttttgaaaaaaaatttgctgttgaatggcacaagagcataatggcttagatatacactttaaagctgttacagacctgattttaaacctcactctgccacttagtaacggtgaccttgagcctctgtttccccgtgtctggttggggagtaatgatagttcttacttcattgcctcatagggttaaggttatgatgacggaaagcttccaagatagtgttcagcgtagactaagtgtaattagcttaattaaatgtgagctataatgtttaatctatgtttaggaggcaggataacatagtggttctgagcatgtgtgctattaataaaatcaaacttgggttggttactaatctacgcggctcatagtcctctttggtaaaggtgggggataacactacctagatcatggggttattgtgacacataagcaagatggtcatataaagtacttctggttgagtgaagagtgtctgcaagtgtctagggcgagggagatctacaggctgtggatcaaattcggcccacaaggtaaaaataggttttatgtttttaatgcattattaaaacaaaaatgaagaatgtgtgacaaaaactgtaggtagcctgcaaagcttaaaacatttactatcaggcttcttatagaaaaagtttgacaaccccttgtccagggttactgcctgcccaccatttatgaagctactattacatgattatttgattttgtttttgtttttaaatacttctttttttttagcttttacagccttagaaattacatattataagttcatctcatgtttttaattgcatgaaaaattggtttaagtgacgatttttaagtgatgattactgcatttttattaagttccttcaggttcctgttggagtattagcttatgaattattccttaatttctcaacagctgtacttcctccctttcaacttaataatttttagttttgtcttctcaattgcgaagttgagaatggggtaaga

SEQ ID NO: 31159 - DNA, 1090 bp, Homo sapiens
ctgatagcttgagttggactcagatttgacctagtagctttgagacatttgacagttatttaacctttagactttagtttgctcaactgtaaaatgataggattgtcattaaaacatgagaacagggcatactgtataacaaacatatataccagcagtaatcactgttaattttggtccatatttggttcactttcaagagttatgttgtggcaagaggtccattacttgcctagggaaaaaatacgtttcaaatatcttttggaaatataagtatggaaactttcataaacatatatgaacacttaactataaaggttggaggacataaatgaaattgctctatgcataatattctacaggattttttttcttttactgcttaatattgttcatcatttttttcttgtttatttttttctggtcatggtgctccactcttttattacttctaataaagttttccagttaattatctgggtgggtgggggtggggcataatccttttatgcaaactgtagtgacacattgccatatcctttcagatatttattcctgtctcttctcattggttaacactttcaaaatgatgctaagtgatagtgttgaggccagcagcctgaacttattaaatgaggaatgggaatgcttctagtgtgtcacacttggtcaactgcggaattaagtcagttacttatattaattaagtgcatctgtaaactttctccccatctaccttgtttattcctttggtttaatgtaacacagtgtattacttttactctttgatttaaaaacagtcgaacctactctacaccaggcaccgtggaaggtgctgaaaataaaaccgtgaaaatgacagtaagtctagcatgtgttagaggcagaataaaggggattgtgctctaggtgatatcatatgagcatctggaaacagaataaagtctttggtaattcactcctgtggttttattttctgtgtatcaattagattagaagtccagcttgtccctagagaggcagaagtcagggctggaacagagggtggcaatggctggccggagtggtgctgggcagcagggatcctggg

SEQ ID NO: 31160 - DNA, 1026 bp, Homo sapiens
aaatcttgagattgctttggggcgcactttcttgtttgtttttttgtagctgattcacatgtaatatttatcacatacgtttactgcagagaaattaatacgacatttaatcattttgtacaagcagtactataaagtggttaaaacattttgaaaagtgacctgtgggaaagaaaaactacattttgttaaagtggtttttttgacgggcatgtcttgtcttgaaacggtaatccacatgccattagagtcttgtggaaaatagtgaacaaaaggaagtaatggcttttactgttgaagaccacacactaccaaacacacaaaccctcacagtgctgcttacccgaaagaaatcccgtgtcattttgggggagtgatctgttatatttgtaatttgtataatattatctcttgatgttacagatgttttttgtatttattgatgctttttctccagagttgaaagatacagatggcagcgatagggttaaggatagagcgcagaactaatgacacatacttgactaacatcatcaagcagaagtacagctttgtgtgagggtgttttctagaacttctgaactctttagattactctgttagataaagccagtgtatcacgagtttctcatttgtagttgccaaaagaaagaaagagaaaagaaaccaattaaaattgggcttattggctgtgggtatgtttttaggttaggactgatgcaggcactcagctttgtaaccaggactgggtttgtaccatgtcttcagtgtgccttccatggtgtcaatttcaactcatagggtgctttaggctctctttcctatggtagccagatgaaagaagtgcttctagatcttatatcttcatggcacacccatccagataattttttcagaagcctagaacttgctcttattaggtcaaattggatcatgttccatcccaacttgtggccagtggaatcagacatgctgattgcctagagtcagttatggctggccccttatgtgggggatggggtcagc

SEQ ID NO: 31161 - DNA, 1327 bp, Homo sapiens
tgaatgggtctcatgagatctgatggttttaaaaacgagagttgccctgcacaagctctcttctcttgtctgctgccatgtgagacatgcctgtcaccttctgccatgattgtgaggcctcccaccatgtggaactgtaagtccagtaaacctctttcttttgtaaactgtcctgtttctggtacatttttatcagcagtgtgaaaacggactaatacagtaaattggtgccagtagagtggcacattgctgaaaaggtatctgaaaatgtggaagcaactttggaactgggcaacaggcagagattggaacagtttggagggctcagaagaagacaggaaaatgtaggtaagtttggaacttcctagagacttgttgaatgcctttgcccaaaatgctgatagtgatatggacgataaagtccagggtgaggtggtctcagatggaaatgaggaacttgttgggaaatggagcaaaagtgattcttgttatgttttagcaaagagactggaggcattttgcccctaccctagagattcgtggaactttgaacttgagggagatgatttagggtatctagctgaagaaatttctaagcagcaaagcattaaagaggtgacttgggtgctgttaaaagcattcagttttataagggaagcagagcttaaaagttcagaaaatttgcagcctgacaatgcaatagaaaagaaaatcccatcttctgacgagaagttcaagccggctgcagaagtttgcataagcaacaaagagctgaatgttaatcaccaagaaaatggggaaaatgtatccagggcatgtcaaaggtctttactgcaagcccatcacatcgcaggcctggaggcctagaaggaaaaagtggtttcgtgggcccagcccagggtctctgtgctgtgtgcagcctggggaattggtgccctgcatcccagccactctagtgtggctgaaaggggcccttgtagagctcaggtcatggcttcagagggtgcaagcctcaagccttggcagcttccacctggtgtggagcctgcgagtgcacagaagtcaagaattggggtttgggaacctccgcctagatttcagaatatgtgtggaaatgcctggatgtccaggcagaagtttgctgcaggggcagggctctcatggagaacctctgctagggcagtatagaagggaaatgtgggattggagcccccacacagagtgcctactggggcaccatctaatggagctgtgagaggagggccaacatcctccacactccagaatagtagatcccctgacagcttgcaccgctggtctggaaaag

SEQ ID NO: 31162 - DNA, 1092 bp, Homo sapiens
acatagtcatgcagtcttcccgaatggcaaactgggggccaggaaaatggccacccactgttagcctttactctagggactgcatcttggtagtcaggatggacctgtaattttttgcctataatgattggaatagtccagggtttctcagccttggtactgttaactgtttttttcggtttcagttctttgtgggtaggctgtcttgtgtattgttgggtgtttagccgcatccctggcctgtatccactaggtggcagtagaacgccatggtttgtgcaaccagccacgtccccacacatttctaaattttcttgagaaccactggaatgaccccttaatggtaggtatgtttcagatgattttgatacaggaagagaatttagctttcttgttggggtcagaccttaactgtaattgaataactcatcagcagtaagtaatctgtatgctaaggtctaggaatgtgaagtgtgctttatttactgctctgttggaatagtggacagaggacagacagtgcagcataatgattacatgcatgcttgtgggatacagtgggccttggctacatgtatggcgctagaatattgcgataattattaactgcctttgtgtatcagtttttacatgtctaaaatgaggggagaagtagtagctacctcagctacatctagggttcctgttcccataagaatcaaatacctggtgtgaggcaggctgtgactcagtgggaacattgcgcgtacagggagtgactcagctgataacagaataaactatcaggctcctgacagtttcccctcttctttaagttgatttaagttgacgctcttctacactgaaattcagggctgcaggaggcacagtagaccctttgcagagtgctctgagcttcctccagtatgtggcccagcagtgcttgaacaagggacaaattgggagaggttttgcttctgatgatccctctattctagtcacaggaagtggcactcaacaacagagtgtatgtatgaagtccagagtgtttcagttctaatttaccagtccctacacaatgctaatctttcatgagagtggcacaaagctctg

SEQ ID NO: 31163 - DNA, 1849 bp, Homo sapiens
tttgttttggatatggagtctcgctctgttgcccaggctggagtgcagtggtgcgatctcagctcactgcaagcttcgcctgctgggttcacgccattctcccgcctctgcctcccaagtagctgggactacaggtgcccgccaccacgcctggctaatttttgtttttgcatttttagtagagacgggatttcaccgtgttagccaggattgtcttgatctcctgaccttgtgatccgcaagtctcggcctcctaaagtgctgggattacaggcgtgagccaccgcacccggccgggatctgttcttgaatatgcgtgtctgttttagaacattccacttgtgatatttcacctttcccatgaatttcaatagaagtcagtcaagtacagtgtaagaaaatagtcttatgtcttgccctgccccaggggagctgttagatgccatttcattattgcctcaggtataatacctgtatgtaaaaaaattctgataaacactcctttctcgttatactatacactacactttgatgctcattgacatccttggactgtgaaacgtgccaggactagttttgttttactccacgctttttttttttttttgaatgcacttccacttccttctaatgtttctttgaactctatgtgttattgcttttctcttttctattttcaacgtctctttctaagggctacttcccttcaaactttaaacctgctcaaagtccttaataaaaaaaagtaataaaatctgtatgtctgtaagtcatgacaccccaatagctgtaaacttgctcaagccatttttaaataacaaaagtgaaacccccctgccaatgcagaagtagtgacttcccactgtcagtgagctcatcttgtttggaactctcactagccactgaaaggaaacagggctccttaagagaaattactgatttccgatcaggtacaggaaaagtataagttgagttgtgacatcttttgatcagaaagcaaggaagtgctcagaccgattaggaaatgctaaaaaaggacacagaagccgacttgagggcactcctagatctgggacagtttgggcattaatgagaatgatagcaacaggtgaaaatacattgaaaaccaaaacaaattcaggagtttatggtgatattaaaagtacagattacaaaaaggtaggatgcaaatgagaaagctcttgtttacaggagaatgctggctagtaaaggtagaagaagggtagaatttaggacatcaccattttgcaacctcagtgtgataactgattcaggcaataagcttcaattgtggccaaaagccactgggtgaatgggtgtgggagaatagtatctttcagtctgaaaacatactcccccatcatttagagtaataaaaagtatacctctgaagcagagagatctggtggtcactgaatgatccaacttaccaaaagtgagataatctggcatcgtatgcctcctgatatgatttagttagatgtacacaacatacttttgtaataaactgtatcaaaaatcttcaatgagcaatcagacaaatttagaatatgaaacatttgataaagcaaccagccttggactctttaaaaaaatcaatgccacgagaaacaaacatgatgggctggaaggggacagtcgtagattaaaacaggccaaagagaaataacaccgttaatgagtggtgattgttggctggagggaatagccatacaaattgttttgagacagttgtataactctgaatacagattctagattaggtaatattactgagtaataatcttcccagaaatattgatggtgtggttaagcgagagagtattta

SEQ ID NO: 31164 - DNA, 1045 bp, Homo sapiens
gaaacccatctcacgtgcagagacacacataggctcaaaataaaaggatggaggaagatctaccaagcaaatggaaaacaaaaaaaggcaggggttgcaatactagtctctgataaaacagactttaaaccaacaaagatcaaaagagacaaagaaggccattacataatggtaaagggatcaattcaacaagaagagctaactctcccaaatatatatgcacccaatacaggagcaccaagattcataaagcaagtcctgagtgacctacaaagagacttagactcccacacattaataatgggagactttaacatcccactgtcaacattagacagatcaacgagacagaaagtcaacaaggatacccaggaattgaactcagctctgcaccaagcggacctaatagacatctacagaactctccaccccaaatcaacagaatatacatttttttcagcaccacaccacacctattccaaaattgaccacatacttggatgtaaagatctcctcagcaaatgtaaaagaacagaaattataacaaactatctctcagaccacagtgcaatcaaactagaactcaggattaagaatctcactcaaaaccactcaactacatggaaactgaacaacctgctcctgaatgactactgggtacataacgaaatgaaggcagaaataaagatgttctttgaaaccagtgagaacaaagacacaacataccagaatctctgggacgcattcaaagcagtgtgtagagggaaatttatagcactaaatgcccacaagagaaagcaggaaagatccaaaattgacaccctaacatcacaattaaaagaactagaaaagcaagagcaaacacattcaaaagctagcagaaggcaagaaataactaaaatcggagcagaactcaaggaaatagagtcacaaaaaacccttcaaaaaattaatgaatccaggagctggtttttttgaaaggatcaacaaaattgatagaccgctagcaagactaataaagaaaaaaagagagaagaatctaata

SEQ ID NO: 31165 - DNA, 1049 bp, Homo sapiens
tccctaatttcatctagtgaccaggggaaaccttgctgtcttggtctaatgagggcaggcttccctctgggttctgcctgcccatttgcccattttcccatttataattagttgagatatgtaaacatgctatataaatgttagctgttattatttcaatattataatttgaaccaaaccttatttaatctagttcttagctatacgtgtatgtgtaagcttaaaagtacttttgtgaacagctgcatttagagagaaatgtgaagtccaagtgcatgtttatgcatatgataaaactttcgcagcatagatgcttcttagcattacaactcaacaggcagaggagattcgtgttgacaaatgtgcttgttattaataactttgtgttacatttcaccggagagacctctagcttaccagttttaggccttttgcttttggcaggttgcaattattgctgtcttataaatgtcacatacatgatatatatacacacttccaaaactgtgtttttcattcttgtcggaatagttgagacttgtctgctaccaaaagtctgagtcagattctgatactttgccttgctgctcttttttttgtagttttcccagaaactttatattatacttaacaatataaatatagtattatactcataataagcgaggcctttgcttgtattcatttaaaaatgtagagaagcgcttaaaagataggaactttcgagtcacaaataggcaggctgaagattgacttatggaattgatgaagctgttgggagaccaatttcatgtaagaaggagcaatctgaggatagaactatcagccatataacaggggatgtgagagggatacagtgacttccatttgtttgtaaaaatgctgttttgggatttatactaatgggtacccttcatgtgtgacatgcagtgtgacttaaatatctaccttagcttttgccatagttcaaaagttgggggagggagtttctagataatgagcatccagtagagtagacggaaagtccacggcagttaaattgctcagca

SEQ ID NO: 31166 - DNA, 1046 bp, Homo sapiens
ggcaggcggtttgggtataaatgcccaccaactttggttctgccatggctggggaggagggtctgtgctgctatgggccttttcagacatctctaactgaacacacgcgatttttcctgcagcttcccttctatagtggagcttagaaagtcttgtcaaaactggcccctgagatgaaacctttggccatcttaagctagtgttttatccaggacaaatgaagaaaaaatacagcgaacttgtttactccagcatagagacaaagtcaggattagattaattgtgattctttgcagttaatgctacataacgtggcatatggagttaaatttggatatacaagccagcagcactgccttgtataaaccaggagacctcaggctggtaatgtaatctctctcaatctgtttccccatctgcaaaaagagtctagtactacctgcactattaaagttgttggaaagtttaaatcacgtaaggtgtattttcttactataatgcctagctctaaggtcagtaaatggtagggtctctttttactatgacaggctaattgttcctttacaatgctttcaaaactgcatggttcaacatatgctagatagaaatacagtgctatgctttgtgtttttaatgaatattaattgttatggaaagagccaaatttgagtaggtctttgacccagccactgtggttataggaaggctcttttagatacatagcaatacataactcatggaaagtattttcaaattataaatctaatacaagaggaaataagatctcatatgcagtaccctggtaaactcaaactattacggatggggcacacatgatggagtgcttctcggagctttacatttttgcctcaacatgcctaaggtaataggagatattctcatctgtgctttactctgtggtctcagtaaggaagggatggagacacatccaggatcaaccagagctggtggtctttcccttggtccccattgccagtcccaccctgtctccacagggagtgtgaatgaggatggctccatctttc

SEQ ID NO: 31167 - DNA, 1027 bp, Homo sapiens
ccttgaaattatttcccagaacatcaaatgggagttttaaattttttaagtgttatttgaaagaaacaatccaagaaaaaattaatttaacatgttcagtgaataaggactcatctctaagagattaatgtaatatagagattaagaatgcaggctacagggttggaattcctggattcccgtaccaccccccccacttatcagctctgtgactcttggtaaaatacctaactcatctgttaaatggtaataattctctttaccccatagggttgtggtaagagtgagacaatacaaagcagtgttgaagtcagtgcagggtaaagtgtggcacagccttcagttaatgttaggaattgtagaaaggcagataacgatggacagaggctgagatctcttaccaccactccttccctctcccctacccacttaacagtatatcatggtgacttttccatttcagtttttaaagttctgcctttttcttttgagtagttctacttcatttcactgaagaaaagaatcataaccatttttctgttactggacatttgggttatttcattgttcagtgtttaaagatctctgtacttgtatttccttgttccctcccacattcccctaaaatctttgaaggttgtgttttgaggttggtcttcagtacagctgctgtaattgatttcattattttgtaagcacttgtttgctgtgacatcaaaaagagtttgtgctcacttagcataaaattaagtaattattggacatgccatcttttaaatggaagaactgaactcttctcacgagggcagtaggagtgtattttgtcagttaggaaagaagaaactgcttaagagcttttattgaaaacgccttatggcctgtctcagaaattcaaacctgagcttattagttggtttatgattgtgtaaagcgcacatctctaagataaccataacccagtatggagagttttctcatttatagttgatggggtttctttctcctgaaattgtttccctcaaattgc

SEQ ID NO: 31168 - DNA, 1064 bp, Homo sapiens
gcatacatgcaggaaatagttagctgcctggtaagaagaaagactaaggtcagagcaaaaaagtgctgtagatgtcctacgaagggaaaacttccttctcctgggaaggaattggtatgctgtcatgcccagcatgttgtaggagtctgtaacttttataaacccccaccttcacatgaagtcaatccattctgtcctggagtgttttcagtatggtttaaaatggattttatgggatgtttggatttactttatacatagtgttgacaaattacatctatactgtaaagtacaaaagactttttcctaatttaaaattgtctgggcagctcattctagagttcatttcttgcgtgttagaactccttacattcttgaagtgaagtttattttgactgtttacaggaactatcaactaaacacttcatggaagatgtgacttatgacagtattccttactgggagatttttgctttctttattctttttgacctttggctgtgaaaaggattgtacattgtcatttagaaaggcataacaataatgaagtgctattaaggaaatggtagtcattgaaatacttcatgagaaaaggaatttaagtgtataatgtaatcaaatttaagtagctaatcacaaatccccttttctttttagaaagaaacaatatcaaggttatatgttactttctcttttttcaccctaaattctaagccactattgattatccctgaaatgttagcttgtgaatctgggtaattgttaaaaacagaaaagtgcaagctacaaatgagagcctcggtccttgcttagatgtaaatagttttcctatgaatttaaaacatttttttaaagccacctaaatcctataaaataatgccagtgtttcaggctatagaaaatgtctcttgagagtaatatcttgtaacatgtattacttatatatataagtcagttttcaacagagctgctgtgaattactgttttatggcctaattcattaaaaagaattgcctaattgtggtgtagaaacttaggcactaaggcagagtaataagaaagga

SEQ ID NO: 31169 - DNA, 1762 bp, Homo sapiens
accattcacatacatgcaagtcatttcatggaaaagctgttttcttacctgcgtctaggccttcatctgtgagagtcatgcttcactcattttgaaatacctctcattgtaggctccaaggtaacactgttacagagttcttgctcatcttcaactacggatgaaaatcaggaacttgacagaaaccacaagatagtgggtccctctgctgctgttgtcagatagaatttattgaagactgggacgtggaaacaaagaggaaggaagagacgttttaatctctgtgggtgttaggctgacttctgagctagttcctttcctccagtaatgcaaaaacagtcctgctttcttatttctcctcctacttttccccacatccctacatcatctgatgcacagccaggcaaaaacctgttttcttttctaacctttgccattgtcaaattcaacatgtggtatgaggtggagaactgatgtgtaagatatggttctttctgaagcaccctcagaaaattgtcagcagcttcacagtataacgtgcagagatgggtagttggagctacctggaaatgcggaattaacagaataaagaagtattttgacaccaatgtcgacatattctagataagaggtgttgcattgtcatttttcccacattaattttcccatatttgaacattactgataaatagatcacaagtaggacttcagataaactcctcgtgtgttaacattttggtgtttgtgctgtgttactattttgaaagtcttcatatttttagttcctttcaggctctgtaatataattggtgatgtcctgcagtgctccactgtctttcccattgactattagtgccattagatttggaagttttcagaagatggctacaaagtcctcttcaaagtgtataactcagaaccagaaagaaagaagacaaggggctgaaaagcttactttataaggttcctgcattttaagtgtatttacttaggctgttccattgccaaattatgggtaacaactagtaaagttcagcttgccttaaaaacatagctatacatttagttataataattataactggcttatgacatgcccgttactattctagttgctttatatgtacttgctacgtaggaggcagtgttctggacattggagatggagtagtgactgacacatacccaaacagttatttccctcatgaagagtattttcttactttctgtctcacagacttgctagtcactgttgatccttggcaaagacctgtgagacacagagcttgtttagagaagttcgccatttctccctgccagagggactcttcttcagacccccagcgggccccaatagtcctcactgatgctttgattgaggggctaagaatactgatgtgcatagagaggcttgttagcttcagctgcagtgagatctggtaggtaaataaacttaaggacaagtggatgtgaggaggagccgctagagcctggttattaccagggcacattgcagagtcctccagatgtaaacattttgctgattaaattgatgatttggcaggaaccgtatctctaaggtgcgactctcaagacttccctgatttattgcaggagatgctgtttactctgacagtctcaaaaacacccattaattgttccgggtcccttttgtgcttcttgacttccccgtggggtgtttcacatagatgttattgagtatgactggggagaacatgataatttgttgcttcttgacttc

SEQ ID NO: 31170 - DNA, 1726 bp, Homo sapiens
gctctcttggagacttgttcatgtgagccctgtatagaccttattctttttcgtagctttgtagtattccataatttgtttaatcagtacctattgatggattttcagataaatatgaacattttcaatgaatttattttaaccatagcagatatttgctgggttatataatttagtttttttttgtttttttttgtttgtttgtttgttttgctggcaagttatttataattgtgtgtgtgtgttttgtatgtgttggggggcatggctgccgaaaggattccactggttgttgagaaagatgttgacgtaagaatgtagaggattttagtaaaggcccggtgtaaacattttatgaaagtacagtgtacaaggatatttaaaggaagcatatttggaaattgtcctctataggatctctgaaggaactagcatccaaaatgcttcttgttggatggctcttttacttgtagaatgggggtgaaagtcaacttagtactgtattaaaagaatgatgtgagccaaggtttaatgttaggaaagccagcaaaggtggaggagcgcgtaatgtcggggatccaaaatgtcacgctcaggacttcctaatttagtgtgctgtaaagtttttgagctttgtagtaaaataattgaaaaagtgttttgaaaaaattgtaatctgataggaaaacattgaatgcagacatgcctttttatgtttccctatgtgaagcattcagttctaccagcttgttgatttagagtagtggagaaagggggcagaaattacatcattaagatgtgagataagtcaccacattataaaataatgcctttttgttaaacctcttgcaatgaatgacaggacatgggacttcattggcaattgtgcacttgccttcatctgagaattacaatggagaaacaaatgcctggtacaatatcacccccttctggtagattgaaagaagtaacagtttttaaaaaaattaataggtgcaatttgtacatgtattgtaggcagttcacaaaacctcactttggtgtggatactaacgttgagtcatggttgattgtctaatcccaattagttgaagtgtgcaaacagattttctgtattgctagcattagattgggtttaaatcttgaaaatcagaaggactgaatctcgactgatgttagcaaagaatcagaatttagaactttgttacaaaacaaaaacttttgtatgtgtattttctcttttcagtattttttttggaaagatgctgaggaagcagaggaaagcattttctttttcaccttgaggtctcacaaatgtgtcatctctgattatcttcctgttgttcccatttgcttgcaagactcaccacgtctttagacatgtccctaatacctcagtgttgtcattattcttctgatgtggcctgtgtttctgtatcatgcctagccgtccttgctggctttgttttgtacccgtgatgttcactaccatagtacatactcagaagtatttgttaattgaatatctgtaaccaaaatatggggaagacagagaatattctccaactccgtgctctggttctgcaagtaaagataaatgagataatggaaattatctgagaacaatgactatgaatattttaaataatattatcccaagtgtattaaatcatctaatcacttgtagttgtacacttttgaatcccttttgtagatgtctgaatcc

SEQ ID NO: 31171 - DNA, 1105 bp, Homo sapiens
ggtgaacttaaagatgtcatcaatgatttacagagtcaaggtagcacattgttaatgttttgagtggccaaagaattagtgaccttctctcactaccctgcctccctcatatcaggacccttgagtaaaaagtcccatttctgatcccctttgccagccttttgaaaataaacataccagtgtaaattattccgattcttactcccatgtttgatatcattacaaatagaatcaacaaaatgtggacagaaaattgaaattttctataacaagaaaatacaatagccaacacatggttattgtttcagtgtagtctttggcaccctctttgaatatatcttcccttcccttgcctcagttttaagctgtttaatcattaagaattaagaagctgtaaaactagtgggtcattttgaattttttgcctgtgactttcttatagtacttaagatattttagggatcattgataggaatagaaagaaaatgtcttggcattttttgtaaataaaaagaaaatctactgtcttctaaagtgaacagacaaaaaaagtcctggatacatacagatctgacttgctgattctctgaaatctgttttcaccttagtagaatttaagttgcaggctggtgtgaagttactgctgattattataaatatttacatgtcatctagtaaattcttcattaaaatgcatttgtatagtcaggagtatccacaaatgtgtttttgtatagtctaatgataaatgctgattttgttttctcattcttattaagttttgcagatttacagtttattaccaaagaggacaacttgttaaaagtaattgcaacctggtatattttttttgtttacaaggctaggttacgcctattgtatttattgtgggaatttttaaaccttttgcttctttggaatttttagtttctgttgttaaagacctgtaccatatcactgcatcatataatcagtgaaatgggtcatgagcatttgacttatgtggcagccatggacatgggcctctcatgtctcctactgtggggagcatgatggacaggtagctcctgctgtggatccaccaccacattcttgctgctgccac

SEQ ID NO: 31172 - DNA, 1032 bp, Homo sapiens
aatattgaccagtaaaagtgaatggctttcttcacccaggcagttttatcatgttgttcttccctgacagtaaagaacttggccaagttaggaaacatctttaattgacagtagcttggtcattcagttaagaaaaattagaagctgttttacagtgtaaaggctgttttctcgcaatatgtgcatgcaatgttggatattatcaaacatgatttccccatcccttcttcttgtttactagggtggtattctctggattgtatagtgcagggcttgacacagagcgataattgagagtaaaacctactttggtattctctctgactctcattccaattccttttaaattaacaaatgcagtgacataactcagtttactagttccatagtaaattattttgtgccatgtgtgagggtggtatttgtttgggacgtaagggaactttggctgtctttgccggggggaataggtttgtgcatgtgtgtgtacaggactgagtgtgtgtgttggggaatgcttgggctttgtagccagatatagcacaaaccacatgtggctttaaacttttaaatttaaattaaacataatttaaaaaattaatttcctcagtcatactagctacgttcaagtttcccggtaaccacatctggctactgtattggccagtgcagatacagggaattttcatcaatgcagaaagttctatttgacaatgctggtttagcctcttaataactgtaaaatggaatacatagctgtcttgctggatcttctgagagttaaatgctttgcaaacattttgactacagtatctagtacttagtaggtatgcattctataacataaagcttaattaccatttctcttgttaatagagtcacattatgaatgacagagtagggaagaatctgccacttttgcctttggtgaagctacatcattgttcactgggacgtgacacttggcacaaaatgtgaaagtctcaacatatgtcactgctctacctgccaggtgggaatgaaataataaaa

SEQ ID NO: 31173 - DNA, 1066 bp, Homo sapiens
caatagaaactgaaattgcagttctattatactgttgtggagtaaaagtgaagaatgattctggggggttattttagaggacaggaagtgggaggggggcagtattgggcagaggtaggagtctgttttctccatcaagcttgtgaaggaactgctaatcttccaaactagaggtctagttttatttggcctgaacaatgttgaaaacatcaggaaatttcacataagaatccagatttggaacccattttgaaagatgagaagatttgctagcatccagcatgaacaatccagcactattagttgcctcttcctgatggggaagtgagctctctccagttctctggctcacagcatacgcgttgacatccctgggccacctctttcaggagcattacctgccgggtcctacagtcagttgatttggcaatgattattccgcttatcatttaatcttatgtggctatacttaacctctatagatccccaattgttctactttgattataaatgtatctttcccttcttctgtgtctctcctccctgcaaacgcctgatttttcttgtattactgaccatcacttaaccatttcttttcaaatggtttttcttatacctcttagcaacccagaaaaaagtagtgacaggaggtcatgttgattagttcacacctgagaatgtgttaatagtcacagtggagcttttctctgtgcctgcccctctactggggcctttaagtgaaaaccctactgattgtgttataaaactgctttcggtggggaaaaactgaggtttctggtgttacgaaaagcttctgagtagtggaatagggacttgaccccagttgtgttggatgcccaaacatttgctctctccccagaagggctatgggaggacaacatccaggactactgaacagctactttggacacccagccttgtggtccacacagagccagcctgctgttgcagttcactggattggatcttggcatgggtggggagtcatttgtaccacgccgggggaaactctgtcagcaggaagagcaggccggtgtgccctgcc

SEQ ID NO: 31174 - DNA, 1027 bp, Homo sapiens
tctttacatgttaaatatcttcattggttttcacagtgcagagcagcagctctgcatcacttgggaacttgctagaaatgcacatttttgggcaccaatctagctgagtgaataaaaaactctggggtgccccaccctgcatctgtattttagtgagccttccattgatgcttggtacactcaaatgtgaggaccactgatttaaatggaataagaattttgttgccatttagaacttgaagctattaatatcagtcacttcagacacataataatccccaaatgttggtcatcttaaagggattagtttgatattaaactcttggaaagggttgtattgttatttttaaatatgactattgtaaacaaatcttagccttccttatttgttggagtctcaaaattttaaaaagagcttttatgctgtatgtacttcaaataataattgtcaatatttaatttcttacactgtcatggattaactcactttattaataatctcaactattctctgaagtacgcgtatcatcctcattctctggatgaggggaactgaagagcagagcagtgaagttagatggagaccccattctgacctgtgctgtctagttagccttagaatctgtatttgtgtatttctgtacctgagaatctttccctatcacaccctctcctcaacccctctcccactaagaggccccagtagtgagaagtgaatctcgtgtgggatggttgtacgtctttcaataaaataaggaccatactctcctttacagcaaattgtaaatgctaaaggatgtttatgatgctttttctaagaccatcaaatgaaacaaggcttattcaagaaaatgattatttttaacaaatcaatctgccatattactaattcagaatacttaagtcatactaccttattgagaatttatatttctaaacctctagaagggctaacagtagagatttgagggataaaagaagggcttcagttcttgatctaaattaactttatttttcctctgatttt

SEQ ID NO: 31175 - DNA, 1086 bp, Homo sapiens
tatttcattaaagatccttacagttttgactcatgtcttccaagacatgagtgtaacagtctttacgtgatagtgtgtttgcttcagtgttcttttttttcctcttcttttttaaaaattctctgaacatatctaacagagaaaactcttgattattgttaggaatgccttactacaatttgttgattggagcaataaaatgtgtgattgcaatactaattgtgcatggtgcacatgagagttttgttataacttagtttctaccttttccacctcaaagatatttggcaaaacaggattatgatagacttttttctgttcttgtttaattagatcccttagagtgtataactgtactgtctgttgtagtagctgccagccacctgtggctgtttaaatttagactatttaaaattaaattaataatatagttcctcagtcacactagtcacatttcaagtgttcagtggtagccaaatgtggccagcaggactagcttcaatggtgtgtgacgtgcactgtgtttagaagggcctgtgtttaaaaaggcttcatgcttagtttaatgctctgcagtttctctgtggaaattcttactaagttttgatcagggagccttgtgttttcgttattcactgagaccccaaaattatgcagttcgttcttgtggctagtagttatcttattggacagcgcagagagaaaacattgcagccatcatagaaagttctgttggatagtactgtcttagcagcatcatgtaaaacgtgtccatctagtggatagcagcacagctcccatctgttaccatcaatggctgcatgacgactccaagtaatcgctctttggaaagttagcaaggttgatggtaacacatttgagaaaatagatattttggataataatttggaaaatgtgcattgtatgtacaatttttataataaatagcagcatagcatggcccacaaacttgaatttcaaagcccaaaagttctgggttcaaatcccacctgtgccatttgctttcttaataagttacctctagctctgttttttcatttttaaagtagggataacgaaactgct

SEQ ID NO: 31176 - DNA, 1021 bp, Homo sapiens
taaacccagtggagaaacattctaccaaatgacagtcgtataatatctttaagaatgtcatggttctgaagtcaaggaaagactaaacaactgttccagaatgaaggagttcaaaataagacgacaactaaatgttgtacataattctgtactggttcttttcttataaagtaccatattgaaataaagtagcatattgaaactgctggaaaaacgtgaatggaatctagggcttagatggtagtaatgtattaatataaatttcctaaatgtggttatgtaatagaaagtctttgatctatgctaaagtatttaggggtgatgaggcattgtgatgttccttcactctcacatggctcaggaaagtgttatttaaattattcttgcaatttttataaggttgagatttttttcaaaataagagcattttttaaaacttaagtgacaaggacagaataattcagcaacacttagtgataacaagataagagtaagtattacaatgagaaattgaaggacctaaagtagagcctcttactctgctagtattattatattatcaacactagtttaggtcgtccccaggcaggcctttaattctcagtgtcaagaaattagaaattaatataagaccctaacatctagaatatggaatacacacacacatatttaaaataaatcttatgttttgtactttctacctaaaatatgtggtgtagtgattctaagtcaaccatattttgtctttgaaaatcctgagccctccatgaaatacctaggtatacatactaacagattatgtgtaaatgtgtattctaatataaattcctggacatacagaagtcccaagtaggcaaaaattaggtaagtagttctccatacagaattccctcatatacataatagttctcctagatgttctacctgtgagactatattttaaaatgctgagctaaattgaatgtgatataaatatttacataatgaaattcccaaattaggtctacaaaacttaattata

SEQ ID NO: 31177 - DNA, 1029 bp, Homo sapiens
ttcagcaatggttccatattttccatatgtttatagataacattcagatatcgaattttcatatatgttttaattcatttatttatttcttttatctaggagaaatataatggtttccaaatgtcctatactagattattgatagattttgtcattagttttactattgaataccatgaaatatcagctgttgcagccactaaatagttacaaactgttggtactacagtttactagtcaatccatggttatatgcttgtgctatgctaaatataaaggattcaagatgaggacttaagcagttcatatttgtatttagaatattatcaaagatattttcttaacttgtctcagtattagaatttacagcccattttcagcttattgtatccagaaatttcaatcatatccaataatttatcagcatttgttgatgacagtaaaagtgacacattagcattttatttgtttctgtgttgtttgattacaacagtgacattttagcactctttgtggacggataactcttctagtagaaagaaagcaggagggtggtcaagctaagtgacagatacaaagagttggaggacatagggctttctgtgggtaagaaatggatgagaaaagctttatgtcactgactaggcttgcaattcagtattcccctatcaaaggcccccttactgatgtttctgtttaccagatcttggtttcaagatgccaggttctgaagagatacaccacgagttcttataaacactatatctaaatttggtttgaaagtctaatgtttggctgtgtgcagtggctcacacctgtaatcccagcactttgggaggccgaggcaggcagatcacgaggtcaggagattgaggccgtcttggccaacatggtgaaaccccgtctctactaaaatacaaaaaattagctgggcatggtggcgcatgcctgtaatcccagttacttgggagctgaggcagggggattgcttgaactcgggaggcggaggttgcagtgagctgagatcat

SEQ ID NO: 31178 - DNA, 1111 bp, Homo sapiens
cagagtaaacggaaaaaaatttagaaaacttgtaataatcctgacttctttaataaaatgtgtcctgtgtattgcttaaatccatagtccagccttttctgagttcttgagccatgagatggaggtggcctgtgtaatctactatttttagaaagttaggaaagcaaaccaaatactctctgagaggaccctatgaaatggctgtacccttcagctgtgctgcttcagactttggccaggctcccaggtgacttacgttaatagcagacttctagttagaagaggagaatttatttcattaaaaaaaaaaaaaataagtcaaacagttcaagaaagtattcatttatgtaaaagaagtcaattggtatgttactaaagataataggaagaaaattagctcactattttagttgcatactgatgattttaaggtttaaataattagatttaaatataccgtatgtaaatgtagaagtctgtatcgtaataaatctgttgctaagtaaaatgggaatacatgacaacgaggaatgtaggtattaagaatgtcagaattagaacgagaacagtaaaagagcaaaagctgtaataatgtgtgctagtatataaacaatactctaaatacttagtttctctaattttccttttacaattgcagttttaatttataatagtctaagagcgtattcaagctgagacttaaattgcttacgtgctatagatttaggtgtattagctatttcagaaatccagaacatttgcaaaggtgcattattttatgccaaagaggattatgttcccctatggcttgtgaaagagataggaaaaaagaaaagaaaaatattaacactgcaagccaccattagaaaattatatttcaaaaatgatgtttcaaatcaatgacaaattgcctattcagtcatgagctctcaactaaaatttggggagtcaatgtaaagaaagcctacagaatgtattttaatatttgccaagttatttataccctcaaaaaaaaagcttttacgatatgatcaacagaaatagacttattgtttactgaattctatttcaaatacccattcatttttcaggtactagggatgggagaaag

SEQ ID NO: 31179 - DNA, 1099 bp, Homo sapiens
ttgctcaggtaacacacaagtaagcattaaatgccttcctgtgtatctgagaagtttgttatgaaatattttggaaaccgctgcatagtcagtgtaggaggagcagatgaattttagctgtggttatgtgtgctgtaaaagactatacgtgcttgtattagtcagaatgagtacaccactaatttttgtatggtaagagatttatactaagctcatcatcagtttctataattcagtgagataaaactgagtcagattgatttttaggtagcacatgtagaaacagctaattttattcccctgatttgatcctcatctattgattatataaactaaagaagctaagaacaattaacccttacgaggttacacagtcaggagatgctgaactgagattcagtgtagaaagtctgtcttcagagcctatgcttttagtctttatgctaagtttaacttgtttaaatagcaagattatgaagcactatacagtgacctcgtatagacaaaaatatagtatattgattattagagaaactacatattagactgttgtacatacgtgggcaagtatttgttaaatcatttcagttgcctaaatttaagcaactgtgctgtttaaaacatgctcattcacattttttcttaatctagaaagtcacttctgaataattgcttgtttagattttctcatttggtgtgggaaatttatattaaaattttaactaatattctaacaatacagagtctgaacctaaagtccagaagaattttaagtcatgccgcagacaggatgaacagtatagcaaatcagaataatagactgtttgggggggttggggggaacccatgagaatttcaggatttcaagataaagcttggaattgaggtaaaggcatcagataaggaagtgtttcatttcataactttttttttgcttgaaatataatatattttaaatcacaaaagtagtataactgttatttttctaatgcacagaaccatgagactttttttttttttttttttttttttgagacagagtcccactctgtcgctcaggctggagtgtggtggtgccatctcagcttactgcaacctc

SEQ ID NO: 31180 - DNA, 1053 bp, Homo sapiens
gaagacaattaaaattataataaaatatacaatgctcaacatttaaattctatatggccaattgattcttacagaatgcctttttgatttttgtccaactcttgcatctgtagtcaacctgtggtcgcaattgacagaagagtttaattctttctttgtgctcttactcctgggtccctcattgtacagtgatcatcaaatgcaacatccttcatgaaaatgaatagcttcactttttggcatttccttcctttttatgtgtcatagaatacactacattattcttgattttacagttaatttgtaaattgtttctaacccccactagtttataaactccttaagaatgagaagcttgcattaatcacttctatatatatagtgttttgaatatccttggcattcattaaatgtttagtgaattgaatgcgatgtttcttccagactatgaccaataattgtgagaagattttatgtgtttttaaattcaactttagagaatttctttttgtgtaataggacatttgttggacagcaacatgtaattactcataaaatgtttctctgcggagtccagcatccttcatttgtgataggactcatccagttaaattgctcaggcactataatggactatttatgttctgttgatgtaaatttctagaacaggcctttccctggactcatgccatgttttgtatgttatcttgtgcaggcagcacatggggacctagtcaggcttcctgatatgatagctgtatatacagcccatgtctcagaggggaatgataaattggcctgtgcagtgacacaatacacagttattttggtgacagtattaactctcttttcataagggtgctttgttggaaaactattcagcttaacacagaatatttagctttcaaaggttgcatagggagaaatgatactgccaggatagaaacattatcagttttttctttctttttttttttttttaatcttttttgactctaccgagaatattgaaaagagttttgattagtattggtgtttattacgagaggaaca

SEQ ID NO: 31181 - DNA, 1046 bp, Homo sapiens
cattttattcgttagtaattgagaagcaggtctaattttctaatcttgcaagttgggaaattattaaaatgctcaagagacagtagatcaagcctggtgtccctttctccatcaaattttaaaggatttttttttcctcagtaattctgcctttgtgtatttccaatcttgcttcctatttgcattgcacacagtggcatgtcaatttcaaaagaaaatgtattcagatctactttcaaactaactgaaagagatagtggtatttattttatcctgaggttttgttgttgttgttatggttgttctttgttttttaaatctggacatatcagtaatctcctaagagaatctattccaaacacagagactgtttattcttgttttagatactgttttaaaagccaggttatgttattatagtatagatattttaaaaaataatgaaaacagagtttttttaaccatatttttgtactgcataaaaatgcagtgacaagagaaaaacattagaactctgtcatactcctaatatagaccattgctgttaggtttctaactccatgttccctgtctggaagctttataaggccgtgccttagtcttcttaagcctaacacattgtagccttccaataaatattactttatttgtattaaatttaaaatggaatagaatgtggtacatcaccagcgttcatagctcctgacccatgccataactttccttgccccatccccaagattaaaaaaacacaaactattagactaattatagtcattacagttgtaaattaggtcatgcatttcattaaaaattgacgcagctccctttttgaaaggctatgtcacggaaatgcaaactagccttgtatatagaacactaaaatcatttaacttgaattattctaattacgataccacaaagattaaaaaatacatctatattatctcagtctgataactgggctgggaaaaaatgtcagttttgatatgtaacaagattggtatgagttattttacgtgacagttttattgattgattttttt

SEQ ID NO: 31182 - DNA, 1050 bp, Homo sapiens
ggccacataactgttttgcctctttgcttatgtagtttggagtatgaatcataataattatgtatcttactccatctctgcatttgattccacagcctacgacttacacctttgtgttcttaacctcttagtaagaaatgcctgacacgtagtagactgactagaagtgtacattgaatgtttgctggttaaaggaatggaacatggacttcactcatagagaccttactatttggttgaagagataatgcatacacatgtgacatgaaggtaaacacaaaatatattgaagatatctgtattttattttttttagtttatagttaatttttacatactatatatttttgtagtaggtaagtcaattattttcatgctacagatatggacatttatgtatttatgtacaaatacattgatttaggttatctaggccagattgtaagtagcaaagccctgtttgtaaaccaggttttgtgacttcaggttagaaatattaaaaaaaaaaaaaaatccttaattgctcttccagatatgaactcattctttttttttttcccctgtgatttctgtcttttttgtttgttaagtttaaaaaatttatggcaatttttaaatgtacataatattagagaaacaatataacaaccccctccatatatctatcagtcagcattttgtatgcatgtatccgtatgtgcatcagccaacattttgccctttttgttacctttcacactccttttacccctgtagcatgttaaaagaagtctcagacatcctatcatgtcacttatacttcttcagtagtatctctgacagttaagaacttattttaaatataactccatttccaaatctatgaaaattgacgacaattttattgtatcatttgatagccactttatgttcaacttttcctgattgtcacagcaatgtccttttttaataggtacgtttttccagttagcatctatggtgtcatttagcttgttcttccatcatccttattttctgtaaactgaaaattagagtcgagtttaactttaa

SEQ ID NO: 31183 - DNA, 2008 bp, Homo sapiens
cctcagatttatcagatataccctattaaatggcaatgtgtctaccttgttaggttattgtgactcttaaataagttaatacatgtaaagaacttgtggaatttcagggcacacaatgttaccttaccattgatattatttgctgttattaaatcttaattttatgtaaacattttaaaatgtctgtctcgttaacaataaatgtgcaatatacaaataaatgaaaatcaaaattagtggtggagttttaatgaaataatttagagctccagctctggaactgtataatcttcattcaaatcactgtgaccttgaagaagttatgtaacctaactaagcctcagtttccttgtttccaaaatgggagcagtactaatatctaatccttagaggagttgtgaaaattaaatgggataacacgtataaagcacagagaacagtgcttggcacttaatgagtctacagtgtgtgttagctattgttttattaattctgtcatgatgaagtgaacactgtgatgcaatacttttatacttagaatctgcctatatagggttttcagttttgctaatgaggagtgttattctctgctgtgtaaagaacacatgctttggtgtttataatttttctctaataggtaaatgattaggaaaagaataacctgttattttacttatcctttgttgagatatttaaattatacaaaaaaactgtagatggctttttatatctataggattttagctctggataaatcagttaggtaaatgcattattaatgttggaacctgcttaactctgttgtccagccacattgtagccactggttaagtcgaacgccactagaaagaaaagcaaataatcaaaaacatcaaaatggaaatgaaatatggagcaaggaagtcattacttctgtaaaataaaggtctgagacctaatattttcccattggttggaagtattgattatgaaaacattagaattttcagtaaaattgtttctgtgccaagatggcagatagaatattatgaaagaaatgaccaaaattgcatatgacatttattttatatggtaacattctttctttcattaacaggaaattttagggcaattatttgcttattgggaatgagaaggatgaatgaaaatttaaaaaggattcatcaagtcttccttataataaagtaaacttttaagagcatgtttttccatagaattagaaacttagaatttcatagtaacagtgtattcatcacctcgtttggggagcagattttcagtatgatcacaggaaaacacctgttttgacactctgaaaaaggtgcagacgtacgggcaaactctctgtaggtgtaaataagaatgctttggctagcatcctgcaaggagatgggtctaaatggtctgctccagcttctgctgctgctgctgctgctaatattgctgggaaggaaaagtggctgacctggcatatccattactcttggtgctgcagcagtcactcaggaaatgttgtttaaggggaaccttctggatccttttcatggcaccatggcaagaagaagctgtatcttatctatggaagataaagcatggagttggctaatggatgctggtgagtgaataaggcaattggggagccagtttgctaagataccatttgggtaggcctgctcgctcaaggcctgagatgacatccatgggaaatggcttttggtattctgtacattagaaactgttttagagaggaaccgtggttttcacattggtgatctgatctgtgattctgtatatgttccataaagttctcatttattctctgcttcactacttgaaatactaatattgaagtttgttcagtacttcagtagatggagcatagttttccatgtaacttcttagtcactaatctctactcttgtttttgacttgccctacagtgatttttaaaaataactctgtggtatatgaaagcagttgttcctcctttcaattctaattgagcacc

SEQ ID NO: 31184 - DNA, 1102 bp, Homo sapiens
aagatatttcaggaaaattgaggtgttgctttcaaaaaagtattaaaaagtgggcacagtaaattgtctgtgtgtgtgtgtgtatgtgtgtattttaatgctactgtttttatcattcatttctcatcatgtagataggaaggttagcagaaaattaccttgagatttatagttgggatgactaggcctggagcattgccctttgctaagataagaaatataggtgttaaaattgatgttttctctttctttttagggagaacatgtaattggtttgggagggttgaatttaaggaaaaacatctgaaaccctcttacacagactgatagtgctgtgataggaagaaaatacccagagagaatgtacagtaagaagaaggaatctaaagacaaaccttggcgcatctctctataaccagcagtcagaaaggagggaaatcaaaagaaagtgtcagagaatgagtaggttaatacatagcaggtaaatgaggatggtgctttgccaaggcaaaagagaaaaacattcagaaagtaactagttattctatagagaagacaagaaatgagaaaaaaatcactttggctgttaaaaggacagtagtaatctttgaaagcagatgagtagaattgggagagaggaggtagaattcagattgtaaaccagattccaagaagatgagtcactagtaaattgggaggtaatgcatgaggcctcaacacatgtagacaactctataaagaaattcaataataataagagaagtgggagtcagctgaaggattcagcacagaagaggttgttgtagagcagtgagggttattccactgcagaatagtggaagcatgtctttttcactaagggaaggggcagccgtcagtggagagtgaaagaatgaatgacaaatcgctaaaatagggaaatatcagagaagatgagaagggattaagaaaaagtgagttagagagattggccttgaatggaagattaaccaaaaacttcctgagagacagaaatgaaggtgcttagccagattccattccctaatactacctgcattttggtcatccttgtcatttgggtggttccatgccttgggtccac

SEQ ID NO: 31185 - DNA, 1036 bp, Homo sapiens
tggtttctcttcagatcgtgtaaatctttcgccttttactaaagaaatttttacctattttcagcagttttctcagtgtattgtaattatttcatcaaaagttgaatctccttaccaaacttgggtactactgaaaggcagaaatttctgttattcatcattattcctccagagcttggcatttttttttatgctcaatacattgagtgaaggaatgagcaaacaattaaaagaaagtatgacaaaaaaatcgtaagtgagatccagtctctgcccaaatgcctgagaggcaaaatagcaacatgattggtgctgggactccagagccaggcttcttaccagcttgacttcatactgtctcggtcaacttggcaattgatattatctatcttatagtgttgttatgagaattaaatgagttagtatacacaaatgcctagagcagtgcctgcgtccagtttaatttggctttacaaatttaaacctgcaaggattatgtaattagacatacataaattttacacaaataaaaatcagagtgaatgtaatttgacatcagttgaataaaatgaagcaaaatatcataatctttggtttattactgtgtatttggtaatcctggaaattgatacaatttgcattttagtttaagtgcatgttatttaagtaacatttaagttttataagatcatggaattaaccattttttcgtatttttcaattagaaaaattttgtatttttacaattagaaaagtgtaattttttattagtatgcaacagatatgacacagctaggctaaatcaaattattacatatagtccaaaatttagatgattatactgaatattagtattcacttactgtactactgaagagtcaacatttcaaagctaatgatgaaaattatctactaagtgtgtgactttttccccaagaatgatttcatctgcttccaccaatttcagtattctagttgatagagtcaaaatcatagcatgcggaagcagcacaagatatcatgtgcaacatgtgtt

SEQ ID NO: 31186 - DNA, 1050 bp, Homo sapiens
agaaaaaaaagagtaattttgttgatcacagtgtagctaaaaagttgttaactaggctggtaatcatagcccgagggtttgttgttgtttgaacattgagtaacaggtttctaaccttgagtttaattaccatcagaagtgtcttattctgatgttaaaggccaaatatctgtgatttcaggacataattctttgagaaagtacacacctttcatcacatgtaatttttaccagctgatttttatagcacttaatgttactccatttcaatccatttgtcttcttattttgctgtgtgagtcatcttgccgagttctgcagaggataatgtgataccctcagcacttaataagctggcagatacatttccagttgaatgttgatgctatggaaaatttaaccgaattaagctataatgcttcacttacttttaagtggtccatgttagaagattaatgaaggaatcttttcagttcattgttatattttggaaatataatactttgataggatactttggtaggataaattataacaggtgtaagactgcaatttaaatatgtaggcataaggaagaaacaatatcacagccaattaggaaagtgagtaagcttttgaatgtcattatgctttgttgtttttgttgtgaaaattaggggcatcaaattaattgattattaatgtcagttattttagatggtgaataaagacaaattttctttagatatcatctcatttattttcccttaattaacagtgaagggatagtttgcagaatattagacattaataattttatgtacaaaagagaaaataatacagtgttcataattctgtgattgaggatgtattatatatttacataaaacaaggctgtaaattctaaaggaacaatacattagacgtagtttacatttggctttttaaaattatattttaagttctgggatacatgtgcagaatgtgcaggtttgttacacgtgccatggtggtttgctgcacccatcaacccgtcatctacattaagtatttctcctaatgctatccctc

SEQ ID NO: 31187 - DNA, 1031 bp, Homo sapiens
atatacttcaggcaggagtagaaaaagcccatggcatattgagctagtatgtgtccttacttgctaaaaacaaacaaacaaacaaaaaaaagtaaaaacaaacgctgtccataagtgcacactattctgtaaagaaaaattcctatttacagttaaaatattttaaattttaaaacaacataaaaatgtgaatacattttggttactttttggaatattaaagcagaatagataaatgtgtctgtgtcgtttcctggaaaatcatttgttaaaaaactcattttggtaattatctagtaattctatagttagcaaaattttattttatatttctatattcatatttctatgaaaattgttcttaatttaacatgccaataattcttttcattcacatgttaatttccacacctgtttctatgaaatgtttgtttttaatttttctgattaaaaaatgttatctagtttagctttgtaacttagagtgagaaaaggctatggtttgttctctgaaatgcttaacttactttcaaactgattaaatcagccaaagaatttgaagggtttagctattagatgtcaaataattgcttgattaacctatacttcagtttttcaactgttcttttgacatattaacctgcttcagtgcagggaacaaatttttgaggctggggacatagtaggtgtttggcgtctttctcaattgatttagaaacaaacttagtgtaactaagtaggcgtaacatactctttagttacccctagaaaggtatatttagacttgtttagtaagcagaggtggtaatattcaaccaagtaagcaaatataagtatgaaatagttttcctttaaacccacttggcagtggaaaaagccaaatggaaaactagctgaccactctgatcctgtttgtcttacacagtagttaagctaaatgccactcagacaatgatttatttattaaagcaaagaaaatatttttctttcctaaaatcgtaatgtaaaataataaatataagagtacattt

SEQ ID NO: 31188 - DNA, 1050 bp, Homo sapiens
gaatggttttgtgcaaactgccttgctcttggctgcttagtggagccttatttcctgtagtctgtagcagctactgcaatgggtagaacttagaattccaccttaaaattgggattcttacaaagtccaccaaacccatgaggagtctatatttgagttttgaggatattcaaaagccctgaaatgttatgtaatttcacgtgtacagttttctggagagtgagtctgtagcatacagaggtgtttgtgtcatgcctcaccacagtttaagagctgtttatatgcattgtacagagcccaagggtattctggaaacaacaaagatatgaaaaccttggttatagagaattagagaattactgttccatgagtgtggaatacattatattagactagatgagctggtgtaaaggagtcattgtaacaaaatcaacaaaggtttcttatgcctgtggaatagcttccatggagctttttcccaagtgatccctccagagttgtttttgtagaatcatctgggcagctgtgcgttgtattcatgctgaggtgatagatgaatacttttcagaatggacatgttatgatacatttcaggatccttttaccttgaaaactatgttgctgccatgttggaaaaataacacctagcaaaaatgattaatgtggaagggtacgtctttaatctgtgatgaagagaaattaatttcatcttccctcacctcaaatccctgttctatgtaatggacattagcagatctatattgtactcatggcacctaaataaattcataccattaaagggagttttagatttattacctattagatatattatttattcaggttaaatgagaatttggctttgcaatgtgtattcgttatttgggtaatgaagtaacaaacattttaatgttacttttcaaaatgtaaaatgtaaatgatttatatttgaattattatagacttcatatgcttagtgtacaacagaagtttgtaatgttttatttttaaggaaagttacactttgggaagggtgatccatggaggcag

SEQ ID NO: 31189 - DNA, 1023 bp, Homo sapiens
ttgtatgaatttattgctagtagtctaagaaaaggatgagatggtattattaataacttagatgaagagtggtaagccagtttaccaaggcttttccataaattagtgagaaaggtaaaagtaaaaataaagattagatggcctacagctccctgtaaaataatccgttctcagaaccacaggccttttgcattgttttatgggccaacaggctttcactagacccttgacattcttgtagtttagatttctggtttttaacattcaggaactgtcccaaagattcattacatgtaatcgattgtttttggtccttgggaggaaattttcatcaggtgctctgagttgacttgaggactcagctggagaaggcatctagttggctaccctcttcaagatatctttgttgactgttcatataagccataactatggtgaggaggatggagtatttgtccatttgggaatttacaaaggtccgtggaacacataacattaaaatatcaggttcttttcataccagtgctttacaaacaggacttgagaaatgagaatagtataataaatgtcagtagttatggattttagcttttcagcttttattaaccctaccagtcccagtcccatagttgagtgaaacaataaatgtctgtcttctctttgctctcaatttctatgccaagtgcagttcccttgattgtgagtgcttcagactcccagctcttacctttacctacctaggtccaatctaaagtttccgactttgaggaggtatgactaggtactgtatgggaaaaggataggatagaaaggggcatagaattcctaggaaatgaccactgattctggttcagaggcctagcagttgaaagctagagctggaaatctggaagctttattaatggtatttagtaggtatctggcagcacatctggtagcctgcatgtgcattatttacacaggtattcaggtagatgaagtgactaaatgaagaaatatctttatcacacacaatgaatcatg

SEQ ID NO: 31190 - DNA, 1030 bp, Homo sapiens
aaatacaaaggaagatacaacaactatttctaataaaagccacctgttttcagcacaggtagagagtgtagaaatcacagatatattcctttactcacttaatgcacccgagcagagtgtttagcagatccaggctttcagcctaaatgttgttggtgtgatagcaagaaaaaaaaaaaaatcgtgtgacaaccttctgtgctttcccctctcacgttcacattctggtttgttaaaaaaaaaactgtgttgccatggctgacgctcctgtgaggcccaacatctccatacttttcatcttaactaagcacttaagaatatgcactacagcttctgattgccatttagaacagagcaccttgtgatgactaagctctttcaagtatctatgcttaacgtgatggcttcaatacccttttgctatatagactcatctgtagatacttggtacaagttccatagtttatagttgtcatctatttttatttgtatgtttattgttaatatggatctttttctgaaaaactattcaaggatactagacacatactgtatatgaaatgattctaaaaattctgagacttttctattttattctcagtggtaatttttaggtagtttgttgagtgttactttagctatttggggaactgccctagaaaaccagtggaattctctaggtatgggggtggagtgcagaggaggagacaggctcagataacctgtgttgtgatactgcttttttttgcctcaagagattttctttacccttactgcttatgctgttgcagtccatccaatagaaacatgttctgggctcatgagccaatttgtctttcccctcgctgctgcctcaagtctgggagagctgatggcagtgcacaattttagcaaatggtcataggcaggggggtggggcagggaggggagtgttttctccatggggacagagccagtgtcattgagcacattttgttcaagtacaaagttgatctgtctgaaggagactgtggtcagcagtggtgagaac

SEQ ID NO: 31191 - DNA, 1043 bp, Homo sapiens
aaagaccaatgaagaaatcaaaacagtagaagttgtgtttgatttaaagaatagtttcttgcctttaaagatggtaaaactatgaaataagtacaagggtgctatgatactaaacacagacaattatgtaataaaaaaatcctatttacttatttaggttaaagagtcatgaatatttgagaatttaaacattaatagaaaaattagtgttactacaatagcaaagacatggaattaacccaaatgcccatcaatgatagactggatagagaaaatgtgatatccctacaccatggaatactatgcagccataaaaagaaacatagttacatcctttgcagggacatgaatggagctggaaggcattttcctcagcaaactaatgtagaaacagaaaaacaaacaccacatgttcccacttataagtgggagctgaacaatgagaacacctggacacgaggggaacaacatacactggagtttgttggggagggcgaggcaagagattgagggggattgggatagcagtaggaaaaatagtgcatgctggggttaatacctaggtgatggattgataggtgcggcaaaccattcactgtggcacatgttttcctatgtaacaaaccttcacatcctgcacaggtaccccagaacttaaaacaaaaaacaatagtgttaatatgaaaatatatttcctccatagtttaacatatgatttaaacatagtagatacataatatttacttattaacaggatatatactatgtatatttactctgtggtatagtatactacttgtaaaacaaataacagcatcaaaacagtgaaatctccctagagacttttcaaagaaaaaaatgaatgtaatgtatctgttataactactctaaaaattttaggctttattttatagtgctataaaagctcttaagagtttattcaaataaaacatgaaatataaattatgtcatatatcctaagttttgaatttgtaacacaagcaaaatctgtttgtaatacatatgctgctgttagaaatagg

SEQ ID NO: 31192 - DNA, 1026 bp, Homo sapiens
taattggaagtaaaacactcctcaaaaggtgcaaaagaacagatatcataaacagtctctcagaccacagtgcaatcaagttagaactcaggattaagaaactcactcaaaaccacacaaccacatggaaactgaacaacctgctcctgaatgactactaggtaaataatgaaattgaggcagaaataaatcagttctttgaaaccagtgagaacaaagacacaatgtaccagaatctctgggacacagctaaagcagtgtttacagggaaatttgtagcactaaatgtccacaggagaaagcaggaaagatataaaattgacacctgaacatcacgattaaaataacgagagaagcaagggcaaacaaattcaaaagctagcagaagataaataagtaggatcagagcagggctgaaggatagagatacaaaaaacccttcaaaaaatcaatgaatccagcagctggttttttgaaaagattcacaaaatagatggatcactagccagactaataagagaagaatcaaatagacacaatataaatgacaaaggggatatcaccactgatcccacagaaatacaaactaccagcagagaatactataaacacctctatgcaaataaagtagaaaacctaaaagaaatagataaattcctggacacgtacagcctcccaagactcaaccaggaagaagtcgaatccctgaatagaacaataacaagtgctgaaattgaggcagtaattataatagcctatcaaccagaaaaagcccaggaccagacggattcacaggcgaattctaccagaggtacaaagaggagctggtaccattctttctgaaactattccaaacaatagaaaaagagggactcctccatcactcattttgtgaggccagcatcgtcctgataccaaaatctggtagagacacaagaaaaaaagaaaatttcaggccaatatccctggtgaacatcggtgcgaaaatccttaataaaatactggcaaaccaaatccagagtacat

SEQ ID NO: 31193 - DNA, 1051 bp, Homo sapiens
cattactgggtatatactcagttttgtaaatcattctactataaagacacatgcacacgtatgtttattgcagcacaattcacaatagcaatgacttggaaccaacccaaatgtccatcaatgatagactggataaagaaaatgtggcacatatacaccatggaatactatacagccataggaaagaatgagttcctgtcctttgcagggacatggatgaagctggaaaccatcattctcagcaaactaacaacaggaacagaaaaccaaacatctcatgttctcactcataagtgggagttgagcaatgagaacatgtgggcacggggggggaacatcacacactggggcctcctgggggttgtggggcaaggtgggggatagcattaggagaaatacctaatgtagatgatgggttgatgagtgcagcaaaccaccatgtccatgtcacatgtatgcccatgtaacaaacctgcacgttctgcacatgtatcccagaatttaaagtataataaaaatcaaaaataatcaaaaaaataaaacttctggattctttttccaaattattatttttactttgtcacatactgtctggtgcaaattttgtctgatgaaaaattggtacataatttaaccaaaaataggctgtatatcatggcttgcaacctggagacctctggtagatttctttagtgcatcccagccaagtgtccttcagaaattctgttgttgccaggctctcttcattgccctcaaagagctctacataagcagtggttataaagagctttgcatgatatctggagtttctctagtaatggtctcatgtgcctttacctgtgatcccaaagttaaccttggctatctataatttgtgatggcagctattctttgggtaaacaaattagctatctcagggtccataatttgtgtagaaatcctgtgcattacatgaactttgaaatagcctaggaatagagaaattcagtttctggttttagctaatgtcttgagagcttctttgctgcttctgtaacctagatagactttg

SEQ ID NO: 31194 - DNA, 1043 bp, Homo sapiens
tttaataagctatgtatacctatataatgtacgattatttaaccaataaaatgctttaaaggaatatttaataatatggactttaatatattcagattttaaagcaggtctaaagagtgggatttcatattgttctagattttaattatttgaaaggtaatttatcaaaacataaaggataattatctttaatgatagaattatgagttattttaatttctgtctgtgtacttatctgtagtttcagcatctgcaataaacataatgtagttagaaaaggaaacacaaggaaatgagaaacaagcagtaagaaatatgagcccagaataaaacaggggaggtcactggatatggctgacaaattcataattggttaaccttgaaataagtcattttatttaaagtatagactaaaattttactttaatttcagtcatttacaaaattcatttaaggttttattaaaaattttatctctgtcatagcttatcgtaaggggctattttgaacatttttgtctattttttatttaaaaaagaaaacagatacttttcatcctccattaaaagaaaaacaaagaaatatctgtattctttacatttttattttgttttcacttcaaatgcaatgctttaatatggatatctgcctttgtaataatttgatctctgttatatttcaactaggaatgttcagcttttacatgataactctgtctatatcataataacttacattacaaaagtgtttttgatttagtttgaaacactcatttcagatacagcctttttgaaattcaaagtactcagaagatttatttgcaaaggctatttcatgatgtaaggcctgcttgttgaacttcaagagtgacacccaagtgttggtaactacttaatgtattactcatgaaagagtttgcagtcccaagaaaatgcgaaataaaatcttgagtaaaataaatgatcagtgtctgaattagatattacagagtaagcatggtattgttaagtatgtcataaccagggctatcttcattgttttac

SEQ ID NO: 31195 - DNA, 1168 bp, Homo sapiens
agaacctgtttaatttttgccctgaagtaatggctgttgctatttttgttagcaaatgttattttcttactccatatatactcaagataaacttaccccagagtctttggtaaacaaagccattaccttattttcctgaatataacagagaaactttattctttctaaaatcaatttcttcaactgacagttgaaagacagtgacattcagaagccactctttatgtcactttttgactgtttctctatcctgagattaatgacaaagaagtttatttgaaattcacccgaagtattttcacaatacttcaaagtaagtctacgtgagtattctagtccatgttgttcagctcttatcaacaaccagtgtctggagtaatagtaaaagaaataggtagttgtttaggtattatttcaataaagaaagaaaaactagtgatgttttaatagatgcagtcctttggataagacctcaggaaagcagtgtgggatctgaagtctttgtacaattgaacaggaggccagttaaagatgactgattagagacatgcactgtattcattctcttctaaaaatcccagtaaaaatgatgggaaggtcaatacacaaggaaaaagaaaataagaatgagacaacagctacaatattttggaacctgaaaaacctgagatggttgtccagtaatgcaggaaagtttaaatctagactggtagtgaggaaaaccaaggatcaaccagattgaaatcccagaacctctgaaaggtggtgcattgattgattgattgattggttcttccttcacaaatctatggttacttggagtaatttatagataattgctgtgttaatagaaaaagacctataagtatgattaacttaattaatttggtctaggactaggttaaaggtaattcctaggtgcaggaattgatgatgaagttgggtaaaggtgtgactaaaactgcaagtttcatgcaaatctgtttgagaagtagtcagatcctagatcccctctttggctctacccagcaagatgatgaccctctttaccccagcagcagggcagcattggtgaatactggaccaggagacccaggaccacataagaaggggactgttgtacaggaaacgaaggtatagtggcagttggcacccacagccttctgcg

SEQ ID NO: 31196 - DNA, 1030 bp, Homo sapiens
tcaccaaaaattgggtaaataattgtcttacttgtttttacttctctttcttaaatgtatatctagcttacatttatttcagtgtttaatattagaagtgttttgagtgtttatttagaagtttggtgattttctttttgaccagaaatatcctgtaggaacttaacttttgtttatatcaatgagcctttggtaaaattagtttagttatacatcatttcacttagagtcacagcccccaaaacctatcaacaacattgtgtggacttactgtactaccatttcccttttgtgggtaaggagactgaggcccaaattagttacgtggatttgtttaaagtcattcacctaactggaattgtacctagtgagttttttgattcttcataatgtattggcatagactgtttgttcaaaaatacatatatattgtaagtgcagttaagggttcagtctacagaactaaattttaatttaaattttaatctgccagggattacacatctggaaaattatttgaacttgctcctgttggtgtacatcacccatggagctagtcagacggagtgatgagatttttatctcatatttgaatgtctttgacctcttagaatatggagacttaaaagcaaagagcatcttgttttctgtggcacagctctgtggcacatcataaaggtcattgtcttattttctcatggacattgttcccgaagtgaagaatattgtccatatctttagcataagcagtctgtgaatgtgtcccaatggtttggcattgcagtattctctagaaataacctaattgattataaaagtatcccataatctgaagtgtgtggagtttgtatttattaacttttgcatgtatgctgtctatgtactttcctcagattaaaaaaatacccaaataacatacactaccctccttaaactactttacagtgatttgaggaagaaaagaaaatgtatgtttggaaagtgccaacttaattcaggttgtaattttctgctttttggtctaaaaaat

SEQ ID NO: 31197 - DNA, 1042 bp, Homo sapiens
tcctactgggactacaggcacatgccaccatgcctggctaattttttgtatttttagtagagacggggtttcaccatgttagccagaatggtctcgatctcctgacctcatgatccgcccgccttggcctcccaaaatgctgggattacaggcatgagccactgtgcccagccagtatttatttttaatgtgggaaagagttgctagaggtagcaaacatatgaataacctgaggataggaaggtaacgtatgaaaatggttttctgagagggaacgttcatgctctgaaaaacagatggagcagaaagctttataaagaagctgccttttcctttcctctggaattgttgaacaacatctttgagggaaacatgacataatattttgataattttagtgagtgtatgtatttgagcaaggctggtattgagttgtaggctgtttggcatggtaaaagtttgaattctccagagctgcttttaatccatttgcaatgcctgtgttttttcttgtgagcagtgtgtatcctcatcaggggctgcctcaatgcttatccatctggaggaggctactcagctttaattaaagaaacagtggttgagagggtccgcctacaaccactgaaagtaataaatgtacatggtgtaaaattcaaatactgccaaaaagtatgcactgagaaacaagtccccctgtatgactggtttggggcgtagcttccagagatactctctgcacatacaagtacagtttttttaatacgatgattgcctaccatacacactgtatgcaccagtacctatttacttttagtccatcaaacagccagagtcttaagaataacaccgagtataattttttaaaatctttgtatgctccccaaataagcccaagttttctttatgtagtttcttctacttaggaactttaaatgaataggtccacatgagttatggactttattgtgaaaatagtcattgctctgaatatgggattcttattgagcattacatctgattccttgataaaatattttaggat

SEQ ID NO: 31198 - DNA, 1030 bp, Homo sapiens
atatatgtttatagatgatcggatataaaagacctagtctgtatactgatttatgacccatatattcaccattatgataccacagcttcttcatttgcttaccttccacttgtataaatttctagctcctacatgttttgccttattgttaatactgttatgtgaaatccacatcttattatattcagccttgaatataaaaggcagacaagccattcgtatttgccagtgtaattatgtgcttatgatattttcatacagtttaaaatagttgatgctatatggatttatcacagtattttgtaatacatttttacttgctgcttaatttgaggaggaaatattttgaagtttctcttttctttgttttccctcagagctaccaatccatcctttaaggaagtattgtcaaggattgagtcccatgaagactgtaggaacttacccatgatctcttttctcattctccccatgcagagggtgacccgccttcccctgctgatggatgtaagacatgacggtggctttttcctctgtggatagctgtgcttctctaaatctgatttagaaaattattattattccacttaaattgatgcatatttaaaggtctaaaaatcccccaattaagtgagaaggtgttgtttgttcagaaagtctcacctgtatctgatatctctggaaattatctttcatttaggcttctatggtcattctgaagaaattggatctcatcacccacttactcagcattttttgaaataggaagagttgtggcttctttatgtcaggaggcctggattccaattctagctaagccattaggcatgtgaccttgagcaactcagtctctttgggcctaagattcctcagactgatcactgagatcccttcatctataatgttccaaggtgccctgggccttccatttcatacaggaatgagagtctcttcagcatgacaaggcatagtactgcctgtattatgcattgtgcgaagtgagtgaggaaagcccagcttccttcttgtg

SEQ ID NO: 31199 - DNA, 1044 bp, Homo sapiens
gcttgaacatggagaatgtggctggagcagaataaaccagggagaggggtggcagtcaatgggcaacaaagtccagtttgtcttcagagctaccccagtgctgtctgtgggccatcagtcctcaagtagttaccagcctggtatgtaggaagcagtttgacatttctgaggcatcaaaacttgtgattattttaacaattaatttatttttactgtatttctaaaaatgcttggtctgcaatggattcaaggggtggagactggttctctaccagagatatctcgagaaacactgatttagaaccacataagccatagcaggaagttccaggaacaacaggggccctggggacagaagtttcagtggggcaaacaataagaaccctaaccctaatcctgttggagtagtcgaggggagtcccgatgttggcttggaccgtgatatgtaggaggagatagaaatgttatattttggagacaaaaacaacaggaccaactgatggattggatgagttgaggtggcagtaagtggaagagaggaatcgatgatatttagatttttggcgtgagctgctggcgtgagctgctagcttgagttgtttcttaatcaaggtaggggtacgtgcagtgagttgttagctagttgagttgtttcttaatcaaccttggcgtgacttcttcctctggcaccctgttgaggcctctccatcagattaacaggcttcctagtttcacacccagcagtccaatcttcctttctttacctctagtatcatttagttttattgaccatccagctctttcatgctaaccctttttttgagattatgtttttctcagcctcttatctatgctcttagtttgcctctcacacctatgaccattcctcttctctgtctcttcagaaatgcagcctgtccaaaaccaaacatcaacactgcccgtggctttccccgacacacacatttctgtaaatggtactattgacactcttttgcgttatccagtctggagacttggtgctgtttttgatgcttctgtgtc

SEQ ID NO: 31200 - DNA, 1389 bp, Homo sapiens
aaccatgacgttttcttttttccccagtccctcagtgacccagttcttatctctaaatattcgtcctttcaaaaatagcattcttcctgctatcctttacccaaagcatctcctttcccagctcagcccaggttcaaatactctcagccttctcacttcagggcctctgctcacgttctttccctgccatgtcattcattccccctcgaaagctttccctgtcccactttctcttctcaccgtagcacttagcctggggagggatgctgcctctcagctttttcatatccttggagcctggcacactccaaatacttgttgtttggtgtggactctgttctttttcacaggctggtatgagggggaacgactacgagatggagaaagaggctggtttcctatggaatgtgccaaggagataacatgtcaagctacaattgataagaatgtggagagaatgggacgcttgctaggactggagaccaacgtgtagtctctcagatggtcttttgttactgcaagatttgcacgacacttaccgggctggttggttctgggctagttttattgttaattttgtcacagcctatttaattaaaagaacgaaaacacttgcctttaagcttgccaggttgttctgctctctcatgagaagagcttggatacagtgagtttgcacagctcagtttttacctaaccacacacttgcagacctcctgaggtacacagaatagctgagcagttcacttcagggatcaggtcatctctgctcctcctagtttcaccatgttctggcaataaaaaacacatattatatcctggttttctctatccttgcattactaaggtgactgtctctctttatacatccttgtatggttctcccagtattagcaagattgtatatctgtaaagaatgtccagttttgtaaatatttccctgcctttttttttctttttttacatctgattttaatgcttcgttaacttcaaaaggaactggtagagttcagaaggtgagctgttgtttttctaaacctcttcccaggaaggggacattgacacttgaatttttgtcacctttttcctcattagaaggaaagtagaaagccttactttaggatttttaaaaaaaaatccatctcaccccatattgttcttaaataagtatagactaattaacctaagctacctttaacaacgtagaatttagatgggttcatatatgtgagaaaaacctgaatataggacaggggtcctacttttttccccacctctgtcgcccaggctagagtatagtggtgtgatcttggcccactgcaacctctgcttcctaggttcaagtgattctcctgcctcagcctcccaagtagctgggattgtaagagt

SEQ ID NO: 31201 - DNA, 1024 bp, Homo sapiens
tcataggcagaatcagagacagacagaagaaagggtaccagagaggggccagcttgtcatcactcacttctgctccacatctagcttttcttgactactggtattgttgaccaacagagcctccaatccaccccagatgcttggctatgggcccacagaggtcgtggttattcagaggcaacagcttttcatagacctctccacaaatttcccctttgtggtcctactttgctggctagacatacttggtttctcaagctgactgagtggtaactctgtctctgatcctcaaacttctcttcaagtcctcttcttctccagctttctccacaattctaaacgaagtatcttatcccataacacccatagtgtttttgctccttggactaaaccttaatagatacaaattcctaatcaatggaagagaaaacctaactaaaataatgaagaaaaatatgatgattttaattaattaaaaaacccaaaaacatttatggatgaaggtggtggaaggtagtccaatcacagaatctctctcatccagtaagatgaagaaagacaacagtcacagattcaccaggagcaaccaaacaaggaaagtgtccagtctcatgcaaaacttctaagagtgctggccaccaaacagaaacaaaagattcatccacttctgtaagcagttgcccagaaagaagacgatttgaaaaaatctgagaattctggctatgaatgaattccattttggtaagagatggtttaaagtaatgattctcaaaatgagggctgcaagcagtttcaggggatctgtggtcaaaacccatcttacaaacagtttcagggggtctgtatggcccaagctattttaatgactatactaaggttttatttatcattttcaccatggtaacatttttactgaaggtactaaagcaatggtgggtaaaactgctggcagtttaacaagaatcaaggctgtggcaacacattttcttggtagccactgtatatctaatcactgcacatatag

SEQ ID NO: 31202 - DNA, 1035 bp, Homo sapiens
gtcaaaagagtttggtgaacacttcttgtaggaaggcttccctcatctcaccctaggctgggttacatgctcctagggtgtgattttattatcatacgtgggagttaatatttatttcactgcttatcattgctgtttacaataagctctttatggttgggggcaggggggcagaaaatactgcctagcattatatcctcagccctttataacatacctggcccttggtagacccttgaaatatattgagtgagtaaattgataaattaatttcccatcctggatatttataataacttatgattctaaccttataatctaacccatttttaattgtaagaagtcctgcaataaagaaacttgcttaatgtttttgcgacagcatttacccgaagtaattcacaataatttttttgtgtgtttactaccttatactttctgtagaatttgtatcctttagaacactctttaaggaaatgtcttacagtaaataaagtatcattaagtgggggctggattgtcatgactgatggcaaacctacaagaaaatgggtttggcctcagtgacttcagtgatacatatgaggcctgatccactgactggggaaatcctgggctcatgtgacagatttgtaataaaactgcatccatttgatgggaaaccatgtaactcagagatacaggctaaaccccccatgaaaaatttaaattaattaaattatttaagagtgatacgaagtggtaaaatcaaaagtcaagtatcattgagaaaatcaagagagaaataaaataaaaatagaaataacaagtagtaaacaagtgataatgaaataataaaataagtaaaataaaccattttaaaataattaaaaatgaactttagaagtagtgataaataggccaggtgcagtggctccctggtgtaatcccagcactttgggaggccgaggcaggcagattgcttgagcccaggagtttgagactagcctgggcaacgtggtgaaatgctgtctctacaaaaaatacaaaaattat

SEQ ID NO: 31203 - DNA, 1030 bp, Homo sapiens
gacaggagccaagtcaataaacatttattgagcagctagcttgtgcagagcactgtgctaaacaaaatagatgacaaagaggagaacaagatgttgccctttactcgggagtctatgatcttaaggggcagatgattaaaaattaaatctgatgaaaggcggggtttggttgctgctattaccaggaaacaaagtgctagaacagcacttttttcaaaccacaaagctttacttattagtaaaacacaatttttcaaaccacaattaaacctttacttattagtaaaacattctctggaatcaatatgtcagcatttaaattaatattgaggtgagcagaggattcacaaaaaacaaaacaaaaatgattggctcatttctgtctgccccttggttgcttcaagcatggtgttttttttctaatctggtgcaattggatggtggcacacctctgaaataagtggaacccctaaagctggcagctcaacatctgtgactccgtggtgcatatagaaagttcctgaaaggccagcaccaccaaaaatggcagagcagttggcaccctgggaagtgacactgtagttttgccactgcaatgagtgcctaatactcttttagtgttccagttctgccattcacaacctgtggccttttaaaagccctgtggtttccttatttataaaatgagtaggctgtgctagactgtagaatgtgtctgaggttctttctggcactaaaattctgtggaccttactgtgaagttttcataagagccaggaagttttcctccttggcttctccgcatcaaatgacccaagagaaaaaaacacattcttgagtggcagagaagtacctcgcttctttctaaaatatcccttctgatttttccacttcactaatgtttctagaaccaaccttctttctaactaagttctgtatagttcaacttgagtatcaaaggaaaaataattatgcagaaattatatgggtaaatatgatggcccagcagtggaaagttgatagtctctcg

SEQ ID NO: 31204 - DNA, 1057 bp, Homo sapiens
gcaaactagctcggattcggcttcggtttttctcctggccggcgccacaggcccctcctccggggcgggctcctcggtgcgagggcaggaggggcggagccggtggatgccgcgggctcctcctcccaagggcgggccgcgggagacccggccggctttgccggcggggaccgggctgggggcggggccgggcgccgcgagcccctcctctcgagggccggccggtttggcggcggctgcggagggtatctgaggctcggctgccaagccgaacgggctctggctcctcccagtggccggccggggcggaagcaggaggcgggggcagcgtgcgcgctgctggtcttctctcccgcggcgctggggcccgcgctccgctgctgttgctccattcggcgcttttctggcggctggctcctctccgctgccggctgctcctcgaccaggcctccttctcaacctcagcccgcggcgccgacccttccggcaccctcccgccccgtctcgtactgtcgccgtcaccgccgcggctccggccctggccccgatggctctgtgcaacggagactccaaggtcagcgtgggggtccctgcagcaccgcatcccggcggaggcgaggctcccggaccggggagccaccccgcgaggcccttccccacccccttcccccagcccgtccgcgcagccctgcgccccgggcagccacgcgtcgtagagtccctggtcggggcctgtggcatgttttatctcgggagcggcgatgctttgttgatcttgtctgcgtgtcgaggtccgggcgtcggggagggcatcagctccccgcggccgcgtcgctggcccccgcctcccccgcgccgctgtggggcgcagagcccgcgagcgcggcgcgagggtgggggtagggcggcgagcgggcttgtgtgtctgcgtgtcggggtgggggcttcctcggctcccaccccgtccctctgggaggctgggggcccgttgtggcgatcccggggcccgccgaaggcagggcagggtcggggcctcctgtgcggcgttggagctggg

SEQ ID NO: 31205 - DNA, 1029 bp, Homo sapiens
tttttttttgagatggagtctagctctgtcgcccaggctggagtgcagtggtgtgatctcggctcactgcaagctctgcctcctaggttcacgcagttctcctgcctcagcctcccaagtagctggaactacaggcgcccgccaccatgcctagctaatttttttgtatttttagtagagacagggtttcactgtgttagccaggatggtcttgatctcctggcctcgtgatccacctgcctcagcctcccaaagtgctgggattacaggcgtgagccaccatgcccagccatgagcaaattctttagtggtgatttgtgagattttggtgcacccatcacccgaacggtatacacaacacccagtatgtagtcttttatccctcacccgcttcctaccctttccccctgagtctccaaagtccattgtgtcattcttatgcctttgcatcctcacagcataggtgatcagcttttctttaaaaactttttattatggcaggggtgtatttgacatagtaacttgagttttattaaggcagcattatcagagtaatgctttgggtgacttgtcaagtttcctactcttttcccctgtctaagggtgaaactcttggttggagtaaaggtggtacctgtcctatcattgagaggttatgactaggttatatcatacttggatgaaagatgttttataaactctcccttagtgattgcatgtgatacagaatctttaatggcatttaataatgttaattttaagtttggaatttccaaatttaagattttgaatggaatgggaatataacttgggatttttatctgggatgtactgagaattaaacaactatatcaccttttgtcacaacttagtaaatttttttcttagataaaagttagatttttcagattttattccgttaggatattcatttagagtggaagaactgctgcagacaaaaggaatggtttttagtgtagtgtgttcttagacctgaaaggttttgaaattcctccaggaatctcggat

SEQ ID NO: 31206 - DNA, 1136 bp, Homo sapiens
gtctgttggggccgctaaaacaaaataccagaaactgagtggcttatgaacaacaaaaatttctcacaattctgaacgctgagaagttcaaaatcaagggacctgcagattcagtgcctggtgagggcccacttcctgggtcatagaagtgcttgatgctgtgtcctcaccttggggccttttttttttttttttttgagacagagtctcgctagtacagtggcgcgatctcagctcactgcaacctccacctcctggattcaagccattcttcttcttcagcctcccgagtagctgggcatgcgccaccatgcccagctaatttttgtatttttagtagcaacggggttttgctatgttgaccaggctggtcatgagctcctgacctcaggtgatccgcctgccttggcctcccaaagtgttagaattacaggcatgagccaccgtgcccagcccctagggcctcttttataagggtactaatcctatccgtgtgggctctgccctcatgctctaaccacctcccaaagacctcacctcttaatattatcacattggtgattaggtttcaacatatgaattttagggggacacaaacattcagaccgtagcacctattttggacattttgtgactagaatcttaaaatatatggtgttttgtggctttcacttagcataatgctttcaaggttcatcttgtagcatgtataagtactttattcctttttattacctgctaatattccattgtatgtataccaccttatatttatccacttatcagttgatgaacattgggttgttttcactctgaatattatgaataatgctgccatggacatttctgtataagtttttatctagacaaaagttttcatgctcttgagtataaacctaggagtggaatttctgggtcatagagtgactccgtttaaccttttagtgaactgtcagactgttttccaaagcagctgcaacattttatatttttgtctgctgtgtggcagtttatgtcaggattctccagaaaaacagtaggctatagatagagaaatagataatagatatatatatagagagatatatgagaggaaatttgttaggggaattggctgacgcgattatggaggctga

SEQ ID NO: 31207 - DNA, 1115 bp, Homo sapiens
actgcaacctccacctcctgggttcaagcaattctcctgcctcagcctcctgagtagctgggatttcaggcgcctgccaccatgcccagctaattcttttgcccattttaaaattggattatttttcttttttattgagttttaagagttttttttttttaagtctagagatgtttcttatcaatatgatttgcgattattttctgccattctgtagattatctttttacactttcttaatggtgttctttgaagcaccaaaacctttaattttgaggcttaatttatttcttcttttgtcacttttgtttttggtgtcatctaaaaaactgttggcctcattcaatacatatcacaaagatttgtgtaattacctatgttttcttataaaagttttgtagtttttgctcttatttatgtctttgtttcattttgagataatttttgtatcttttctaaggtgggtttaatctgacttagggttttttaacagactggctcttagatttggatgattgttggccttgttattgaccatggcagagcttgaccatgagtgcccctgaaggctgagggtaacagttgctcattgtggtagtatctttttgtatcagttttgtatctttagtgtcagtttgtggagagaggtggtagtttaaaaaactcactaataggtgttttgttttgcttgtttttattgtggtaaaatgtacatgcagtgaagtgcatagatctttaagtatgtagttgagttttgacatatatatgtactcatgtaaccatcaccccaatcaagatatagaacatttctgtcactcacaacattcccttgaacaataaatagaatcagaagcactctggatttaacaaagttgtttttaaaaaatgcaaacttggtattggtgcagtatttttaagttaaaacttttttcagttattaagaaaatctctgtcggtttgtctgttaggcatattatcttgcctaaggtggtacatcttgggttaaccacgtctggctctctagaggttaatagtgcttctcagtggtttcttttctctgatgtctttccttcattagttaccctcttattaaaaagaaaaaaataagtgtgcgt

SEQ ID NO: 31208 - DNA, 1535 bp, Homo sapiens
tattgccacggtaatggtaattaacaatcacaaaatgtaagtggcatacaaacataagcacttattttttgttcgtgagtttgtgggtcagctgacattgctcagctccacttgatcttgtccttttcctgagactagtacactcatgatgttctcatggtggcagaagtctaagaggcaagtagaaacattaagactgcttaaagcagcagggcctggtggctcacacctgcaatcccagcactttgggaggctgaggtgggtatatcacttgagctcaggagtttagaacagcctgggcaacatgaggaaatcctgtctctactaaaaatacagaacattagccaggcatggtggtgcatgcatgggtggtcccagccacctgggagactgagctgggaggattgcttgagcctgggaagcagaggttgcagtgagctgaggtcgcaccaccgcactccaacctgggtgacagagtgagaccctgtctgaaaaaaaataaaaataaatgaagactgattaagacttggtgtactatgacttctgccctcattatattggccaaagcaagtcttgtgcttgagcccagtgacaaaggtgaggaagtatgttctatctataataggacaagctgcagacttaagtgataaaatcatggatacagggaatgatgaagaattagggccaacgatgttatatatggaaaattgaaaacatttgcataagtacagtgaagaatataatgatccctcaggtccctatccagttcagcagttatcaacatgtgaccagtctttcattcatgtttatgtagtgcatcacagtaagagagttacatatgtctggttgtctgtttttgtatgttaagctgcattagttgattcagatgttaccagcttatccgtcattatcaggtttctcattaaccttttacttaatggttttaatagccaccgttcagtgcttatcaaacatctgcaatgaagaccatttaaaaaacatttccagtactgaggactgctacttttgtaaaatacagtaaatttctagacaaatgaaaatttaaaatccaatatattttaaaagcccccaatttttattatagatgcaacagaaataaaattactttgtcaacttgttatgcaaatttatggatgcttatataaaacttatggattctttttttgtcatgaactggtaacagtttgcttaaaaacgttccttcactaactatgtggttaccctggtaaagtcagaatacatgcttgattcattctcattattaatactattttaccaattttgtaaatagttttttcagattttattcattatttccaatggtgcaattaatgtatgctgtataatagaaagggtcgtatgtagaaaagagactgggtttatgaagtacagaaacatcttgaaaaatagaccacatactaccacatactaaatacttgtgaaattgtgacactctattacttgaagtttaattttttttctttttctgtttgagacagagtctcactctgtcg

SEQ ID NO: 31209 - DNA, 1180 bp, Homo sapiens
atgattagggtatgtgtatggggttctggctgtctttaggtgggtgctagaactggtaactaagttgaagctaaattgctttttagttcattgatttagatagtacattcagctgttcattatattctgggaaggtgcccacatgaacttgaaaggagctattggccccttgtagatagggtagaagagagtctggactactttgaaaatctaagagatgtgtttggttagcaaaagaagatgaagctgcagtcagaggtacaaactggttcagttaaggaggaaaaataattgaatttgaaacaatatacgtaacacgtagaaactaaatagtctttaatgaatacctactagcttgaaatctcattagggaaaagagttttttcaatgtatgaagttattaaccaagagcagtgaaaagctgacataacatatgtcagtagagacttgtatttcccaaatctatcgaacattgaaaacttaaacatagtaatttattgaaggcactcccatagaatcctatctgttgtgtactcagattaaaggaggtagtgaaaatgaactcagatgaattaagtgattgaaatttttgtttatatttaatatctacacatttgttaatataagactaatggaacaaaagttagtgatcataatttaggcaacatgaaacagttggtaattggtaaacattgtttatatgaccaaatgtagatctaatattgtacattattgcatcagggtatgtcttgtgacttccagatttttctcaggtataaacacagttttctaaaggcattttatacatttgttacctaaaatgaacaactgtgtaactgtcagctatacctagaattttttatcagaagtattttagattttggattttggagtatttgtattatacttactgtttgagtgccactaatccaaaaatccaaaatgtttcagatttttggattaaggatgtttaacctgtatatagaaagagacttatttagacaaacttgaaagactcatgtactacttacacatagggttttgttttgttttgttctatgttttgagagaatctcgctctgtcacagcccaggctggagtgcagtggcatgatcttggctcactgcagcttccgcctcatgggttcaagtgattctagtgcctcagcctccggtgtagc

SEQ ID NO: 31210 - DNA, 1029 bp, Homo sapiens
tgatccacctacctaggtctcccatagtgctgggattaccggcgtgagccaccgtgcccggccagtgtcatgctttttaatgcttttttttttattgttgttttttcttagattaagactgttacgtagaagcaagcaactgtagtttatgtccttaattggctcttaaactctaatattagatgtactatgcttctcccaaaatttaaaattttatttttcttaaaagaattgtctttccagtgtgaaagtggttaaaagaacttttaaagacttcacagacatgtgtgcattatcctgtgttttgttggttctgaagtagagtgaattagaaattataaaaggcgggcttaaatttaactctgctctggtgttaggatacagataacaaatgactcttttaaactatggaattttagagtaataagggacccttgagtttatctaattcagctgattttatttaccagcaagaactagttttttagagggatcaaaaaactctgtgataaatctgaatgcctctctgtcaaatcagagctccatcattcccctcacccaaaacaaacaaaaaatccccagcaaactaacagactaaacagatactagaataggatagctgaatacttggcaagagaaatctaatggtgtttcatgtcacttgatcataaacagtgtctaggttcagcttgtacctagaatttcccttatgtagtaggagaatagaaactatactgctgtggcttttattactgtaatcctttctgtagaaataactatttgaccaccccttttctagaacattttgtgacatgagagacatcttaacctacctatttttattttttttttattatttttttgagatggagtctcactctgtcgctcaggctggaatgcagtggtgcgatcttggctcactgcagcctctgcctcgcaggttcaacctggcagattctcctgcctcagcctccggagtagctgggattacaggcatgtgctgccatgcctggttaatttttttatttt

SEQ ID NO: 31211 - DNA, 1059 bp, Homo sapiens
ggcctgatagggaatctattttcaaagtagtaagtacactgtttcatgtaacaaaacactatccatttaaaaaaaccttggacatgcaaatttacataaaattttcagaaatagtacatagagctcctgtatacctttacccagtactccagttgttgacatttttgaaccatttgaaagttgcacacgtgatgccctgttacttatatttcctaaatattaggacactcttactgcataaccacagtacaactatccaggtcagaaaagttaacatttactcattgttagaatctaatccacagactccttcacatttcacagtttgtctcattaatatcccttataggccacagatcagtcaggactatgtgttgtttttagttgttgtttctttagactctttcagtctgaaatagttcctcagtgtttccttctctttcatgagcttgaaagtatttttaaaaagtacgtgttaattattttgtagaacatttcccaactttggtttctgtgatgattcctcattgttagattcaggttatgaacttttggcaggagtatcacagaattggtgctgtgcttctcagagcatcttatcaggaggcacacggtgtggatttgtggcatgacaggtgatgttaacttggattatttgggtaagatggtatctgtcgggtgtctccattgtaacattaattaataagtatatgtgccttggttttatatcaaaagtaagaataggccaggcgtggtggctcatgtctgtaatcttagcactttgggaggccgaggcgggtggatcacctgaagtcaggagttcgagaccagcctgaccaacatggggaaaccctgtctctattaaaaataacaaaagtttggccaggcgcagtggctcacgcctgtgatcccagcactttgggaggccgaggcgggtggatcacctgaggtcgggagttcgagaccagcctgaccaacatggagaaacccccgtctctactaaaaatacaaaattagctgggcgtggtggcgcatgactgtaatcccagctccttggga

SEQ ID NO: 31212 - DNA, 1042 bp, Homo sapiens
ctcctgaccttgtgatctgcctgccttgcctcccaaagtgctgggattacaggcgtgagccaccacacctggccactaattttgtatatttagtagagatggtgtttcatcatgttggccaggctggtctcgaactcctggcctcaagtgatccaccccactcagcctcccaaagtgctgggattacaggcgtgagccactgtgtttggcctcatgtacctttttgaatcgtgttagaggacatgttcattaaggagtttattttggagattggtggattttattttctgatcagtatttctaaaggactctaagagatttagctgaaagtataaacttttgcttttaaaaaaagttatctcttacaaggctgttttactcctgttgattatagattgccaatgaagtaattggagaaatgaacttgaaaccagaggaggttttccttgcccaaggtactttacggcctgatctaattgaaagtgcatcccttgttgcaagtggcaaagctgaactcatcaaaacccatcacaatgacacagagctcatcagaaagttgagagaggaggtaaaagtttatgaaaactttttcataaagtagatacatggaaagtcttccattcttccctcctcttccctctaatattcacagaattgcataaccatcaccacatctaattttagaacattttccttaccctaaaaaggaaccttatacccattagcagtcactcctcgttctacctgttgttgtcattgtcatcctgcccccaccccccagctcctcctttcctcctttcttgccagccctaggcaattaccaaccactaatttattttctgtctctatagatttgcttattttgggcattttatataaatggaatggtacaatatgtggtcttttatgactggcttcttttacttaccgtaatgttttcaaggttcatccatgttgctgcatgtatcagaactttattcctatttattgccagataatattccatcttatgggtataatgcattgtatttatcctttgatc

SEQ ID NO: 31213 - DNA, 1029 bp, Homo sapiens
ggtaattttttatagaatgtttagggagtgaatagttaatggaactaaatagtcaggctgagattttgtagttttggaacatctatgaactctaaccaaaggtaaatattgaaagcaaccctttcctatagggttggcatgcttacttctgccttgtagggcagggatcaagaggtcatttatcctaggtgtgaaatatactgtggttttagaagtctttaactgcaggaaggcctccagatgagtaagttacaccatttaggtgttgttctcagcttgtgtattccctgtactagggaacacattctactgatgttgtgtttattctgcctttctagttgtaaaagaacatgagaataatatagttctcaattataaaatgctacttgcaaaatgactaataactaataagatagtatgttaatttctcctcttttttctggagacagggtcttgccctgtcgcccaggctggagtgcagtgatgtgatcatggcgtactgtagccctgaattcctgggttcaagcgaccctactacctcagcttcccaagtagctgggactacaggcaagcaccatcatgcctggctaatttttaaatttttttgtagagatagggtctccctgtgttgctcaggctggctttgaaattctggcctcaagtgatccttcactttggcctcccaaagtgttaggattggaagcatgagacactgtacccggccttctttatatgatcctcaaatgagtttttggggagcaaaagtgtgggagggtagggaagagaaaggttattttcttctatttcaagtttgtggttaaatggagacactagaagaggtgtcagtagttcaactcgaaaatggtataagtgccagttattgggttaatgtgtttataatgtcctcttacagtaaaattatgtgtagaatatacatatgtaactaacctgcacattgtgcacatgtaccctaaaacttaaagtataataataaaaaaataaaaaataaaaaaaaagaaattctgtttc

SEQ ID NO: 31214 - DNA, 1022 bp, Homo sapiens
tctcatcttttgattcttttggaaaacaacttctattttatcatgagtagtagtgaggatataatagattgaactgcttatttatagtgcttattttgtttatgggagagtaccaagaattatgtatatcattactattaggtgttcaacgacctttttaaaattattgtgaaaatgctcaagcaggctgggcaaggtggctcacacctgtaatcccagcactttgggaggccgaggtgggtggatcacgaggtcaggagatcgagaccatcctggctaacccggtgaaaccccgtctctactaaaaatacaaaatattagccgggcgtggtggcgggcgcctgtagtcccagctacttgggaggctgaggcaggagaatggcgtgaaccccagggggcagagcctgcagtgagccgagatcgcgccactgcactccagcctgggcgacagaacgagactccatcttaaaaaaaaaaaaaaaagaaaatgctcaagcatacacaaaagtagaataatgcaattagcacaccccaatattcctattactcagactcaagaattagaataacatgatttcttagtgactgaattcgccatatagcacacggttgagatttccgaaaagttggcaataagtacccagggattttttgtttttttcagatggagtcttgctctgttgcccaggctggagtgcagtggtgtgatcctggctcactgcagcctccacctcccaggttcaagcgattctcctgcctcagtctcccaagtagctggaactacaggtgcacgccaccactccaggctaatttttgtatttttggtagagatggggtttcgccatgttggccaagctggtctcaaactcctggtctcaagtgatctacctgtctcagccttccaaagtgctgggattacaggcatgagccactgtgcctggccagtacccagagatttttttaaagaaatgagatggcttagataattcatttacttaatttaatgcttatgctgctgtcct

SEQ ID NO: 31215 - DNA, 1044 bp, Homo sapiens
gcatagtcctcagaagaattttttcttctgttgctgaatagagcttctagagggctttttgcaggagtgaagagaatgaaatagttgacttctctatcccagctcctggtttaataattagacattccgggaataactgctttggcagaagtcagctacattttattttgacagggagagtcttttgttttcccttttcttcctgttccgtcatactcatggaagaaagtattcagaaatttggagtttttgtaacatatttcactgcttagggctataatgtatggtaaaatattccttaaaggtcacagtgagaaatattttatggtggagagattattggaaagaccagcttccagtataacccagacagtatctacttgggatatcttaaaattaaagctatattataacttcttcagatttttattctatctttggaatggggagctaacactgcagagtttaaaaaaggcaggagggtgcagggcgtggtggctcctgcctgtaacctcagcactttgggaggctgagatgggtgaattgcttgagcccaggagtctgacaccagcctgggcaacatggcaaaaccctgcctctacaaaaaaaaaaaaatgcaaaaaattagccgggcgtggtggtgtatgccttgcctgcagccccagctactccagaggctgaggcaggaaagtcctttgagccctggaggtcgagctacagtgagccgtgatcatgccactgtaccccagcctgggtgacagagcaagaccctctttcaaaaacaaacaaacaaacaaatgtgggagggcattgaagcagagagaccaaggcatgcattccaccttagccattaaattgtccctggcaagttattaaaaatctgtgatcctcgccatccccatctggaaaatggcagtagtaagcccaactttgcagggtggtttggagaatgaggggacatttgtaaagctcacaatgtggcacatggtgattgctcaatacatttagataaatattaggtcccttccccagcctcctccagtg

SEQ ID NO: 31216 - DNA, 1072 bp, Homo sapiens
aggcaacctaacagcttcatactaatgaatggcctggtatagtactgagatgacccatattggaggggaaaatacactgaatataccatcccagaagtccaagagaaaacaattccttgagtcatctttgttcacagatatgttgatttacactacctatgtgtctagagagtcagcaaatggttgcagtaaaccatttccaagttgtctgattctggtagtcttcatgtcaaccttctgaattctgactggtgcccacagagcttgttcgcattacagaaacatggttttttttgtttgtttgttttttgttttttcatttatctcgttcccattcagtaatgggtaaatggttgtcttttaataattttaatatttcagttatatagtacataaatccatgtgtctttttagcaacttaattatcatgagactagaactttgcatcttgtgtttcaaaagggaagtgctgaacaagaagagaaacagtataaagcccaaattcaaaagtattacatagaagaccctatgagataaaagtaaggtcatatcaagagtgtagttttcctgactataaatgtattatcttgataatatattacactcaagattccaccttgcttcagtagtgaaaatcttataatacagctaagtacttttaacttatttttttaagccggcattggaagagaaaaatgtttttccattttatcttaaaaatctttttaataaggtattttccaaaatctctgttgcccatgagctagcaattctaattgctatgtcaagggtaattaattttatatactctcaaagccactctaatccttctatctccagattgcaaaactttgcagaacagcggctcccacttcaccttcatgaagcaaatttccagtctgctgagtacttcagcatcttggtacattaagtttctatctgtttgaattgatcaggaagaaactagcaggattattggccaacacatgacagtctgttaccatgagaacaaggcaagataatcattttgatcccagaaaatccaggaattcttaggtcaggagcatatggc

SEQ ID NO: 31217 - DNA, 1109 bp, Homo sapiens
aggttttgtgcttttgcacgacatgtgtgtctcacatcaattccactctgtggataatattatccccaaaccagggatgaaggatgaataactgtctcaggttggtaatctagttttgatagagtgagggattgactcttcacgtgcccagagcctgtgcccctttccctaccttggtagacgtcttctggattttccaacccctttgtctttcaggagcatctttgggaaggatttgttccaaaggatctatactctggtgctattctgaaacaagatgacagtttgtttttttcttggtttctcttctaaaaatttagattttgggaactggaaatccttattagggcatttaaaccatggtatttatttgtctgcaatgcactttgaattcagctcacattctctcaccttatctcacaattgtttcctaaagtgggtaatgcttccttaaacatgtaatccttatttatgtctgagaataagtcatcaccacaaacaggtctgtgggtacctatggaaagtaggtgagttggagatgacccagtaaatgccccttgacatcaccagctaaggattttctagaaagctcagtattagaaaagtattgaacatttgtttttaccaaactccaggttctcaagaagtagctagataagcttctcatacataaacatttatatttccaatgctatctgggagggaaaaagaataaaaattaaattaaaatgaaagccacttcaatttcggtccatgattataattttattcataccaacatttttaaaggtttaagcatgtttaggaaagtggtttcttcttagatcgggaagaaatggcagcccttttgggaaaggccggtctgtggtaaactcaccagcaaccagggtggaagtgccagaaatattcgcgggaagctgatgattctgagattcctagtgtgattctgaacccaggagaatttacttgcattggaattattgcatcatggaatgaaaccaaaaagttcattatttacacttcacacatttactttttttaagatctggctcaaaggcactgagaattatgttgtagattagaggcatccagttaattaaatcacaagg

SEQ ID NO: 31218 - DNA, 1040 bp, Homo sapiens
tgtatctactaaaaatacaaaaattagctgagtgtggtggcgcatgtctgtagtcccagctactcgggaggctgaggcaggagaatcgcttgaacccgggaggtggaggtagcagtgagcagagactgtgccactgcactccagcctggcgacagagcaagactctgtttcaaaaaaaaaaaaaaaaaaaggaccagtatagtaccagtatttcttttaaataggtgtatttgtggctgataaacaaatttcattcttagtgtacttacataggtcaatacaaaaaggattactctgcaatatgatggctagagctcttttaaaatatactaagtattttattttaaaaactgcacaaaattcttgaaatcaatgtcatcttatgcttgtatgatgatgaaactaatgtactcacattagtctgcctttccaaagcttctcctcatctatatattggcttgactcagcttgttctctatgtggaaaaggacacattactacgtatagtgatttgttagtggataatcacagaatgactgatgctttgttgcaagtatatggcctatctgacacttttcctctgtatcaagacaagattgttgacccaatatggaaaggcagaggagtaggaaagtgatgctggatgaaaaatagaagttaatccctgaggggtgttaggttactgatcttagcttgtttctcttcaagatttacaagttattagcatgtttactatgagctctttgcctatgtgtatattgtaacattttagcataatactaaaattcagtttccacaacatgttgaaaccttgtatacagcaatgttttcttctcatgaaagctaattttccaaaagatgctatttccaggtttcagttcagttagttgtttttaattttgagaaagagttagatttttaaaagttagattttcaagttgcatttcaaaacaaattcgattttttcccatgggtattctatcacttaagtgattaatgaatttctcaatcactcatctatttgccaaatgcttattaaa

SEQ ID NO: 31219 - DNA, 1065 bp, Homo sapiens
ttttgccacttttaggagagctaatgtctataatttttccgcagctatagcttttaggtatgaatacattgttatcagtacttgcttttgttttgttacaccacaaaagggacaaagtttcaaagttatacgaatttagaaacaatttcacattgagtcttgggttactctttgtaactactttctgatattatcagaggaaaataatcatacaactttagtcctttatgaaaatctgtttttaagattatttagcagaagggccagtaatagggagagctaagaggatacggtgctcaaggtgctctcaaactgaggtgttaaatacatattcacaaataactcaaaaataaccactgttagaagtcggttaaggaatcaggagacccaccagctacttgtttgcctttttaagtacatgacttttaggtttgaagtcatatttcatctactgagcttgagggaaagatgaccactttgaaggtaatcagggaagtcacagacacaactattgtgtaattcaaaccaataaattttcccatgatctcagctttttggctcattgcatatttaggaatagtagtgttgataacagatggagccatgagaaatctttagtgtctgaccacagatttccactggcctaagggaagttactttaaaaaatatttcaaggttttaaattcatacattaataaatgctcacaaagttccaatgatgttgtttcattaaacagcaaatatcttccagaaacagggcatttcaaaatacagtttttgtttaaaaaaaaaaaaaagcatttatggtaaagctcagctgacagtctgtggacagatgcacaggttccaataaaattcaggaccccaagggtttccccagctcttgaattatttaaaatatacacgtagtgttgtagtagttaagttttaaaacggtgcctcaaaactggctagttaaggtacattatttacgaaaaatatattgtggaggtgatttttcaccatctcaaatgtctgcggaaaactgtagcttggttatctagcagtggtgaatgagttgattct

SEQ ID NO: 31220 - DNA, 1066 bp, Homo sapiens
aattttctgttagaaaaaaaattcaactctaagatagtaaaatatattttgtcattagggaatgtgagaataaaggaatagttggttgattactaaagaaaatgtcatataattaatgagaaatataacttaaaatatcagataattgatataaagaactgctctcagtcttgtcaagaagccaggcacataaacaattttactttgaataagacttttaaaaattttacaaagttttataaaaagtagtacattgaggccagaaatggtggctcatgcctgtagtcccagcactttggaaggcttgggggaaggatcgctggagcccaggacttccaggttgcagtgagcaatgattgtaccactacactccagcctgggatacagagggagaccccatctctaaaataaataaataaatgaaataaaaaattaatatattgcatttcatccattgtgccaccatgttagaaataatattcttcaaatttatgcttatagaaatgggacgtcggtcatcagatactgaagaagaaagcagaagcaagagaaaaaagaaacaccgtagacggtcctcctcgagcagttcttcagatagtagaacatacagccgaaagaaaggaggaaggaaatcaagatcaaagtcaagatcttggtccagagatcttcagcctcgttcacattcttatgatagaaggtgatttttgtaatttttatttatatagtaatgaggataacattctttaaaattcatgtttttgtatttttaattttgctagataaaacatttttcttttactagctatatatttatgaaagtcccaacccagagtttttttgttccaccaggtccagtccgtgggtctagtgtcctcaacctttgtctgttcttagtaggcaaatagatagaaagtggtgtagtttccttttttaatttaatttaattttttttctagtgcatttatttatttatttttctaatgaattattttttattttattatactttaagttctagtacacaacatgcaggtttgttacatatgtatacatgtgccatgttggt

SEQ ID NO: 31221 - DNA, 1035 bp, Homo sapiens
tcacctggtacagtaatcgaaagcaggacattaacattgatacagttctagtaactagattataaatcttatcagttttctcataacgttctttttctgctccaggatccaatccaggattctatattgcatttagttgttaatctcttcttagtctcctccagtctacgagagttcctcatccaaagatgagtctgtgcttgtctttcatgactttggcacttttgaggaataatggtgtttattttgtagattgcccctcagcctgagtttgtgtgatgttttctcgtgattagagtgagctatgcatttttggcaagaatacgagagaaatgacattgtgtactttttattgcatcatatcaaggggtctgtgatactgctatgtcatagtggtgttaaccttgatcgtgtagttaaggtgccaggtttcgcctgtgaagttactatctttccttttgtagttgatagatatcttgggagagatattttctaactataagtattctgcgcatctcctcaacctttcacttactaactttagcatctctcagtggtttttttctgtagcagttactttggggtttgcctgatgattcaaattaatttttgtgtatcatatgagatagggggttaggttcaattattttcttcatacggagatctaggaacatttctttctttctttttttttttttttttttttttgagactgagtctctattgccgagactagagtatagtgacgcaattctcatctcactgcaacctctgcctcctgggttcaagtgattctcgtgcctcagcctcccgggtagctgggattacaggtgcccaccaccacgtccagctaatttttgtaatttttggagagatggggtttcaccatgttggccaggctggtcttgaactcctgacctcaagtgatccgcccgccttggcctcccagagtgctgggattacaagcataagccaccgcgcctggccagtctagccctattttcttactgagtagtcttggtacctctgtcgaaa

SEQ ID NO: 31222 - DNA, 1077 bp, Homo sapiens
tttttgaataaaagattcagtgattaatattgaataaaaggttttatggagatatataatactgacccaattaaatatatatatatatataataacactattattttgctattttgctttaagatgatgcccttgcagtttttaggtattttaaatcagttttaaggctttaaagtcaaaattcattgtttagatctaaaaggaatattgtaaaaattaattagttgaccttatttccaaaaattagtagattcagaatactgaagttcttagttggcagaagaactctattgtctagtgacaaaataggtgactttttctttttctttttttttttttttgagatggagtcttgcacctgtcgcccaggctggagtgcagtggcaccatctcagctcactgcgacctccgcctcctgggttgaagcgattctcctgcctcagcctcccgagtagctgggattacaggcgcccaccaccatgcctggctaattttcgtatttttagtagagacagggtttcgccatgttggccagactggtctcgaattcctgacctcctgatctgacctcgtgatctgcccgcctcagcctcccaaaatgctgattacaggcttgagccactgtgcccagccctagatgattttttcatagacgttttttctcaggtttttaactgcagtgccattttagtgtttcacatcttgactcacattggagccctttgttgcccagatacaattagggaccagatttccacctgggatggcaaccacattgtggggacctctagttgggggctcctgaattgactgaatgtaccctttgttgcttagctaagttagagctacttttctgtttttcagctaagtttccatgttgtgcagagaggggctatgacctcaaatcagctgagtggatgatctgtccatgttcaatttccatggctcctcttcactggtatagataaccagacagtgactgcacttctttatgcaatatttagcacagtatcaagttggagactttcatatgtgcttttggttgaggtgattttgttttggcagtaccaaatttct

SEQ ID NO: 31223 - DNA, 1043 bp, Homo sapiens
catgagccaccacacccagccattatttttaaaggaattattttttctgagcagtaggtctcaacagtgagcttaaaacattcagcaaaccatgttgtaaacttacatgctatcatccaggctttgttgttttatttatagagcacaggcagagtagatttagcataattcttaagagccctaggattttcaaaatgggaaatgagcattggcttccttttaaagtcgccaggtgggttaactcctaataaaagagtctgcctgtcctttgaagctttgtagccaggcattgacttctcctctctacctataagacccagatgacaccttcttcctatggaggctgttttgtctgcattgaaaatctgttgtttagcatagccaccttcatcagttatcttagctgtatcttctggattacttgctgcaggtcctctatcagcacgtactgcttcaccttgtactttaatgttatggagatgagttcttttcttaaacctcatgaactaacctctgctagcttcaaacttttcttttgtagctttctcacctcttttagcttttatagaattgaagagaattagggtcttgctctggattaggctttcgctcaagggaatgttatggctggtttgatcttctattcagcccactcagattttcttgctgtcagtaataaggctatttcattttcttatcatttatgtgttcactggaatagtacttttaatattttttgagaacttttccttcgcattaacaagttagctaacttttcagtgcaagaggcctagctcttggtcttttttggcttttgatatgccttccttgcaaagcttaatcatttctagcttttgatttaaagtgagagatgtatgactgttcttttcacttgaatacttagaggccattgaagggttattaactggcctaaatttcaatatcgttgtattccagagaatagggaggcccataggagagaaacagagatgggaacagttggttgggggagcactcagaacacacacatctatttaagttca

SEQ ID NO: 31224 - DNA, 1046 bp, Homo sapiens
gctgggaccacaggcacatgcacaccaccacacagagctaatttttgtgtattttgtagaaacagagtttcaccatgttgcctaggctggtctcaaactcctgggctcaagtgatccacccgccttggccttccaaagggctgggattacaggcgtgaaccactgtgcccaggtatgttttctaaatctagctttaggtggttattttagggaattgcagttgtgaggcacttattgctaaacttaaatgggcaaaatgttaatatttcactcaagtaaatcctttttatgtttcataagtttgtgcagaaagtatgaaaatgttgttagaaaatgggacagtgttctagaaaaatggggcagtattttaatgttattttgttggctttcatctgtatatttaactacactggtaaataattagatatattaatatgtgctagttataactagaaggaaaatgttactctaggattcctgtgtacttcagtttcttcaagcatatggacataaccaagacagccatgcacattggggcttggcttcacttgctgttttttggatctgtggtacaactacgtcaggaacctctggttagcctctttgaaggtaagaaactagggagcaaaggcgagacattctagccaagttccctaaaagctgtcagtctacctaccatcagacttgtgagtgagggagggtatcgtagacctgggtttagcaaagtcagattaactgttttatgcctgtttttgtaaataaaattttattgaaacacagctacactaatttgtttattgtctgtggcttccctctacaatagcagcgttggatagttgctacagagacctcatcccccgctctccactgcaagcctaacatttttattatctagccctttaaggaagaatttgtggactattattgcccttgatcatttagcttctaccaccatcaaatgactcagctgatccagctaaccacaagaattagtcatacccactgagcctggatgaacctccagttgatctagagaattgtgtgaa

SEQ ID NO: 31225 - DNA, 1035 bp, Homo sapiens
gactagattactttctcattccctttgcataaaattcagaatatgtgtatgctttttgttggaaaattagtgataaaaatagttcattttatacaaatttcctttatgagatttcttagatgttatcatcatagtttgagaaatacaaagcaatgtaaattttaacaaaaataccttatagtgttattgtaacttatctgttagttgtaggtattctattttgttgggaagaggagaaaatgacattagtttctaatattgggataatttaggtacatgtaaaacaaatcagataaatatttaagtgagtttattaagaaaaatattaaataattatgtagattttagaagacaggacacaaattgagaaagtagtacatgaatttgtttgtttattcattcttaacaaatatttgagtgcatttttttgtgaaggcactattctaggcacctggaatattattagtaaaagaaactgcccttgcagagcttacattctaacaaggaggatagtcaatgaacaacaaatataataaataaattttatagtatgttgggtctagtacaatgggaaaaagaaatatagaacaagttatggagcattgggagttcgggaggttgggagagagggcaggtttcagtgtttaacaggatagaacagttcattaagttcataatgaaaagaagacatttagcaaagatatgaaggaggtgagggaatcttagatgtctggggaagtgtgttaagatgataggaagagcccatgcaaaggccaaacgtcaggaagatgtctgatgtgtttctgtcttctaaatttttcaagttaattacaaatcatttattaaattcataatgtgaaacatgtaagtgacatttaatgaacaagctgattttacaaatactttttcttaggtgatagagaaactccctaattggcttatgagtgggccccagattataaattttactttaaatcccttcgtaattcactggactggtagaactttcaaggatttcaagatatcctacgtctt

SEQ ID NO: 31226 - DNA, 1070 bp, Homo sapiens
ttaaaagagtatttacttttcacgatacaaattatacactaagtttatttaacaaaatctgcttactgtaggtccaggtcaagacctcgtctccgttctcatagtcgtagcagtgaaaggtccagtcacagaagaacgcgtagtcggtctcgggatagagaacgacgtaagggcagagataaagagaaaagagaaaaggagaaggataaagggaaggacaaggaattacataacatcaaacgtgggtaagttggagcaaatcttatctggtaaggacttggtgattccatggcgatgttcaaactaaatttttgttctctgaggtttttcttgtggcttatttgctataagagtagaagaaaatggaataaaaagagagaatacagtagagaaggaagaaaggataaatcaaaatagttacctcagatttttactgtggtacattttcatttctatttttatttaataataatataacaatattggaatcaatataaacagcaatatcaaagtttagtatgtaagtagaggaaaatttgcctaattctgtaggaaagtttcatactctgtttcctttgttatgagtatgaacttaaaatttgtagactacttagtgattaaaaatgtctattaccatattgtaaagctgttagcggaaaagtataaagttgaaacagaaggaggggaccatgtgatttactattgtttaagccttttttagtatagaatgggagcttgggcaatattagggtatgtgtgtgtttgtaagagtgagtgtatctgcttatgaggtccagattttatttttcatagaattgatattattaaaacaatgagattctagttttgtccatttagagacagaacttgaaatccactcataagtgtttgtcaaattagaaaacattaaaatgaaacaatcttttttaacagagtaaatttacagcatcttgtttgttttattcaaaattgtaattggggtcttttattctaggaagtagaatctaatcttggaatttatcctcttttgtcagtctttcagtgtcttgtgtgaatatatttattgtaat

SEQ ID NO: 31227 - DNA, 1032 bp, Homo sapiens
tttcttataaggcttccccctcctacgtgctctttgcctttcttctttggaatgatgcagcaagaagttcatcatcagatgctggcctctcaatcttggacttcccagcatccagaactgtgaggcaataaatttttattcattataaactaatgacccaaaccattgcattctgttatagcagcacagaatgcaccaagacacctactaaaatgctttcttcgtaatttgaataactttagaattcattaggaacctaattttgtatttctaagtgtgcctttcttcatgacctgctaccatgaaaagttttcaccgttattatttcctcattggattttcagtagatggatgctgttctgagaaatgtacccaacaagacttttgggatattttactgaaatacttgtatttatacattcttccatttttctttgtataattttcagaagctttatactttttgagagaggtaagaatttgcctctggatatataatttatttttctataatatggggatggtggtacttaaaaagctgtaagtattataagcagtgtgaataagaaaactagtaccatgtagtaatcatactttatagatatatgttagttatggctttaaccttggcaaaattccagtgtcttcagttttagagtttcatgtaataaattcctgtcaataaggggttttgttttttattccctctacctagtgattggtagaagatgttgggagtgatttgggaaagctggactctgagttttgacagcagttacatacttatagagtctgtcatatttttcctaacctgttatttatacagcaggaagtaatttatgctaatttacccctatttgcatataggttatagagttctgtggtgcagagcatgcttagaactccttttaagtgtctgtttggatcaaagcagggctgtgtgatagctgttgtctgacaccaagctgtgtggtgttgttttcattaaacatttatcacacttccaatgtgacagcaggcaactttgtgcca

SEQ ID NO: 31228 - DNA, 1187 bp, Homo sapiens
tctaggagagatgtaatagtagcttgggccagggatttggcattggagatggaaagaagttgctgaatttgagacatatttatgtatttaatgataggtttgatttggtaaatgagatgcagatgttaaggataaccattagttttctgatttatatcattggaacaatggtgagactttttactgagcaaggattacattggaagatggcagggtatcatacatttgctttggacatactgagtttgaggatcttttgggactttcaagaggagaatgaaagtagtcaggaggatatattgtaggtgcagaactcaggagagttttaacatggtctcaggttttcaattccgttttattcttaactctttaggtattttacttggaccttgatgactacagaaacctataaaggggaggctgcagtaacccaagcaatatcttccatatggcaagattaaatcacagtgactgctggatgtgacccatgggccacaacaaagataaatgcattgtgccatggattactttggatgctgttaaaatgtgtctggcactattgtagttactggagattgcaaagatgaataagacacggtctttgatctcaagaaacttccatgtagtttggaagccagacacacaaataatgataacaatgtagtaagagtgctgtgacagaagatgcccactatactaggggagcatattgaaaggacacttaatccaaaattagccagtcaaggaagattttctggaggtgttgacacttaaaccatctggaagaatatggaagaggaagtgagaaggaaagggaaaaacagaaggattaaaaggagagggattattatatgtttaggaaaccatttttattcctcttttttggggagtaattacctttttattgttagacacagaaaataccttctggaaacaaggtgacatcaagcattgttggttcttcctttttttcttttgttttctttctttcattctcctcctctttttccttcctccttttctgaatagatgatatatttcagaatggaacattatataagggcttacatacagtacagagtcttatttacatcttttcccccatccactcaattcctattctttccctaaaaatccatgtaattacatttattagttttttagttatccttctagggtttctttat

SEQ ID NO: 31229 - DNA, 1062 bp, Homo sapiens
gtatatgtgtgtataaacacgtgtatatgtgtgtataaacacacatacgtgtatatgtgtatataaacatacgtgtatatgtgtatataaacatacatacgtgtatatatgtatataaacatatgtgtatgtgtaaacatacatatatgtgtatatatgtatacacacatacacgtatatgtgtatgtatgtatataaacatacatgtatatgtgtatgtatgtatataaacatacacacacgtatatgtgtatgtatgtatataaacatacacaggtatatgtgtatgtatgtatatatatacacatatacacacgtatatgtgtatgtatgtgtatatatatacacatacacacgtatatgtgtatgtatgtatgtatatacacatatacacacgtatatgtgtatgtatatacataattatattcacaaacacacattttttagagtaacctttccttgccttttaattgtgtgtgtgtgtgttttttgttttttttttttagagctgtcaaattttaaggaggtaagtttctggttgtgattgaaagcactgtgtgggagttaatatgcctagtcaaaatatttttgaaactctttatttgatacaatttcacattaacaaagaagttgcaagaagagcataaagaacttgtatatgccctttatccagactcatcaattgtttacattttgccccatttgctttatcaaattctctttgtttctcttgactacacacatgtatatttgtctgaaccagtgaagagtaagttgcaggcaccagtctctttagccctaatatttctgtgtaagaattttttacatagctaaagtacaataatcaaaattaagaaatttaacatttgtacaatatgattttctaagccggagttcatagtccagcagtccatggtcccagttaatgtcatattcctattgatgcatcaatcacagctccccttcacctaggatgcgatctaggatcatatactgcagttagttgtcatgtctttttaagtttcctttaatatagagcagtatctcagtttttatttgtct

SEQ ID NO: 31230 - DNA, 1049 bp, Homo sapiens
tttcagcactgatgatttatctctatattaatagaaagctaattgaaaacagcttgctatatgtttttgtttagtactttggctttatgtaattttaccagcatatgttttgctaaattcttaaaatagtagtctaaaatctacagtgcatttttgtgatttatatttactttaaaaagatatatatttaaaaccataaatggcttagagaaataaaattataactgatcaaatcttaacatttagtttaagtaaacttaatacattttatcgtatctaacaaaaagtagtcccatatttttgacaattcttttttcttatcagttccttttcacaaaagtaaatatatgggaaattataagaaaagcatgttacttgacaggtggggatagtcaccaccatactcacaagaacatctgtgaacacgttgcttgaaattagatgtttacattgaaattgttgactatacgctttctataaacaagtatatagaaccttgggtttcagtgtccaaggacagtgctctagagatacgtagaagtgaactatggcttgtattataacacctgctcaatatcttaagttagtattgaactttaagaatgaagtcatgttttagcctatgtctggggagcacggcataattttagataatcttgccctcctcagagagaatggtagtcactgaatctaaccagataatgcttggcaaaatgatctactcataaccaagtaatcacagcacttcaggtgagaagctgggctcagtaactcatgcctctttacaaaaatcagatttatacttatatgacatgtttttactacccatgaagatattttaaatgttttggttgtccttggagtggtgttgcatgaagctttgagcttcgtcctcagtgttagaaaaagaatgtttctaattgactaaaggaaacaatgttgattgagttactgaatgaataattaaaaaacagaaatggaatccagtaaattgtgaccctctcattcttttcctttcagcaatgtgattgtgaccttaaaaaaagaca

SEQ ID NO: 31231 - DNA, 1047 bp, Homo sapiens
ggctacccttttcttcacatactcaccagcatttgttattgtctgtcttttggataaaagccattttaactggggtgagataatgttttgttgtagtttggatttgcttctctctgatgatcagtgatgttgaatggcttttcaaatacctgtttgtcacttgtatgtcttcctttgagaaacatccattcaagtcttttgcccactttttaaatcagatcataatatttttttcatattgaggttattgagttccttatatattctggttattaatcccttgtcacatggatagtttgcagatattttctttgggatgcagatattttcccaatctttgggatgtctctttactttgttgattgtttcctttgctgtgcagaagctttttaacttgatgtaataacatttgtccatgtttgctttggttggctgtgcttgtggggtattagtcaggaaatctttgcccagaacaatgtcctggagagtttctccaatgttttcttgtagtactttcgtagtttgaggtcttaaatttaagtctttcattgattttgatttggtttttgtatatggtgagaaataggagcctagtttcattcttctgcatatggatatccagttttcccagcactgtcctttctccagtctatgttcatgacacctttgttgaaaatgagttcgctgtaggtgtgtggatttgtttctgggctctctattctgttccattggtctgtgtctgtttgtctgcaagtaccatgctgttttggttactatagctctgtagttttattaaagtaaggttatatgattcctccagttttgttctttttattcaggatggctttgggtgttctggatcttttgtggttttatataaattttaggattttttttctatttcttcaaaaaatttcattggtattttaagagagattgcattaaatctgtagattgctttgggtagtatggacattttaacaatattgatttttccaatccataaacatgaaatatctttccattttgttatgtcctcttcaattt

SEQ ID NO: 31232 - DNA, 1048 bp, Homo sapiens
atttaaaaaatggaattccttttggggagctagcactttacttgattagggttctaaattaatgttcattgttatcagaattgattacaaacatttatcttttaatgctgatctgtaatgagattttaaacatttcacctttgaaaatgtcttcacacagataggtattgccaaatttgattgcaatctatgatcatattcattgcttgaaaggcatttataaaattctgttagattcttttcttgatttttgtcttttagttattatactgcagattaatcacttccaattgaagtagaagctcctcaattgtgcagttaagtggacttgtgaatatggaaattttctttacacttgcattaaaggcagaaaaatactgctggaagtgtaatttgaggtcaaaaaacatactccttgaaatgtgtgttggaatgaatatcttctttaactttgacagcatgggaagtatataaagcagtttgacattactttgtgattcaagcaacatcagttgttactgaaatggctttactgttggatgaattttgcatataagcaccattttgccttgtaattttaggttgagctcattaaaatttatttttatttatttattttttgttttagagacagcatctcactctgtggccaggcttatatactgtggcaggatcatggctcactgcagcctttggaactcttggactgaagcaatcctctcactcagcccccacctagtagttgggattataggcatgagcccctgtgcccacctaaggagcatttttatgtctactgctgaagctaaaagtggtttaggataaaagtggttgagggggttcttctcagtcagaaaaatttcagtattgatccctaatgtgaaacatcacaactagactttaccactgttaagccatcaaactgctgccatgtgttggaataatcaggatattcagcatctgtatctgtcaaaaaaatcatacaaccaacaacggacaagtccacaagagcaagtgaggttcactgttgacacttctgattaaatac

SEQ ID NO: 31233 - DNA, 1027 bp, Homo sapiens
gcctcatggaagaaagctgccctcctcatactggtacacatacttggtacacagccagtgctttgcagttttctggagggagatgcagccatatccacctccccacccccagccctgtctgtgcttatcaaagagcttcatgtggtaacaaagcaggtttacctaagcaaataattaagttgggaaatggatatatacatagaagccacataaaataattactgacaatcaagtgccagactattgggagttttctataagggcaatgcatttgaccttggtatccacagatttaatattctgtctattcaaagtgatgtggcctgttttatgtgacaatttgtaacttttgtgtggcatgacttaaagcctatgttctgagaggatgctgtgaaggagtcatgtaacttagccaatgaataaagcctactaactgctcagcactgtatctcacagtggctttgttttttctgatgttaatgtattgaacaatcctcatcaaaggtctgtgtagtaatggtgatgttgacaataattagtaatatttgctaaatgcagtatgctgagcactttacatgcattattgcattttcaacttgggacatttgcaaagatcttagcgcttacccattaaatgtcaggaaggactgtaagtttagagattaagaaattgttatgaacatagtcatggtgggagtttaattggttcttgtacaataaatataagaatttgcagattttgagaagaagagaatcttgttttaggtagatgaatggatgagcaaaattatggaggtgataatgaactggtttgagaagagttacatattggcagaaaattgttagccaggtaaggtagattataaagcaggcaatgacaagaacttgggatatgaagacattgatgttagggagaaggtattggaggacttttggtggttagtgataggagccaaaactaacatagacaaagtggggatacattattgaagagttcaccatttctgtttgcctcgtgcattgcaaa

SEQ ID NO: 31234 - DNA, 1050 bp, Homo sapiens
gaaagggaatgtgccaagaatgatgactagttttctctcagccatgccattcaaaacattttataaatatcttttaatttaaagaattacttagaaacatggcaaagcaatagcctacattgtctttttgttttaaagagcagtttcttgtcctcattctcaaatacaggtatctcagaaaattaagtgattttccctaagattgtggcagacacagttgacagcaaacctaccctgaaatgaagctatttacagtctttgtttatcccattttgtgtgaacattaatatctttctttcagaattactaacgtgtatgatgatgagatgctgcatcagaccctgctggcaccattgtatgacataccttaacctttctaaaatctgaaatattctgataaagcatgtctagccccagctatttcagataataaagtatggacttatactttgaatctgatcattttcgttctttatatattgcaatattattttctaataagaaccattttgtgacaatgtagctgtgcgagaaagcgaagtagatgtgtattatatagcacagactctaagatagattgccaagtgaaggtacaaaacagagtgtataatatgcttctattgtggatttcaacaaacatagaagggagaaagacacacacacacacatacacacatacacacacacgagtgcatatcttcagaaggattaaccaagattgagaactgggagtcagtgatgggaggaagacttaattttattttgtgtgtgtgtgtgtgtgtgcatgcatgtgcacacatacatatatgttgccctgttcagatgtttcactatatgttaatactttttggtttaaattttaagttatacaaataactatatttgaatgttcttgtgaaaatgtaaagattcatttgacttccagctccgataaatgcattaattttgtaatgataaagtataaaataattatttatatagatagtagccttctctcacaccttgcagtaatttattcttatcatttgtcagtaggactgcagacattag

SEQ ID NO: 31235 - DNA, 1025 bp, Homo sapiens
aagaaaagtagcacagagaatgggtgtcttacaaataaccattgcaacactacagaaggatttaaaaagtgggaagtattattttaaactgaatcctaaaagggtcaggaaagacatttatataattgtttaaaataacgtgttttctagaacatcctgaaatgttaatgtttatggactaaaaaatgtgctgatacttaaaattatggcagcaaaaaaagaaggctataaagatgctaaataaaagaagatactaaagcagggtttaaaactatataaagtttatttttattatgccaccacataccttttcattttagaaaaaatttaggaacctttgaaattatttgaactttaccttttaaagtataaacaactgttattgagtctaattttattttaacctctgtgtcatgtctaaaagtattagtaaaaataactagttttgtgtgaaattattttaaaattttatagaggtctaatgtcataagtaactgatacatattaaaagctgtaatttcttgcttttatgggagaatctcttggtttagctattttaaaaaggtctcaatttctaacaggagaattttttttttttttttaagatggagtcactgtgtcgccaggctggagtgcagtggtgcgatctcagctcactgcaacctccgactccctggttcaagggattctcctgcctcagcttcccaagtagctgggattataggcacatgacaccacacccagctaatttgtgtgtgtgtgtgtgtgtgtgtgtgtgtgtgtgtgtatgtgttgtgttttagtagagacagggtttcaccatgttgtccaggatggtctcgatctcctgacctcgtgatctgcccacctcagcccccacaaagtgctgggattacaatcatgagccactgcacccagccactcaaaggggaattttaaacatttctgcttagtggcataatgtgtagccattacaaatacattgtgatttggtctgttgtttcttccatttcctgtttgtttct

SEQ ID NO: 31236 - DNA, 1053 bp, Homo sapiens
ctctagctctgagtcccagaagaaagttttatatttaactattgcatcgtaattgatattagtaaatgttaataatgttattggtttggaattaaaatctgtttcgaatatttagccacgatttttagtggtatgattctgaaaggcatatgaaggactaaaataagatttaaaaaaatgtacctatagggtgttatgattattatatcaaacataaatttgagtctgagattttattgtatttgggttaggaacatactttatatgtgctaaactattacatatttgtactttggttcaaaactttgaacattttctttgactcttttataggcgataattcacctggacttaattattctgattttgtgtaatttttttgtatttatccctttattgtctctcccactgccatctccttagtctagatgccaaacatttcactcatggcttattccattacctcctaattggcttcctgcttcaattctattacttctgtagcgagacactaatgaatagtggaaagatcctaagcctgccatcaccacttgttctgtaactttgagcagtttaatgtttattgtttagccagaacagagggtttttttaatcaaatatgacagatgtgtgtttttttctagttcattgaggtgaaatttacataacataaaattaatcataattgcttaaaatgaacaattcagtggcattcagtacattcacagttttgtacaaccatcaattctatctagttctaaacattgcaatcactccagagtgaaaccgcttacctactagcagtttctccccagtttcctttcccccaagcccttgacaaccaccattctccctctgtctccgtttgtctattctggatatttcatataaatggaatcctataatctgtgaccttgtgtgtctggcttccttcatttagtatgtgtgtgtatgtgtgtatatatatatatacacacaaacatacacacacacacacacacacacacaacttattaatccattgataaaatttgggttgtttctacctttatt

SEQ ID NO: 31237 - DNA, 1172 bp, Homo sapiens
agccataggagggtggaggcagcacagccggctgccttggggacacgggacacaggggacccactaccgttattgctggtcccgtagccacttctgccaccaccacccatgcctcccccactgtggacagcccattgctgccatcattgggtatcatatgttaatgccactcctttgctcaaaattactcagcggttctcagttgcttacaaaatcagtgttatgtttctatgcttaaggttctaaagttctatatggtagatccacagacttttctaactttatcttctagaattcattactgtgctttttccattggtcttcaagtttcccgtattcttttctacctgggaagctttgcacattgtttttctcttctataaatgccttctttcttccttttccccctctccaaacactccaaggctcttctaaaacaagatttccacatcttttccctgaccattccagtacctaatgtttctctcctcatttgaattcttttagtcctgtctttgcacaccatttatattgatgttgattcatacactgctgatattaatatttagttgtttcatgaatgttatacttatttttccaatgaaataaacttccaaaggtcaggaactgtatatttatccagacatggtggctcactcctataatcccagcactgtaggaggccaagatgggaggatcatttgagcccaggagttcgagaccagcctaggcaacatggtaaaaccctgtctctacaaaaaaatacaaaaattagccaggcatggtggcacatgcttctggtcctagcctcttgggaggctgaggtgggacattgcttgtgcccgagtgaagtcaagggttccgtgagctgtgattgcgccactgcactccagtgtgggtgacagagtaagaccctgtctcaaaaaaaatagaaattacatttaaaacttctacatctttcccagcagttttaacaatacctatagtagtactacatcagagaacattttagctgttaatcttttgtaagtaagtcattgtagagaaacagaggatctagctgtctgaaaaacatttagatgctgatgtgctcattttaactgctgtttgatggattttataataaatatactaagatgttacctagcttcaaaagcagaagatatatgaca

SEQ ID NO: 31238 - DNA, 1032 bp, Homo sapiens
gttatatacttcataaatattttctcccagtccttgtcttgcttattttcttaacaatgttttttaaaaattaatgatttgtatacagcaaaatgcaccttttttagtgacagttctttaattttcgacaaatgcaaatggttaagtaacagctctgagaatctaattgtagaataatcctatcattcccccaaattcccccataccccttttttgtgaacccactactcctgactcctagaaaccactgatctttttttttgtccttacacttgaatttttctgaaatgtcatataaatggactcataatatgtagactttgagtctagcgtttttgacttagcatcatgcatttgagatttatccacgttgttgcatgtatcagtagcttatttactttttattgctgagtagtattccattgtgtgaattagttaattgaaggatgctgttgtttctaatttgaggcaattatgaaataaaccattataactttctcaagttagatattgtgtgaacatggggttttgttctacttgggtaaatacctaagactaggattgctggcataataactttgtttaacattatgagaaactgcaaactgttttccaaagtggctgaaccatattttgctcccaacagcagtctataagaaatccagttgttccacatgcttgacaatactttgtatggttagttttagttttcctttggtcatttcagtgggtgtgtagatgtctctcattgtggtttcaatctgcatttgcctcatggtgaatgatgttaagcactcttaatgtgattatttaccataataggtcttctttgcccattaaaaaaattgttcatttttcagttgctgagttttaagagtttgtatattctgagtaaaagttcatgatcaaatatgttatttgcaagtatttttcacagtttgtggcatgttttcattctcttaatggtgtcttttgaagagcagctcttaatcatgatgaagtctaatttctcagtttttcttgtatgtattg

SEQ ID NO: 31239 - DNA, 1052 bp, Homo sapiens
tcttcaacatacctgacaaaaacaagcaatggggaaaggacttcttatttaataaatgatcctgggaaaactggctagccatgtgcagaaaattgaaactgaaccccttccttacaccttatacaaaaattaactcaagatggattgaagacttaaatgtaaaacccaaaactataaaaaccctagaagaaaatctaggcaataccattcaggacataggcatgggcaaagattttatgacaaaaatgtcaaaagcaattgcaacaaaagcaaaaattgacaaatgggatctaattaaactaaagagcttctgcacagcaaaagaaactatcatcagagtcagcagacaacctatagaatgggagaaaatttttgcaatctatccatctgacagaggtctaatatccagaatgtacaagaaacgtaaacaaaattacaagagaaaaaaaaagcccattaaaaagtgggcaaaggacatgaacagatacttctcaaaagaagacatttatgtggccaaaaaacatgaaaaaaacctcaacatcactggtcattagagaaatgcaaatcaaaaccacaatgagataccatctcatgccaatcaaaatggcaattattaaaatgtcaagaaacaacaggtgttagtgagattgtggagaaataggaacgctttcacactgttggtgggaatgtaaattagttcaaccattgtggaagtcagtgtggagattcctcaaagacctagatccagaaataacatttgaaccagcaattccattactggaattatactcaaaggaattactgggtatacactgggtatatacccaaaagaatataaattactgggtatatacccaaaggaatataaattattctcttataaagatacatgcacatgtatgttcatggcagcactattcactgtagcaaagacatggaatcaacccaaatgcccatcagtgatagactggataaagaaaatgtggtacatatacaccatggaatactatgcagtcataaaaaggaatgagatcatgccctttgcagggaca

SEQ ID NO: 31240 - DNA, 1762 bp, Homo sapiens
ctgctatatttctgtctatgaaaccacagataggaaagcatgtaacatcatctcccatttggaacattatattttaagtcttacttccacccccacctccaaccagaatggtaatattgtttgttctccttccctctaggaaaggagtcaagcctctactctcagtattgcatatagataagtctaatacacctccagccagattgttttagccatagttagcctactgatttctttgaaacaccaccattatacagattttaagggataatgcatatcagtttgttcaatacggtaagaaaaactgaatagaaaataattttatcctcattgttaatctattaaagggatgagggcactactcttaggaaacagaatgctggtgaagagcagaaccgttctggagctgaacaacctgactctgcatcctggccctaaggtcacttaataattttgtgaccctgagcaattgttaaacccctctgtgcctcagttttcttaactgtaaaatgagtatgaaaaaccatagagaaccatattaaatcattcattgaatcagttaatacatgtaaaatgtttagaaagatgtctggcacatataaagggtatataataaaggctgattattttagtggactgcgaattggcacataacgtgtattataacctagtctgcctccctgtgtggcaaaggctagaaagcaaaaatctacatgtttgataatcttttgtatctaaaattctggatatgagttaggtcccaccagttatgtgtattcacatgcagtttttttccacatggaattttgaaaatggaagtggtgtggtaggctatctacttgctgcttcagctgttgctactagcgagcacagctatggagacctgaggtatttctctagcagtgtgccaaacatctagccactagctttatgcaggtcgaaaggcaggtgcactagtagcttcttgatttgcagctgtagcaggttattcttgaacttctcagttcaaatggcagcctcctgatttctcaccgccctgagaggtagagggagcagcgccctagcaagctagttctgcagtgttgatttaggcatcattattagaggcacagcccagagctggtactttcagcccttctaataattttattattcatccaatttctggtgtttaatccacttttgtttaaaaaaatgtttgaattaaagagaaagcctgaccaataggaaaatgatatacacattagggcatttacactatgaaatattatgctgctgttaacaaataataaattaactctccgtcagttaacctggagagatttccatgatacgttttggagtgtgaaaaacaaagtacataaaatctatggatatgatttcagttatagtaaaagcaatagcaaaatttatgtatgcgtgtgtatacatgtcttgtattttatacctcttttatatagtctatgaaaagtaatttgaaatatttctcatataaacatttgtgtctcttcaatggatcaaaatataatgctgtcttttcatggggaatcaaaattcagctattttatctaaaaatatatagtaacttttaatgtgtctggaatctatatatgtgtgtgcatatatgtatatgcttaagtgatcttaaaaaaaaacaacaaaaataaatacaatagaatagtatccaacctgaaaatgaaggaaattgtgccaatctgccaataacatggatgaaacttgaggacattatgccaactgaaat

SEQ ID NO: 31241 - DNA, 1839 bp, Homo sapiens
cgggatcaactaattttatggtatactgagaaaaaaatgaatttcagtagcaagattcctcagtagaattaccttcttttggatctcttggcattgttaatgaaagcaagctatctgatttcagttatccttataatgtgcccatagtacaaacagacataagactaaatgcaaatgtgtctaagcaaattataatttttaagtactgctatgttgtgtggcattctgatcaatgtaactaattaataacataatggcccttataaaactctgtggtaccgtaaatcacgtgtatagtacttatgaccaagcaatacagtgaaaatatgttgtagtggttattagcctaatcctattaattcagatcttaattggaatcttaatcagttgaaaatgaatggcagtgagagtaatcacagatattgaaatttcaaggtgatttgtttttatgaaaaaaataatatgaatgcttatcttagcaaaagaaacttttttaatacttcagaactcctcatttacatgttgacagttgatatttctacagctctcttgttttcattaaattagctctaagcatcttttaagacatttgcttaagaatttcttaagtaactatagatacttgaacattataattctttgtaatttttaatttagacttttcactaaatcacactgaccttatacgtagtctgcaatatacagtaccttttttctttcagttcctgagaattgttgaaaaagcatattcctccaatcatagctgttttaattagcatctttaaaaatctagcattctaactagagtataaactacaggattacagaggacttaatatccacaatgcctaacacatagtagaaactcagtttcttgaattgttgcatgatgaatgaataaatcaatgaccaatttccctttattcttttaaattcatgctaagtagcttattttgagcttgcaacgggattccaaataatctcattgaaagtataacccaactttgttaagggcttttctaagacaggccgtaactattaagctattgctgtaataatttagagcatgcaaaattaaaccaaagaatgtcaaaatactgtcaaaatttgctaaactatttgctagattctttgttgttgtttgcttccaaattttttttctcttgagttgtctagatacttgaatgctatcaaattaacagttccctgagagtgattaatgtataagctacatttattttatttcatataattagtctaactgcaaattgaaaccttagatcagtatgcatgtgtgtatatagttctgtatctgaaagaataaaaatcctttattttcagtctgtaagccactagtaattcactctgtcacatcatttatacaattcatctcttaatttctcatcatgctgatgtgcaatacagagttgaaagcattgcgaaaatgtagataaatgttgtctacccagctccctttatccactctctgttatctcagaaaagctattgtattagcatagcaagatctgtgccatgcaaattcattctattatgcagtcttcctttgagtgttcttaaatcaataacataattatgtttgcaagtattgcatccaaaataaaagtcaggctgcacaccaaaactggtccaggatgactactttgccttccagcctttaaccaatgggggcccatttagagtgcacttcatgtccttatatagttcagttgatttttccacttagtgaatatcgctagtacattggtgataggcgctcactcttgagccactaattctttccactttagttgttataggaatgttatatctttcagtaaa

SEQ ID NO: 31242 - DNA, 1071 bp, Homo sapiens
ctgaagaaaaatttgaagctagcagagcttgatttgtgaggtttaaggaaagtagtagtcttcgtaacgtaaaagtgcaagatgaagcagcaagttatgtaaaagatctagctaagatcactgatgaaggcagctatgctaaacaacagattttcaatgcggagcaaacagccttctataggaagaaaatgccatctaggattgtcataggtagagaggtgaagtcagtgtctgatgtcaaagcttcgaagaacaggctgactcttgtcaggggctaatgcagctggtgactttaagtttgaagccagtgctcatttcccattccaaaaatcctagggtccttgtgaattatgctaaaccacctgtgcctgtcctctataaatggaacaacaaagcctggatgacaacacatctgtttatagcatggtttacagaatatttaaagcccactgttgaggcatactgctcagaaaaaaagacttctttcaaaatattaatgcacattgacatgtacaaggagaataatgcctgctaacccagcatttgttctccagcccctggataaaagaactaatttcaacttttcaagtcttaatatttaagaaatatattttgtggggctagagctgccataagcggtgattcctctgatggatctggccaaagtaaattgaaaaccttctggaaaggattcattgttttagacgccattaagaacatttgtgatttataggagatcagaatagcaatattaacaggaatttggaagaagttgcctccaaccctcatggataacttcgaggggctcaagacttcagtggaggaagtaacagcctttgtgttggaaataggagaaaaactagaagaggaacctgaagatgtgactgagtgactgcagtttcatgattaaacatgaacaaatgagtagttgcttcttatggatgagcaaagaaagtggttccttgagatggaatctactcctggtgaagacagtgtgaacactggaaattacaacaaaggctgtggagcattacataaacttagttgataaagcagtggcagggtttaaga

SEQ ID NO: 31243 - DNA, 1436 bp, Homo sapiens
gaggcaagaccctccaccagcaaaaagattatgacttgttaaaggctcagatgatcatttgcatttttagcaataaagtatgttttaaattaaggcatgtacagtgttttttagatgtaacactattgcacacttaatagactatagtgtagtgtaaacataacttttatatgcactagggaagagtaaatgttactgggtctattgcagtacttgctttagtgtgatgttctggaaccaaaccaagaatatctccaaagcatgcctgtaatgtatgaaatgatgacaggtcacaaggagaaccgtggagcatggtgatgggataggttgcgggagggatttatatatatatatatatatatatatatatgaaagccctatgataatataacctttgagcaaagtcgaagtaagaatatgaacacctttcaaagttaatactttcctgttttcttttttttaacaagttgcattcttgcacatctatattcttaaaattcaaattgtttgatgttgtatctgcttgataattcttcaaaataatagagctatgatctcagcactgtacttcagcctagacgacagagtgaaacccccatctctaaatattaaaaataataaaaaataaaatgcaaatattataatatcttgcaaaccagcattagtgaatttggattatataggatcttatcactcctaccactttgatattttttaagttagtattttcactagactatcacaatcattttacactgttagacctaggttttggggtttttttttctttttgtttgttttttaattcttaaaggatgttggactttttgaaatatttttttctatgtcttgttgagatgatcatgtgggttttgtctttatctaacctacatctataaacatttaaaataatggtgatttatttgtagagatagtagagagtaaaacaagcctaatttattatactaaaactagataaattaaactctcagacataatgaattgagactgtcttaaataaacatcaagcaaaaatggaattctgactattattcctctccccccaaattaagttatagttttgtttcaacatccatctttagtatcagtgtagagccatgtcatgagttattgtttatttgtaacaccagccttgtctatccacaataggatatcacttttataacctccccctcccttcactccaattatttctttttcagcagtaacttaaactaataaggtcaaacttggaacattttctaaagaggccaggaaaacctagttagtagaaatgattgtgaatcagaagtctggtcagtttcatcccagaaattctatattttcttttcaatatatttgaagtcctcagtaatagtttatcagtcaggtgtttactaaaagaaatatatctagggaaaagagttgagagtact

SEQ ID NO: 31244 - DNA, 1041 bp, Homo sapiens
ctccaatcatggtgtaccttaagttctagaacgaggaataaggaattgattagtgggtcagtaactgtccaactggaacaaagttgggaaaccactgtgataaggtaaaaaaaaaaaatttaggttctttaatgagacttgtgatgaaagggtaaatatcagattatagtgttggtatttttatgcaatatgggataaataaagatgttttttttattatgcattaaatgaattatattggataacagtaacaggttttcattaattttatttataactacagatgcttctcaacttaacgataagattacattccaatgaacccatcgcaaattgaaaatattatacatcaaaatgcatttaatacacttaacctaccgagtatcatcagaacatacacattagtttacagttgggcaacatcatctaacataaagcctactttattataaagtgttgaatgtctcatgtaatttattgaatactatactgaaagtgaaaaccagcatggctgtatggatcattgaagtactgtttctcctgaatgtggagtgctttcataccacagtaaagtcaaaaaaccttaacttaaaccattgtaagtagggaaccatctaataatggatctttatgagataattctattctatttatgaataaaatagagttctcttctactcttcttttatctaacaaacatattagcccaaaataattatttgtaatatttacctgcctacttactatttaaactccaacactgaatctttcatgattatgtatattttcaacagtgagtccattcttgcacaccgagaaaatatgcgacagatgataagaagtttttctgaaccctttggaagagacttgctcagtatctctgatggtagagggagagctcataatcgtagaggacataatgatggtgaagattctttgactgtaagttcttttttttaagacagttagtgagaaggccctgtaggaatttgaagaaaagtattacagaagtatatatctataatgataggatatgactaa

SEQ ID NO: 31245 - DNA, 1076 bp, Homo sapiens
gtattgtccatttctgaaccacaaaacagtgcttaactcagagcagtaagtcagtttgtgggatgaatgtttccaaatgggaaacaaacattttaaggtaaacaatgactaccatcttgccttatcaattagcctcttttcacccattttttgttgggtgggtggaaggccagatgcagcaggatgggttattgacagaagagaattataaaggatataaagtattttaactctctgtctgtcctatactagcctatgcctctctccttgtgctctcctcatattaagaaacagaggatgttgtccgggaggtcataataacctaagtgagtaaaattctgaaagccaattttcgattcccaagtgtattggctgtctagaatttccaaggaacttgatggatcagagtaatgcaaaaaagcaggacctcaagccccagggttttatagcacctataaaacatgttttacagtttctgttcaattttatgctgttaagctaaatatttgacatcatatggcactttaagcacattgatttatggtaagtcagcaactgcatctgtaataaaaagtccaaagtatgggttttaaaagtaatctgctgtatttattattgacataaacagttacctgcagtccatttgaacatcatcttagatttaactcatgtattaaagatattatgttttccactcagcaaggtcaccttcaaggtgaaaactgtatgtggttgaaaatgaaaaagatcaagtgtataaagataaatatttaaaaaataaatgatatataggatttcatttttgtacactcctgattaataatcatattctgtttattttttacacccaccttcttctcccaatctccaactccagaaaccactaatctgttttccatctgtataattttgttatttcaagaatgcaatgtaaatggaatcacatagtctgtaaccttttgagagtgactcttttttttttcactcagcataattcccttgaagtctgtttacttttatgtggattgtctgtctcatgcttgtttcaccagggtagttacaactagggtggcata

SEQ ID NO: 31246 - DNA, 1044 bp, Homo sapiens
acattttactctttttcaagtatgtaggctgaaattggagagagcttaaattagtttggagtctcagtgttataataatccctcatgttttcacagggctcacccagttgtacagttcttttcctttacatagtttcaattggtattgtttacaagcactcaattttgggatcatttgtaaccagaaaacaatgaataaaataatgaattatattttacagcggcaaaaatcaagacgcagggacattaaatgatggcatgtcagaacaaagtgccaagcaaaggcttcagattttttccctccgctataccacaatactatgattctgcattgttactcaggccacatactgtacagaaccttatgtaaattatggaggcttgattccaagttaattatttcaactaccccatctgtaattttagtttgaatttacatatgatattaatatactataaacctcctctgtagaatttaaagagtgtattctaaaaaaattatatgacatgtcaaaggacatagaagagtcaaaacagtttttgaagaaggagaaccaagtgggagaatttatatacctaattttaagatggacaaaaaagctacattaatcaaaacatgcggaattggcataaggatagacacaaagaccaatggaatacaatagagagtctagaagtagacccataaatatattttcaattaattttttacataaggtaattcagagggggaaaagattgtatctctaacaaatgatataggagcaactggatgtctaaaaaagaaattaaaggaccttgacctttagtcacaccatatacagaagttaactggatcatataattaaatatagaagctaaaatcgtaaaacttacaaagcacaagggaaaagttttgtgaccttaagttagggaagactgtcttagataagacacaagaacacagaaataataagaaaaaggttaattggacttcattgaaattataaacataaaatcttcaagaatagaagatgaggtttctggaatggtagtatgagtcac

SEQ ID NO: 31247 - DNA, 1027 bp, Homo sapiens
tgaattttgaggtcttgattgatttgagtctaatgatcacattttaatgtttggttacttgaaatttgtaaaatggacatggcattttcagacttaaagcccccaaaagactactatttggcttcctctgaaatgataaacaatcgggggctggcaggagtttttggtaagtcctgcaaaggaccagcactgagaaagggagaggaaagaggggcagggctgggctgtggctgggtcggctcccttttttctaggggcctcaacttctttgtttctggcctgccacccctgggctgagtagcccttggagaaaatagtgtgtaacttatttttagtgcttttggaaaataaaataatgggaataatatttttatttaaaatagcaattaataaaggtttgattgtgtctaagctttgctttgtgattatgattacataggaatcattgagaagaaatacatattttaagggccctatgttttttcactcctagtgtcacttttatctgtggtcttactctatttggtgaatcgtgcccagggtaagtagaagatctgatatttgcttcttaaaccgcagtggatcatcttgtggggtctctgggtctgcctctttgggggccagtgctttattccatgcagtaatgactttctgttcataatgatggaaacacatttgattatgtaatatataattatgttttctgggccttcatatttattaagattgctgtcattttttaaaatctagccagatgagtttcttaataatataaaatcttagatgttatttttatattaacataaagaaatatagcatttaaaaagtaacctaaagcccctctgtgttattgtcctacgttaaaagaaatcagaactaagcaaatttatagctataatttacattttaaggttcaagatgtttggtttagaattagaaattacagattttttttcttttgctaattcgtactgtatgcattagtggatttttgttgttgttcttgataagattttgatgttgtcat

SEQ ID NO: 31248 - DNA, 1024 bp, Homo sapiens
tgaggctacactgacacatcattagcacacaaagtccatagtttacattagggttcacgattggtgttgtacagtctatgtgttttgacaaacgtataatgacatgtacctaccattatagtatcatacagcatagttgcactaaatttttaaatagcaatgataaaggccttctgactccaaatctagtgactcttccttgtgacttcagctgccccagtaacccctggagaaggaaaagaaggtccagagatgagcagttgtggatggagcacaacagagaggatgtgtgttcaggtctgtgggtcacactggtctggttgcaagcctctagtatcttccagtttttgaatagtactatatgtaaaatatcacgttataaattttgtgctagtccacagtgtgaagtcattagatggttttcacagggatacccaagagcaaacaaggaacatgaaagacagagtgtgacacagaggcaggataaaataggggttctgagtgcagggtctggaatgaaagtgattcagtttgtctcatgaatttgctacacagcaactgtgaatcattaggcatgttgttctactgctctgtccctccatgtcttcatctgtaaaatgagaatgatggtacctacctatatcagtttgttaaggctgccacaacaaatgagcccaccaaactaggctgcttaaaactgcagaaatgtgttgtctcacagatgcatgctacgcacccagtgggtttgtgccagaactaagaaaatcagggtaaagagccctgcacttttcatagcaagcagtaaggaagctgctttctgtccataatacactacttcacctctcaagactgctattcggtataaacaatcctgagaaacggcctggttaaacagtgaaagagtaaacaggaccctgcaatgttgacctattcagcaagacacataagagaacaagaggccaggaacaactgtttcccaagaaggactagatctcatatggaggttccagaaaggcttccttga

SEQ ID NO: 31249 - DNA, 1024 bp, Homo sapiens; identical to SEQ ID NO: 31248

SEQ ID NO: 31250 - DNA, 1024 bp, Homo sapiens; identical to SEQ ID NO: 31248

SEQ ID NO: 31251 - DNA, 1024 bp, Homo sapiens; identical to SEQ ID NO: 31248

SEQ ID NO: 31252 - DNA, 1024 bp, Homo sapiens; identical to SEQ ID NO: 31248

SEQ ID NO: 31253 - DNA, 1070 bp, Homo sapiens
ctaggcaaccaactgatctgatttctatgttatagattagtttatgccttctaaaattaacataagtggaatcacagtatgtgtggatttttgtgtggcttctttaactcagaaagtgattattttgagattcatccatgttattgtatatatcagtggttcgtttgaactcttgctgagtagtgttccattttgtggatataccattttcatctgttgttatacatgtgcattgtttctaggttttggctattacaaataacattgttatggacacatgtatacactttatctatttatttttggggtgaagttttgctcttgtcacccaggctggagtgcaatgatgctatcttggctcactgccacctccgcctgctcagttcaagtgattctcctgcctcagcctcctgagtagctgggattacaggcagccaccatcatgcctggctaatttttgtatttttgtagagacggggtgtcaccatgttggtcaagctgatcttgaactcctgacctcaggtaatccgcccaccttcgcctcccaaagtgctgggattacaggtgtgagccactgtgccgggcctgaatatacactttcatttctcttgggtaaataactagaaataagaacggcttgatcacgtggtaggtgtatgtttacctgtgtaagaagctgcctgtcttccaaggaagtactattttactttgccatcacatgatgcttaaatcactgaaagaggtttccccttttcccattgctctattccatctgcatcctgctttccaggacacctcccttcaggtggctgggtggctgctccctccctcttaagagaaaacaacaagagagcaaggagatcacttgtcacatccaaccagtctttactcctgttgtttaaaaaaggaaaggaatcatttttaaattagagaagagctctagctgtagactcaacacattttaagtgcagttttattattttttagtgcctctgacaggtgcattttcctcatttaatgagaagataagaacaattttaattgacacgttaattgaaagcaaattcttc

SEQ ID NO: 31254 - DNA, 1070 bp, Homo sapiens; identical to SEQ ID NO: 31253

SEQ ID NO: 31255 - DNA, 1070 bp, Homo sapiens; identical to SEQ ID NO: 31253

SEQ ID NO: 31256 - DNA, 1070 bp, Homo sapiens; identical to SEQ ID NO: 31253

SEQ ID NO: 31257 - DNA, 1045 bp, Homo sapiens
ttgtaaatttagatttgaggttagagtactaaaaaataaaaacaaaagcagaaaagctgctgtgctctgaaatgccagggtgtttttaatgtcaagtccagcagcataatagcttttacctcttttccccacctaaagaaagagtagtgttaaacttatttccaaaataaaaggagtctgaacctctaggaaactggtacagtatcatcttagaaaagaacctaaatgctaatctacactcataaaaataacatgttttcaaatagtttcagaaccaattcagtctcctgtttttctcttcatgataccagtagctaaaaattaccctacttaatgaaaattgcagacaattttttttctttatgcagtcttacataatttttggtccattttgacctagtctgacattttattttgaacaactacatcttaagtgttctgtcttttttttttttttttttttttggaagatttattgtgaagagcgaaagaacaaagcttcaacagtgtggaaggggacctgaatgggttgcccagtgctctgtcctttttgtttccactctaaaattggttcggcaaggagtaagagagtagaccactggcattttatttttgaacactcgaattgtataaccagtaatctgttagagttgttatccatcttacagtgaccccatcatctgacccaaatagcgtttaaaataagagctcgttctagaagaacaactttaggcagcagtaactttaaaacattttgaatacctgctctactgtggtatagtgatctaaatattagatttatttttcttgtgtctcatatagaaactctaaacaaagcagatgaacagttgtgtctgtactaacacgtgactaaaacctctatagagttccagtgtgctgaaagccaaattaaagttctctttttttagtaaacaatcacactgggaatgagaatattagagctaagagggaggccagagcaagggtggtaaacgcggatgcttccagaggtcacatagataacccactggagcagtgggcccag

SEQ ID NO: 31258 - DNA, 1045 bp, Homo sapiens; identical to SEQ ID NO: 31257

SEQ ID NO: 31259 - DNA, 1045 bp, Homo sapiens; identical to SEQ ID NO: 31257

SEQ ID NO: 31260 - DNA, 1045 bp, Homo sapiens; identical to SEQ ID NO: 31257

SEQ ID NO: 31261 - DNA, 1027 bp, Homo sapiens
agtcctttttgtttggtttaggtgttggttgtctttgtaaacactggaagctgctgagtcatctccctcggctttttccatcacactttaccccacatacattcatacacacttggctcaagcttttcggttctttctctggacactagatgactgtcagccttacctgggccctgccccagaggctgccccagcatctggtaggagcttagtgagcggaatggattcctagtgaaataatgaatgtctttccttgtattctgtgtttgaaacctccaggatagcaattccatctgctatatgaaataagaaaaagtaaatattctttggttaacctttgtcattcgcctacttaaacctcaatcacatttctttgaaatcatgccagatttgtggagagcaaattgccaggtaaatggagggcaaattcaccaaactaattcttagttttttccttctctaagggaaggaacactttgcagcttaacagcattttcaaagtttcaaacaggactggctactgagttgaagaagcattagttggcccttaagtcctcccctctggccactgttgtccacttcacacatttggaccaacttccctcatctgagcctgaatcctattagccagcactgaaaatctggcatggtttcaaagaaatgtgattgaggtttatgtaggggaatgatgaaggttaaccaaggaatgtttactttttctgatttcatatagcagatggaattgctatcctagaggtttcaaaataatcttatcgagatgacttttgacccgtcttcaatagcattacaacaatccccgcagcctggagactaagctctgctgctgttttgagtgagctggccccacagagggtgtgacgtgggagtagagatgagtgtcggcctcaaagtctgctcccatctctcaggaaagcaccttctttagattaaggtattggggctgacactaaaatagatgatatttgaggctaagttttcaatttcactctttccagaaaaacaaagt

SEQ ID NO: 31262 - DNA, 1027 bp, Homo sapiens; identical to SEQ ID NO: 31261

SEQ ID NO: 31263 - DNA, 1027 bp, Homo sapiens; identical to SEQ ID NO: 31261

SEQ ID NO: 31264 - DNA, 1027 bp, Homo sapiens; identical to SEQ ID NO: 31261

SEQ ID NO: 31265 - DNA, 1050 bp, Homo sapiens
ccaggaggcataggttgcagtcagccgagattgcaccactgagttccagcctgggtggcagaatgaaaccctgtctcaaaaaaataaaccaaagggatataatttacataccgtaaaattcaccttttttgttgttgttgttgttttgagacggagtctcgcactgtcgcccaggctggagtgcagtggcgtgatctcagctcactgcaacctccgcctcccgggttcaagtgattctcctgcctcggcctcccgagtagctgggattacaggcaggtgccaccacgcccagctaattttttgtatttttaatagagagtgggtttcactatgttggccaggctagtcttgaactcctgacctcgtgatctgcccacctcggcccctcaaagtgctgggattataggcatgagccaccacgcccggcctcaaattcacctgttttaaatgcacagtgatttttagtaagcatagttttgttcaaacatccccacaaccaaatgtagaacctttctgttattcccaaaacattcctcttgctcattggcagtctatcctcattcctactaccaggccaaggcaaccaccgatccactgtctttataaatctgccttttctgaacatttcatataaatgggatcatagaatatccaatcttttacatctggcttctttcacttaacatattgtttttgatagtcttccatgctgtagcacataacagtagttccttcttgttgctgaataatattctattgtatggccgtattatattttggtcgtccatttaccagttgatggacatgtggattgtcttcactttttagaccttatgaataatgttgcatgaatacatatacatctttgtgtagatgtatgtttccatttctcttgggtagattctcaggagaggaattgcaagatcatatggtaaatttatgtttcattttataagaaactgccaaactgttttccaaagtaagcacactatcttatattcccatcggcaatgtatgaggcttacggttttttcatattcttatcaaaaa

SEQ ID NO: 31266 - DNA, 1635 bp, Homo sapiens
accaatacttaggtaaagaattttcttttgcagactaagaatgattgctttgcatggctggtgaagtctgaaggagaaaagcaagcaatggggtggggtggcgggctgcgggtggcggggtcgaggagaggtgcattgtcaatgacagcagcactgagcagattctaatgacttcactgtggtacaaagcaacctggacactgaattgcatctggtttccaatgaaagagaaccacttagagtgcttagctgggtttaaagcagtttcctcacttttgtgtggccactctgggtgtttgcccgtatctgtacttctgtagctgactttttaaaatgcctgaactttggcttgtttttcttcatggattactaaaaaaaaagaatactttcttctactaattagattagattaaagttaacccatgggaccctttggcaaagtactgagtagattaatacttcttttcagctagagtttttgttttgttttgtttctgacaacagagaaggaatggagtgtaacctgttaccttctggtgaaattcctcattgtgcttttgtcgctgtattcttactgtgtgcaagacccgccagtcacaggctctaagtctaagccttggtttgaacggccttgggaataaagtaggtttcccagaccctccctagggccctcattgttttgattttcctttttacacatatccacctacagtgtgctacagcccaaaacccaaacttaaaaataaacatgcagtccccttttatttatccaatggtgagacaggccatcagcagctgcagtagactgaagcctagaggtagaccctcaagtcagacaacagccctctccacaataatcagccaaggagtgttcacaaagccagcatatcttacacccaagcaggacaggagtgtggatcgaggagtaagctgctgtggtgtggaaatttcatgcatcctcaaatgatgtagatgaagaaggcattttacatcaaagtagcaccttctatgctcttatcgtatggccccagagtgctgtgcctaatgctaaagttctggggagagaaagtggttgaaaagctgtaaacaaatagttgggtagactttaaagtggggacaataacactctgagattcaaagtagaaaagagcaggcaaagtgcagcattgatcacttggaaacctcctgacattttgtcaccagcttctctcctctatctcccctctgaggatttactaatcacctcagctttgtgtcatcctccccaggaaggggcagtgtggagccgtggtagagcactgcctgggaatctgcagggccagtggggccacctgcccgcagcagagcctttgtgtgaccgtagggaagcctggggcagggaaccactgcccctgctaccagcatgctgtctgtcatcagcaccaggagctgtgccaggggctttgcaatcctgatcttatgcagccttcatactgcaagcagcacttgctggagcagcctgtccaaggtcacagagcaaaggtcagctgtgtccagcatggaggccctgctctagtccatggtcatatcacaggtccttttcctttttgacagcatttggcttttgtagattaacaaaattatatattccaagtt

SEQ ID NO: 31267 - DNA, 1056 bp, Homo sapiens
cctttccatcttaactaagaacttatacactgtgctgtaacttctgcagttcgaagcatgacagtgaaactagcacaaatttatttttcctttttcacaatttcacagataaaagatttggttttattgtaggtcatagcaacctcagcattcattttttttctttccttattaagtcaagaacttttaccttttcacttaaaggaagcactttacagcttctctttggcatatccgaattaccagcatcactactctttcatttggggccgttattaggtaaaatgagggtcacttggacacagcactgtgatactgcgacagttcatctgatcaccaagccagctactaagtgactcacaggcagggactggagacagtgtggatgcactggacaaagagatgattcggtcctgcatgggacagagcaggatggtgtgagatttcatcacgctatttagaatggcactcaatttaaattttataaattgtttatttctggaattttccatttaatgtttttggaactttgttgactgtgggtaactgaaatggcagataaggggagacactgtatatttttctccagccacatatgtcagctgagagcaggcacagagtagcaaacagctgaatttatccacaggtgggatttaaccaagtgaatatgaagtgagggggcaagtgagaataattgattgagttaagggttgcaatgataggtaagggaatctaagacacagagagagaggagaggacaccctgagagtacagaatggtgaaaagtggacagtatatggggtataaggcctagtgcaatggaagaattattggattaagaatagttggaaagaatgaactggaatgacaatgcaagattgttggagaaggggaggcttgaagatgaaattatggagggcatgaagttgttggtaatggcaaaataggatatggccatgggagcaggtataattgagatggaatggaaaaagacggaatttacaggccaaaattttgcagggaccatctaacagacatggaaatttccaggattta

SEQ ID NO: 31268 - DNA, 1025 bp, Homo sapiens
gagatgatgttaacagtttagtcataaattttatgtttctgtcctgtgttcagtgacataccaggaaaacacattttcagaaaaggtatgctatgtaaattcttttcattactattttacgttatcctacaaaataatttttttgaaaatagaagcctgtaatcccagcactttgggaggccgaggcgggtggatcatgaggtcaggagatcgagaccatcctggctaacaaagtgaaaccccgtctctactaaaaatacaaaaaattagccgggcacggtggcgggcgcctgtagtcccagctactcgggaggctgaggcaggagaatggcgtgaacccgggaagcggagcttgcagtgagccgagattgcgccactgcagtccgcagtccggcttgggcgacagagcgagactccgtctcaaaaaaaaaaaaaaagaaaatagaaacgctggaaatatttttttaaatagtaactctgattttcatagtaaattcaattttcataatgaactcatgatctagtgtgtttagtttttgaaatgtccatgatcaatgtaaaaagaaaaaacaaactcatcacctttactctcattaaatttctataaggaagaccttcaattgaaatctaatttttttttgttgactcacccaatgctatatataatatattattgttatattgtattgctgatgtggaaaactcatgatataaaatgaaattgatataaaaagacagccatctgacagcctgaaagtgggcggcaggggcagtttataactcaattcatattgtagattaggaaatagaggctgacagctatgaagcagtagcccaaggaaacacacctaataagaagtgcagtcaagtccagaaccaggtctttgatttgatccaaaattttatcaactctagaaccatcaaagatggcctagattgcaactttggatgaattagcattagtgtaacctttatatatatatatacatatatatatacatatatacgtatatatatacgtatat

SEQ ID NO: 31269 - DNA, 1036 bp, Homo sapiens
tgtgagtaggttttctaagggagagcgctagtatctgggcccatcttatgcatggacagttcattctagagagggcagcagcagaggaggtaccagagacaatccccatagaaggataggagtggctgtctccccatttgcaagctactggcaaaccatcaggcattacattcagctcaagtctctgccaaggtggtgttttattttgtgttttccattcctgtattcatttggaccacatggaagtgaaattaattacagtgttaatcccaagcatgtagtcaaggtcttgccaccctgcctggaaatgtggtttgaaatagagggataatggctgataatgattttttttttcaagttctagagcaacccttctacactttaaggtatattcaaaaatcctaggggtctctctttttttttaatgcaatttctgattcagtggttctggagtgggactggagggcttacatttctagaaagctcccagtgctgttgataatctgcttggagaacacactttgagtagcaaaactctagaaagtttcacagataagtgatgccacacataataggaaactctcagatattttaagctggcacaagctatcctgaaaacggtggcacagctccatctggaaagggtttgggctatgagcttatctacgtgctgagcttctttagggagggtgcacagtgatgtcaccaccactgagaactgccctcaactgcttgcattcatgtttcaggagcagatgttctatcacttgtctctgtatagtgcttattagagaacacttacgacaaaaaaggagctagcaggtagaggagtggaatggtcttttagtattctcagtactattccttgttgctgttgttttgttgggaaatttccatctcgaattttgaggtgcctctctccaaaagataatatattatcaatgtatgtgtatatacatgtgtatgtatatcattactatattactagtacacatatattaatctgtatgtatatatacataatcatgagagttca

SEQ ID NO: 31270 - DNA, 1106 bp, Homo sapiens
atcgagaccatcccggctaaaacggtgaaaccccgtctctactaaaaatacaaaaaattagccgggcgtagtggcgggcgcctgtagtcccagctacttgggaggctgaggcaggagaatggcatgaacccgggaggcggagcttgcagtgagccgagatcccgccactgcactccagcctgggcgacagagcgagactccgtctcaaaaaaaaaataaaataaaataaaaaaataaaaaaataaaaaataaaaaataaataaaaataaataaattcctgccaaatgcccatatgtagcacctcagaggtgctcaaaagaggaaaatccaaagccaactgaaactctttcaccaaaaaaaaaaaagatgtatttcctgactttttttctatgcatatatctccatatttttgtttataaaattggaattatagcataggtactgtttttagccttctttcttttacttaacagtcggaaactttcatccaatctaataatattggactaagcttactcataagattcatctaatgtaataatattggactaatcttattcataagattagtatttctactagctgcagaatagcccatcatatatttcaccataatatactttatcaatcttttattattaggcatttaagttgttgccagctttttgttttggttttgtttttgttttgctttctttcttttttttttctttcttctctttttttctaccattaatgaatttgtttcctcctttttaaagtgctctgacatctcaagacggactttcctaaagtatcagtgttgtgatattgtgtaatttaacctctctgagccgttttctcatatgtgaaacagggttcacagtgcctgcttcatgtgtatctgagggttagacataaaatagtaaaatgcctggcacttagtagatgctcaaaaacagtaacttttaatttcagaatacagattacttggaaattacttggccttatttaacatggaagtagataacatttgctgcctacgagagatggctgttttattcctcgtatcagaagaggcctcgttctggtctttcattcatgctagagaacatttcagttgaaaa

SEQ ID NO: 31271 - DNA, 1106 bp, Homo sapiens; identical to SEQ ID NO: 31270

SEQ ID NO: 31272 - DNA, 1106 bp, Homo sapiens; identical to SEQ ID NO: 31270

SEQ ID NO: 31273 - DNA, 1106 bp, Homo sapiens; identical to SEQ ID NO: 31270

SEQ ID NO: 31274 - DNA, 1106 bp, Homo sapiens; identical to SEQ ID NO: 31270

SEQ ID NO: 31275 - DNA, 1106 bp, Homo sapiens; identical to SEQ ID NO: 31270

SEQ ID NO: 31276 - DNA, 1106 bp, Homo sapiens; identical to SEQ ID NO: 31270

SEQ ID NO: 31277 - DNA, 1106 bp, Homo sapiens; identical to SEQ ID NO: 31270

SEQ ID NO: 31278 - DNA, 1106 bp, Homo sapiens; identical to SEQ ID NO: 31270

SEQ ID NO: 31279 - DNA, 1712 bp, Homo sapiens
cggcgctggaagggatgggggcgagcaaacgggttcagttgtgaatttttgtttgtgacctgtggaatggtacaggtcacaaacaaaaattcaatatctttattgtattcccgctaaaatcgagacggtcaatcaagagagcaagtggacttttttcccagagacaatcaatatgactatgtgagcatgatgaaaagttttttgaccctaacctcacctccgtggtgttagattgccgttaaagagaagacgataatttatttgaagccactgtagcttttgtgagtccaggagttgggtgacattattaaaccctcgtggcagtgtcgctgaagttcatgagtttccaaaatgaaggttccaggtgctcagcggtacggagaattgcatctagagccttaggatttaacctcctgtttaggataggcagcaggaaatagcttgttacggttttcccagatttgctctatgatgtagtgttttgactcttaagaggtataggtgtatagaattttgtgaccggtggcatttctttcaagaatttcttttttagtaaaaccaagctgaaggtttagtcacccccgtgagtttaagataataacatatttaagtggaaaatatagactcctaagtttcataaataacatccctccatcccctactttaaagatgggcagtcattagttctccgaactaattgcactaatgtaggcttttcccccgccgtttgccttcgttttcctttcctttcactgacttagagactgcaagtgaggaacttgataatagaagtttagaagagattttgaacagcattcctcctcccccgcctccagcaatgaccaatgaagctggagctcctcggcttatgataactcatattgtaaaccagaacttcaaatcctatgctggggagaaaattctgggacctttccataaggtatttgtatggaaataactattttataactttttaaataactattgtaaggtaatacgtttttacaagatgtttcagttttgtaactatcctaaaattcattcactccctatttatcctgatagtctttctgtctctctctctcacacacacacacacacgtttcatatgattttaacactgaaattatcttttgtttatctggttatctttggtacctctagttacaaagttttccattgaatggagtcggtgtgtgtttctgtttgaaagagtattttcccttggataatttttttttcttaaagccttctatggaacccttagataatttaactataaaatgagttttctaaaacgtctgcgttagaattggagcattcttattgaatgttgaagcttttaagagagaacttgatgtaagaaaactcaagtcgtatgcctgtgattagcaatgagaacttttaaatacttgcagtttttaactgcaagtaaaaaaatctaacagtttcagttaaaatcagtagtattagcatgaccttatgaacttttccgtgttttgtttttgtttttttaatgcagcgcttttcctgtattatcgggccaaatggcagtggcaaatccaatgttattgattctatgctttttgtgtttggctatcgagcacaaaaaataagatctaaaaaactctcagtattaatacataattctgatgaacacaaggacattcagagttgtacagtagaagttcattttcaaaagataattgata

SEQ ID NO: 31280 - DNA, 1466 bp, Homo sapiens
gaagctaatgtaatattgtcccaacgaagtaaataatttataaattgtcaaatttatattacatttgtgcttctgaagtatatgggatgctaaagccaatttgttcacatgataatctgaacctttttatgtgatctttacaattgtttaaaaaacatttcttcccaaataatacaaaggtgaatgttccaagttaacagattcagtttgactcaattaaatttatagataaggaccttaggaactcacttgttaggaataagaaacagggattggactacggtagaactaatagtgcccaattaaaactttgagggaaagtgacaatggtttctatggattgttttttttaagtcgcttatgaaaatctcagactcctaactggcaatttaaagcatttgatggtaagtaaaaatgtgatttttattaccttctctcctactgaataacatctatcttaaaaactgatttgggaggctgagaaattggaaacagcatcgtagtatcaacatccaagacctaaatcattacttggaataaaacatgtagactatttggccagtaatagtgattaacagcaaaagtaatctaaatttagtaaaaataaacatttatttttgagattaaaaagaaccaaattttttagaagttcctaagagtaaaatttttcagtgttaatatattcgcttagcaaatttttcaagtaggcatttttattacttaaatccattaaaaatttcattaattggccattcaattgaattcctattaaggcactatgctaaaatgctgtaagtaatattaagatggctaaaccttatttcttgtccttaaagacacatacatgccttcaaaaagtttgttgtgattgaccattgtgttttttataatcgtacattttcttttatatatacctactttgggagcctcggtcccgttgtaagtctgtacaagtagagttttattagctctgtataacatttcttgggtaactatgacttataaattaggggtgcttttgctccattcaggggtagaagaatggttaatgtttttactaaaaagttgtattaatgattgctgcctcaggaatatttttgtaaactcctcaaaagctacaactattagcacaactttaattttgtcaaagttttcaacttcatatgcttttgtcttcatattacaaaatctaaagtttgaaacacgaaccaggctgggtgcattagctcacgcctataatcccagcactttggaaggctgaggcaggcagatcacttgagcccaggagttggagaccagcctaggcaacatggtgaaactatgtctctatagaaaatacaaaaattagctgggcatggtgacacacccctatagtcccacctactcaggaggctgaggtgggaggactgcttaaacccaggaggcagaggttgcagtgagccaacatcgtaccactgcactccagc

SEQ ID NO: 31281 - DNA, 1124 bp, Homo sapiens
aagagcaatatactatcaaatgaaatgaaagctaagaataaagatgtaaaagatacagaaaagtaataatattttgggaagtactaaaagtatttagataattgtattacatgtgtatttatatataaagttacttctagcacattgtgagtgtaagacatttgccagcatatcaagtggtggcccccttagtgaaaaaaaaaaacttgccttgcatccagttccttgttacagatgaaattccctactctgaagtcttagaaccgtggggatgctaccccctagtggcgtagcacagtaacaaacaataagcatttggcttcacagtttaatcttttagtagtccacaaatctgatagagggataggatttgggtttttctagatagatttttaagggttttatcatgtccctacttgatgccatttttcaatgacactagtatctctaattatttttaaataaaaaaatttgtatagtaagtttattgtatagtaacttgtaagtatattcgtaaaaggtaaaaccaaaattttactcctatggtaaaatttttatatacctagacattgtagtcactggaaaatgtgttattttccctccaacttagaaaggcaaaatagctgtcataatcaaaaatacaggtgcttcttcaactatggggagagggatcatcttggaataaggagagttttaggatcctgccttattaagagcctggacatatttatagaggaagtgttccaggtaggaaatgtggttttaaaatatgtgcacattcaaaataatgacttacaatatacttgctttgctaggaaactgaataaaattacaaaatttattgaggagaataaagaaaaatttacacagctagatttggaagatgttcaagttagagaaaagttaaaacatgccacgagtaaagccaaaaaactggagaaacaacttcaaaaagataaagaaaaggtaggtgttagaaaaaaattcttaaaatttcacgtctgaatatcatacctagttttcatggatgtgtttgccccttattgcctaagagaatgaattagtattctaaatgttgttttaaggtttgtctctgaacatgattttaccccctcaagggaaac

SEQ ID NO: 31282 - DNA, 1393 bp, Homo sapiens
gccctgccagagacagttttccttcataagaggtcaggtgtttgtagaagtagttttactattagattgagagaatatagaaattacagtgaatagtcgggaaaatacttgttaaagctagctaatttaactctgattataaagaaaagaagaactagaggaccctgagaaatgcctttaaatatgtcaaatattgatagtattgggtaacataaagatgtatgctcctataacttgttttataatctcaggttgaagaatttaaaagtatacctgccaagagtaacaatatcattaatgaaacaacaaccagaaacaatgccctcgagaaggaaaaagagaaagaagaaaaaaaattaaaggaagttatggatagccttaaacaggaaacacaagggcttcagaaagaaaaagaagtaagttttttttttttatcagtgtttattttggtggcttttttttttttaacttaaagattattttttcaaaaatactgaaacctgaactggtaagtttggacttttaatgtccaacattcctaaaactagtcaacctagacttagatgactattcttttaattcctgctgacatgttttttaaaaagtttactaaatgagagtttgtagtagtagcagaaggtgtgatgtcaaatacagtaccttgattattatatatgccactcctaagcgtgttgaatcatcatattttgttgccacctgtaaaacctggagccacactaagcgcaggttaatgtctcttttgtttttgcttctatagctcttgtgtaatagttaaaagctgtggctcttgtttcagttcttggttcaaatcctaggtcaatcacttactgtctctgttcttgtgccggttgtcatatctccaagtcatcttccttaaaatgagaaagaatatatctactttgtgaaaataaagaataaatatatctatataacgtactgagaaagaaaataaatgttagctataattttagcattatattaataaaacgagagcatgaagttgtcacattgatatgtattatctaccccaacaagagtaagcataaaattatctttgtttgtatgtaccacagcatttttgacagtgctaagcatgttaaatacctatgttaatggataatggtaattgactgcattaaaaagtcatggtagagtctgctttggcatatcaacatgttctaatgtcaaactataaaacttaacaggttagaatacctgtgtgatgaagtgtcacttaatagagtctgctttggaatatggacatgttctaatgtcagattataaaactttacaggttagaatacctgtgtgataaagtgtcaatggataatgcagtagctttcatgatgggatacttcatagttagtggatt

SEQ ID NO: 31283 - DNA, 1033 bp, Homo sapiens
atttcattttattttcacttttagaaagaaaaagaacttcaaaaacttacacaagaagaaacaaactttaaaagtttggttcatgatctctttcaaaaagttgaagaagcaaagagctcattagcaatgaatcgaagtagggggaaagtccttgatgcaataattcaagaaaaaaaatctggcaggattccaggaatatatggaagattggtaaagtagatttttggggggcatggctttactttttttttttaagaaagtgtaacttatttttttgccttgacaaccatatttcaagtgtcactgtatataaaataagattcattttgtttgttttaaggcacatttatttttaaacattttgcccttacagtttcttgtttacttagctttagataaatacaattatttcatacatatcaagaaaaatactagtaatgtcacacaaacttaaaaccattttatccttttttttaaaagagagactttagccaggcacaatggtgtgtgcctgtagtcccagctgttggagaggcagaggcagaaggatcacttgagcctaggagttcaagtccatcctgggcaatatagcaagactgttttttaaaaaatgaaaattaaaaaaaatttttttatatatttggggtttcacaccattttacttaggtttgggctagcatttaaggatataacaagggataatctaaaaatccaaggctagcaatagtgaggaccattactgcttcttagcttcgagggaagggagttgtggtccagaggagatggggaaaatggataccttaaccccacctatttcctgccctccagtcttagctgaaacctcaaattggctgaaggtggagagtcaaaggagccagttgatgcagtccttaagtcagcctttcggagaagggaacaaattgatgtaaaaattacccaacatgattgcttctgcatcttgtatcgggacttccaccttattttcttaaagataaacagtttgatcctattcatttgctctcaaagaaagccc

SEQ ID NO: 31284 - DNA, 1063 bp, Homo sapiens
ggtatcatacccaagaaaccactgcctaatccaaggtcacagtgatttgcctcctttgttttcttctaaaagttctatagttttggctttatatttaggttttaatctattttgagttaattttatcacgtgatataaagtagggctcaaactactctttccatgtggctatccagttattccaacaccatttgttgaaaagattctttaccccattgaattttcttggcatccttgttgaaaccacccaaccattaatgtaaaggtttatttctgggctttcagttttattacttgtgctggtataggacactgtcttgattattgcagcattgtaataagttttaaaatcaggaagtctgagtcctctaattttgttctttatcatattgactgttctgggtccctataatttgtatatatgacttttaagatccagatggtcaattactgccacaaaaaaaggcgaggaagtaactgggattttgatacaggttgtattgaatttgtagatcagtttagatagtataggcatcttaacggtattaaatctttagaaccacaaacatgagatgtcttccgtttaggtctaattttagaaccttttgtgtataattcttgtttcttttgttgaatttattcctatgggtttttttttgtttttttttttgagttttcttttttgttaactgttgtttttgtttgtttgtttgtttacttttagatggctgtatgggcgaaaaagatgaccgaaattcaaactcctgaaaatactcctcgtttatttgatttagtaaaagtaaaagatgagaaaattcgccaagctttttattttgctttacgagataccttagtagctgacaacttggatcaagccacaagagtagcatatcaaaaagatagaagatggagagtggtaactttacagggacaaatcatagaacagtcaggtaatagtgtttttgtttcttggtttgtttttttttccccccacagcattgactttatttaatcttgttggggagacatctgaagctgacttctctcccctgttttccaggta

SEQ ID NO: 31285 - DNA, 1048 bp, Homo sapiens
agtggaattttttttaattatgaaaaagcaatgcacgcccactgtttttttaataagtttccagaaaatacccaaatgatcaccttcattttgacgtatgttctttcaacttttctaatacctagtttgcatgtaatgtatttatatatgtggtagatatgtgtagatatataaagtgtgcatatggtttttttaatgtcatactagcttttcttaaattatggttttctttccaaggcagtataaatgtactttgtttttaattgctttagagcattttgtttataacataatttgacaaattttttttgtattatgtacatggctatgtttaaaaaaatccttgtaggtataccttgattcagttatttccttagatttcaaaaattacaagtattacaccatatgtgtacaatgtttaaggcatttgttgcataatgccagattgttttcaaaagttataattcatgcactactaacagcatattcaaataattatttttccaagtctttgaacactagggtggtctacataagtttgctaccttgtaaacagaaatgtggcattttaacgtgtctttataatgagcttacatattttgtgtttgttggccattttcattttttatatcaatggcacatatctttcctcttcctattagtgtgtgtctttttcttgaagattttaagtgccctttttaaaaattcacaatgtttaaagcaaatgttaaaatattgaccttaaatgttaaaacttttttgtagcgtttaatagagcaagaagaatatttgaatgtccaagttaaggaacttgaagctaatgtacttgctacagcccctgacaaaaaaaagcagaaattgctagaagaaaacgttagtgctttcaaaacaggtatgtttagagatagaccttttttggggggaaaaaaaaaacaggtttttaaagcttgcaatatttaagaagcagtagaataataatagaagctaagtatatgcaagtcattgcactattttatggtgtttgttataaagtaagtgttattaatag

SEQ ID NO: 31286 - DNA, 1052 bp, Homo sapiens
tcattttgggattttcattccagaaacttttaggggtatcctaaacattacacatggaattctttatttcttacaattgagctttttctttattgtctaataactccatctccatctcctctggtatcagtggagaccaaattattttttatttgaaccaaatatttccattttggaggagtaaaatataaattaaaaatgcaaattagtagcagaatcacagctagaatcctaggtcatcttcctagatcttttccactagaagtcaaaataaccaaattcctttcacactcaaatactgttttatgaattattcctgccatcattcctttacatgttatcaatgtaatgtttattgtccaaaaaatatttgaggttacatgtttgtgtgatttacctgttattacttaatgtttgacttttctttgtttctctttaggaacaaacaaaaaatgcacagttcataataatttctcttcgaaataatatgtttgagatttcggatagacttattggaatttacaagacatacaacataacaaaaagtgttgctgtaaatccaaaagaaattgcatctaagggactttgttgaactttatgctgaagattcttcaagttgattcagtgtattactgatttttttctatttgtaaaggattatgagttgtataaaatacatactccctaaactagatcatgaaactggtttctgttttatgcagttgtcatttgtaaagtctaataaaatattctctataattgcttctagattacaaaaatatgacaatcttgtaagtagcagactatggagaaaaatgagttacctggagggtcaggtaacttgccaaactaaaaagtatgttagttgaggcaaagtcctaagcaaggttgtgctatcaaggctcagcataccttcgtgggcctttgatttaccaacactggaaatgcctgccaactaatcttggatagattctttaaggcattccacttagcttgccagttgagacaatcaccacagttattacccaaatactatgaacatatttttgtaa

SEQ ID NO: 31287 - DNA, 1050 bp, Homo sapiens
ttgatagagaaaaatcaagttataccactgttgaaagtaccttaggcaaaacttaaaaacccaagtgccatggccaggcgcagtggttcacgcatataatcccagcactttgggaggccgaggcgggcggatcacctgaggttgggagtttgagaccagcctgaccaacatggagaaactccatctctactaaaaatacaaaattagcccagtgtggtgtcaaatgcgtgtaatcccagctacttgggaggctgagacaggagaattgcttgaactcagtaggtggcggttgcagtgagccaagattacaccaccgcactcatctggacaacaagagcgaaactccgtctcaaaaaaaataaacacccaagtgccattcacgtaaaatataaaggttaccaaatcacatgctataaaactaacttttaagattaaaaatctgtgaaaacagcaactaaaagtaactaactgcatttttaataaaatgcaaacttggctccttatctttacgatctgtcaaactcttaactcttccttcaaggctcaacttgagcctgccttttccccagattaggtcccctgttattctcattaaacactgcatttttacttcatagcactttaacaagattttatttaagaattttgtaacttttctgtatacattagaatgtaggcctcctataagggcaggaattgtgtctaaacaatggttatattcctgcaatttaggcacaaattttaacactgcaggcattcacttgttactgcttcaatgaacaaatgccttttcagagacctgtgttaatacagatttttgttttggggttttttgttttttgtttttttaatagcaaaatctctgcttaggaaaaggtgtaaaacgaaaatctatcagaaaatactccattcaggccaggtgcgggggctcacgcctgtaatctccgcactttgggaggccgaggtgggtgaatcatgaggtcaggtgattgagaccatcctgcctaacagggtgaaaccccgtctctactaaaaatacaaaaaaattag

SEQ ID NO: 31288 - DNA, 1116 bp, Homo sapiens
tataccattcactcatgtttattctctttgcttttcttattacccctcacagctcctgcagtgtaaggtctatccaaaagtcctttaaataatgaccaggaaaatgtagattaaatatgtatataggattctgaaagttatcctaggcaagtggttttcatcagtttgacaggtaactctatttctggtgtgaggcaagaagtttgagaattgggggctggctcctcagaggaagctaggcaatactctcagatttaactcagcctgccattgagaaggtggttcaattatttggttaggagtgttatggattacagtacattagacgtgcctgagttttcaaacgtaagtgcaagaacacgtcctcaaaagttcaatctatagtttcccttccccaaacgatcatgcaaaataaaattaaacatagtatttagtgaatatcaaaaagtggggaaatgtaaatgaaccatatcagctgcctggggggcagaaacagtgatttatagacttgagatttagaactcaaacattcttggtttgtactcaaggaagagcgtcattaggtaagttgcatggcagaacagaaaagagcttactgatagtgtgggaataccttagaaaggaataaaaatcatcacctttatctaatatctctctcactttatatatgtgtatatatttgtttcttctacattaactattaagttgaaggaattacattttagaaaatgttgattatgaggaattggtagaattctcatgtacaaaatggacattttctactttggggagctttatgaatcatattgaaaattagagtaactgagttcttaacaagtaacagcaacagctacttcttaactccttcatccatgggaaacagaagttgctttgtgtgtgtgtttgtgtgtgtgtgtatgtgtgtttactcatgcaattattactgatcaccatactagagaaagatggtctcataggatgaaaatatgatgttcccttaatgattagattaaacttcccttggcagtgttgaatctaaactgaaaaacatttttgccttccttaaattgagtaggagttatggctatgaatatttagacttatatcatgcctatg

SEQ ID NO: 31289 - DNA, 1067 bp, Homo sapiens
cgtacctatgtgtcttgtttaacttcctgtgcccagcagtggctctgctaaaatactgtatatgtatttcagaatgtcattacttatttttggccagtgttttgttccttaagatttatttggtttttaaagaaattgagatataatttacatgccataaaattcaccactttaaagtgtatgactcactggtttttaatatagttataaggctttatagccattaccactgtctacttctagagcattctcttcactccaagaagaaaccctgtgtctgttagcagtcactctccctattctgtttgttttttttttgccaaataaatgttgtcatgattatctctattacataggagcctgtcttccgcagagtgtcatgacagttgtttgacctttcgcgtataggtttatcacgttcaccttttgttctaaggttgatggaggttgcagttttcagcactaccaccaccaccaccatgttgactgaaattattataggacataaaatgacagtgtgttactcacaatcacttgtgaaagtttcagtgcttatgaacaacagacaactgagcactgtgcagatttctgactatgtgacaaagttggcctgtgctttaaaatttaatgaatagagaagtaaattcttctgggctatgtggaaaggtttagatttatttgtttcttacactaattagttttttgaaaaaaatgcataaaatgtgttcatacttacacttatttctgaaggactggaattggttgttcctaaactaacatgattgactttcttaaaaaacctcatttataatttaaaactattttgaatctgtgtttttattattccagaagtgatatatgctagttgaaaaattttaaaaaatacatagagcttagaaatgttgtaaagtaaaaaaagagttctttgtcatcctttcactttagagtttatgcttcaaatttttaaaaatgcctaattctataacctacttgattctttgctcagtttttaaatacttcagaaatgcttgtttattgaattgtgttattctttattttaatactgt

SEQ ID NO: 31290 - DNA, 1029 bp, Homo sapiens
tgaaagttagcagagattggttcatgagttgtaagtaaagaagtcatctctacaacgtgaaagtgcaaggtgggccgggcacagtggctcacgcctgtaatcccagcactttgggaggccaaggcgggcggatcatgaggtcaagagatgaagaccgtcctggccaacatggtgaaaccccgtctctactaacaatacaaaaattagctgggcgtggtagtgcgtgcctgtagtcctagctacttgggaggctgaggcaggagaatctcttgaaccagggaggtggaggttgcagtgagccgagatcacgccattgcactccagcctggacgacagagcaagactccactaaaaaaacaaaaacaaacaaacaaacaaaaatgccaggtgaagcagcaaataatgcagaagatattgctaaaataattgatgaaggtggctacactaaataacagattttcattgtaggcaaaacagccttcctggaggaagatgccatctaagaatttcgtaggtagagagaagtagtcagtgcctggcttcaaaacttcaaaggacaagctgactctcttgttaagagataatgtagctggtgactttaggttgtagccaatgcttatttgccatttcaaaaaaacctatggcccttaaaaattttgctagatctagtctgcttatgctctcgaaatggaacaacaaagcttggatgatagcacatctgttcacagcatggtttactgcatattttaagctcactattgagatctattgctcagaaaaaaagatttctttcaaaatattactgctcattgacaatacacctagtcacccaagagctctaatggagatgtacaaggaaattaatgttgtattcatgcctgctaacacaacatccattctgcagcccatggatccaggagtagttttgactttcaggtcttattatttaggaaatacattttgtaaggctgtagctgccatagatagtgattcctctgatggatctgggcaaagcacattgaaaaactt

SEQ ID NO: 31291 - DNA, 1856 bp, Homo sapiens
aacacccttggatgagacagatttttgaaatacaagccagttcacatgttctgtggtttttaaaaataagactgcataaagtttttattttttatatattactgcatatgaagcctgttcagtgagtgttatgctttgccataggtaagcttacagaatttatttgagaaaacgtagatatataaataggtctatttttcaacaggggaatggtaaggtttactaaatgtttagtgatacacacacacacacacacacacacacacacacacacacgggaattttttgccctttaatattgatgaaggaaaaagcaaagatatttttcatgttttttgctgtatttacctagactattccaaacattggtgatttttatctaggaggtttatccatttaagggccagagtcagcctttcctgaatacgaacataaaacctttgctttgaaggacattttgcacttggggcaaagcgaaatttgttaagtaaatggattttatgtgttggaggactagagaagtagtaacctgggacagagaaactgtccaatttaagactaccagtccatggccagtcacaggacgaagaacatttagagctgaatcatctatattttctaagttttgcgcacaccagcaaatgattcagactatgtttgttcccatgtgccagggagctcttgtgctgatgtgatgaaacttggcatagcacagtcctccagcagagcagtgcctgcctgtttatgctgagataacttgcactctcttgattttactcaggggacttctgcagttttttgttttgttttgtttttaaaactgtgtccctgcctctagtgcatttcccttttagtatttttcctctcccacagtgtctcagcctgaggtaatttgactgtcatatatgggaggtttggggtttatattatctacagattatatatgttgtataggttcccatggcttcgtttcatacatagtttgaacttatatagtcatttccagcattccttcctgtttcttcttacttttagccaccgcctaatctgccgcagagctatttgtgtcgattgccttggttgtgaaagcaacagctccccacacccaagcccttagcttcagaagtgctttccttatgactttacagagtcatcttggtggctacgtcgggttctgcccaacatcctctacttagacatcttgtcctaggaattaactctataatactcctcctttctcaactgcctccttgcatgggaaaggctcatcttagtctttttggtttcacagtgtttcagaaagctgtagttttctttcaactctgccctcatggttttaccttcctttctctcaccctgggtccctgggtccctaaccctggtcagtgatctgtgacagtacctggtcatgtaattaggagagagggatctggtcattatataactaggttgtggaatgccagctgaacaagtggctagaaacctacaatccggcttggaactgaggtttcatggtgttgatgtgactccatgcaagtgagcaatttactctgtgttagaacgtttttattttgaaaaggtagacaacagggtctcatttgatcgttaggaagaacactaatgtttattgagcgccgggctgggtacttcattctcacgttctttttcagccctcagagcattcttgtggtagggcaagtgagtggcagatgcattgaggaagacatgcatgtggatacacacatattcgtagtttatttatactgtaaattttaaatatgcctaataaagttatactaggagacagtgtggtatagtagaaagagcatgggctttgaaaattcatgaagacctga

SEQ ID NO: 31292 - DNA, 1032 bp, Homo sapiens
cagggcttgccaggcacttggtgtggcactgagtgggcatcattttattacttcaatcccaaagcaggttcctctggactatggcattgctattctctagagctggcttctgcttcagattttgatgagggtgcttttttctcagctcacgatgttagcgccttccatgctctttagctgcctaaagatgttcatgtctttgggcctctgcactggatacttatccaagtgtatgtgaggctttggccctttggtggtaatctgctgccaagaacggttctttctccccttttcccaccttcctcttttctttcttaaatataattgtgcattaattgggtcaaagagaatttgatccttcctaactgttcctttcctaagttgtcactgtgatttccaagtaactttagacaagggatttaaaccattgttcctttttctttcttcataaaatgaaattggcagtattgctgctttataccaggaggactcagaagcattgcattctgggctgagaacgtctaggtacttttcataggaggctgaaattgcgggtgtgatttcagaaatagtcttctttgtgcttgctgttttgaaatgactgatcctagaaaggtctctggctgtgtagttacacactgcttgattttaatagaaaacgtttaataggagcatttttttttggagccttgcattcagtctatgagagtctgcaaggctttaaccaagagagtatgcaaagacagggtgttctccctttccctggaaaggtgggattgcttggcaagtagccttagaggaagtgtttagtgtgtgacatcagggaggggggcagctggccaggatttctaacaccgtgattacaggtagcacatgctaaattagggttctacaccgctagtacatggctgcatttagcaggaaagtgaagaagcctgaatgtgagaaagtccttgccaaccttataataaagtaggtgatgtttataatgtctattatgtatatagcacttgtccttccagaacagaattt

SEQ ID NO: 31293 - DNA, 1049 bp, Homo sapiens
tacagatacaatgataatgtcagtaacagtttccatttattgagcactattttgtcatgtattgttcattcactcattctcagcaaatagttatcaattacctactatgtgtcagattgtcttctaggtgttttctaagtggtgttatagggtatcctacagcaatgaaaaaattcttgccctcatggaacttacattccagaggggacaattagtcagtaaacaaaataagttttcactgtgtaacatactgtatattttatgtatttattttgttaattgtccttctctatctgctagcatggatagagggaatggatccatgggggaagggagagtagcctggagaagtaggttggtaccattattgttgttatttttaaaaaaatagatcttaggtatacagaattatattaatcatattttttgctccatgacatcctttgtcattttattgttatttatatactaataatgcaaggaaatcctatgaacctatcactgactatgacatctagaacactggcaagaattttgatcttttaagttctcccattcatgccttattttgacatcatattttaagccagtaagtggggacaatgtagagtccagatcggaggtgggaagagaccaaaggtgaggagaccagttggaggtggtagatgaggagaggatgatgaggcataaccttagcagtgatagtggaatgaagagctggatgagattggctttatgagagaatgcagtattgcattgtcatcatggcatggagttattattcatcaactctttatgtttagataaagtacatgatgatgaaatcatccttggtttatttgctttcatgctttcaacatgtagtgctacaaagctagagaatctcaaaatttttatttcagatttaaaattttgctgtagattaattaaaacataaaagtacatgcaaaaggatgtaaaatttaatgtgctagaaccccatattcacagtacctagcataaaaagttaagtatattagtcctcatattacccctattgatttcatttc

SEQ ID NO: 31294 - DNA, 1050 bp, Homo sapiens
gcccttccttaaaagaagagggtggagagttagtttgctttctgccatgagaggatagaatgaggaataggcagtctgcaacctggaaaagagtcctaaccgaaacctgaccatattggctccccagatcttggacttccagccactagaactatgagaaatcaatttctgttgtgtgttagctacctgcctatggtactttgttatagcagcctgaactaagtgtgcttattaaagtactgaaccataagggtgatggtattttgaatacatgttttagcaccattagtgtatgattagggcagggaattccctaatgagggaaaggtcataggctggaatcctgtgcgtgtctgtttgctcattccgtggcctaagtctgatcttttaacgtggctcctcacctgacagttgcaggcccttgggcatgaggggtgccatatgagagaatacggatggatcaccatacctccatcactaggatcatggccacaaatcagagctctgtcactgataacctctttggaaactaatagttttgcatctgtacatactatatgtatagatttatgtttttcagaacacgagcaggagatggttctattttagtattatgagactaattttttttaaaactgtatcttctaagattcatgccttatatatgtatgtacttttttaaagtctcatatttttatactctctttcctgccttgggcctcattttatttccttcagcttagtgtttttgcaattcttcctttagggatttctaaatattcatattttaatttgactttccttaatttggaattccattttatgctccagagcctcagacagtgtcataaatatgatgatggctcaaatggttaaactatgtgccaaaaaaatctgtggtcagctcagccacgtgtaacatccttatatcctgatgtatgctggctttctttattcctgacacatctttttagaaaggtagacagataaatagatagatggataaacagatagccatttgcaatggagtaatttctatttgtctacatt

SEQ ID NO: 31295 - DNA, 1120 bp, Homo sapiens
tggactctggtctaatacttacagtgatagagtatgggtaaatacacaaatagacttttaagggtatcctttagccttcagactttctgagacccgctgagatacagaagagaagaagtggagagattccatgggcaaaaagggacttgagagttatggctcctcaagatctaggttcttattctcactgagcctcggcttcttcatctctaaaatggagaatatttaacttgtagagatattatgaaggtaaaaatagataatttagcacaatgctatatatatatgttttaaatacttgtcttttgccagataccggtttgcaaatcttttcttgccatctatggattatgtttccatcctcttcacatgtcttctgcagaggaaaagtttttaatcttaatgatttacaacttgttagtttttccttttcctggattatgctttcaatgtcatgtctgagaactgtttgtctagccctaggttatgaaaattttttctatgttttttaaagagccttattgaaatataattaacatactgtacaattcacccatataaagtgtacaattcaatagtttttagttaggttcacagagttgtgcaactgtcattctgataagttttagaacattttcatcaccccaagcagaagctttgtacccattagcaattatgctctatttctccccatcttccttgtccccccaacctaggcaaacactaatctactttctgtctctgtagatttgcctattctggacattttatataaatagaatctgtggtcttttgtcactggcttctttcacttgaacagtgttttcaaagttcatccatgttgtagcatgtatcagtatttcattccttttcattgcagaataatattccattgtattaatatgaatatataagattttgtttatctattcattagtttatggacatttgattgttcccactttttggctactatgaataatgctgctatgaacatttgtgtacaatatgtgtatggacatatgtttcttatatatccaatatgtacataaaaagaatatggtacatatattggtgtatggttggtagaaatgcctattcagagtctttgtccattttt

SEQ ID NO: 31296 - DNA, 1026 bp, Homo sapiens
acttcattgtgtgccttaaaaatgttgtattattaggatcctcaccttgaaagattgtttcaaaaaattgttattacattgaaataagtcttttaaagtacaacagtgtcctgttatctagattagatggataactgaggattagaatatgtatggaagatcagtcaccagttaaattggttggttagttataaagtatatgttgacagtgtgcatagtgctttgtgatactcttgaaaaaaattttaattgacatataattttataattagcataccataaacttcaccttttaaagtgtacaagttagtgcttctttttaatatgttcacaaagttgtgcaactgttacccctatctaattctacattgttatttgttaattgcttattatttatttattttttactagttttttatgtgtagcttacttcaaaatatatttgaggtaatttacagtaagagactcattataacagggccactatgatataagaggtcaaaaacagtagtagaaaggaaagaataccaaaaactcaaactgaaattaatgtagtattgctattaggcaaagcatataaatccagaactctgaatctggtagcatttttttcttctatcatggtgcaaaatttatttctcctaagaacttgcttttcttaaacaagtcaaatcacactgtttcttccctctttaaagttccctcttgattctcacagccaaaagtcatgtttcatattaatgtttgagacttattcaaggtcacatatatttggggggcaaacatggcatatcttcttgtagtatcaatttttcctaaaaaatttagagaagaaccaatattttatattaattttaaaacattgcttaatgtaaaaaatagatatagagtggaatgaagaatttgcctgaaatcaatgcaagatttcaaatagatatgctcaattgtgatctcagctgagaaaaaatgaagtgaaaatagagtagaataacgaatttgcctgaaaggaatgcaagacttcaaata

SEQ ID NO: 31297 - DNA, 1053 bp, Homo sapiens
ccctttcccagtaatcaacctacatttaattattcatgctatgatggactgcataaattaaagaaaaaatagaaaatctgaaagggaagataatgatctcattgttatttgtagttgaccatggtcaactataaaagtataaaaatactaaaattattaaatgtcatatttatgatcatttgttcacctgaagagtattgaataataaggggtacatttgggttatactgaatgagtgttgaaaatgattgaaaatcatgaaaataatttatttggggttgaaattttatcaaataaataatctataaggtgtatacattatgagcaagttagcaagagtgtcttgatacaaagtattggtaaaagaaaagatagttcacactgagtttgttttcaatttaattcatttttgcagatgtcaacaaaatctttcacctttttatagtatttaggaagaagagagcatgtaaggtcaaactttaattaacttttctttgcctatactggactttccctacacaagtaggtacttatattctgatcacaagtccccacacgtcggttgtagatagcaatgtcaagttagtgcatacccagctactaaagtttactggactttcaggtgttcttggcatgccaggcaggtggtacccagttatttagagagatctttctttcagaccttagacatgtcttttacatataaattacttaggtactttgaccgcatcatgtggttcagtttgttttacaatgaagactagagcttggggaagggtggtttttgttgcccatgcttacctgaaattcagaaaacttatcttgaaggagccagagccagttggtatatctctgagaactgtccttagactcttagctgggtggtgttttcctagtccttgtgtaaaaggataaagatggtggaatgtataaggtaaagtgtttttaggatatacgtatctgggtgccacaaagggcatgagtagggaacagtgaaggataagggtgaaaccattcattgatcctaatcatggaaagccttgaataccaggc

SEQ ID NO: 31298 - DNA, 1033 bp, Homo sapiens
ttaaggacatgtatctaagtgttcatctgggttctctaaccccctcctctatactgttatggtgttactaaaattttattagttataagtaactttacttgacactttcttcacatttccttcctggcttccttcctttccctcctttttccttatatgcttaaatctggaggaaaattttgttctgaattatatattttttaatcaatattgcaaacagacaactgtaaacctcaagtttttgttaatgaagtacttgaaaatatgattttttatttttttgctattatggttagaaaatagcgataattttttaatgaatggctggtgaaatgcagcagacacagtgcaagttggtggcatggtatcattgtaaaggttaaacagctgtgctggaaagagtcattttggtttagtccttttaatttggaacttttttggcagctgaattccaggacagactgtctatgacactttaatatatttaacatattttcaaaaactatcagaactcaggctaaataacctaaaccactttgacttcatactgggttacattttgcttgttgaaaaaaacttaagttggtttttaaaagaacaggctggtctgcaaaaaggtgatgaagaaatattagcctttgttggaagttgagaagtattatataaaccttagactgatattgtagaatggcttctaagactgaaaaattgtaggcatcctgttttaatcctctgtaacccagccatatgcgtcaaactgagcactcctaatacctgatacttagaaaaaagagtaagagagctgtttttctgtgtacaaatacacaagtgacacctagtatctatccctctattcccccagctctggtcttagggaaggggggtccaggcattttccacctggagaagtaggtgcctgacagcagatgcaacattggtgacttcctggactgtggcttgtcttcaaggcaccctgccaagacttcggtgtcgggggaactagagaattagggtaaaatttcagggcctcacc

SEQ ID NO: 31299 - DNA, 1035 bp, Homo sapiens
cagttgtcctccaaaatgccccaagagtattagaatatgatagaagattgtttatttgctaatgaagacatcagaactagccgaatggttcaaaaataattttaaatactttatacattgaaacaaatcaagccactataataattaggagccccttgctctggtgcagggcataataatcgctagcaaatccttagttgatgacatcacagtaatctgagacagagaggtggggactgtagtggacacttaaagcaacattgctgtgtctccttggtaattcatgaatgacagttcccggcaattcatgaatgtgacacttctcggtcatttctgtgttttggcaggtactggtggctttaaagccagggaatcaaagtccttaaagttgtaattaattttcctgaagctgataatgagacctactgcgatcctttcacataagacaggtctttacacacaatttatgaaaacagaataattaatagaaaatgatttcaattgtcctctgtaatatttcattgaaataaatgttgtagagtggttttagctcttggcaaatcatgcaataataataataaaagagaagacggctgtgtgggaaagagtagttatttttaaatcttggtagacaaatgggacctgcccacttgtctattgagcacatctctgtaatttctcagaaattaaacagcatgaccctttgattgaatccaaagctggaagtttaaatagataacttcaaagtaattggcttgaaatccaaggatctattctgggatgctttagaaatttttattcccttttcacctcagctttaaaatatatataaatgtcaaggcttcagactttaaaactgttgctgttgtactccaaactattttcttataattggcactgttcaaatcctttttggaacaggatttgagcttgagtgagaagagaaggtagtttggaagaatcaagaagtatgtaacagtgggatctaaaaatctaaacaaaaagaggttaaagggacagatctgatgtatttca

SEQ ID NO: 31300 - DNA, 1029 bp, Homo sapiens
tattaattttctgtctatatcagacatttcctaggtttttggctacccagagtctgaacctctgtttttatctggcatgaattctttgttatgtggggttttgtgggaggcggggttccttttccagaaggggtcagattttcttgtctttagaagctaggctgcagccatgtgaattaggttcagccaatcactattactcacccagaactttgaatcttgagtgcataactcaaagatgcagagacagtttattctttttagcagtggtggtgttgagagtccagcgacatcattgtctagttgcagcagtggtgatgagaaaggtgtgttaaccagactcttttgtggctgagtccctgtgtcctagcctcccttcagcctcccttgattctagctcacttccaggtcaggcttctagcttttccttcaagatatttctgtatccttcaaatatactttttccctttaagtctgccaaaatggatttctattgcttgtaaccaagaactctgactgatacactgcgtgaaaactaagctaactgtggcaggttatactttccaaaaattgtaccaccaatatatatcctatcctatatgctcttctaacagtgtgatttcacattcctccattgagaggtagagggctgtgttccccctgcttaaacctatgtggatgaatagaatgtgtagaattaataatgatgtgtgggttccaaggcaaggccctaaaaggtgatacaacctcctcctggtcctctttctttcctgtgacatgtgccttggaaactgagtccaggtaccctgaatatgccatattagagagagcacatggaaagactatatagaattagaggggtatgccagaggaaccccagctgttctagccctcagctgtttgagttttcccagtgtaggcaataggacagacatgtgatcaagcaagctgtcccatgacttctcagccccagccttccagctggcccaggtgacatagggtagagcagaaataaactctgagcccttc

SEQ ID NO: 31301 - DNA, 1051 bp, Homo sapiens
tgctattcttccctcacagcaagtgtttatttaaatgtcttcacacatgctgtttcttctatctgaatgccttcccccagatttctacacggcttcctcccccacttacttcaggaccctgcgcataggtcaccttatctcaagcgcttgaatatgcctcatatgatgtagctccttggtacatacttgttgatgtctgtggggataggcaaaatgccttttgtcatgtttgggtctagtattttacatcctcattcttttttcttagaattctgatcagaccaattattgagaagcttttgggaaacactgtttatctttcctcatagggtgtggaaaatctcttctgtgctagttttgggtgccaggcagctttgcattatttgtttttgcgtaagttggtctcatttgttcattttgtcaaaaaaatccttttaaatttctgatttatggtttcctaatttttcaatgctatatttctttttataattatttttgttatttccataggatttttgagaaggatgggaggtaaatgtgtagggccaattctgaatctttaaaatagaaatgcataaaatgtgcttggctctgttcattcacaaccatacctatccatttgaaaaattaagcatttttctgtttgtgtgtgtgtacgtatgttttaatttattgagtctgattacaatgcccacttctacatatgaattttcagagcctcttgtaatagttccacagccctaaaattgggaaactatctgctatgaatatatagcagaaacatagtcattggaaatggtgggcacattggtatccctaaagagtagagtaaaattcattttcatctaaaggaacccaatcctcttgtttcacatttagaaatcatcttatgtcattccctgttactctcacagaaaattcagagtaaggaacacaggtggagaagaaatgggcaggcagctttgcagagatgttatcaagataacatttttcttcacattctgtagactctagagaaatggtttacaagagagctttaaaggtattgttt

SEQ ID NO: 31302 - DNA, 1032 bp, Homo sapiens
aaacaactgatcaccgtagccttaccaagtttacatataaaatataccatcaaaatatttaataaatggtagctattatttttaaagatggtattttctattacttcaattattattattttattccataaacatctcttgaggatctaccacataccaggcactgtgctaggtatgtgtgtgtgcacacatggaggtgggggaaagggagagggataaaggtggataagttataccacttgttctctaggcgtctatattccaatggaagagacaagtcaaagggaaatgataatgtattaggaattatggatagatatataatactgtaaattatatatttatgcttttgtattgtatttatttatattgatacctatatttatcttggtaaaattctgtccatctcttcatccttccatccatttatccatctaatctgcaggaccttgtttccatttttgccttgagttgaagggaagagaaaaattgtcttggatgaaactactctgaataagcattggttgatgtcaagcaggggaatgaacctctaccatgattataatgagtcaggtagctttgttgttttataaaggtatttctaaaaccctcttcagaagcaatgcataagtaaaataagttttctacgtgaaccaaggctaaagctccactcccctgcaggttttgcgattttactctagataatatgtactgtttaattatggttcatccatataataaaatattatgggtctgttaagtacttttaaaagcatatatgatgttctttcaatttgttaggtagaggacatgactgtaaaatattacttagtataatctttatatgcattgaaaaagactggaagaaaatacaccaaaaactttacagtaactatttttggacagagggattatggttggttttgattgattgctgtatatgtttctgtatttctcaagttttctaatttgaatgtccaagtgtggaagaggaacagatggtaaagagtatggctgtagactcttgtattg

SEQ ID NO: 31303 - DNA, 1058 bp, Homo sapiens
gagaagaggcagcgttgagggtagctgaatgagagagacgggtcttgtatctaggaactttgagactagggtcctggcagagggtctccttcaggaacctatgtaaatacagccagaaagtctggttgtatacctacctgcccctttgcccctttcctctagcgtctttttctctgtggattcataatgtaattcaattgaaacctttctttctggagggctgcagcagcagcctctcttaaagatttctgagccataataggttgttccatgcattttgatgcttgattagaatcttagaatgtgggaactgcagtttacagacaatctagctaggtccttgtttgaaaatgaatgcagtgagaagactgctgtgttgatatgaaagctgataaatagtaaacctggaaccagaacccctaattcagatctctttccactgcatgattgctcttttgtttcatttcgataaggcagtcagcacaccaagagtttaagctttttaaagccaaggacttcttagaacctcccccccttaatgcctaccccatgctgaatatgttccagggtaacaaaagtgtacattgaattgactttggagcaaaagaatctgttagctgtgctgactatggctccctctgattaagtagggggatgtttgtttcaatgtgagaaattccttttctgggctctgctatgaatatgctatgccagtggtggctgtgggtggtgggtacaaagtcaagatactaagccacaggactgcattctgacccagaatagttagttggtcattatgatagcattcacctgagctctcctgacttgcttgggttattggatatgtaaaacatacattgataaaggaacctctttaagaggcaaggcacttgtgcgtgttttatttcaagtatattccaaggagcttgtttagtcctataaataatcattgatcctcagtgcctcacagcatgtattatttccattttgcagatgaatcaagaaagtcagacttgttaggttttccacctaaggcaaatgtgttaatattgtgtaaa

SEQ ID NO: 31304 - DNA, 1033 bp, Homo sapiens
aaaaacattgtgggtttttttggccaggcaccgtggctcacgcctgtaatcccagcactttgggaggctgaggcgggtgaatcacgaggtcaggagttcgagacaagcctggccatcatggtgaaaccccgtctctactaaaaatacaaaaaattagctgggcgtagtggcaggctcctgtaatcccagctactcaggaggctgaggcaggagaattgcttgaactgaggacacggaggttgcagtgagctgagatcacgccagtgcactccagcctggccaacagagtaagattctgtctcaaaaaaaaaaaaaaattgttattttttttttttttcaaatcagtggttgacttcattacatttgcctggaaaatagactggtaacaagtgaaaaactacctgaagaagccagttcaacttagagtgaatccaaaagggcagtggggccatgagaagcttcatttcttagcagtcaaccagagggagtttccaggggtcctgggaggagggtttagataagtgaaagttgtgccccttgcagtgctcttatttttcagtttaaaagatgcctcctgccatccacatgttatgcagttggggatttcaacccacttacagcatagtcttccctatttaatcatagaatctcctcatttttaactgacctggccagcttctttatcaattttgttcacatactgcgggcctcaagtgttcatttaaacgtttgggactgtaactgctaaagctgttttcacatgtggaaaatatgagcctttaagtttcgtttagcagatgctcaagccagcagccagcaatatgccccacttctagggtggtgcccagagtactggactgagcagctgaaatgcagcttaagttctggttttattgcaaatcagccaccaatgttgaattggtttcttagtccctgagtctgttgccttatttgatgaattaaaataagtaatataattcaggacccttgggagaagtgttttatatcactttgctaacactgaagactctcc

SEQ ID NO: 31305 - DNA, 1035 bp, Homo sapiens
gtgagaaaatgaacattctcagttatttgcgaagttagtaaaattgcagtccctattccatttttttctgatgaaaatggatacatgagatctcatttattgctctcctcaacacctttactgtcccagattccattcacgttccaaatcgtggacagtaaaactgaagtcagataaacacagtcacaggtacaactgggagcgagttttaacatagtggtaattttgcaaatgccaacatgaatactagtgagtactcaatttacgacagacaatttcacaaaaaccaaccacagagtgatttgatattcttgcttcttagagagttttctaatccatataatgcaatgggtcaggttgctcatatgattaaaaaaattaatcctgtagaaatgatgtattagacatctctaacccaagaaaaagatgtcttttgtataacttttaaattcccatttgtctatcttaggacaaatgatgacttcttcgtgtagtaatgaaaacgtctaaatcctgctctgtggagaaaagctagaaccatgggacattaagcaagaatactcctctgatttaggctcccagactacaactaacagtctttatgtatttatcatcttggttattgttttatctcaagcatatacagtgtgcagaaagtagaataatgaataaaatatgaccatggagaaaacccataacttttgcttctattatagaaagcagtgtttgttctttttaatttattacatgttcacattgaaacattaacatctacaatattgtctttcagtttactcttcaattactaaagcaaatgattttgatttatagcacttacacaactgcagttcaggtcacagaattgaaatctatttgataatgtctcagcattctcatgggcagccaggaaaaaaaaaaagagagagaaagacaaatagaaattttagtgggttcagataaatgattattctgacaaacctggaaaatagtaattaaacagttcattccaaaagaccccaatgtaaactctgctca

SEQ ID NO: 31306 - DNA, 1050 bp, Homo sapiens
agcaatgaagagcaaggacgatagctgtctggtgcctggtccagtgataggaagaatcagttatcactttatatagctgcaggggagagagaaatcaggagatctagaaggtgaagggaatgttcagcaaagttgaggatttaggagatttcattgttaatgaatgttgagctccggagggcacagtagaagggttttaggattcggggaggagtgttagatggggacagaatagggaatatgcataaccatatggaaattggagtatgggaaataggggtgactgaggtgtctgggactatggtaaagaaagaaagggactaataaagttgattagtcatggttgtctgaggacacatagtgcagtggttgtgttggggaatgccgagcaggatgtcaaggagactctccattcctgcaggtggaggttggagcttgaggggaagatcagtcttattcagtgcctttggggctttttttttttttttttttttaaccactgctgatggagattgaaggaataggaatctgcctatcaccctgtgtacctggcatcacttgttaactactaggctttgttttagggaggccagctatatgaggagggttttactctggtgtgttgaatctttgcatctacactaaaagtggccagtctactttttaccagacagtgcttgataaaagtataatctgctgctgatacctctcaaatctgttaactgcagcccaaatttttttatagatctccagaccaattgtatcttactgttcactgaaaagtcctcttgggtatctcacagatactgtcttaaactgaaatgtctgaaatcaaatgtaacatctttttctcattatatccattgtttatttcggtataggtagtcacaaaaagtgtactgcctagttgtctaagcaaatacttgagcatcattctggagtctgttctcttcctcttttccatatccagttaccattaaatcttacagattttttttctgcatcacttggactgtgcagataaatcttacagatttttatctcctaact

SEQ ID NO: 31307 - DNA, 1032 bp, Homo sapiens
tcctgacctcatgatccacccagctcagcctcccaaagtgctgggattacaggcatgagccaccgcacccggctgttcataaactttctttgttctttgtttttctgtcccccttggccttgagttttattttttctagaattagaattacgagttttattttcatttgctgatttattttgtctgtctttttgccaaagaagtcttaagtgatatctctaatctgttgtgactacaatagagttttctaataatttgattttgtttaaaacagatgtaatttataatatagtcatgttagtagaggagaatcctattttgcataattattttcatagggctttttttttttttttaagatggtctggatttttattattcctcaaaacaacatgctcagaagatggtcgaatttcttcagtgtacagttccctgtaggtatgttctgaaccttgaatgtgactaaatctaaggacttgggaatggatgcggatcacatatattcttcaggctcagacaacttctctttatttaaaatcgtagtagaaatacttacacaatcaggaagcatatattgggttaaccacccactcacagaggtggtaggacttgtgctccaaagatcgggaaattttcatagctggagtttatattgaaaggtactattagtgtgaacaaagatttgcagtgggcgttagtatggcttttaataatgctatatagaaagtagattggtctgagccaacagcatgttctagaggtttggtggaaaaggttcaaaataggtagggcttagttagaatggtgaaggttttgacatgcaagtgcaggacagtaggttttaccagaggaggcatcatgaagccattttagaccttggacaatgatggtttgatttaatgaaaattgatattcctgagtccatacaggttaatgatctttgtctttatattactactaacttttttcttaatagatacaaagcatcacaaagactgatctctcaagatatccatagtaacacatacaatt

SEQ ID NO: 31308 - DNA, 1053 bp, Homo sapiens
aattgggttgtgttttagttggggttgctataacagaataccatagactaggcagctgaataaaaaagcaaaccttcttttcacagttctggaggctaggaagtcagatcagggtgctaactagcatggtcagattctggtgagagccctcttcctggtttgcacatacatggctgtcttcttgccatcttctcacatagcagagtgagagctctctagtatctcttacctcttcataagagcactcatcccatcaataagggctccacttatgacctaattacctcttaaatgacccacctcctaatgccatcacattagggattagggtgtcaacagatgaattttggggcaccataaacatgcagtccatagcaggttggttgttttcttgttttttattttgatgttcatattgttccagacttggccagtgggtacccctccaagctggggcttacgtcctttggacaggtgcttctctgtatttgatcttgttcttatgctgatataactttttgggcaggatttgaatttttcttgttcaggccccacatataatctactcttagcttattttgcatcatgaggaaccaatgtacttaaaaatagggcagtttgagttgagtcatctgtgatttaaggaatcatgaaatggcttcataaaaaacactgatgtcagtgttatgtattctcagcttatcagttctgtcacatgttgaaataacttgatcagtggggtagtgagccttgatgacagcaagaaatcagtctaggtatctttctgtactcaaaataatgtgataagaaaattgaattttagttgattgacttgatacattttgaaaactgtgttattgtctagggaagagacatgattcagggtgacaaaacaagatctgtaataattaaaggttatttggaataggttgggcagccactatgtttctgtagcaatgttgcttgtattgttttatctgatggcaattttattttgtttttgttggagtcagcactgcagtggtgcctgtcacacattttccttctgaaaca

SEQ ID NO: 31309 - DNA, 1043 bp, Homo sapiens
aaaaggtcaccaattttgtttatcttttcagaaaaaccaaccatttgttgatcttttgtattttatttcaatttcatttatatctgctctgatctttattatttcttctactaatttttgatttggtttggtcttgcttttctagttctttaagatgcattgttagattgttttctctgatgtcactttgtagtgcccttttacttttattctgacctttggagattagaatgaggtgtaaattctgagcctgagcctcagagattgcatgtttcctctcgggcctctgccattgctgtgagcacatgtttagttaaatctgttagaggaagtgagggagaacaaacccaggttgccgcacctgaagccagctaaccctcagacatgtaagcaagcacagctaaaatcagtagagctgcctagccaaaccccaactcatcccagacacatgagcaataaacttgtatgcccctgaggatttgtggttgatacagagcattgttgtgacattagacagttaatattgtgacatacgaacactgaattaacaatttttgtggctgggcatttctaggttttttctttttcttttttcccataaaaatttgtttcatttctcattattttctgagaatatatatgtaaggatgaatttactgtgtcaaagagcatataagaatctcagtacatagaaaaatcctttttagaaaggtcgtacctaccatgtaatgcagtttatgagattgcctcttttacagtcttactgttcttgatgtttggtatgttttctcttttaatgttttctaggctcactttaggtgaagcccagtctgtagtgatctgttagatgaacttctgtagcagttacaatctgttctacgtggttagttttataaacctcctgagttattatcattaacatttttatatgtatgtctttctctccaactaggctatatatttccttagggcagcacaaatatagcacaatgcataggtcctcaagtatgtagttagtagtacaatctgatttgagctacaat

SEQ ID NO: 31310 - DNA, 1044 bp, Homo sapiens
ttcaagcaccctcacttctcgagcgggagaaggtgcgggggaggggggtgggagggggaggggactgctgaacgtttcaggccaaggagacgctcgcggcggcggcggcggcggcatcttttaagactgacctgctttaaaagtgccactttaatggcctaggaaataactaaaatcggattacacgttacttaccaacgtctcctcctaaactggagcgccaggtcgtgtataaggagtcaatataggaaacgcagggctggaacctgaatgcaaatccatcagccgcccccaaatcgcgcaccaagggagcggcgctcgggagcccccagatcagcccatcgccggagctccgccagcgcgtcccccccgcacccccggcccctcctccgcgccaactgtgtaaatcagccgccgcagtcctctcgccgcgcatcgcaggcaaaatcccggcttaggaagcaaggaagcaagtgatctctctctctctctctctctctgtctctctctctctctctctctctctctctcctctctctgtctctctctctctcgctctctctctcgctctcgctctcgctctctctctctcgctttcgctgtccgcctttccctctcccccattatcggtcacaacctggcagctcttcaagagacaccctgtgaaattgagtgtcgggaagtcagcattctgtacccgtggattgatttgtaacttttatttgcaaatgagagagatgcctgtttggaaaattacagcccaaaaggtggagggtgatcaaattaagaacatctgagctgtattggtgggcggtatcgctaaacgcctccggggagcggtttccaagtgatttgcagtaatcccccaccttcatgatacatgggtgacgatttgaaagtacacatatttcctcatctgtttacatttgccgggggcggggggcataaaactgtagggcacagggagttgggaggggggcatttgcctgagagatgctggataccatttcgcgataaattagatacggacactggaacaattaa

SEQ ID NO: 31311 - DNA, 1144 bp, Homo sapiens
gacctaagtgtatggaaaaagtaatgctacactttaaaatatagttaatattttaactatattgttattttttatatatataactatatttaaatattttatatttatatataaatatatataaatataaaaatatatatataaatatatatataaacatatataaatatatataaaatatatataaatatataaatatatatattatatataactatatttatatattaaatatatattatatataactatggttatatatatatataatatataaatatagttatatatataatatatatattatatataactatagttatatatatatataaatatatatatatcaactgaatagcttattgagtattgaagggtgccaagccagtcagttttttataagttaagatactttctcagaatttagaagaaaattatatttaagggtaggggaacctaatatagtaaagaggagacatcactaccaatcttacataaataaaagtattgttggagaacactatgaacaattgtatggcaaaagattagataacctagatgaagtgaacaaattgctagaaagacacaaactactgagaccaacttaagaaatagaaaattcaaatatagactcaaaaatgctcaacaaaatactagcaaccaaatctggcaacaaaagaattatataccatgatccagtaagttttattccaggaataaaggttggtttaacatgaaaatcaattagcattacatactatatcaatgaaataaaagacacataattatctcaattgaagaagaaaaatatttggcaaaacacactttcatgataaaaacatttaacaaactaggagtaaaaagaaacttcctccacggggtaagtacatctacagaaaacataaataatttttttaaaaaacatagctaacatttggtagtgaaagtctgaatatttccctttaagatcaggaataagtcaaggatgtcagctctcacacttttattcaacactgtattgaaggttctagccagggaaattaggcaagaaaaataaaaagctcccatactagaaaggaagaaataaatttctattcacatatgaattggtcttgtatatagaaaatcctaaagaatccacatg

SEQ ID NO: 31312 - DNA, 1168 bp, Homo sapiens
agttcaaagttccacagatatctagggcaagggcaaaatgccccagagatttgagcatttttgctaaagcatagcaagctaaagcatagcaagagtgacctgtgctccagttcccaataagttcctcatctccatctgagaccacctcagcctggacttcattgtccatatcactatcagcattttggataagaccattcaacaagtctctaggaagtttcaaactttcccagattttcctgtcttcttctgagccctccaaactattctaagctctgcctgttactcagttccaaagttgcttccgcattttcaggctatttttatagcagtaccccactatcctggtaccagttttctgtattcgtctgttttcacattgctgtaaagaatgacctgagactgggtgatttataaaggagagaggtttaattgactcacagttctgtatggctggggagacctcaggaaacttacaatcatggcagaaagtgaaggggaaccaaggcacatcttacatggtggcaggagagagagagcaagtagaaaactgtcaaacactttaaaaccatcagatctcatgagaactctcactgtcatgagaacagcatggaggaacaaccctcatgatctagtcacctcccaccaagtccctctctcgacacatgtggattacaatttgagatgagatttgggtggagacacacagccaaaccatatcaagaggttaggcaactatcatgaagtttcatagctgagaagtggtagaatggggtatagacccatcctgtctagctccagagctctgttcataatcaccatactccgtgctgttccctttacctttggcttttccttcatatgctctcaaactatgagactctgatctttttactcagtctggatctgtttacctaaattcagcagtagctgctcttgctcctattctccccaagtagattcaaacctttgccctttagttttagtagtcaattccagttcatactttattgatgatattgacattttattatatggattttctcagtgtccctgtcctcagttttaatattatttacatatgtttacttttcttctttcttctgtgtttcatagaaatacatttaccactcttgtttcaaggtaatccctccctgtatgttccaga

SEQ ID NO: 31313 - DNA, 1162 bp, Homo sapiens
tgccgaacctgcagatttttgttatgctgtgaaggcttttgttataaacaaaagtatatgtggggatctaatgtacggcatagtctgtagttagcaatactgtattgtgtacttgaaatttgctaagagagatcttaaatgttctcaccatgggggaagagaggtaactaggtgagatgatagatgtgccaactaacttgattgtggtaatcatttgacaatgcagtgtacatgtatatcagatcatcatgttatacaccttaaatttgtgcagttttatttgtcaatcatacctcaataaagctggagaaaagaacatgataataaaataagtcaaattatattgcttatttattatgaagtttaaataaaatttgctgttccagcttacaaagtccaaaagataagaaaaaaattctcagcatgaataaactgggaatgtatcttcacatcaaaaattcatttttcaatgcatttaatggtttactcatgctgagaactacttcttatcttttgaacttttgaaccctgtatgtatggagatgagcaaaaatgtatatgagtttcttttaaatgtactggaataccacatgtaaaacaaaacaagtagaaaactcaagacccagcaatacacattgatcaattatgtgataacataataatatttgtactgggctttaggcatgttatatgcaatactgaaatgaattttgctatgagaaatatcataggcatcagccattgaaaggtatgcctaacatcttttgtaaagcaaatcttgcttgaatttaactaacagtcacaagtctgggccagtaagcaacacagtcagtgtcccctccacccttcataaatctatttgcagtagaaatctcattaacattttaattgttttgtatctaaagttgctctcagtgccacatttaaagggctcaggctcattaaaatttaaggaccagagagctcatagtctactctaatgacctagtgatggttgtaaaggctctaaatattttttggttctttgaataactgaggaattccttgtagtggctaagtatgcctgaagataggttgttgcattgcccaatttcaatcccatcagaaagctctctccctcttttccctcatctaaatcctagggtctcttaaagtccctttc

SEQ ID NO: 31314 - DNA, 1217 bp, Homo sapiens
tttgtcaactgcaaatttaaatctcattttctcttaaaggaacttgataaaaagtttgaaatgaaattctgagtaagaaaggtaatgtgcttttactgcagaagccaatattctgcacttgctatttcttgtaataatatatcttccttgccatttgaatttgaagtatatgatacctgtgtgcacttgtgtgcttgtgcaattttactcattcttatttatttctgggtattgtgcaccagaaatacactaacaatattaccaacaacaaagaccattgtgatttatcacttggtttggtaggggtaatttcacttattagttatttttgtaactaaattccttattttttcataaaagcctactaataatggttgtagctataatggaacattctactattctctattggagtttaggctagtcaatgttagaaactacgaacatgataatcaatcattaaaattcccttaagtgattagagtattttatgttgggtaaagaagatgaaacttgctcccaaagttctctgctctcaggtcagtctggtgagtctggcatttgaagggtagaggtagaagataggaggaagcagctgatgggcctgccaccaatgggttatttttcagataggagggtcctaggaacccagataacctggtcagacttttttgagggtaatttaataatacacttcctgagagaggcaaattagaagaacagagaagacaaagccaaaaattgaatcctacataagacaaagggaggagagtagtgacagtcaagagaatagagaaactcaaaagatattaaaggtacaaatgtagctgcacaggttaggatctcggtctcaacaggagctggacactctattggtcaagaacagtaaaaagttggatgtgcaggacatgatgcattattattatatatttttgaacatgaataatctgctctaatgtactatatttctcaaaatttattctctggatcgctgcttccgttgtattttaagaagtgttacatgaagtaaagtttttgtgttcaaataagtttggaaaatgctttgttaagtaacctaacatactattcattcttgtaaggactttccagagtctttaatatgctaatgtatatttttactcccatagaagggcatatagatttctgtgtattcaaacccatttgactctgtagcctttctaatggggatatcttga

SEQ ID NO: 31315 - DNA, 1026 bp, Homo sapiens
gtgtcaaaagtaaatgaattcaagaataaccacttgaaaaggaattctcccttaatgtctttggtgcaaaaatgtgctcagattgtactggctctgaagagtgagactcaaagaagtaaattactttctagctactagttttcaattgctactggctcaaagtgctagctaaccttgcaaaagtggagcagagaagaaagcagtttgcatttttctcctaatcaaaatggaagagagtgagtgagataccatagtgtcacagagatttctgatggcagaagtttataaatagtcataaacatctcattgcaagtctcaacaagaaccacttaaatgtcctgtatacatttttcaggcaatttttatttggaataaagggtctaggaaatggttttgaggtgtgaaaactgatgtttatagagagtaaactgttttctttgaaggcctttcaagtatatattcagcagtcatgtaattatgtaaatttgtcttggacagttaaggcagttagaagctagtactaatgaaatgctcagttatagattcaaccctggtctgggccagtgtgtttcagccaaagagaagcctttagcaaggcccaggaagcatctctgaggcatccctgcaatttgttgagcttctttggtcacaaggggactgaggacataaaaatcaaggcttttcccagaaaacctgcctgaactgcatggcagttgcatcctctgtgtctcaaatggatagaactgaatatactacacattttggaatgaagagggctgttgtttttttcaccagtgaatctgagtatggtagaatgtgtatggaataagcagtgagggatatctttatgatgtgaaatggtttaaatgagtttaagaaatcgatgacttcattcacaaaatgactccaagggattgttcactttttgaatggctactacttttctcccatctgtaaaatggaggcagtaatgtctagtttcaggattgtggaaaggaataaataagatactgtctggggagcacc

SEQ ID NO: 31316 - DNA, 1033 bp, Homo sapiens
gcttgactctaagttgaggcttcctggaatgccaataaaggctatactcttgacttcattctgttctgctggaatttccacttgctgagtttgatggagaaaagcatccccacaatagtaatgcatgagtctttaaatgactgtgtgtcttagtccttattaatgcagatgagactttaataaattatttactgagcacttaatatttgccaggcactattccaagttttttttttatataaactgcttatttaatctctgtaatgtatccacaaagtagatactatcactacttaaagctgaggcacagagtagttatgccagttgcccaaggtcagacaggtagtaagtagaaaagcctggattcagtttcagacagcctgattgcagagtccaatcccttcactacggcattctgtgtctctccggttgagtacaagtcccggaggacttgtctttgattggtttcattagtaaaccaacattagctaatgttctttgccactctgaatgctggtgaaaagctggcaatagaagataattattttctggaagatgagtattacatataacggctgtgtcatcctctgattcaaggcagtagagtgtagtcgttaaaattgttctggaattagactttgtgatgttttagctgagtcctcagatttccagttggtgactttggaagttatttattctctccgtaccttaatttcttcagtctgtacaatgaataagaggaacagttcttacctgatagggtaatggaatggttaaatgaggatctatacaaattacttgatccagtgcttcacatgtagcaagcacccaataaacaaccaccacatcactaccatcattatcaccaccaccatcaaagtgatttggcagaaaggtagtcatgctataatgcctagcagccagttatattctttgttcatcttaatgtgaatgagataagtcaatcataaagttacctaggattgagtggactttttatagacctggttatccaaactatatgtggatctat

SEQ ID NO: 31317 - DNA, 1029 bp, Homo sapiens
ttcccaatgttagcccttctaatgagctaactttagtttacttcctctgtgtgctatagggaagacctatacttcctctgtgtgctatagggaagaaaaatatacaaagactttttttgtttactctgccttctttttgttagacccttgtgtcttccctatagaacagtgctttgtataatacttaataaccatattgaatttgccaataaaccaagcatcatttcctctaaaattttccaccttaccaaagtaaacttctaaaaagcaaattcaggggaatatacaaaactgtgcatatttatcatgggttgaaaaaaattcatatttttcttattttgtctaatctatgactttttacttttaacataatttcctttatatctattcattattttacagaatataagatatttttcaaaatttagagtaagtactcagttgagtcccttgtgtgaaataatagacgaattggtttgtgtgttacctctccatctgccatcctaagggaagttgggaaatctcaggcaagattaatgacaatagaaattttgttccatgattaacttatattctgtcagacagccttttggaacagttttataaccttctttcctctatgctatttccccacactatttgcttaaagatttttttttcaaattagtcatcattcacttcttatttcctttgtagaaaaattaaaagttataaaagagagaaaataccaaaatactacttatactttgattaaatcttgaaataatttttaaatggcacctgcaacttaccctagacctggtgaaattcttgtgaggacaatgttaactcatccaacattaataggatggtacttatgtggcaggcattgtgctcagagcttaattaagtttctgctccatcttcaaaagactaagagtatagttggagaggagatacataagcaaaaatccccaaaaaggtaacaagagcagtatacaagttgttctgaaaataagggagaggtgctgacttctcctggaggaagct

SEQ ID NO: 31318 - DNA, 1075 bp, Homo sapiens
tgtaaattcaaacagttttacattcacagttgttcatctcccattggacagaagcagaccaacaattcagatttctgatgtttacattagtacttagtactttcatattcttaggaaaggattttttttaacccctttcctaatctctgaaatgcccaagtgttctaagtagcatggttgattaacatataacgaatctattagtagtgcatttaatgatgatgaaatgctacacacatttaaaataacagatataatagctcactgaacagaattatcctaaagttattttggaatcctcagaaaacatttacttgttctctgaagttatctgtgcagactattgtgatttcgtgaagggagaactcaagatcgtacacctacatttcattaacttttttggtcatgtttcatgtgtctctaaggcaatagctacagtaactttagttggtttttggctactatctcacttgtatcaaatagattcatagaaaaatatggtgacagcattggcgggaagtttggaggacatctaattcaaacctctcatatttaggacaaagaaataagaaccctggcttgggttttagggcacctgatgaggaactagaacttcagatatactgtttattacacaaaaatagatttttaaatttgagattttttgaccaaaaaattttatcataaggcagtaaactcaggtttcatagatctacataggattacttgttggatataacccatttaagtttaaatacccaattcttttttgagggctggactctggtcattctggcagttgattcttctattttcctacgagttctgtattatgagaatttatgctctccattccaataatggaataaaataagagcatgatactggagattgccatcccatgtggtgtgttaaagattcagtctatcctgttgcagtctcattgggaaggagcaatagggagacatatgtgatcactgcatcatacatattagatggtaaataaaatttaataaagagcaaagatctttttcctgttagggaataaatttgagcataattgcaaattacaatt

SEQ ID NO: 31319 - DNA, 1054 bp, Homo sapiens
tataaaatatatcacagttttttcattgcttcatttttaatacattataaaccttaagcaattgaaagtgtcctgtgcccttgagctttaagagatgagtttaaaaaacttataacatgtaacataatccaattgaccaaacatatgttgagttttaactatttgctaaggattgtattaagtactaggagtacaaagatgaataatgtaggattcctcacttcctttgccttattcagctttttccttactccttttagtttttcactcaataggtattttttctcctaattttaaggtctaccttttaactgtaaatggctagattggactacatggtgtctaagttttcccccaattctgcaattctatgccttctaaatgtatgctttgaatgctaacatggatatgtgcaaacactgaggcaggttttgcttagacatgcagcaagtttgaaattcgtttatatacacgtttaagaaactcagcttcggagtcagacgggcctaggtacaaatatttaccacttaggcaagctaccaaatctctgaatttttctctgtggtgtattttataaagtagggataaaaatactacttcctttataaagcattatgaagactatatgagataatgcatgtaagagacttaaacaggtgtgttcagaatataataaactcgaaataagtattagtctttattcatcaggcaatataaatataggtaatttacttgtctggaaaaatattcctaagtattcgcaagttaggtaaagtgcatttgtccttattttacaagagaagttagtgaactttaatgaggatgacaggataaatgtattttctgtctatgctagtcatgttcttgtcaagaaccacgctcagaaattctttgttggtagcagactatcgcacagtggaatcatcttacatctagtgttttcattgctcagcactgtgctgaaaacaacagctctaccatgtttgcccaatgagtaaatgattggctggatgaatagatgaaaatgattgctgttaatacactaaatataaaa

SEQ ID NO: 31320 - DNA, 1103 bp, Homo sapiens
atttatcttttgtcttaggaggcttttaaagttttctctttatccttaatgcattctagttttattgtaatgcatttaaatatgaatttacttttaatttatctggctttcttccagcttttgctttctgtctgagaatacatttttctttttctttttctttttctttttcttttttttttttttgagacagagtcttgctctgtccccaaggctggagtgcagtagggtgatcttggctcactgcaaactctgcctcccaggttcaagcgattctcctacctcagcctcctgagtaggtggggttacaggcgtgtgccaccatgcccagctaatttttgtatttttagtagagatgttgtttcaccatgttggccaggctggtcttgaactcctgacctcaaaatctgcacgcttcagcctcccaaagtgctgggattacaggcgtgaaccaccgtgcccggccacattttatttcagttcttaaaaattcttaggcatcattatgattctttttaaaaatattggtttttcaccattctctcaacttgctacttctggaactcctgttagtgatgtgtgggagcagagagacattagtagtgctcaccaatattggaatagttattccttcaaggacatatgtgtgactatacctcttaggcccttgcagttaagcagagctatgtaactaattatggacaataaaatgtgagagaagtgatgtgtgttattgccaagttgaagcaaggaaaagcccctgcgcaactctctagtctctcttttcttctgctttagcaattacgacagagggcctgaatgaatggtaaacttctatgaagatactgatatttgggaatatttgctactgcaatgttgactctcttatcctgagtaaaatagaaagcctctcaagctaatccgcatgttacctaaaattctcttacatagttgtcatttacttgtttctctggtataatctttcagttcagtaattttttctttagctgtgttcagctcaggattagtctcttttccagttttaattttagttatggtaattttctttctagcatttataactccatcataaccacattctc

SEQ ID NO: 31321 - DNA, 1062 bp, Homo sapiens
ggcctctctaaaaatttttgcttctcccttgagtggcataggaagtcattggaggactgtgaactgagaaatgatatgatctagctaacatttttacaggagtataatgaccgttaggttgttgccaccaggctcaaataccaccactcataaaggcatttttgaaatagactgaggtaattcctcacggaggggaactgctactgtcaaacagatgtcatcagaactataagaatatattagactctttcaacatcgagaaaatgatcaggaattgtaaggagtcactatggtgggaattttttttttttttaatttgagttgagaacctgtctgtattctttttttaccaaaaaaataaagacttgctcaagaaagacatgtgtccctatcagttctaaaaatatcatatctgctctgatggttaattgctgccagattaaaaaaattcttattaaaacaagttttatgttatgagaattgtaggtgaatttagaagccagagatacaagaatgtcttcagcttgtttgaacgtgttgttgttaaatagaattttgaaaactgatgaatagaataaaaaatttatcctgtttttctcaaactatgtctaagaaccaaataattgattagaaggatagtatttttatagaagtttatcaattagtaaagaactgtggttatatgaactatccattaatgaacctactacttataaaatgtatccccactcaaacatatcttcagtcagatatctgttctgattctaccccattgtgtcaactccctttctgttcgtatatcagtataacatgcttttctaatcagcatgttagatgtggatatattgattagtaaaatgcaaattatttctgaatgaaagtagtaatcacataaaagaaatgggattttataaagttcaaaaaagtggtcctggagaaccatttgagcctttctcaaaattattaataaacagtggtctaacagagttatactagttatcatttgaagaagaaaaccatcatggattatcaaagataatgcttttaaagtgaaagttttga

SEQ ID NO: 31322 - DNA, 1046 bp, Homo sapiens
tctttccctctgacccatcctgcttggtcattagaggaagcgtcacagaaggaagaaagcagtattatgcggtgccttccaagacacagacacaatggagattgctgtggcaccaatgcgtatagagatgtattaatgtgatgataagtagaggggctgagatcttgtcagtactatcttattgcatgggaagtttacagattaaattcttttttctgtgtcgtattttattcatctttaatatcccttataatagcttttcagctgtagaagaaacctcctttcttttcttttcttttccaactacctctttcatagggtcaggagctccctctgagtccactactcttagatgatttgtccccaataatttatatatcatcacttaggttatttttagttgattattttttggggtataaaagagtgaagtgcttataaaagcttcctggcaaggagagccagagtgagaaggtacagctgtgagtaatgagtctaccacttatctctgggggcttgcaggacaggtttttagcctgtttctcaacatttctttggacttgtttgtaaccttggtagtcacagtgtgggagggtaaaagggaagagcagggctatgtaagtagcaatctaatatataccgtctctttctagatgagattttatgatctaatgtattctttaaaaggaaatacaattgtagaaattttcataggaattcagagaatcactgcagaattatccttttaatcatataggtgcacaacaaatacaaatccacatacatatttctttttctctacctcatccccacacccctcctgacaaaactcaaactgtgttttaagtgttctgtgcttggtggtggctgctgccattttcggcaattattttattttttttcaaaatctgttgctttgaaaggccccgtagtgttatgtagggtgtaggtctacacagttattacctactgtcagcaaaactgaatagctgggagggaataattatacaatcccttttgccataagccacttctgaacatattgc

SEQ ID NO: 31323 - DNA, 1035 bp, Homo sapiens
tggtggtggatttaagagaatttgttttccttcacaaatgaaatgatgtatgcaggatttgatatgtaattctttgagtaagagataattgctgtacacactaaccaactatttgcatttagttagcaacagtttctactgaactttatctcatgtttccttaagtaaatgtttggaagtatgtttgtcttatttagtaactttaaaaaaattttaccacatctcaatgcttctcaaaggttatctaaatatctactcaaggaaaacattctttagttactcagcatcacaggcttcagttttctcatatgtatgacggcttgtaatgcataatattcttaccagccctgacatgcagtagtagttatttatatggtattgtattgtgtattttagaactacattcaattacaattcagtctgtattcattttaggaaggatgcatgggaatgtgttctgaagcagggcctctcaaagccaagtccttaaaccacataccttagactaatcttggatgctggcagaaaatgcagattccttggttctgtggactgaattgtctcccttcttcaaattcatacattgaattcctaagctccaatgtgtctgtttttgaaggtagggattttaggagataagtttaaatgagctcataaaggttcattctaatccaatgcaattggtggcctttataagaagacaaaaagcgttctctttctctgtctctttctccacacctgtgcacactgagaaaaggccatgtgaggatgcagcaagaaagtggttgcctgcaagcctagaagacagccctcacattcaaaatccaaccatgctgccattccgatcttgcaattccagcctccagaacggtgagaaaataaataaatttctgttgtgtaggccactcgagctatggtattttgttatgacagcccaaactaagacagattttggcaccaaaaagcagggttgctgctgtaacaaatacctaaaaatatgaaagcagctttggatctgggtaatggtaggctaga

SEQ ID NO: 31324 - DNA, 1024 bp, Homo sapiens
tgcctattctgggtgtgttgtataaatggaatcttatgaatgtgactgacgtctttcacttagcaaaatgtttccaggttcatccatattgtagcatgggtttcaatacttcattcctttaatattccattgtatggaaacaccacattttacttgtcagtatatcagttgatagacatttgggttgttttcactttttggttactatgaacaatgatgctataaacatttatgtgcaagttttaatgtgaatatatacctaggtatctatgcatcataccgtattgctgtgttttaccctttcgtgccattttgatcttagagctggcttcatgatatacctatatccctgcatcccagacacaagcatctgtcttcaaatggtcttgtttcatttgtctcaattttaggccatctgcttttcttatgttcatattctctgtcatgtttttatataaatccagggtttataatgccaaccaaatgcatatctttaactcagactatttctatggactttaaatctctgtatctaaatgctctttaccagataggtcttttttaatatcctacagggacttctaaatcaattttttatttgcctccattctaatgtgctcctcctcctatatattatactatgcgaatgacacatcctaataagaaatccaatagccatatgaggctcattcctttccttatccaattcatcaccaaaccctattgattcagtttcctaaacatatcatgaatctgttacttcttctccactctcactgacattgccttagtttaagctctcgtcttctctgtgcactggcctcttgtcactctgtagatcattcccttcctcttccatctattcttcctgagcctgccagaaggattgctctgaaacacagatctatgcatatcactcccctgtctaaaatatctcaatgattccgagtaatctgcagaataaaatgcaaacttctgggcttggttcaccaaacctttcacaatctgaccctaatgatctctc

SEQ ID NO: 31325 - DNA, 1047 bp, Homo sapiens
gataacttgattctttcaaaagaactttcagtaatctcagtttgatacattggactctttaagcatcttctactttatttcactataaatagtattgggctatattttaagtgtccctttactggctcaactttctcaactgattgttagttctttgagttatggaactatttctgttttacctttgccatctgtgcactctgtacattggtaagcactaaataatatgttgaatgaatgcatgagttctatatgctgtaaatattccaagaactctcggatcttatgtttcaggttctctgtgtttcatctgaccctacttcttccatatctagagccagagacagtattaaatacttgatatgcaataactggtggcactcttattctaatgcccttttcttacacctattttcatgccaactgctagcttgcttttctttttggttctcacagttattcttgctgttttgccttagttttggcaaggataaatgcttagactgatctccagaggccacaggacttgatctcactctatggctagtgagagatctgtgtgtgcctagtcttcatgctgggaccttattattctgtgcagctctgcaggtgactgtttgcgaaaggatataatgggaaatgaaacatttgcctctgtaatagttattgcttaaccactaaagaaaagtccaaatacatttccaagctttctgtaagtttcttctgactctccctttaaacaattgaatttattagacttttaaaaaggaaggagattgggggcgaaatgggaattcaacccctgcatatcattttttcctcacacacgtagttctagaatcacttctttaaacatctacttctgttgtaaggaaaatagcctttattttggaaccccatggggcttctgatttctctcattcaaatgaatgtatttgcagtttggaggaataattaatagggctctcctgttgaatgttgaatgagagagtgaatgccttttagccaaaagaggttcttgtttgtacacataaaatgtgatattct

SEQ ID NO: 31326 - DNA, 1029 bp, Homo sapiens
gaattcacatgtttaaaagatgctttcccacccgtaaaagtgtcagtgtgtgttcattgtacacgtagttaaaatgtgtgttgtagatttgaacagagaccttttaacttagactcaagattatgtgattattaaaacacactcacatctcaaatccttggttgtcttataatgtcatgacctttaactacaagaagagatgcaaatactgcatattctcacaatacttaagcggttagaggggcattttagacttctttaggtttttccacttattctcagagggttagcagaattgatgagtgagtatcaggtgggtttgatacatttgggcaggaagagagcaaacttctctattagctgtcaaatatacatcaatacgtgatgccttccctgtatttaacagcagttcgctagaccatctcccagtattctgttgatctagtaacttcaagttttttgtcacatagaatgttataatttaatcaaaaaggtaagtggcaaccttctttgagaaagtcttatacctgtaatgtaacttcatgaatccaaagataaataatagaacagtggtctttaaccttagctacatatagaggactttagagaactgctgatggctgagatccattcccagagattctggagtacaaaattttaggaattcaattttttaaaagattctaaggtgattataatttgcaaccaatttcgagaaccactgatatgatgtagcacatacagatcaccattggatcttcctaagatgcagattcattttctggggtgtctttaagtgggggcctgagagtttacattccaaataagctcacaggaaaagctgatgctgctggttcatgaaccacactggagtagagggtgtgtagaatttatctttttttttttcctctttttcataatcttctactctccagaacttggatgcttgttttaattccatactatatccctggagttttttttttctttcccattttgcttgtgagtttttgctcacaagtttttcta

SEQ ID NO: 31327 - DNA, 1029 bp, Homo sapiens
aaatgaaaaattctcattctgaagaaaacctgatgcttctattagtcgcatgatgattacatctgtaaggattccagtcagaatttatagcagtcaataaacaagctcaaaactcctaaaaagtaacggatgagattgaatctcattttcccctacttaaattagaacattattaactctgtgttgtttggaacttaggagaaggttcattttatttttgttttttaggttgttaaaatccaagtagagttaactattgaactacaaattgttttttaaggaaaagtaatgggtaattttatggcatgggctttgagttcatcacaaattttcaacactaatgaaattattatatccttatgttatcatttttggtaacttttttatattgggtttaagtaaccatcttggcaataatttctaagctaattaattatatatgccaacagagttcagtttgatttagttgtatattcaattccctttttattgtggtggaactaggaaataaactctaattcaattttaagtacaaataattaaatgaattgggcttatgaatgaaatcttctcattggcaatgccaggaggtcaattaactagttttacagtatttctgtgaacgaaaatgcatctccaatcgtgtgataaatattcgctgtataggactgaaaacactgttgattttattaatctttcagttagtctggagtagatattttcattagatttacagaaaccactatacatttttgaaagtaacatttcttaatatgaatttgatgtggaagactatcatctcttttactcgaccaaaataaaactctttggagacactttatttttatttcgttttactaaagcaatgtttgtttaggttatgttgtgaagtatatacaaaccatgtggattttgatactgaaattcagttcaaatgtatatcttctataaacattaaaagagctctttcataaatgtcctaaaaacagtgattagaatcgtgcctgaaacagcatgattctctgattc

SEQ ID NO: 31328 - DNA, 1606 bp, Homo sapiens
gggccttggatggggctcagaagtgaggaggactgaactgtaagtttcagaagcctcctggtaaatttgcctctgaaagcagaaatggtacccctgtcagtttcaagggcaggccttccagaaggagtaagagctgtagcaatcaggtaaggtgtggactaaagatagaacagtggcagcaaggactaaatgttagagtcacctgggagacttttaaataaaacatttctatgctccagatttctagagattaatacccaaattgtctgggatggtgccaggttattgacattatttagctcttgtccctcctgtaattctaaaatgcagccaacgtttaaagctactgatagttaataataattgtggtgaagataattttggagctaccatatagggaacatctcataccaagtgtgagatggcactgtatcaaacactttataggaattatcttcttaatactcatgacctgcagagatatgtgtatctccccatcttaacaaggaggattctgagctccagggaagtgccttagctcatacagcaagtgcaggaacctggatctaaactctagccaggcctggctcattttatacccacatatttctacctccttaggtagtagcatctttgagagggccacagaaaaagcacaagccctcacagaaagaaccagacagctgattgtctaccactagggcaatttgtaaggattgtctgccaaagaagtcctgggaagtccaggaacctccacacatacctgcagagacagaggtcactgttaccatatctggatgtcaaaaaggtcttttggaaaccaaggttttatcctttttttgttcttcccctcatctcctcacccccaacaccaagggttaaattcaacatcagtagctgtggcacaagtcctcctaacaccttttgtcctcattcaccccgtcacttttgctgctcacaaagtgctccttgctccctgggtagatactactacccctgtctgtaggtttcttttttttcctccattaatgctttccttgccccctgcccccgcttcttcctatgcatcatctgtagcctactgaagtgtgtttttatatacctgtgtatacccggatatacacattgggaaatgcttcccaattcctggcttaaactcttgtgctccattactcatttaccaaatagaagtgtcttcagctgcacttaatttcaaattccttggtcatgtttcggtacctccctttctcctgataagtgggaaatttcatagcctgggaactgaatgggtccatactagcccaggtacaatttgagaagcttaatatcataatgcacttaaaataacctgcagcaatcgaacaccaatctgtacctttataggaagtttatgcaccatggtttaccccatctagctggaagttggcttcaaaatcagccaggctccccattggcccataaaattagtggtgtccatgcaaggttcctaacttgtctggacatgggataattcccacggtagctgtgacttggtgatttgctctggttcccttctccccgaataaataggcaggtgaaatgcagaggaaggagcatgggaggtaga

SEQ ID NO: 31329 - DNA, 1030 bp, Homo sapiens
taagtagtgtgagtgtatatatgtaatattaactctttgaagcatggagtttgtttttctaaaacaaagtttttagcctagtttttaggtatcttagcattgtccttttcttgttggattccactaagaatttaatgtcctttaaatatattgacagcatgacccaagaatattcatgatttcctcttcccttttaaaatataaactttaacttttttcactaatctagagattttcattttgacccaagactgacaattttaagaggatttttgacagctgtgactgtcaagaacagaacaggataaatgattaaactgggtaaatccaaaaaaccaactgcccatagcaaaaaatatatgtgtgtgtgtatatatatatatatatatatatatatacacacacacatatatatttatttctggtttttagaaataaatatgtcaaacgaatataattgtatttgtcctgagccccctttcctgagaggattgagttctaactgcttatcagccattgttcactgccatgcaaggatttagaagagagaggaaacaaacattctatagtttcataggcattgatccgtataaaaatttactctcccattaaaatagtttaaattactaaaaagaaactaagatcatagtgaactttgagttttattttacagtcaaattatgaatgggaatcagataatggcatttatttatttatttatttatttatttatttatttatttgagacagagtttcactcttgtctctcaggctagagtacagtggcgcgatctctgctcactgcaacctccgcctcccaggtacaagcgattctcctgcttcagcctccggagtagctgggattacaagcatgcgtcaccaagcccaactaattttgtatttttagtagagatggggtttctccatattgggcaggctggtcttgaactcccaagctcaggtgatcctcctgccttggcctcccaaagtgctgggattacaggcatgagccattgcacctggcctaatg

SEQ ID NO: 31330 - DNA, 1095 bp, Homo sapiens
cttatctcaaaatttcagtcaccatccacttaccatgtacttttttcgttattgaagcattccagatgcttcctttttgaaaaagaaaaaaggactaaatttaacggtatgtacagagactattgtgtgtgtgtcttgggaggagtataaatatgagctcccattaaagtaagatcttctaaattgagaattgtaagttgtttttatgcttccgttcgtgtggctctgtgctgtgtctgaggaacataggaatgaagaagacattgtgttggctcacaggacgtctatagtcacctgaggaaagatacaaataaccaagtatgagttaactagtggtttccaacaaggaacgactgtacccccaggagacatttgccagtcgagatggggatttacagcaggaagttagatatataaatataaagattagcagagcactgggctaaagatatatatatatatggtagtaataacacaatagttcttgaaatcaaaagactgataaaattatccagcaagagtgtgtgggtgatgaggacactagatgagggacacctgcaatcaaaaggatggacacaaaggaataccaaagataactgaataaaataataataatattgaacattttgtagaacccatactatttttaaaaagttctcctaagcacttatatgaatgctcataattagcctgttattgtcagcgtttttgtataatgattgaagcaggaatcaacagtatcaaatgcaacagagacatcattacaatgagtactaaaagtgtccatagatctggcaattaggaggtcattggaagccagagcccagtgggtagaaaagtaaaatgttgatgggcaagtagagaagtttaagccaaaaaagtttggattaaaaggaaaggaaaagaaaataaatgaccatgttataatgggaacaaactaaaaagaggtcatgtttttcatggtggaagacatggaagaatgtaagaggagcagccatcgtttatacacctcgaggaaaccgaagaagatgccttatcaactctgagaggactgggaagtttgacaaaccaggacaggcaaagagacataagagg

SEQ ID NO: 31331 - DNA, 1037 bp, Homo sapiens
tcacactgtccactacaatggcatatatatagtggtgggtaactaataattatttgagaagccaataacaacatatttaatgggtaagcaggtggcctagtgtcctgaccttagtttagtttctctcattgttctcaatttcatcctcaaatgattctatgtaaaatttctgggtctgtaccataagcttcccaaatctgtaagactagaaaataccttagtttattgttcaaaagtaatatttcagataccaaaattatgacttgtctctttcttcacatcaaaattagagtgcattcattctaattaaaatgaaatattattttatttcatttaatccaaggttaaataatgatgtcattctatgatggttcatttttaacagagacccaccgaagtttctttttgtatgtctagttacaagaggctaattctgtttgactattcacttgcagatataaatgaatgtaccattgacaatggtggctgtcaagatcgatgctgtaatacagttggcagttattactgcaaatgtcaagctggccagaagctggaggaagatggcaaaggatgtgaaggtaacaggactgtctgcttactgataagggaagagagaacatctatgtaatgcaaaagaggaggttgtcttttatccagagccagttgaagtgcctgtgttgaatgttgtcaagagcacagatcttcctctcatgtctagattacagtattgtaaccctaagaacatttcaagtagcttattatgggaaacatatgattatatgctggtttggttgtgtcatgttctgattatggaatttcaatcattcatttaaatccctggataaagtacatattttttaaagcatttcatttaattctaaagtaaaaatgatacttatcataaaatactcatatgttgctacaatgtaaatggaggggcacaaaactaaccacaggaataatattcttggtatagaattagctttttgcacaaacctcaattttctgtttccttttaaaattaattccttcattta

SEQ ID NO: 31332 - DNA, 1024 bp, Homo sapiens
agagatatggatcaatggaacagaacagagccctcagaaataatgccacgtatctacaactatctgatctttgacaaacctgagaaaaacaagcaatggggaaaggattccctatttaataaatggtgctgggaaaactggctagccatatgtagaaagctgaaactggatcccttccttacactttatacaaaaattaattcaagatggattaaggacttaaacattagacctaaaaccataaaaaccctagaagaaaacctaggcactaccattcaggacatagacatgggcaaggacttcatgtctaaaacaccaaaagcaatggcaacaaaagccaaaattgacaaatgggatctaattaaactacagaacttctgcacagcaaaagaaactaccatcagagtgaacaggcaacctacaaaatgggagaaaattttcgcaacctactcatctggaaattttttaaaagcaaaatgtttaaaattcaaggatttagtagagagcattttgagaaatggcttaattgcatattctggaaatagaaaacttattggatagggcagagagtatattcagggaactagtggatgatttattggggctagacagaggacagtttcaactcaataggtaaatcccctaggtaagtggataggaatgtggtttctgatggaggacatctgagtagaggaataatagggtggaaatgtgatttctgaaagttgttctgggcatgagtcataggatgttatagaaagacaaaaagacatggaaatgacagggataccatttatgggccagtgaaattgcctagctattaatatccataagttgtataaagagggaagaatcagttaattctgatgacacaatggacccaagggaaaggggacatatcaaagtctctttaagtaagatgatgatgaataataaatctattatcgatagcagaaatgccaaatgcagtatgtagaataagtgcatctttaaaagcactaaacagaaatatcacattccaacc

SEQ ID NO: 31333 - DNA, 1014 bp, Homo sapiens
cataggaccaggggttgggtttttatactccacatgaaccagtcatttgatttgtgctgtcccagaaagggaacatgtccttggataagggagctatcttcagcaaaagcaccccaaggaggggtgacagctaaaggctgtagactggcggcactcctggcacgtggggtggaagccttcgttactgaaaggagatccgggtggtagatctgatagcatccactacagtagcctatcatgtgaagaggttgacacatttagtgagtgcaaattgagctgttttgagctgagggactctcataacttggcacacgtaattgagcagttgctgctttctttgcctacctgcttgaatccctgacgttttagttttctttgcatatttcgaaaaccaacaagtgatgtgctttgttttctgatattttgtgttacaaataaatatgaagacttcatagatttaaatgacagtgggtctgttatattgctatctgtgtgtagtttttcttaaaatattagggtagatttcaatatggtttctctgatgaccttgtataatttgaatggacacttttaattagagcctgcaaaatttctaaatgtgccatatggtttgcataaagatttagaataaaagtaaggataattattgtctgtggaatagctaaaagaatgttcaactagccaactatcaaatgtgattcagatgttaaaaaataaaaaactgaagcaacagtaatcagtttggaattacatgtaataattatttctggattttttattttctgtagaatttgtggtaaaatcttaatgaaagtattaaagactccctcctaaaaaaaagtacagacatacttgtcttattgcacttcactttactgtgctttgcagatactgcagtttttacaaattgaaggtttgtggcaaccccatgtcaagcaagtctatcagcaccatatatttcccaatagcatgtgctcacttcatgtctctgtgtcatgttttggtaattctagc

SEQ ID NO: 31334 - DNA, 1052 bp, Homo sapiens
agatcaagaataattgatattctatgtgacccattaaaataggtcttatttaaggcaatactgtttcaaattgtatctcttttaagtaggctaacctgaatgtaggcaccctttttttgcactttacagcaaaactaagcaattcccgcaaccatcccgatcagaggaccttgaactgagagcacatgtttaatgatgcccagactagctattgattaaacactgacagtgttcagaggaattgagaatcaaaaagtctcccccatggccagctctgccatgctcacttcttaatagatggcaaaggaggattctaaatgagatccgctgccctgcgcatcctcagaactccacaggcaatgggattaatttctgctttgcagttttttggaactactatgtctaaaatgtccatccttctccagaatttactacagatgtccctccttttttattttttgttcctcttctttgaagaaaaaaagttttcatatgaatttaaggcatagaacaatatcctttcaaatgtggaatgaattaaagctcactgttaattactctataaacaaataaaagaacaaatcctggagaataattcaggctgaaatatcattctctaaatcaaataaacaacaatataaaaaaggctaaaagaaaataaaaagaagaaaggtttcagacaggactaatattctcattggcattgctccattgagttggttactgcccagaggcacagatatttttaggatattcttttgtctggtaggagattatgacccagaactgtgaagtaaggctgtttctacacttaaaaaaatgtaatttccaatggtggaaccacccagctgttttaccttcaacaaacattgatgaaacacctagagggtgtcaggcacgttgcttggtactttcccttttaaaattatttaatccctccaacaatccatgaaatactcattataatccttttaaagatgtgaaaactgaagctcagaggaattaaataaatcctctattatcaaacaatcagtaaataggtgagagcaaag

SEQ ID NO: 31335 - DNA, 1048 bp, Homo sapiens
cttgtaacaccctgcaagctgccctaggatgggtgtgaccttggatgaggaggctgttttcagctgaaggcaactcttggagaaacatttagccataagctgcgtgctgccaacaggaccagcacttgaggaatgaatgctcttctgaaaagagaaattgagtggtgtgctagcgcctcttctccaagagatccacttactttgtataataattagtgggaacagcacctctcggattctggttggtttagttttcaggaaaatttacaagaggaaggttagtgaagtgaactacatacaatcccagccagcgcatctggtcttgatgctgcaactgacaccaaacatatctcattacaagtctgtatttctcttaccctacttctattactgactgttcagatagggctcactgggaaacagactgagatgtgcatacaggatgtttactgaagcatgtgtgcttttgcgaacaacacatgtgagggggcagggaagcagaattgggcagagagaggagctgaattgaaatgcagttgcaacagacctcattcaattttgtgagaacttcagagctgcaacagcttttcagattgaccccaccatggcacaatgtagctggactatatactcttgcactggatcagtcattagacacaggctcttctaatgtaagggatattgtggctctctttagttaatggcatttcctagagagagaaactaagctgaaatctgtcaggtgtcataccatagcagctgagggaatgagcatttcagtcctgaaatggaatctgagcaacacatcatgatatctattacagtagttaaaaatggcatctcggcctagcgcagtggctcacacctgtaatcctagcactttgggggctgaggcaggaggatcatgaggtcgagagatcaaaaccatcctggacaacatggtgaaaccccttctctactaaaaatacaaaaatcggctggcatggtggcgtgtgcctgtaatcccagccactcaggaggctgagacaggagaatcgcttgaacctgg

SEQ ID NO: 31336 - DNA, 1076 bp, Homo sapiens
cttcgtatggtacatgtctctgcatacaaatactgcttatttataaggacagcagtcatattgaattagaggccatcctattccagtatgacctcatcttaactacttatgtctgcaatgattcaggttcaaataaatttacattctgaagtactgaaggattagaacttcaacatatgaatttttggtggacacatttcaatgcattacaaaccccacttttccgtatttccaaatatattccagtactgatatgttcttaatatacaaatggtcacatttaagcattcctctgtgtctgtgttgtcttctgaaccataattctatgtgctgaaccagaaagaatagggcatgaaggacaattttgagtgaggatttaggaatgagcaagaagaggcctacattaaggcaggcaacagcctgagagaccctgggacctggtgggtgtacgaaaggatccaaaacttggaagccatagaaaaggagatagaggatcatataagttattatctacattgggaaacctgaaaaggactctgttaactttagaggtagctctgtactatccctggcaattgggactaggatggccctacatggtggcatcataaccatcactttgaatgatctctactaatgtctctttccatccactggaaagtcaagtgttctctctaagcagctttctacagcaaagcgtatgtgggcacacaatgcaattaccttgagcctggaggccacttgaaggattttttacttggtatgtcacttggacatctgtaataggggagaaaataatgtcagagggatatttcagaaaaggaattgaattactgtaacactcctcaaagagaaaactatgggtatgttttcctgaatgcaaaggtgtgactttttcatattagaattcctgtgctgccttccatccctaacactcaatggcaaagagaaaataatgaaaggaaggcaagtaccatttgccaaagatgtggccaagataacgctgttgtcaccatgaaacctttatgttatcctacatgatgtaaaattatttctgattaccatagaatggaagg

SEQ ID NO: 31337 - DNA, 1032 bp, Homo sapiens
gctcggtgggggagcttctgagacttattgtcgaggagaaggaatttcaccaaggtaatcaatcagttaaggtggggcaggaacaaatcacaatggtggaatgtcatcagttaaggcaggaactggccattttcacttcttctgtgattcttcagttgcttcaggccatctgggtgtatacgtgcaggcttgggctcagaggcctgacactttcttcaagaggcaggatattatccaaaccctaaaggatgggtaaaaattacgagagtgggctggtatagagttcatcccaggtagaggtactagcatgaacaatgggctaatggtgtgaaaaaatatgcacatataagatataaatggagtggtttgtatgtgatgggaaatgaaaataaaaggcctagaataagggtcaaatgatgaaaagccctggatgacacattaagagatttaggctttgtttttgatttgaaagtaatgagaaggatctaagtatttttgtgggataaatgaatatgaactcagtcacattgtgcagcacgtcattgtatctctgctctgttcagcatctctgttgatacttgcttctctggttgtggataaagttccagaaaactcacaaaacttttctagtcactcaatttttgttgtataattcaattaaaaatatcaaaacttcaatttctaatcaaatataaagcttgttcccttggctagccaggcctatcacaagctcaaaagtggggaagaaagaaatgatggacttcttcactctggcctcatccggctcttgtcctccacccctttctaggaacgtcctcttcaaggataacttctgtggggccgctatccaacctgtaggaaatgtgctgttttactttgcaggttgttgaagtgtcattatgtagtctcttatcttcagaagcaggtcagataccagctcatgaatcttccagtttccaggaggctcatattaagctctcagagtgattctctcaaagccctctcctttggttgaaggcaagaggaaagtac

SEQ ID NO: 31338 - DNA, 1045 bp, Homo sapiens
ggtaacgaagtagcttcaaactgagtaaaagcaaaaaatctgaaaggtgcctgaattcaaaaagcacatctctaaagtgccatgctttatagaagagaatgtatgatatttttactaatatgaaacatgttttcaaagcatttaaaaatctttcaagatcttacaaatttcacagcacatacagaataaaaatattgagaatatacgacttacttgtagtgtaggttattcttagggacatataaaatacttaaaaatatcaagattaggaacaaaattaggcactcaattggaacaaaaatcagattttaattgtttttatccctggctatggaaagagtgcttaataaatagcagctgaactaatagaagaataagtattgatcaggtgttactgagagaattttctacataaggcatggtctctgcagcttaaccctcactgtcctcactgtgtccaagattcagaaagtgcgtcttatatcattgcaagttggaggttttctgaaagacttcaagaacaactttagatagaaccttggtttttctctgtggtttctttccaaatctagtaaaatttcagtggctgtgctgctgatcatatatttaagattgatagaactaattctgggttaaattacaatgtacacaccaagctgaagatcattctggtcactcggggccaatgtctggatacatccccatcccttggcacaacagaagctagtttttcagactgtttccagatttaatgaagacctcctgccccaactatcttgacctatagaatatcattgtggttaggattctgaacatggggatcctttactttccttcctcatggattttagagtttcaagagtatcccataaaaaaatgcatattcagtagtccccacttacccttaatgtatatgtttcaatatacccagtggatgcctgaaaccacagatagtaccaaaccctatatatattatgtttgttctatccatacatacatatgataaagtttaatttataaacaggcatggtaagatattaacaac

SEQ ID NO: 31339 - DNA, 1036 bp, Homo sapiens
agggctggtgatggtagtcctgcccctcccctttgtctctggctgtccttaggggtatttctgtcttcaggcacttttttttttattattttggtaaattattttatttcttgcatgatgatttggaggaactatcttcaaaccagtacaaatatttcataaatagcatgtggccattttctaaccaattgagtaatttgttgcacaataagcctcttcacatctttcagcaagatatacattgaatttgaatagtaaagacattacgcaataaattaggacacaattaaaatttgctttaaatatttctttgggggagaggacaccacacttccactcaatgaaaagaaacacttttgcagtccagaggtcttttacttttctatacctatttgccatgaatccatagcgactgggttccggcagctcaggctccttctcactggttctcccaaagtgtgcatctctgggtggagcaggctggcacttctcttgaacccaggtgactttctctttggctttcttcttttctgatcattttccttcacaagtttcaggaagctgcctcagcccttaaagtgcttaatatgctcaatatgaacaataattctcctgacaagaaccttgcccataacttgtttgcttacaacagtgccaacagcatgctgtgtaacattgtagaccctcccagttttgccttcgtaacacttgtaggacattcctttttgatcagtattcattccctggatgtctacaatatcacctttcttataaactctcatgtacatgtccaaaggaacagctccatgttttctaaaaggcctagagaacacgtatcaagtgcctctcctctttccctttgtgttcattttggtgaattactagaaaatggcagttctggcccaaaggaagccaggcgctttcattgttccctgttggttgagacagagacagcattgaaagggaaccctgccagggaacacaagatggtgggctgtccacctcgatctcacttttttcagtgtaaaatccctga

SEQ ID NO: 31340 - DNA, 1032 bp, Homo sapiens
cacaatagcaactgcttaaagaaaacttcatgcaaaaggcacatgctgttatctagatagtggggtgcccttaaagtcttttcttaaaaaaacagggcagtaatgttatacagaccactaaaggaagcaagtagtttctggtctacagacttctactgtgatctacagttagtccttcgtttctctaagttttaccttgggaagtttttctttttaattcacaggtcttctttctgagtttcctttttcatatctctggaagtctcaagctgctttcaaaatgtttattggctcctgaccttatcccaagaatcttaagtccttttcaacgtgacattgtattaaaacttttcttttgcatccattaactaagtaaaattttaaaaataattggtcataatttgtccatgtatttttatgtcacatagtttttaaaaatatcatatttgtattcatgtctataaagagttgtacatcaggctattgttaagaacactacccacatgataacatggtctgtaagagatgagtcagaagctacttaaaatagttgagaatacagaggtcatggcaggctgaataatggcccctcaagatgcccatgtcctaattcctggaatatgaatacattaccttacacagcaaaagggactttgcagatgtgatcaagttaagcatcgtgaaatggggagattttcctagattatttgagtaggcccaatgtgattatgaaagtttttataaggagatcagagaagagagaagctaagctgctggcttcgaagatggagaaagatgtcacaagctaaggaatgtaggtggcttctagacactggaaaaagcaagaaaatctattctcccctcaagcctccagaaggaacatagtcctccccaataacctgatttacatttctgaccttcagcatcatgagataatacatttatattgtttaaagacactaaattgtaaatgcatattagtggtaatttactgcagcagccataggacactgacacagaaatgtttataag

SEQ ID NO: 31341 - DNA, 1024 bp, Homo sapiens
gaaaaagaagaagaaggctttcaactccccgaaaacagggcagaataaaacagtgcaatatcccagtgacatcttagagaatgcatctgttgaattattcctagatgcaaataaactgcccacacctgtagtagaacaagttgcacaaataaatgataattcagaactcgagttgacatcagttgtggaaaatacttttccagcacaagatattgtgcacactgttacagtgaaacggaaacgtggaaaatcacagccaaactgtgctctgaaagaacactctatgtctaatatagccagcgtcaagagtccttatgaggcggagaactccggggaagagctggatcagaggtattccaaggccaagccaatgtgtaacacatgtgggaaagtgttttcagaagccagcagtttgagaaggcacatgagaatacataaaggagtcaaaccttacgtctgccacttatgtggaaaggcatttacccaatgtaaccagctgaaaacgcatgtaagaactcatacaggtgagacgggtgtgtggggagatattatttttatactgtgactaatatagtgtatttttatagagagtacttagcacacactacttgtgaccagaatttggtatatttttctattcatcaaagtatttaacagtgttaaactgttgaaaatttatttgtaattgtaaccaagtatttaatggctgtttaagccctaatgcatcaactccttataccattttccctccaaataagtatgttgattctagcttaccaagtatttaacagagacaaagacattaaaactgataaagagaaaatgtaattacaattcaggccaattttcagatattgccaacacttctcattacatacttctagactctgttgacttctgaacatgttcattggaattacacatacagtgttccctaagcttctacagttacctttattttgcatgtcctctgcctggttgtaaagtatgagcacctattggtacgtttacattcgtacttttt

SEQ ID NO: 31342 - DNA, 1053 bp, Homo sapiens
ctgtgtcgcccaggctggagtacagtggtgcgatctcggctcactgcaagctccgcctcccgggttcaagccattctgctgcctcagcctcccgagtagctgggattacaggtgcctgccaccaagtccggctaatttttttgtatttttagtagagactgggtttcaccatgttagccaggatggtctcgatctcctgaactcgtgatccgcccgcctccgccttccaaagtgctgggattataggcgtgagccaccgagcccagccctagattcgtactttttaaaatgctgtatgtatttatctcgtgaattcagaaacactaatttcttttgattctactggtgttttcagtggtctggaaaagattatatttgttttcagttccaacagttaacattttcttaataacaaagctagtactgttgatgaaatcttatatgacttatgcaaccaaaacactattttcttctaaatataaattttattgttcctttaggtgagaagccatacaaatgtgaattgtgtgataaaggatttgctcagaaatgtcagctagtcttccatagtcgcatgcatcatggtgaagaaaaaccctataaatgtgatgtatgcaacttacagtttgcaacttctagcaatctcaagattcatgcaaggtaaaaaaccaaatgagttgtttgatcttttagtcttttaatcaccatagtcttatgaatagactattatattagaattcaggacagtagaattgtaattgtggttccaccaaacaatgttaacacgttcaaggaaccacaaggaagccacagtggttgataggaaataagcagggggtggggactactaggaaataaggtcagactcgtccagaagtaagatcagaatggtccagaatgcagcttaagaggatcattctgactggtataggattataagagtggaatcagggtaaacaggaatctatagataaaacccaagcaagggtgatggtggttcaggccagggtggcagcagtgaaagaaataagtagtagtagattctggatatat

SEQ ID NO: 31343 - DNA, 1208 bp, Homo sapiens
aatcattaaggtctcatttcagattcttgtttgtttatatatgtatatgtattcatagcagatatgatggtagcattttgaggggcagtttgaacatttgcacaattatatgcacaatcatatttacataatttaaaaatagctcttccaaataagtagtatgggccaaatgaggaaacctagaaattagctttgtggaagtgctcataggctggacctaattggggagcagatggaagcccagccaggcaggtaaaacatagaaacataggtgcttcaggggactgaacacagtgacaaaaagaagtggttatctgggcaggaagaaagcatctagttaacaagtgctgtgatgtgctggagcaggcaccagtgaggtgtaagtagaaaggtagctagatagtcaccattagcaggcaccagtggtggtagtgagacgtagcttctagattgtattgtggcaattagacattatcaaagcaggaatggagaaaccaatcagaaattctgaaactagaacatgagatttgaaaaagtgacttttagatgacaaaaataagggcaacccaatttcttgagtaggattgtaaggttaaagagaaactaccaagcaacgttgacttaatctggggtcagataaaaaatgaataaagcaaggatctctctctctcttaagaagtttaccgtctagtgaaggagcaaacaactactacaaattatatagtgagttagaagataagtgctatggatagggtaacaggaaacgagagaatgggaaggtgggcttatgttttaaacagagtaggttgtggttgagggaaaacttgaaggaagggagtgaaacaaaaggacctgcttatttgggggaagagcattctaagtaaagggaacagccagtgtgaaggccctaaggtgagaatataaaatatagtaataactgataaaaagagagaaaacaatctatttagagagaaattagtgaaaccaggaatacatcatgttttgccaaatatattgcacatttttcaatttgatgttgtgcacgtccttttcagagtccaaaaatctcaccttagtatatttaatcattgcttaattgaagataatcattacagtggcacactgaattgcgaagtacttggagaaaaaataacaccaagaaagctgaaaagacattatttggacccatcaaatcatcacttttaatc

SEQ ID NO: 31344 - DNA, 1027 bp, Homo sapiens
catgcagtggtgtaattatagctcactgcagcctcgagctcctgggctcaagtgatcctcccaagtagcttggattagaggtttagccaccacgcccagcactaatcaggatttaaatattaatatttaaggtgtatgaaatgtgcagataataaaactgttttcccagctttttattaacaaatactcccttctgaggcagtgtttgaattactcaattagagaaatttttctccccacagctcgatgcattctatttctcatcatttggctcataactggaggaaggcaccacttttggttcttgccaaatctgactgctgatgtgggcttcattgactccttcaggcctctgtacacacatgaatacaaaggaccaaaagcagacttaaagaaagatgagaagtctgaaaccaaaaagcaacagaagtccgacagtgaggaaaagtcagacagtgagaaaaaggaagatgaggaggggaaagtaggaccaggaaatcatggaacagaaggctcggggggagaacggcattcagacacggacagtgacaggagggaagatgatcgatcccagcacagtagtggaaatggaaatgattttgaaatgataacaaaagaggaactggaacagcaaacagatggggattgtgaagaggatgaggaagaggaaaatgatggagaaacacctaaatcttcacatgaaaaatcataatctgactaattttgggactgaatgaataagtacaagaggttggattttctatgttggctgattaccatattgaacacatggcatttgtagcattctttaaatctatctactgaaatgtatttgacattcaagcagttatattcggtccttcattttatagaatattggcactattattggtacagtttaaagccattaatatgttttatccatttgataattttacagtaagtaggtctcattcattttgacagttatcaaagatgtactttccacagttaaatttacattaatggcaatttttgatagttttat

SEQ ID NO: 31345 - DNA, 1067 bp, Homo sapiens
atcggctcccaccacagccctccaaacagctctgcgctctgagcgccccctccccagggtccccctctccaggcaggaagatgtccaagtcccgtgcggcggaggcagcagcgggggtgacagcgacggccccgagcccgcagatagtggagcagaggggtccagggaggcgctgcaccgacgttggggagaatgtatgtcctggcaatcaaagatcttttcctccgtgagcctaacaaatgctctggaatgtgttccagccttcaggaggagaactccgttacacgtcacgaagtcaaatgccaggggaaaccattagctggaatccacaggaaaagaatgcaacacggagcacgaagcccaagcacagaagatcaaagacgccaggagaggacccctcgcaccttttccaaaccaaaaatgtgaagcagcagaacttccaaaacctccggcctcgtcttgtgattccaccaatgcagccatcgccaagcaagccttgaaatagcccatcaagggcaaacaggcccccgaaaaaaagctcaaggaaaagtcgcaaactcacggatttctaccctgtcccaaggagctccaggaagggcaaagcggagctgcaatttgaagaaagggaaagaatagatgaattggttgaaagcggaaaggaaagaaggagtgaagactgacctcatcaatgacaaaggccgggtgtgaacaccagagggagctctcccggggcgcctttgtggtagaaaagcaccggagcctcacggagatcaccgacgccacgggacccctccatggtggatctccgtggatctccacagtaagccgagatcgcgccaccgcactccatcctgggaggcagagggagactccagctcaaaataagtagatgactgaatgaatgaatgaacgaatgaatgaatgaatggatgttacaggtttccaaggtggacttaaacagatggctttatattaccaaaacttttacattctagttgtttttgtgcctttttttttttttttaatacaggttgaacgttttgtgcttcccatgcatgcagtcaaaa

SEQ ID NO: 31346 - DNA, 1047 bp, Homo sapiens
gatgagtgaaaagcagtaattcactgtatctgaagtatgaagtggtgaagtatgaattggcctacagtttaacaggctccacgggtgagttgtatgaatacagaaatttgtttgagaagcatgagactagatccccaagagctttgcagatcacattaaattttattttacatgactattatggaagtctagttaaaaggtaccctaaagaaagggtgggttgggggtgagggataaaggcctacatattgggtacagtgtacactgctcaggtgataggtgcagcaaaatctcagaagtcaccactaaaagaacttactcatgtaaccaaacaccacctgctccttgaaaacctgtggaaataaaaaaagagagaagataccctaaatatactactttttttacaatagttttctgttaattgttatacaaatagaatttcattttaaggaatgtcataatatttagctcaatatttgggatcatttctatcttccctgatataaagaactctggaaagtcattattgaagctccaagctataggtaaacataaacacattctcattttttaaaacagtgttcctgaagtaattcatgttcactgttcaggaaaaaaagtagtgcaaaaatttatgaaatgtaaaaagaagcctcctgtttttccttttttctctctcctccctcaccaattccaattgtaagagaatagcttagtatgtatccttctatatattttctatgcatttgcaaacgtgtatgtatgtttctataaattctttattaacagttttattaacatgacaaatgacatacagctgatattttgcagacctggtgggcatggggagcttggagcccagtgccacccaccctggccctccatggccttaaaaaaaaattatatggggccgggcatggtttctcatgcctataatcccagcattttgggaggccgaggcgggtggatggcctgaggtcaggagttcgagaccagcctgaccagcatagtgaaaccccatctctactgaaaatagaaaaattacct

SEQ ID NO: 31347 - DNA, 1033 bp, Homo sapiens
gttctgatcagtcttagctactcaccattccctagtagtattattgtctctgcttctgcctgttcattcctgtgtatcccgccttcatttttacctattgaaattttcccatctttcagagccacctcagatgcaaccagatctttgatggatcaaggtgaaactccttagtgtaaacatcactggcctctttgatttagccattatttttcttcagcatcatctaacacacttctattcctgtgctccaccctaattacttgcatttcccaagacctaccacagtctttcatcattccattcattaagtgtttgcagaatgaatactgccttccttgatttctccaactagaagtcacacctttctttagaaccatggttagaacaggacttagcttattgtgtataaaatttaacaagtactgctttctcttccagtaggaattacctcccttccttgaaggaagggactgtatcctctgtaactttgtgcttcttagtatggcataatacatttatgtattaaatatttgatagcactactcactgtatattaaagtagaagcccagtgtaacaaaatgccaacctctcccctctctgtgacccatgatctccctgcggtgttctctcctcattccaggtctctcagtgtacttgttcctattgccttttccttttggctaacttcttctgggctacactatctaacatctggctgttgaggtgactactaaattgaatgctaattcaaacctggatgttcacctgtaactaggaatgttgttctggtcaaaagttaagattaactggaatggtgacaactggtgtcttttttattcgcagtcctcagttttgaactcctttttggctctaaacttgcttgtgggattatcggggttttttaaattttcagtactccattcttgattcgtctagaaaatctgggggattaatctaaaaatttatagatttcctttcagtacaattagcctaattacttgatttttaatcttattttaccatttaaaggtt

SEQ ID NO: 31348 - DNA, 1051 bp, Homo sapiens
ttaaagcaaattttgaatgaatctttaagttaggtatctaccttcccaccagccccccaaaaaacctctcagtagtttctttcagtgtacaaaatgatgagcatttttctatgatgaggttttaaccattattcagggtggtcttttgtttttaaatctttttttaactaataagatttacggtgtgtattttatacagaaatgcattataaatgtttttaattgtgttctgttttttgcagtctttaagtgccatgccaattgttcttatattctatagaagttcgctcaaaatactcaacaggggaataggcagcggacagtcagaatggttggaattttggctttctaagaaaaactttattttgcataagcatgtggtcagatcattttgtgcatatgcagcctggattggatgttaagtaaatgcttgttcagtgccggtacatttacttaaatctgtttttatttttgtcatgtagaatactactgtggtcatcataatgtaatctatttctgtaccttttttttttttttttactttgaagtctttaaataaaatgtataatacccattgagagtggatcatttttcatatgtagtatgtcagaaatttgtataagaacaaagatgcatcaaaatttgttcaagaaaaagtgaaaatttcagagtttggaattttgctgtacttaaagcaccattctggtagaactgatgctgtcgtatttacatttaataatgttacatttagctggacatagtggctcacacagcactttgggagactgaggtgggaggatcacttgaccctaggagtttgagttcagcctgggcaatatagtgagaccccatctctacatacagaaaaataagaaattagccaggcatgccggcaaagtgcctatagtcccaggaggctgaggtgggaagactgcttgagcccaggaggttgtggctgcagtgaactatgatcatgccactgcactccagcttgggcaacaaagtgagaccctgtctctcaaaaaatatttaatgttatatttattaatgt

SEQ ID NO: 31349 - DNA, 1034 bp, Homo sapiens
aaattggtaactttattttaatatgtatatctgaagaattcaagaaaacaaaggcatcctcagaggtgtgcctcttttctttattattagaggcaaaacgaacaattttataggatttgtagtgaaattataccagattataaggagaaccaaaactaagtcgcaaaatttattaatttaaggggctctcgctttgaaagtttgagagtaagttacgataggcatttgtatccattcattactttcctcttttcaaataagcaactaaatagaaatgctaatctcagacttaattatttaacagaagagtgtaccatggaaaacctccagacaaatttctccttggttcagggctcaactaaaaaactgaatgggatgggagatgatggcagccccccagcgaaaaaaatgataacggacattcatgcaaatggaaaaacgataaacaaggtgccaacagttaagaaggaacacttggatgactatggagaagcaccagtggaaactgatggagagcatgttaagcgaacctgtacttctgttcctgaaactttgcatttaaatcccagtttgaaacacacattggcacaattccatttaagtagtcagagctcgctgggtggaccagcagcattttctgctcggcattcccaagaaagcatgtcgcctactgtatttctgcctcttccatcacctcaggttcttcctggcccattgctcatcccttcagatagctccacagaactcactcagactgtgttggaaggggaatctatttcttgttttcaagttggaggagaaaagagactctgtttgccccaagtcttaaattctgttctccgagaatttacactccagcaaataaatacagtgtgtgatgaactgtacatatattgttcaaggtgtacttcagaccagcttcatatcttaaaggtactgggcatacttccattcaatgccccatcctgtgggctgattacattaactgatgcacaaagattatgtaatgctttattgcggccacgaacttttcc

SEQ ID NO: 31350 - DNA, 1025 bp, Homo sapiens
tcttaattgtttttaacatacagttaggataatttgttataaatgtgtttatggcttaccacagcatattaggtaaaattagcttgcaacattttatcatggttagtgttgtgcgtgtccccatcatttgtattgtttaatttatatctctgaaaaatgcagccttagaaactgttgggcttccttggtgcttcatggagtagagggatatcaaacgtgaaagagaccaagagttttgtggtagcagaataaccttgtaaaaggctaccttgggaattaatgagctgcactgtcattcagaattcattcaacaaataatagatatttgatagatgagtccctactacatgctaggcatatagtgctaggtattaaaaatacaaaggtaaggctggttcttgacctcaagctgctgtttaagcagaggctgcgtagccacttaacagggattttaaatagggaattcagacattggctaggggactatgctaggtgatctttaagattccttagaagctctagtctgactcttactgggttggtcaagactaggaaataaaataaagaataggagctaagagggatgactgtttaaaaataaaggaatgtgctagcagttatttaaggtggcacctgaagtttagagacacagaaataaatagatgctaggtttggctcatgagtaaagataaaacttactcttataaatcaaactgtagggttttgaaatgaacttgatcaaaattgagtcagatttcaagtcaaggtctttgagcaaatttagaatttgcttgatattctgaagatttgagattccagtattcattataggaaaaactttgaaatatataaatcaattttagtaattttatatttttttctttttcttttttcgagacaagccccacactgttgcctaggctgcagtgcagtggcaggatcatagctcacagcaacctcaaacctgccagcttcaactgattctcccacctcagtcccctgagtagctgagactacaggcatgc

SEQ ID NO: 31351 - DNA, 1023 bp, Homo sapiens
ttgtaagttttttgttgttgagccctagatttttttctactagtgtaaatctgtattccctccaagtatggtgataaggggactgagtcttatttacatttgtacaatcactactttacctgttgtatttgcagtaagtcttttgagccctattaaacctgtcaattttcttgtcctgtcagaaaactgagattttggctcaaaaatggatgttattaacaaaggggaacaatatagatgtcttagtacaaagaaaatgaaatgtaagaggagattgtctggagttcaggggatagagtgtcaagtcttaaatggttacatctttttgctaagtgttactcagaatatagttacaaatatggtacttaaatatctagctgaaatttgtttgtcccatgagcttctcacatgagtctactgggcaattttatgtgagttttggtcaaaattggtaatctcttttatcttagttttgcataatttattgttgccattttatcaaatgagtaggaagtagtgaagtatttcaagaagattgctcagtggggtttgatacaagaactgcccagtagctgggcgacattcagagctctctctctgaggtatataagaagagccctgggagctcctcactgagcctcctgtgagtcaggacatagccttgcagtctgccactgaagcagcctcaccaaagcaaagattccctgctttggaagggtggtgggcaagataaagtcctccaaagtagttatagattattctttttctggagtaaaacttacctgctcagagttgttacacagctgtataaagtccttaatgcttttaattctcaggtggttttgagggaaggagaagagcctgtgattttccttctgtgtatctttttagtgcttagaaattacttgccaaaaaaaaaaaaaaacacgaaattacttgcaagctggttatggttgcttatgcctgtaatcctagtgctttgggagttggaggtgggagggtatcacttgagcccaggagttc

SEQ ID NO: 31352 - DNA, 1227 bp, Homo sapiens
tttttctgatttatatattatgacataaaaattgaaattatattattatcgttatagaaattttaaaattcgaaatataaatttacagtgaatgaatgttgtcttgaagtttctcttgttccttgtgtggtgtttcattaaactgtaattccgtattacctaaattgaggaaacgtttttctcagcttttcttcattgccattaccaaagtgactcaaaatcttcaaagcacagttaaaacactgaattgtgccgtaatgagaagggccttctgcatagggagtgtgaccctccctcctagactctctgtctcttgtctttggcactcatgacagtttaatagttagaaggcaccttcaaggtccgttaggccaacttctcatcaaatgtcccaaggtctatatgccccttacagttcagccattcccaagaggcaacccattcagctattaagtagctcgaaatgtccaggttctttcttcatttggttagagatctgcttcttacattctttatgtcttggtcctgcaactgtagttctttatagcataatgcagtggttctcagattgtggtccccagaccagcagcatcggcatcacctgggaacttgcatgaactggaaagtgtgggcttgggtctcatcaatctggtttaggaagttgaactccagatgacaatgatgcacactaaagtctgggatgcacagatgtcctatagtagaaagtgggtggggctttggaatgaggaacccctggcccagaaacccagatcctggccctctgtgatcttagggcaacccctcagttttctcctggtcagatggagctgatgggggcagctaattcacaggcgtgctgacagaattcaatgataccccataggtaaagcacagagcagaaaatccaacatactgtgagcactcaaaatcggcgtgtagtgttatagagtcatgcaacgcatttattggatgcctttgagtaacagtctacatagagtccatgcgtttgataattaacaagttgagaaaaaagtttacatataacactctagacatgaaactgttaaataccttcattttacagatgaaaaatccgatattcagagaggctaagtgacatgttcaaaggcacacagctggtcctacaattgatgccttagcagcctgagctccaattcttgataaaatgcccagtggtcaccttaaatttcttcagaacagagtggg

SEQ ID NO: 31353 - DNA, 1044 bp, Homo sapiens
acactttcctcttctcttatatacagagactggcaaacagactgctcagcaagtgtttattgaatgaatgatttaatgatggagcaggacatgttgttttgacactgagatgccatgtgtttgaaccaggtgaaaacttatgtttgattttaattttaaagacatgttctaattataattcttactattggaggcatatggaactttcaatcaagaggaataactgagatacttcaaattatgtgaagatagaaaggtttttcttgttcagtcaataattattgcattgcagataacagaaacccacttaagctagtttaagcaataaaggtttgaggaaaatgaaggcagtgtttctatacctcctgagctcctggaaccagccctgggaagtcactggaagcacaggttgcatttcatcttttctttgctcttccttccctgatatttctttttgcagagcccatcctatatgaataatggatgcttattctaaactcatgaagtgataccaattttttcttttaaaacggcctggtctgcacattactttttttttttttttttgagatggagtctcgctctgtcacccaggctagagtgcagtggcgtgatctcggttcactgcaagctccgcctcccgggttcgcaccattctcctgcctcagcctcccgagtagctgggattacaggtgcccgccaccaagcccggctatttttttttatgtttagtagagacagggtttcaccgtgttagccaggatggtctcgatctcctgacctcgtgatcctcccgcctcggcctcccaaagtgctgggattacaggcatgagccaccacacccagcctactttttaatagtaaattgaagttatgggtgttagatatattctttgcaagccgttttgaagcagattcttttcctaatgtgtcatgtacaatctgtgggggaagaaggttatataaagcaagaatgacttctattcaacaaaatagtgatattctatattttcctgtctcttttgtttctttctttaaaatgaa

SEQ ID NO: 31354 - DNA, 1071 bp, Homo sapiens
tttttttcttgtttgatgttactttattacacttatgaatgaaatactaatgctgttattttatagaagatcataaaataaaagtacactttcttagtgttttatgtttctttaaaaagataattaccgtgagtcatagagctacaattacatcaagagtttcctatacgaagcaaagtctctggtgggtttttggtacagtctttgcacctggatcagtggagcaaaatgtcatcacacttgaaaaaaaaattacttaacaggcccattaagaatcttcagaagtttgcatcttgttagggatttgtggtccaagagttagtactacagaacaggctcttttgtagacctagggaaaccagtttgtttctctgccacttaacctgcaagacttattataggtgtttccttctcctgtctgttttgaagagacttcctctgggaattaatggtagaatacttatgactcctgagagcagagaacgttcaggccatcatcatcttctccctctgggctgtacatggcctccctgtgtctctactgcctgtcatacctccccactcctccacctcagtcacagggcgactgccttgctttcggtctacctttcccaactcttcaggctcatcctggtggatcccattctgtagcccctgctgctcttttcaggggattctattttgtcttatacacttttgtcatttagttacccacctattccccccagtggactcccattctgggctcctgcagagggcttgtaagttcacctttatatccccagggtcagagctgatgctctgccgagtgaatggggaagcgccagaaagaacagaagctaatgatggactggctcgaccatggctcccactttcaatactcatccctctgtttcctcagacattttacttgaattaattttgtagttctccttctgaactgctgagcaagtatttggacactttgtgaggagccttttttttttttttttttgagatggggtctcactctgtctcccaggctggagtgcagtggcacaatctcgtctcactgcagcctccgccacccgg

SEQ ID NO: 31355 - DNA, 1077 bp, Homo sapiens
ataaagaacacactgatgacttttccccacgtaatctctgaggtcggtattttagtaacctttgagataataatttaactcacgccctatagaaattatgtatgcagtaggcccttggtagagactgacatttatataaggtcagtgttggttgacctagtttgatctggccctagatttataaatgaatgaatgatctccccagaattaggaagacatgacatcaaaaatatgaattcatcattactgtaaaagtttaacatgctgttaaactgtagcatgttagtgagacgaggcctcagtatcttctgctggttggggaaaaaaaataaatgtgtattaagtctcaggagcctgcgtggtcctcatgcttgttaaatccagaatgggtctctccctttctccaaagatggagtttggccttggtgggattctgtgttgggagctgcagtcccagatgcttctgctagtttaatagaagagatcaggaagaacaaactggcaagtgaattggacagatacagacccaaaagacttcagataattggaaagaaattttgcaaccagggcatttctgccatcaaaacagaggtatcttgcaatgattcttgtgctggctgttgttgaggtcttactttagcactggggatgggagataattcccgtatagccataatatgggaaatcaccagtatcctttaagatgacaaaattcaaattctaataaagacaggatttgggacattttttaaagagaggtgctgggtgtggagagggaggaagtctggtttctgataagggcttctcctcattttacaagtctgcttgtcatgagagaagtattattcctggaaatgaaaaacatggaggcagaaaatccgtttcttcaaaaacagatagtggatttttgcactgccaacctagctgttgatctgtcagtcttggtaactgaaaccctatgaggctgcgtaacatctcagatgttcagcttcaaatctgagatcacaaacagggtcctaaaacaaaaagtttgttaaatgcccagtcaagaaaatggggctacggaaaaactcaaaa

SEQ ID NO: 31356 - DNA, 1228 bp, Homo sapiens
taaacacttcttaaggaacaagttataattgtaaataggaattaactgttattttccttctattgtattgcaaagctaaatgatggtggcagataccactatgggatgaaagtaggctttgtgttattttgaaaatgtgtatgaatttcattacaataaatggaataaacggaatagaaacaacggaatctacctttaagcctgactgaagaagttgccctggatatatctgagatacaggaaagttatgttcacatggccacttagagattctggtcttttgtctcctagttcaggctatttccgtgcctttgttctacccctctttggggcctgacataataatacagggctctcaaattagaataacttgggtttcacgatggagcacttagattgttatgtgacttgttgtgttacaggtgatttttgtggttctgagtcctttttaaaaagcggcggttctcttgcaggaagccagttgagggaagttctccatgaatgtacgtcacaatgatgatgaccgaccaaatccctctggaactgccaccattgctgaacggagaggtagccatgatgccccacttggtgaatggagatgcagctcagcaggttggtgtaggaagagggaaatttaagtcaaattgtctaagtgggaaacagtaacacagtatttgatttattttgggattcaaaggtttgtgatttcaaaccttagcatttctagaggtaagtgtttttgttgtagaaatactgtatcgttttttaaaatgtgattttagagaacaaaatcttccctcattcagtttgtattcttgaagtattgaaaaatggatgacttctgaagtgagtcattttcagactgcataaaagtcttcgaaataaaatgactgtttattcatgctgtattgtgcttgactagtttgcttggttggccagagctgcatgctcagagggtcaggttttggcttcacacaggagtgatctcgacaagacacgtagggcagtgtgaacccacccttgctcctggaatagtccttccaaatgtgtagctcataaaatcacggtacttattttctctgaatctcctttgtcactagtcactgaacattgtggaatagagttatttgtgaactcagtcaagtagcacttgggggaaacaatttagacagtaagtgaaactttaacaaattattagggattgaactattatctctaacattaatta

SEQ ID NO: 31357 - DNA, 1043 bp, Homo sapiens
tttcaatcagctttggattcaggcttcaggtagggcagtgagcaaaatgaggcaatggacacattcacatcttcttccaggatctttctagtttacttgcttatgtttttaatcctgggacattttctttgcatgtgttattaccacaaagataaatatttggcattcgcaccccatcgcttcccttttcctgatttggagaaaagagggggctcaaaacacaaatactgcttacttttcagttttgcctgaggccagctgtgttctatggcacacagactggggtctcaaaggtgtgtgtggatgaacagtttgggtatgggggcctgggaagagcttggagattgggaatcttgggggtggggctggggagtggggagttgggagtatgtgtgaccagaaaatagtagcatgaggaataggtggtagtactcttctcatgtagtcaaaggtcacttttgaagttattaggtattcctggctagaatccttagttgcgtggaactcctctgcagcttttagattgtatcattttcccccttaaagatacctgttggataatcataaatgtgggctccaagggagaagtattcatttatacatgaaaacaagctacacaaagtgtggccagtggaaaaaactctagaagtgaaatgggatctcctctctggtatggtttatatcttgattgtctgagggttggatttaacgcttaaaaatgctgcaagtgtactattttgtctttggtcagttggtactcttctcccaggaggagcttttttttgggagacagtcttgctctgttgtccgggctggagtgcagttggcaccgtcacggtttgctacagcctcgacctcctgggctcacgcgatcctcctgcctcaccctcctgagttgctagaactacaggaatgcaccaccatgtccggctaatttttacaattatttttgtagatatggagtctcactatgttgctggggttggtctggaactcctggtctcaagtgattctccccgtctcagcctcccaaagcactggaa

SEQ ID NO: 31358 - DNA, 1002 bp, Homo sapiens
atcagacttaagatgaattggtgttgagttctcagagtacagctctgtagtgtgaatccctggtcatttcgtagctaatgcttaacctgttagccccaatttcctctcttaaaatgggaacaatgatagtacctatctgataggattgtgaggataatccattgtaagtgtcattattcttatcatcattatctagttgtatacacagctttactgatttttcccccccctaaatagatggcatgattgtgggcaatgacttcattttcctacttgtagaaatcagttgaaattctagtctccctttcattgcttatttatgatagacttgctttcatagggttgctggtgatggcaccagttcaaacattttagatgaaggtttataagaatgtgtatactgttcagatatggggttatagctaaaacaatgggtccagtgttccatgaatttaaagtaaattttgttgtagatttttagttgttggttttcttttgaataacagccgttcactcttgcaccacgcctgagcagctatattcagagaaggctgtatcctcttattttatccaacaaagcagtttttctaatgtgcctccttttacattttcattgaattccatacttctggctgggcatagtggctcacgcctgtaatcccgacactttgggaggccaaggtggggcagatcacctgaggtcaggagtttaagtccagcctggccaacatggtgaaaccccatctctatttccccctaaataccaaaatacaaaaattagctgggcttggtggttggcacctgtaatcccagctactcaggaggcttgagacaggaggatcacttgaacctgggagatggaggttgcagtgagctgagatcgtgccattgcactccagcctgggagacagagtgagactgcgtctcaaaaaaaaaaaacttgtttccatacttgttaaaatttttatttagtgcattctgtttcttaggcagtaccaagaa

SEQ ID NO: 31359 - DNA, 1028 bp, Homo sapiens
tcaggtgatttgcccgcctcggcctcccagagtgctgggattacaggcgtgagccaccgtgcctggcggaaatagttttttaaaaacattaataaaatatataaaaaaaagcatggcactatcatcccatgagttagaaatcaagatctaggattaaattggttaatttattcttagttaatagtcacgacagttcttattctgtgagtcaagcgctcacctgttgagtgacatagttcttgaatcatatgcccaaggaaaaggacatgtctaacatctcagaattttaaaactgtgtgtattaacagtggcttatatccttttgcacatcagaattacctgggaacttaaaaaaaaagtttaaaagttgatatgtaggctagttgtagggaagtgtcacattgtctgagcccaggggaattgtcagattgtaggggaattgtcagattgtaagggttggggactgggcatgagtggttttgaaaagctcccgggccatttgaatatgtagtgaggttgagaagctctggttaacgtaaccctcaggacagctcaagaaattcttgcactgtgctttcccacgtacatttcagtgtacaggctgtgtacctgtggctgtttatcaggttcatcttctttagcaagtttggcagttttgtaaagtgtctaaagatcttttatcttgtattcttatacatattaagtaaaatctatgtggtagttggctttactgaacctattaaaattgctttttagctttggttataagcttctaagtaataaacaagaaccatcagacagaaatatgagttactgctttcggcagagtacagatttactttatacttacttagatgtaaacacaatagttcacgtatgtttaacgaaattcaaagttcacctatgtttaatgaaattcaaagttgattggaacaggtatgattatgcagagtggacagactttaaaaagtgagatgagaaggccaggcgtggtgcctcacgcctgtaatcagcaccgtgggaggcca

SEQ ID NO: 31360 - DNA, 1056 bp, Homo sapiens
aagtgaattttatctgagatatttaggtaaataaggacccaagagagagatgccagctctccgtaaactagtgcctataaccaagagttatttaggagctttgggtcatctccaacttattctgagaaaatcagtaggaaaaccacaaagtaaatattcagaaaagtgaatatgagttaagtaatttggtttgtaagtctaaagttctgtacagctgtctctgaagcctggattgataatgaagtctagatctttgggtttgtttgggtttgtcagtaatagctattgatgatcaaaaaagccatatgagcaaaaggttttgagaaaaaagttaggttctggattcattttaaaaagttagccactcgtttgtgtattttaagaaatctcatctgctgtactgaagccttatatatgttcctttatcttaagataacatagatagtacaccattttagacttagagaggtggtagaggtcaattcatttaaccatcacattttacaggtaggaaaatcaggacccttttataaatgggctggcacatctgcagattgtcctgggtcactgggaaggtgggggaggccggcaggggctgaccagaatcagcctcaccagtggatactctgtcagccttctcgcctgcctgtaaacctgttttcactctttttcatctggcatggtcctgaagccaagggcagcagtgggcattactattacacagtactacacactatacaaaactatgcctccttccagctccctggaataggaacctctgttcatagacctttgcctggaattagactgaaataggctgtgctcactgggccttgcctgttgtggattttggcttcccacttacaggggcggagctgcctcttgtgcctcccagggactgactttgcatttcccttggctccctctctgtggctttgttcctcattttcatcaccagcctgctactaggactggtccctgctgtggttatgttaacatcttctagggtttacaccccaaccctaagaagtcatgtgaaatcttacagaagagctg

SEQ ID NO: 31361 - DNA, 1036 bp, Homo sapiens
cagaataaaaaataattttataattgatttgtttaaatattgattaattatgcattcttttaaaggccaaataaaaagaaagaaactttttgccccactctgttacactactactaactgagcaatcttggtttatggaacttgaggttttgggaatcattaaatatttataaagatacttatagttttgggttttttgtttgttttctttgagttgtatagctggagaattccttttcattcatggtttcaggtttagctttaaggcaatatataccaacttttgaagagcaaattgtcaaagtcattaattatcttcagtttggatagtacattgaaaacattaattattttgaataatgtatgtttcttcagctattaacatctgactcgtctgttttaggacctgctgaagttcccatgatgtcacccaatggatccattcctcccattcatgtgcctccaggttatatctcacaggtaatccatttgatggacttctctactcactatggacactgtcgttgctccaacagaatatatgttgaggcttcaaagccatattccaggagttaatttgggtaccgtagtgctaggtttgccatcattttgtggcaccacatggcgtttcttgtgtcttgccacttgacgtaccagagaaccagagaaaaggagacacagaaggcctactagactgtcctctgccaagtggggtttttatatttgattgtttggttgtgatttctttatggagtctcctgcttcagacatttccttccacctgtaatacaactttctggaagaaaattcatagatgtagttagttaacatattaaaggagacatagctcacataaacagggcctaccttctgttacagaaggaaaaaaatggagttcaattgctccacaatgtggcaaaagctaggcttggtgagttattgagtatgatgtgagaacttggctgtttgcacttaaatttctctgagctttggttttctaagtaaaatgatggtaatagcaatctcagagatctgt

SEQ ID NO: 31362 - DNA, 1053 bp, Homo sapiens
acttacttacttacatagccagattgctggccagttttcctgctgttgcaaataaatgacttactttacacaagtctttgtaagtaagaatcactggagggagaaaggggtgtagaacaggctcttccagcagggacaccagatgatggatcacattcacatcagccgtcagttaacagaaaagaacaaggaatgtagaattccattatgtctcctgctcatgtattttgaggaagcatttcattccattgaatagagtacagttctcaccattgtgacgcaaaaataacacctccttttatgctaaaggtccatttaagaaataccagttaaaaattgaacatttctaacggagagaagcttcagtgtgctttttcttactagtattattgctgtgattacattaaatgcaaaaatatttattgcatgtactaggaaaagtggagaatttttgacttggatatagttcggattctggaaaacttctgtagaaaatccaaatagagtaaaagtagagctgtacactcgcttgtatgaaactgatgatggaagcatgttgatgctctttcccggctgacaggtatggcagaatatgctagacaatattggaagaatagttaaaatggaataatttgaattgaaaaagggaaagaagcagtctgtaaggcatgtgaatgactaacttcatttcaattgggctccttgaccagaagatgggtgcaaagttaaatgaccttccgtgatagtattatgtcttttatgacacgttacagtagagtatctgaaaaagattgttaatatgaagaaaatagaattgagaagccaacaggatgtgtacacaacatcttctttaacgctggcagtacacacacttcaatgaaatgaggaaggccgaaccaaatataaaatgtcttagttgtcttgttatcaccaagagataggagcaagatacattgttgtcatgcagttgtagaaagaaagaaacacacacacacacacacacacacacacacacacacacacacacacacacacaatctcctgcagcaggct

SEQ ID NO: 31363 - DNA, 1079 bp, Homo sapiens
ttttccaagcatcttctttcacaacactcatcatgaggacatcttgggagcaaaagtgtccatactgatttggggttacttaagtttttctttggtcagaatccctcatttcatccatatcctcagtcctagattaagtaatcttagggcacacttacggcttctgacgttaatgccacctttgtttcctaaagccctgatgatgatggaactgtgcatgttaaagcaggaaaggggaagaatgttgtcagcatatctagaagcctagccctggaaaagtacttaggtggcacagaaagcctctttctggaaaaccactgaactgatagttaaattcaaaagtcactcctagaatcagtttcagcacacattaaattcactcgtcttggatgaagccagtgaaaattttaagacaaaaacaagatttattatcaaatactggtctctccaaaaagttacatgggatcagaatcagatgtcaatgaataatttgtttttgtacgtttttatagttacatgttattacttctagaactcatttgactggttgaactagagaaccagaatacaacatgcatttgtttttttctatggtggaagagaaaagtaaaattaaagtggaagttattaatactatatatattcataggctgctaatatgtactgcgttctttccttttgtgtttttctttaggtgattgaagatagtactggagtccgccgggtggtggtcacaccccagtctcctgagtgttatcccccaagctacccctcagccatgtctccaacccatcatctccctccctatctgactcaccatccacattttattcataactcacacacggcttactacccacctgttaccggacctggagatatgccgcctcagttttttccccagcatcatcttccccacacaatatatggtgagcaaggtgagtagattttcgttggcgtcaggagccgttgaaactgattacagcgtttcaatagttcaaggcggtcctttgtttcttgtgaaataagcatagtagaaaaggatctaggtggtttgtaagactcatggggaattccta

SEQ ID NO: 31364 - DNA, 1067 bp, Homo sapiens
actagcctggacaacataacaaaacccctcctctacaaaaaaaaaaaatacaaaaattagccaggcatctgtagtcccagctgctcaggagcctgaggcaggaggatcacttgagccaggtcaaggctgtagtgacctgtgactgcaccactgtaggccagcgtgggcgacagagtgagagcctgtctcaaaaaaataaaaatttattataatacctgtactgtgttttatagaaatgtggtggaacatttcttgttttgctcaggaatttttgaatttttgtattttcaggactgttttaattaagtaccaacgtaattccattcatagggcatgttgtatattataggcatactattatttacaaaaagttgattttgaattaaatttcatttgaaaactgttaataaaaagtggtgtaaatcaagaaatgttttccatagagccaagctagttaaaaagaaagtaggatcctgcagtagaaaaagaacattggaagaattggtaagattctgattaggtctgtatgttaatagtatagtatcagtgataatgtttttcttttcttttttttcttttttttgagatggagtcacgctctgtcacccaggctggagtgcagtggcgcgatcttggctcactgcaacctccgcttcacaggttcaagcgattctcctgtctcagcctcccgagtagccgggattacaggcgcctgccaccacgcctgactaatttttgtatttttagtagagatggggtttcaccaggttggccaggctggtctcgaactcccgacctcagatgatccacccgcctcagcctcgcaaagtgctgggattccaggtgtgagccaccgtgcccggccaccagtgataatttcctggttttgatcattattctatagttctgtaacatgtttctcttcggaaaagcagagtaggagatagacagaaatttctctgtactatttttgcaacttttctgtaagtataaaagtagtacacaataaaaaggtgtttgaaaaaatagagaaaatactattttgttcataattttcccagtgggaa

SEQ ID NO: 31365 - DNA, 1030 bp, Homo sapiens
tccgactcctcctccaggaagccttctatgaataactttactcggagcccatcttttccccaccaaaagggattttcgttgtttgctattatttcgtacttaagacattttctgatgattattctcttctttcatgtttttcttaattagatgataatctagggcaggggtgttgtaaaagccagcccatcttttgcttctcaggcccctcctaccctagccctttacctgcgggccctctcagtctccctcacacccacactcttgacatcccgagctctgagatggccagtcctgatgagggaagtcttcccagctaaggatggtttgtttcgaaagtcattcttcttttaatatattttgtagtagaaatttgattatgtatatgtatatatttaaagtgcgttgtagaaggctatgatcttctaaagcaggagtgtatttgcatgtaaaatgtggtcctttaatggtggatttttaatcaaaatttataaagaatgtggttctttgatttatttgatttgtttaatcaataatattagtatattgatggatattgcagactcctggaaacatgaagagatttttcacatcagcctagccaagaagaatttgcttgggattacattacttctccaaattggaaaggaaaatgctacttcccttgtacttaatttgcagagctgaagattttttaaactgacataatgcaaattaaacaaaacaaagagacctgcagattttatctaagtttcaagattagcatgttacttgagctaaagagaaaacttctcaagtttgggttttggatagactctaattaataaaacttaaagtttagtttttattttctgaggtgaattcttggagtggttcctcaggttaatgtttgttttgcccattagtccaatgtcacctttcactggaattaggaaattattttcccatactgtgtttttcaccctaaaccaaaacaaacagtaactgccttagtcctcattcagctgtctcagcctcctgtgctcagagg

SEQ ID NO: 31366 - DNA, 1032 bp, Homo sapiens
ggatttagccgggctttgaatacctcttttaccccttactaacagtttgacttaggggaagttgcttaacctctctgttcctacgtttcttcatccatacattgaaaataataatagtacctgcctcttaggattactgcagagattaaaaggtttaggacaatgtctgccacgtattaagcgttaagtaaatgtcagttgttaatagtaatgttattgttaataacaccaccattatatcttggattgcattttagtccttcaccttggaagatgattgcctaaaaagtatttaagtaaaaggaaacttgaatgtttgtttacatggcaaattttatctctgggataaaagggggcatgtgttatagtgtgtttagttagaagctccttgggtctgttcttgggtgagaagctgtgtaggtttatgaacactgatcctattgtgcttattttaaaggcttctggaatacagtaatttgaaaaaaagtgattaatatatttccatttctaatctgactgttggatgttagttatgtcatcaagttaccgtagtgcatctctttttctctatacattttgaagctgttttggcaataaattgatcatatacagtatcatcaggggcaattttaattattaatcatctgctttcgatcatctgctatgctccctcccttttattaatcatctgcttttgatcatttgctgtgctccctcttaaagagggaggcataggagaaaaatgtaaatattttcaagaagttttttttttttttttagacggagtctacctcttgttacctagactggagtgcagtggcacgatctcggctcactgcaacctctgcctcccgggttcaagcgattctcctgcctcagcctcctgagtagctgggattacaggtgcctgccaccaagcccagctaatttttgtatttttagtagagacggggtttcattgtgttggccaggctggtctcgaactcctgacctcgtgatccgcccgccttggcctcccaaagtgctaggatt

SEQ ID NO: 31367 - DNA, 1050 bp, Homo sapiens
tttgtaataagttgggagttgagtcctattaaatttagagaaagttatgattccctcaaagatgtaatacatactagatatagccaaaagagcgataaggacctactgattgtgatgttaatacatgataaacattgaaacattttacattttaacagaagagatgcctcagattgaaacaagagtgatattggttcaagaagctggaaaacaagaagaacttataaaagccttaaaggtacggagttttaggttttagttttttttgtaatgcaatttttcttccatcagtgtgtaaatagtttcatagctttcttaacctcatacttaagtctcttttccacagactattaaaataatggaagtccctgttataaagataaaagaaagttgtcctggaaaatcggatgaaaaattaataaaaagtgttattaatatggtaggtcaaagtaactcattgcatgtggcatgctgcacttcccttgattgtattattctactttctggtgattggaattaggcacaaggtgtattgtgtgcaatctgaagcttaatgaatagaaactgttttatactttttaactccttagcttcttttttctcattcattttatatttagtctaaattcttgctgtatttccaaaattataaatcacggtaatttataatcagggaatttgcctcagcatacgaaataatctaattctggaatccagctgttttagtttgctagggctgccataacaaaataccacatagttaattgcttaaacagtagaaatttcttttctcacagttctggaggctagaagtccaagattaaggtgtgtgtaggtttagtttctcttgaggcctctcgccttggcttgcagtgtccttttgctgtcctcacatggcctttcttctgtgtgtccttgcatccctggtgtttcctcttattgggacaccaggttggattagggcccacccctattatctcatttaaccttaattacctctttaaagtccttatcgccaaatatagtcacactctaaggacttcattcttc

SEQ ID NO: 31368 - DNA, 1047 bp, Homo sapiens
tatagtattattttcctatttttctgaagatagttaatttgtacaataagaactttatgtatggtatcattttcttggtcagtagtggatatctttctaatgcatcttgatatcaaaatgcatgtacttaaaaactttagcattctaattttatggaacttatgcatacttgatgatttatgactaataagtaataagtcagaattatgcctttataatactgatctttaaaatttaagaacttaatttgaatggagatatgtatatgtaaaaatgtaagtacgtaaagaaatatggttgttcattaagtgtaatgctgattattgtgtgatagaaacttattttctacaaatataaacatgttaaagttgatattgaattgattgttaagccttatttagagagacagatggattatttgatatataaataatttttatttctgctaactatatgatgaaaaggacattaaagtgggctttgtaaagatggagtcagtggaagaatttgaaggtttggattctccggaatttgaaaatgtatttgtagtcacggactttcaggattctgtctttaatgacctctacaaggctgattgtagagttattggaccaccagttgtattaaattgttcacaaaaaggagaggtaagcatatacatttattatgacttttcaagttaaaatttttattaatgaattttaattagcaaaaaatttatttggaaaaatctcattgattgctgagagcaaaatatttagaataggaataatagtggctattctaatgtggtcctttaattcctccattttaaacttagtggtgaaaagctaaggcctttgaaagttaaataatgataactgtacatatgcatatacacagacaaatacatagtcctttttttttttttttttttgagacggagtcttgctctgtgcccaggctggagtgcagtggcacgatctcagctcactgcaagctccgcctcctgggttcacgccattctcctgcctcagcctccccagtagctgggactacaggtgcccg

SEQ ID NO: 31369 - DNA, 1069 bp, Homo sapiens
tcacattcttaaaaacttgtctttaaagtttagtggaatggaataattgttagaatttagataaatccctgatatagtgaatatggaagtctttgcctttaattacctttgttctagctgtagagaaaagacacatgaatagttaagcttaataatgttgcaatttaatgactgcttactacatgctaaatgctttatacgttttgtgtgtttataatagattttattattcctgttttacagatgactaaactgagatacagagaagttaagtaatttctccagggtcatataactagagagtgatagtgctgttcaaaaagcaaacaaagtcacaggggaggtcacataaattatggagaaaataggtagaatgaagtcagaggagggtgagttcactttgtgctgaactgatacagaaaggctcctataattcttccttggttatcagtatttccctttctttttgatttttagtctgtaaacaaatgtgttttctagatttaagaaacaaaaaaaatcaaaatctcctccggacctcatgacacttttcacttattgtcccatttttctgtttgctttcacatcagcatacttaaaagaattactttgatctattgtctcatttccttgattctcgttgtcctttcaacgcattccaactgatctgcagtccttgttggggagacagtttttatgcattcaacacatgaatagctactcctttatggacacaattttttttctttgcttctgtgatattacttactcatttctcattctccttggcctaacttctttttttcaattctaaatgttgtatgttcctcctgagtcattgtttcttctctattgtactctccctaaattatcgtagtaaaatctatggttttgaaaagcatttgtatgctgatgactcccaaatttgtcctcttccctgtcaagctacctactttgtacttccttgtccatgtctaatagatatcttaaacctaagataaccaaattagacctttggattctgccactcttaattcctctgttcctttgctcctcttcatcagtcttt

SEQ ID NO: 31370 - DNA, 1923 bp, Homo sapiens
gtgatccgcccgcctcgacctcccaaggtgctgggattacaggcataagtcactgtcctgtcaagtaggtttttatcttggtgttttgccgctaactttgtggatcaatttgaatttgtgtcagttatttagctagtctggacacccttctttgacaaaatgtgttattttatgtttgcagagtcataatcttaatttagaaaatcatattctttgattcagtgaagctttgaaaatttgtcaccctttagttttctcaagtgtaacttaattctttaagcttcttttttgtaaaatggtacttcaactattagtttttcagttttttctttttttttttttttttttttttgtcatctaggctggagtgcagtggcctgatctgagctcactgcaactatttgttttttttagctgattgcaggtttgtcaaatatttaaaaattttaaagcttatgttcttttctaccgtgaaaccagtacgtgccgtgaaacatttgtaaaactcaagagaaaaggaaaaagggagagaaatacccataattccattatccaaaaatgtctaaaattttgggtttttttctttatcctcgtaacacatagcagttttttttcctgttttaaatgaagccaaccatctattgagcattaccacatctattgagcaagaagttggtattgtacacattttagaaatgtgaaaccggtacacacagagaataactttacagaggcagtcatctaataaatgctggatccaagacttgaacctttatttgtataacttcaaagtctgttctcctaactattaatgctattttgcttctttaaaatcatgctgagatacattcttttggtatgtagatgaatacaccatgtaaatgtgtcttaaatttgtacagtttttcgtatcatctcaataacagcattcctgaaaacattggtgtctgtattttataatatcacatagtggttaagaatatgtagtggaaaaaacgggtttgtttttttttttttctttttgcgacaaagtctcgctctgttgctcaggctggagtgcagtggtgcagtcttggctcactgcaacctccatctcccaggttcaaatgattctcctgccttagcctccctagtagctgggacaggtgtgcgccaccacacctggctaatttttgtatttttagtggaggtggggtttcaccacattggccaggcaggtctcaaactcctgacctcaggtaatctgcctgcctctgcctctcacagtgcttagattacaccactgtgcttggcctgaacaaagcagatttgattgagtttgaagtcaggtgactttaagtgcttcagttttcctgtttataaaatggggataataataactgactcatgaagttgggcaaactaatcttaagttttttgtagtgttaaaacttttttttacccattgtgtttacacccactgtctagcatttagattactttcggtaaatgtttactaaatgatggttgtgttacctttaactttcaaaattaagactagcactcactgtattttcttatctaggtattatgtatacaactttagaagcctcatccttactttgcttccaaggtctagtgagctgatgttttgagtaagatgaaaatttttgaggttgttatatacatctctctcttttcctcagtatgaatttttctttttcaagattaaacatcattaatccttgatgtacaattttctgctcttagcttggcacagtggctgatgtctgtaatttctgcactttgggaggccgaggcaagtggattgcctgagcccaggagtttgagaccagcctgggcaacaaggcaaaaccccatcgctacaaaaaatgcaaaaattagctgggtgtggtggcgcatgcctgtagttccaactcttcg

SEQ ID NO: 31371 - DNA, 1045 bp, Homo sapiens
gatgttcattattttacacatcaaattaagacactttgtaaagtgcttctttccaatgagtatctcagaaataataaaagttgtataaggagctgtcaggtttaattttaaatatttcaattcgtgctatttcaggatgatcttgaagaccttatagttaattgggatgagagcaaaagcattggtgacatttttctgaaatatgtaagtattgtatttcttttttaagttttcagattaaaatatgatctcatcaaggactggcaaggagtgtaatttgcctatttaaatgtgagaggttttaaaactttgatatgattgtgtttataaaatacattggaaatgttctttgtcttctgaaacatgccttctgtatgcaatttaacactttagtagcccaagattattggaagaatgccaattatcatgctgtggtataattgttttagtatgtatcaagttatttgcctttcataaatggccacagattgtatttttattttatatattatttaattttcattttaagttcaggagtacatgtacgggtttattatataggtaaaattgtgtcataggggttaattgtacagattgtttcgtcacccaggcgttaagcctggtacctattagttatttttcctgttcctctccttcctcctaccctccaccttccagtaggccccaggtatgtgttgttcccctctatgtgtctatgtcttcttatcattttgctcccacttataagtgagaacatgtgatgtttggttttctgttcctgtgttagtttgttaaggatgatgccctccagttccatctatgttcctgcaaagggcatgatctcgcattttttttttaatggctgcatagcattccatagtgtatatgtaccacattttctttatcaagtctatcattgatgggcgcttaggttgactccatgtcttgctattgtgaatattgctgaattctaccagatgtacaaagtttttatttttctcccttcttagttgataacactttttgctgtcatgtctgtttctat

SEQ ID NO: 31372 - DNA, 1049 bp, Homo sapiens
aagagggtttatgaaggctgggctttataaaggaaggtttatgtgtgatcaggttgatggggttggaaaggatttctttgtaagttttttctaaaaattaaacattggtgtcaggagtgcattgattgatataggaccaaagtctgaatctctatgtttacaacgagttttacttgaagtattgatcagcttttaataaaattgcagtaggttttaatttttaattccagaatctgtttctttatcagccatcttctaaactgcaggcattttctttttcaattagcagtaatcgctcctcggatagacctcattggctacgatactgccactgcgcaaagctaaactgcaggcattttctgtttcgtcttacatttcttcctgatatctgtttaatttcctcaattcaggttaaaaatgctgtcttctttatttaaaattattttaattaattaattcatttatttattggagatagtctcacccggtcgcccaggctatagtgcattggtgtgatctcagctcactgcaacctctgcctctcaggttccagcgattctcctgcctctgcctcctgagtagctgggatttcaggcacatgccaccacgccctgctaatttttagtagatatgaggtttcgctatgttggccaggctggtcttgaactcttggcctcaagtgatcctctcacctcagcctcccacagtgctggaattggaggcatgagccatcacgcccagccttatttcttaaggtagcattttccttttgaagtttctcagattcatatatcaggttcaactgtgtgtgtgtgtgtgtgtgtgtgtgtgtgtgtgtcagggtctcattctgtcacaggctggagtgcagtggcacaatcttgactcactgcaacctccacttcccaggctcaagtgatcctcctacctcagcctcctgagtagatgggcctacaggtgtgcaccaccgtgcctagctaatttttgtatttttttttttttagagatgtgcttttgccattttgcccaagctggtctcaaactccagg

SEQ ID NO: 31373 - DNA, 1687 bp, Homo sapiens
gcctgtcactttactaatgtaaatagctatgattctgtttatacagatcggttccaatgacatagcagagaccgagttttattccttttactatttttgtgatgagtagaatataatctctgaaactgtatttcagaggatgatacgagttctaaattcatgtatattgtatatatatgtatgtatatttaaagtgtttcctgaacaatccaaatttccaacagtttcagaattattattagatatttaatactactattactaagtatttgagtgaaatatctgttctttataaaattattaacctactgaagttaagaaaagcaagtgactgtcatttcttagctgtgtgtcctgtagcaagtttcttattctctcaactgcatttttgcagatgatgttatatactgaggggcaatttgggtggtgattaagagcatggactctggaaccctagtgttcaaatccttgctctgctatttactagctgtatgtgttttggcaagttattaacaatctgtttcaatttcgttgtctgtaaagtgagtcttaagtagttataaggattaagcgagttattatatgtaaagtgcttagaacagtacctggcacattgtgagtgctcttgagttttataagtgatttctttttatttataaaatttccgcaggtaagacacataaataatactcattaaatatatattttaaagttgcttaaagtcttcagttaacacatcaaagagttatggctaaatctattagtgtatttatacaggtttttcatcaacattaatcttaaccaatgggagagaagctgcatttagttgataaaatgaatatatgcaaagtagtttggccaattaaaattgacaaatgcagataaacattaatttgtgaaaattagattatagctttctcgaagccacctgtagcaactattgtaaacattttcatctttcaaatgaaaataaatgaattttatagaaaattttagaaaattaatttatttatggttatgtcacttttaatagacagcatatgtaagaagcagctaaaataccttcaagacattaatgtcatcttctcaattgcttgtttctgttctaacagattacccattctgtttccacaagcaatgtaattggatttactaagcatgtttatgttcagcgcctaaactctactggtgggcgctctcagtactcctggtttcaatctgtacgtcattctgctttccgagctagtttttcagagatactagaaggaaatactgatttttcaaatttcaaaaaagttctttccaagtcatctttgacatttgtgaagaattaggagatttgccaaccactaatggaaacaagcctcatgaagtttaatgtgagcttattagctatttaaaatttgtatttgcgggaaaaaaaaaaggaacatattttttctccaaggaatcacttatttggtgggtgggaactttggaattcacaatgttatgactgctttgaattaataacaatttaggtttaatagagtttcttaagtccagaaaaaataagttccattagaaattttcttatttaggaaaattatcattttaaagaatagtaattgtcatgagtagtggatttatattccaaatctgattcttaatgttagatttatagcatttatagaaaattatgctttta

SEQ ID NO: 31374 - DNA, 1056 bp, Homo sapiens
ttacaattgcagagtactccactgtgtgagtggactctattttattcacccaatcccctattgatgaacattagtttctagtgttctactaccacaatgatgttgcaagttttatgaataggtcattttgtatttctgttagcataatttgcaaaacaaacaaaaaaactacatgtgggattactaggtcaaaagatcagtatataattttggtagatattatgggcatattttgttttattgcacttagcagatagtgtgcttttgatagactagagatttgtagcaatgctgcattgagcaagtctattagcacagtgtttccaacagcatgtgttgacctcatgtgtctgtgtcacatttttgtaattcttgcaatattttatactttttcattattataacttttggtgatctgtgatcagtcatctttgatgttattattgtaattgttctggggcaccacaaactgcacccatctaagactgaaaactttatcggtaattgttgtgtgtgtcctgactgctccactgaacagctgttctccagtctctccctctgcttggatctccctaactcctgagacacaatattgaaattagactaattaataattaatcctacaatggcctctaaaaaatcaaaagctaggaattactaaacttagtgagggaggcatgttgaaaacagagatagactgaaagcaaggccccttgtgctaatagccgagttgtgaatgcaaaaagagttactgaaggaaattacaagtgctattccattgaacatgtgaatgataagaaagtgaaacagacttattgctgatacgaagaaagtttgaatggtctagagagaagatcaaactagccacaacagtcccttaagccaaagcctaatccagagtaaatccttaactctctttcaattctatgaaggctgagagagataaggaagctgcagaagcctgaagctagcagaggttggttcatgaggaaagaaatggtctccaaaacataaaagtgcaatgtgaagcagcaaatgctgatagggaagctgcag

SEQ ID NO: 31375 - DNA, 1903 bp, Homo sapiens
taaaaggcatctttacagcaaaggaaacaatcaacaaagtgaagagacagtcacagaatggaaaaatatttgcaaactacccatctgccaaggaattaataatcagaatatataatgagcttaagtaattcaataggaaaaaagatccaattttaaaataggtgaaagatttgaatagacgtgtttcaaaagaagacatacaaatggccaacacatatatgaataaatgctcaacatcactaatcaaagaaatgtacatcgaaactacaatgagacatcatctcaccccagtaaagatagcttttataaaaagaacaagcaccgagggatgtttgttcgagaacataaagggtgacccttgtatattgttgatgggaatgtgcgtacaaccactggagaacagtataaagtttcctcaaaaaagctaaaaatggaactatcatatgatccagcaatcccactgctgggtatatatttaaaagaaaggaaattagtatatcaaagagatgtctgcactcccatgtttactgtagcactattcacaatagccaagatatggaatcaacctaagtgtccatcaacagatgaatggataaagaaaacgtggtatatatacacaatggagtactattcagctgtaaaaaagaataaaactctcatttgcaaccacatggatggaactggaggacatgttaagtcaaataagctaggcacaaaaaggctaatattgcatgttctcactcatatgtgggagctgaaaattaaaagttgaacacatggagatagagtagagtgacggttaccagaggctgggaagggtagtggggaaggaggtataaagaggggttggtcaatgggtacaaagatacagttagatagaaggaaaaagatgtattgttcagcagcacaataggttgactataggtaacaataaacgttaaaacgtaaaaagtttcaggaggtttgagtttgaataaactattttggcttactttgaaagaggccattttgggattggtgttttgttttgaggcctagacatcaatcaaagctgaccattgaatgcttggtattttgtctttccacttttttaagagttccttttaagcatattattgttgacattttaaaagtcccatcatggcttaggaaaaaaccaatactcttattattcaaagatgatatgattgcttagatagaaaattataaataatctggagaaaacttagattaaattctgaaacaaaatcaatatacaaatagataccagccacaaacaagtaaaaataccttttcctaaaagatacttgttacaatagcattaaaaccattgaaatacttaagaataagtctaataaaagatacacaaaatccctacagagaagactgtggaactttatttacaataattaaagaagaccttaattgatatgattgtcaggattggatgcctcagtgttgaaaaataccagttttccccaaactgaacaaattcaaataaggcaaataaaaataccaacaggctgtgtgtgtgtgtgtgtggctgtgtctgtgtgtgtgcataaaacgtgactaattgtttctaaatttatgtggaaatacaaagggtcaagaataatgaatatggttacagaagtgaaagaatctgtttaatcagatacaaggtttattatagagctgtagtaatcaaaacagtgcagtgctggaagtcttggtgtattaaaccaagccgacagcattatcattgtaaaatagtgggtgaaaaacagcctattcaataaatggtgctgagaaaaactggtatctttttttttttttttttagaaacgttgtgtttaatggtaaagcttagtacaccccagcaccaggaatggcatggagtcgcagcagcagggacggacag

SEQ ID NO: 31376 - DNA, 1047 bp, Homo sapiens
tcggtttccatcttactggattgtcaataggaagatatgatttttcagttatgttttaattatctgtaaatgaaatcaccaaagtccagtcttctagacttaatattattattattatttctgaaatataggtatgatcttattaacattggccagtggctccttatagattattacatgccaaagtccacaaccctaatgccactcaatgcttttcacaattcattcttaaacctccttatgtagattaaaacactgtcctcctggccccccttctgaattcactctttagtccattcacaagactcttaattactattttccccaacactacataccattttaggattttgtggtttgcttatgctaatctttcttcattgatccattccctgcccctctaccccaccccaccaaatatacaccaatgataggacagaaaaacattttagttccttgggtggtctttccttcatcatgatgcttccttcctgtacccttactctgagctcccacaacacagtatttatactgggagtagcccacctttcacacttctaatggttggctttctcactgcacagtgaattgccagagatcaaaagacatgcctgatttatcatgtcattcggaaatgatagcttacctttatgtctgaacatagagtctaccataaatgaatagtaaatgtattatttataaatatatttggctatgaagtaacagaaaacttggctaaccgtggattaagcaaataaagctttatttatctcacataataaaaagtcaggagaagagagttgcttaagcattttatcaggcttcttctattatctcgaaacctttcttctcatgggcacaaggtcactgatgtgcctccaaactcgtgtctgtctttggggcccaaaatgggggagaagaagataacagtattctacctcagggtttctcagctttgacactgttgtcattgtgggctggataattatttgtctttgttatgggggagtgtactgtacattatagggatgtgtagcatcatccttg

SEQ ID NO: 31377 - DNA, 1194 bp, Homo sapiens
gggaggctgaggttgcagtgagccgagattgtgccactgcactccagcctgggcaacagagcgagactctgtctcaaaaaaaaaaaaaaaagaataggtgcattacaactctgccagttgtaactcaaaatacgctgggaatagtcctggtatgctattttgaatgtcatttcttcacgagccttctctagaacccctaggaagcctgagatctcacagaacagcctctcgtgggacactctaccatagaaatctgagaaaaacaagagtatgggtggtgctgctataggggagaacgaaggtataatcactggaaatggaataatttgttagagtgttagaaagagtataaagagccatctttaacattgcaatatcttttatttatcctgctacactcaggtttgcaaaactgccatatgtatacatatatatcaatatgtaaatgtgtatctatctacctctgtttatctttattaattgaaaattatagttgaatgattgatatgagaaagcctgagaagaaacaatcacttttcttggaaaaaactgttcatattccatatgtactgtagacgggaatgtggaaaaacactagaaaacgtgtcactggcccctagaaaacgtgtcactggcccccaggaaaataaatctagcattcatctatcagtccatatatttttttgcttatcttcatgaatattatttctttcccccatttccaactcctgatttcctgtctcctgatccctgtatccagtcaacaatgtctcttacacacgtctcttacatggcatcctttctgtacctaaatccagaacccaaattcaggattttccattgtgcttttgaaatgttgcaaaagccttctaaatgcaaatatcagcaaccaacactctaatatgaataagtttgtctgactatttccctccgccatgtgatacttggctaaaaagaatgaaacataaaaaagacaagtattgatggggaaggccaggaagatcagtttaaaccaagatcattgctagtgagaacaagcctaggttaatgccaggtgcttactagaaggatgttttagggacctgtaggggggccaagaggcaatctctggagagggtgggagattgaggaatttgggtctgggaaaggggtgacacaaatgagcaagataagggggaaaacaaccaaacttgt

SEQ ID NO: 31378 - DNA, 1049 bp, Homo sapiens
tatcaaactgactctctgttctttgtaactaaaccccaaaccaaactgattaacctacagccgcaagaacaaaatcaaacaacacatgatgtatgttattagagcatgtctataactcgctttttacatcaatttaccaaacactgagtgaacccagcacttgttgagaagaaaagacagaaatgattatttagcctttgctaagaaattaagaaatcagttttaaatgaccagcattaaaagcaaaacaatttttcattgtcaccatccaaatatgctaagaaggaaacatctagaatatatttcccaatattaaaattatttcagagtagttataaacaaacggaagactgctccacctcacacaattttgtttattctggttagtggctcccattctttggcaaataatgtatggcacacacatgagttctggaacatgttttaataactcttaatttcctaccactcatgacccatctgtcatgatttgaggaccttacattagggaagtcaaatagggaagactgtgtgtttgtgaccaagagcattaattttaggcgtggtttaactatgtgtcccattaattccatatctacaggtttttatctgtaactcaacccagccagatccatgttctcctcttctttgtcttgttgtatgccttgagaagctaaccttgacttctataagttacatccacccaggcccccttgatagttggcttcttttaaaaatccaacaaatgcaagacaatggtaggagaacagagtgtaagagagagagtttgggttaaaaccccatccccgccattctttcctgctctaagccatgatttctagcagttactacatctttttatcactatgacccaggttgggtggcctttttctatgcctccagctctaactgtactccagtaacactatttttctcttgcccttaggccagtcataacctctttctattgtcattcccttggtgctgcaatgttcctttttatttttcttcaccctgtccagatctaaagtcatccttattaaaacttc

SEQ ID NO: 31379 - DNA, 1049 bp, Homo sapiens
tcagaaatactgtgtgttcggttccagaccatcacaataaagtgaataacacagtaaagtgagccacagacattttttggtttcccaatacatatataaattacgtttacatgacactgtattttaatgtgtataacattttatctaaaaatgtacataccttaattaaaaatattttattgctaaacagtactaatgatcactggaaacttcagtgagtcttaatctttttgctggtggaaggttgtgtcttaatggtgatggctgctgactgatcggggtggtagttgctgaagattagggtggctatgtaatttcttttcttttcttttttttttttgagaaagggtctcatattttcttttttcatgggctggggtgcactggtgcaatcacggctcactgcagtctccacttgccaggctgtagcaattcttcctaagtagctgggactacaggtgtataccaatacacctggctaatgttgtacgtgtgtgtgtgtgttttgtagagatgggatcttgccatgttgccgagctggtcttgaattgctaggctcaagtgatcttcctgtgttggcctcccaaagtgctgggattgggattggtagtttttttttttttaaataaagcaacaatgaagttggtcacattgattgatccttcctttcaagaaagatttctttatagtgtgcaagtcagtttgatgggattttacccacagtagaacttctttcaaaattggaatcaatcctcttaaactatgccactgcttttatgtatattctatatcatttgttgtcatttgaacaatgttcacagcatcttctctggaagattctgtctccataaaccactttcttcacttatccataagaaggaactcctcattcattcaagtttgttcacgagattgcagcaattcatttatgtctttaggctctacttttaattctagttctcttgctgtttttaccagatctgcagttacttcctccactgaagacttgacctctcaaagtcatccatgagggttagaattgacttctt

SEQ ID NO: 31380 - DNA, 1033 bp, Homo sapiens
cagatcacaaattctgagccttttttctgatcctcctagttatatctgctcccatagaaagtttgaccttttatttattaacactgttacttccagaacctcccaggctgattaggagctctgagcctagtaataataataatgaaaatactcctgtagcatttattatttgcttgacattgttctaaacactttacatactcgtttaatcttcacagttaatactatgaggtatattctacagcattaagaacagtcacagagcttctaatgacagcaggatttgggttcagattttttaaaattttaaacatgttttatttggaagaacacaataaattctacttgtttttcaatacattctatgcattttcttaaattaaattacattttatattcaggggttacatgttcaggttataaccatagtagtgggtaattactagttacactagaagcccaatccccaccactatagcctaactgtcacagaaagaatgaacattgtgtccgacaggtaattttcaactctctgcacaccttccaagctccttatcttttgaagtccccagtgtctactgtttccacttctatgtccatatgtacccattgtttacctcccacttgtagatgagaacatgcgttatacattgattcttttgtctatgagttatttcacgtaggataatggcctctggccccgttcatgtcactgcaaatgacactgtttcattcttttttatggctacacagtattccatggtgtatccataccacattttgtttatccagtccaccactgatggacacttagatacttagattggatcactttactcttgcaaatagtgctgcaatgaacatatgcatacaggtgttgttgttgttgttttgagacagagtcttgctcagtcgcccaggctggagtgcaatggcatgatcttggctcactgcaagctctgcctcccaggttcacgccattctcctgcctcaggctcccaagtagctggaactacaggtgcccgccactacg

SEQ ID NO: 31381 - DNA, 1034 bp, Homo sapiens
gagagttaattgctcatcaatacctgggggaaaaaaagtaaataatcttttcagttttgatgagtaaatagtaagatattaaggcagtattctcagttgtgtttaaggactatctaaattggagtatcttcatgtacttgttaacatgccaacatggcctctactccaaactcactgaagttggagaaccaataccttacattaactagcatagcaaaaatgtaattcctactttatcttaatggttttaattacttaatgatttactctgtataaaaatgttgaataatagctagctgtcttttcatgatgtattagtcaggactctccagataatcaaagccaagagtaggggatatgtgtgtgcacgagtgtgcgtgtgtgtgtgtgtgcgtagggagagataaatttattataagtaattggctcacatgattatagaggctgacatgtcctaacatctgaagccagcaagttagagactcaggagaactgttgttataatctgagtccaaaggcctgagaaacgagagccaatggtgtaatttccagtctgagtctgagtccaaaagcaacagaagaccaatgtcctagtttgaaggcaggcaaaaagagtgacttctcccttactcaacatttgttctcttcgggcctacagtggattggatgagacccacatacattggagaaggtaatctgtgttactgagtccaccagttcactgttaatctcgcccagaaacactctcaaagacacacacaaaagaatgtctgggcacctcatggctcagtcaggttgacaaataaaattaatgatcacaaatccacgtgttgtcaacttgacatccatatgtatctccttaagtcacacttaatctccaaataaaaacaataactaggttataattccaactattatacaagtctcctgcacacaaacagagaatacgctaattccttccatagacaaggaggtaaagtcctcgagtaatgttaacttttctccttgacattccataacttaaatactgtgat

SEQ ID NO: 31382 - DNA, 1056 bp, Homo sapiens
atggattagtggtttgaattcttcccaggctatcagcaatcagaagttgttagtactctcttggggtctatataaaatgaaggtggtctgattacaattctgggccagcaggaaggagtacaatttctattacaggggggtaggaacggaagtcttggtaaggaggccagatgtctccttctaatggcttataagaacaaaacctgaacatgttttaattttttttttcctcaaagcactatctcgggagtagtgctaaggtatttcattccctccccacaatcattttctcccactataataacttattcgttaatttacttacgcatttacttctttctctaacactcaaaagttcaaaaagttcattgagattgtctctattttacttgttccaagccagtgcctaccaaaaccaaacacttttggcccttcacttaccatatgcagccaccttgttaatcactgtttctctggacctcatagtttattgcctttgcaaataggggctgtaaatctattgtgcttctctaaaattaatttctggtcaatatatcaaagaagctttgatgacatttgaccaaggcagacgaagatacaaaaacctatgtaaaatgattctgaaatgcttcctatagatcagccagacttttaaatcgtgtatgccttactataatgaaaaagtgaaagagaaagcatgaggaaactagagtaaactgggaactgtgcttggaacccagagtgataccagcacctcacattttttttttttttgtagatcatgtgatgcttctgtagtggttatagaagcagtgtgatctgcctgtagagctaattggcatcaatgagttttaagacaactttctgaaggaaaatacagtatgtgattttagtttggtaatgaaggctggatttttatactattgaaacagcttgaaacttttgaccaaggcctgtagaaagaaatatatgtatttaatattagaatctagcgaacacaaacacgctaacacgtgtgtgtatgaaagtatatatgtatatatttatatatatgaa

SEQ ID NO: 31383 - DNA, 1063 bp, Homo sapiens
tccccatggtgcacatcagtaaatgttcatgtaattatgagagatgatagaatagaaaccctctgtgcacactgaataattagattaaaactctcaactaaaacactatgaccacttgtatttttacccttacagttagttcccttcacatctaaggggagcaatgaaaaaaagacatgttgtaactttgggaaataaaagatctgttcctctattattctgttattcttgttttaacgcacttgttcattatctgatcaaacaattattgagtgtttaatgagtcctaggggctatgctggaccccgaagataaaaacaggaagacttggtacttgtcataggggacaatcaagcaaggactcacaaaaatcattattataatagctacaatttgtatagtgcctaccacaggccaagcattgttttaatggctttatatattaacttacttaatcttcacaataaacttatgaaaaagttactattagtatttccactttactaaggagaaatatgaggcacagataggttactgtgcaaggttccacagttagaaagtggcagaaccaggattcaatgccagatggtttagctccattgactgtgcccttagccactcactataacaaacattagagatgctatgggaaataagtaaaatttacatatggtagaatgctacccaaggcagggaatggacatctctatcttggatgggagctggagagaaaacacttcatcatggtaatgatacttgaaatgactgcagaacaagaggaagtggcccatccactgagcacaggatgtgcagggatgagtgggagagggcttctttaggtagagaacagcttgtgatcagagagtacagtgagagatgagcctggagctctaggtgggatccagatgtctccggagcttggagtatttctctaggtgataggatgtcattgagggatttaagtaaaggcttgacataatcagatgagcactgtagaatgttctttctgacaacagtataaatgatggaatccaaggatgataaaccacgatagggaataact

SEQ ID NO: 31384 - DNA, 1066 bp, Homo sapiens
taaactcttattcacttatataaagcacctctgtagaaagtatgaaaggtgcttcagagaagttttcgagcctttagaaagttccaaagcctaaatatatatatgaacctttttgtattgcagcaagtcattctgttatgtacacattttagtacagatggctattttgagagagtgtacgtaaaactggttataacaaatgaattttctattcccaagatttgtttttctctcagtatgttatcattttgagctacatttttggaagcatatatgacaggtgtacttaccaactgtgcctgaaagaatgatgttttgaaaaaaaaaatctaccacttcaaacctctagttctctgttctttcttcacgttgaaattatttctggatgaatttgtttatttcttatttctcaggtgtatttatttatactttgtaccctacctacatctcaaatgattttaagatagcttttaaaaattcatgtataataagacagttaaaattaaaaaaaaaaaaatctgacactacatgtatatgactgtatgagagcgtgaggttctcaatggaaaagtgcatatgttaccagtggatggtgtccaggttcttggcaacttgaacaaagaattggacaaaatgcacagacaaagcaaggaaagaatgaagcaacaaaagcagagattcattgaaaatgaaagtacactccacagagtggcagtgggcccaagcataggggctcaagagccctgttaaagaattttttgggggtttaaatatcctcaagaggtttccattggttacttgatgtacaccctatgtaaatgaagaggatgaaggaaagttacaaagtcatttactcggtgtttgtcctatgtaaatggagaggatatttcctgtcatagctgaagtgtttccctttgatttagttttaggaagtccttaggtttcctgcatccagaccccattctcctgcttcacatatgcctaaaactttgtaatatcaaattttgttttgagcttgctggtaggcaagacaaaaaggagcactgattaaaagtattctaagtta

SEQ ID NO: 31385 - DNA, 1032 bp, Homo sapiens
aatttgaagaaggaggtgccatttttaggaatgatcagaaatgtacttttaaattatctatatgcctataaatcaccactgccaagttctagaaaattctaaggtaaaagcaaagactggaagataaaaatgcaattttgaattaatttgaagtgtagccagtcatcagtttttaaaacaatattctctttgttatcaaggtgacaagtttttaaaattctgaaaaaacgaaattcagtttaaattttaattctctgggtgtcaagtagcaagatggaacaaggttatgattcttgtgtttgctcattaataccattttatgacaatgatgatatttctgcatacatttgaaatgtgttaatgacatgtagttaaaggagaggacattggttgacaagttgaacctcagtcactagggaccatggatggaaactgaagtaactttgggaggtatatacaatatttatttgtttcagttcttggtgcagaacagaacgttctgaacaaagaactaatgcaaatgtaccctttctggctccaactgaagcaatgtgatgccttgcaattggaattttgagacatggaaaactgggtcagattttctttctgcttcaggctacattttttttaaaaccctataataattaattttaaagatttcccatttgcttcatgttaaaactatgtccttcaacacgtttaacagtgaattttagctacataattttatttgaaattttttaggctatcaaatgcatgatgattggactgactgttaactttgtatagattgagtctactctcttcaaaagaaatgcagcattttctgaccagtgagataagataagcagaagttgttttatattcagagtactatttttttaatatggtaaagaaatagaaacatgaaatgttttttccaagctaaggtaacaaaatgaccttacggtcagtgtttggatgtgaaagaggaatagaagattgatgttttgatggataataattgactgttagctgttctcactcttctaa

SEQ ID NO: 31386 - DNA, 1071 bp, Homo sapiens
ttaaacaaggttgcatttttataattctgggcagacataaaaatatcctctctttgtatttactcagatggaagctgaaattgttttccaaaaaatggctctcacggcatcattggtcaacttgactgtgataatgtgaagtaagaataaagaaaaggagttaggtcccaagtgagcaaaaactaaaaacaaatgagtagtttttcagtgttttctttatgcaatgaaatatttgtattatttgggtttacaaattacaaagatacatggcttcataactcgttcttttgtcttttaaattatcttcatttttttctttatctttgggagcaaagtgctgatgagttagtgtgatgtaagaatagaagagttaagagaaggagaagaatggcaccaaacactagctttatgttctcaaatttggtgcttaggccactgataattgctattcttttgaaaatatatatgtaaattattttcattttttaaattataataagcctatgttctgtacagatattttctagcttatttcactgtttactatatgattgactttggacaattatttaaactttgtatattcttcatttttaagttgaaattaatgatagtacagggtccttgtgggaattaagtaggctaagatatgcaaaatgtttagaatacagccttatacccatctgtactcaacaaaggttaattataagcatagctgttacatgtatgattacattccttagcttactttctataaaacaaatcacatatgtaccctatattgtagggtgcattgttatgcctggaagatatttaaagtgatatatggctttattgctaaagagttatgctttttatggctggttacatcctaacaaagtagagatagctcaaggatactaagaaaaaggagaaagatgaagggaaaagtagattaagaaagaggaaaaataaatgtttgaatgcaaagtgtaatagaaatacatttgcaactagaatttgaggtttaaattataacattaaattggttgtcatgatggtatataacagcgtcttttgaaaacatttatt

SEQ ID NO: 31387 - DNA, 1040 bp, Homo sapiens
cttttatatcagatcctaacatgctggagttttctcaggtgaaaaatcaggcatcttttgctacaagatatgttctctctagatcactaagatagcctaatccttaactgtgattttggtttttttaaataagtcttgtggtagagcaaagtagagttcattctgagtcatggctcagatggaaacaagcaaggttacacccaagactcaattaaaatcgtggctcatattctagtttatacctgcacctatgagacatactaacacaaaaaactaacaaatgtagttttttttaacaactaaaagtgcattagctgtgtgtgtgtgtctgtatgtgtaggaggatgtttctctgtcagccatgataggcaacattctgctgcaggaatagcaaactcaaaatattagtggcttaaaatgacaaaaactacttctggcacactcagtttcctctggaaatatagaaaactcttgatcaactgtcctccatgtgacatttctgtaactcagactgccttgatcttaatcttgtatctctgccatctcaatacctgacctcctcatttcctgaggtagagaaagagtagtcacagggttccacattgccctttcattgcctcaacccaaaggaacccataacattggctagaatgagagatacagctacacttaactgcaacaggactgggaaatagaaggaaacacatagatcgtgtcatgagcgttactgcctcagccatgattccttactcatttgatcataagcagaatacttaaattttcatgtctgatttctcagagatttatcctgaagttccttataaatagtttttcttcaaatgctggtttgcagtgttctgaaactacgggcttctgccgagggtgttaatgatgattcattcggttgaaaaacaactaggtaatttatcataggctagatattggggatacaaagaggagtgagatgcagtgcttctgacctgaaggagcttactgattagttttcaaaaaagatgtgtaaacgtttatattatactggt

SEQ ID NO: 31388 - DNA, 1088 bp, Homo sapiens
tacataataataaccaacattgattggacatagtatgtgttagaaaccattctaagtgttttatgtgtactaagtaatttattcctcaataaatccctatgatttcaaaatgattatattcacaatcttacggataaaaacttgcagcactgatagatttttaaaaaaacaacaaagaaacttgatcaagattacccagctgggaagcagagaaactgaggtttaaatccaggtagcttgattccagagacattgccctgaaacttaatcatagagctttgatatttaaaagtaaactgcttcttggaaaggtgaccttaaatgtagttatttgacattatttatgcttcaaaatgaatgatccgaaagaaggctttgatgtgcataaacctgacactggaagagagatcgctctttggggaggaaatatgatgaagaactgagatgctggaatcttataaacataagccccttccttcaaaattttcattagaaaattgtaaacactttattctgctattaaccacatgggcctggagactgagaagtggaaggcactaggcaggcttcctctttaactaaactctacctcggcagggttagatctgcatagttgaatcagccccctaaaggaaacagacacctgtgaccacatctgcttctttcccttgagcctgacacctgttctttcatcaggatacttctgtagtttgggaggatgtggttgaaagaatgtatttgtgaattgcaagcaggtaattaaggtagctcagtaccttgaacatttctgatgttaggagcaggcatttgaaaacagtaatgacagtaattagataggtagtgattctcgcttgaacccgggaggcggaggttgcagtgagttgagattgcgtcattgcattccagcctgggcaacaagagtgaaactccatctcaaaagaaacaaacaaacaaacaaaaaaaggcagggattcttttcctgcgttatttattatttacctgttagaaactaatgtatgtctctctgtaaatgcatgagttaaaaaataaacgaataaatgaatgagagagactagtgatattttgtt

SEQ ID NO: 31389 - DNA, 1031 bp, Homo sapiens
tggtatgtatttgcaaggaagtgaaaagaaggaagtaatctgacattaggggtagagaaaacctagcctgagccctaggactattgccgtttatgactagtggatttttgaagtgcttaggtgaagatgtgggctacaggctttgcaactacttatgtttagtaacctcagaaagtctttaggcttttggttttcaaagtaatatactattgggggtataaatcacatcccctttgttactcctgtacctgagcaaggaatttttcacaagcctcttcacttcctgtcagactttgccattcatgacataccatggataggaacagcgtagaaggtgtttgaccactgcggacattgaatgtgtctttggtgagtcagtataaaaactgaagccatggcagttattatttctacatatgacagtgaccctctgccatctgaactttacttgccaggtagaatctgtgtctggagccttaatttgtaagatctgtactcaagtcctgactctaccactggacactgaatatctttcacttttagtctattcatttgtaaaagggatataataaaaatacctgttctgctttctaaaaatatttgtttaaagcataaaatgtagtgacacatgcaaaagccattaaatgtaagtgatgaagtacaatgctaatgtaaggcaataatacatttaaaataaacatagtgaacattatactagaaacttcaagttaatgtagcaagacttattatttattccaaataattttgaacaaaaaagtaccattatttttaaatgagaaaatattatgattttaaacctttattaataaaaacagaatcctcataatgccctgcttttttaaacagttgtgctttcaattaggcttataatattaacaggatagagaccctagatataaggaagcttcttcctctctgaagttctagcaagaattcagcacttcagttcaacattttatctaatctaatgacagtttttattttcacaagattaggaagcaacctcagat

SEQ ID NO: 31390 - DNA, 1058 bp, Homo sapiens
taaaagaatcccgttgtcaagaagtaaaaaggggttttgttgttgttaaatgatgttttaaaatcctgtccaatttatgttaaagaaagtacctatggaggttgagactgaaagacagtgatacatgaaaaggaataaaagaacacagcaaacataaggtctggcaacgaccatgatagttgtttgcctgccaacagcagtaataaggactagttgtaccggttgagaaagctgtttaattcagatgcatccaaaaaatatgcatccttcaaaagagatacggtgcatacatttatactttaagaaacaccactgtgaacttcaatcttgaatgactcaaagaaaacgtttaaattcttcaagcttacagacataagaaagaatgcaataaattgtgggaactggtagagattttgccaaaaataaagggccttctcttttgtgtatgtatgagggtgtgtgtgtgtgtgtgtgtgtgtttaattaggtaaaattatgtaagttcatttaggctctgcagcattttctgatgacccagtaatcattttctgttatcccatttagctgttaagagcaatgaatagaaatctgaaaccaaaagccattccctttaaaattctacatgcattaacttgggttgcaggaggaaattcccttataaaagtgaaggtattaccattaacacagagaactctttcagtcgttcagataataattctgactctcatttctaggacctgtcccttcagttgttttgcagctaatggtcagaggtttgttcagaaccacccacacacacttgtttagtccctgggtgaccaacagaatgcatttatgagaaggttgggccggagaccgcagtgtgtgcctttggtacagagattctctttggtgcaaaatctatctggcctttatagatattgcattagcatcgagcacaaaatgttcaactgcctgactcttgaacccttttccctgacctcaaatgaatgttttctgaagatataaatgtgtgaaaggtggtcatttatataaacctggagaaatacaaggagata

SEQ ID NO: 31391 - DNA, 1029 bp, Homo sapiens
aagaaaatgtattgctcttgaataatatccaattaagcttttcagcattttccaagagcattcaagaaggaaaacatatcccttatcaaggattctttgccttataactaaccaggtaacttctagaatcattctcactattgctgatacaatctattcaaaataatatcgtgaagaacgccgattttatctgtaatctatacggatactgttgtgagttaaagtaagtttgctagaaatagtcgtgggaacccacagttttagaggctcacattctataatcgttcttgtcatgggctagtcccttattcagacattgaatagcctttttctttccagaaaaccatggtacttatatttttgtcttcttttattttcaaggaccatgtagcttttttttcatatttatgctcatatgcaaagcctatactagtctttcttattattttctaatttttatttttttagattatagtagcattttaggctgaatcaggattgtgtgagaaaagtagcagggtttagatcgtgaactttaatgtggcgctccaaacaggccttgcctttactgcagtgggttaacatgagcatgttttactcctctgagcctcagtttttacatttgtgaaatataggtactgatcccctatatcttaggtttcttgtgagaatgagattagataagcatgttatataaactagcacagtgttagcatgtagcacatagtaaaagttagtatgattatgatatcttacgatgatcatcaaataatgaggagtttaagttcagttgcctttcagctaccctactattgctgagtttaatgagtgacctctaatggagtacagagcccaaaacacaattggtaaaacattatctatggcatactacaaatattttgctcattcattcactcattcatttattgatcaccctaagtggaaggactggaaacaagaatataagctctagcttaaggaaatagataggagaggcacattattgcaatatagcctaattataatatt

SEQ ID NO: 31392 - DNA, 1044 bp, Homo sapiens
tgcttcactgtatgagaagggatttcatggattttataataaaggaagattacaaagagacaataatctcttggattactttatactttctctggattgatactttatcacgggtattggaatcagacacataagaaactaaattgactataattttagacaaaccttgtaagtcttagttacttcttttgtaaaaatgggaacattaatatgtataaaatatttgatagtgattggcataacaccaggaacataatcaatattcattacatatgagtttaattttgcctaaatttttaatacagatactgatacttttcttaagaaaatagcaaaaccagaacttagattgaatacaaaagtagattttactaaaacaagagaaaagtaaacatatccttctttgcctctatatttttctaagccctgacctagaatagctagtccttagtcccctagtgatagttatatcaattactccctagtcaggaagatgtctaagccaaaggtaaggcagaaattctggagaaattagccatcagcagacacgatgtctaactgcctccacctgattgagaattctcatatccatgacacgatgaaatattatcagctgaacttaggaagggcgctctgaaattcttacaaagcaacattgtgtgtgtgtgtgtgtgtgtgtgtgtgttggcctttatctggatttattgttgatgaatggcttgattttaaatcaacaggctatggttcaaaccatttcacttcctttcagtttgtccatttgtaagttaaacttttaaattcagtcccttttctgtaaaactgcagtaagaacacgtacctctaaggctgttttatgaattaaataagataatgtatgtaagatggttatcatattggcacatattaagtattcagtcaattatagtacttgttcttattatttattaatagaagtaatgcattcgttacttattaatatcttccaaagcttgaactttgtagttctttaaacgtatttatgtgaaatcttaactgtgcttactt

SEQ ID NO: 31393 - DNA, 1034 bp, Homo sapiens
tttttctgttttcatgttatctaaggacaaagataactgtatcaaaaaagactaccactcttaacaatttaaaataactcttaaggactattaaaagaactatctctattctggaaaagataattttactaattatgatttaagtatactatgaaatctcaaaaacgtctaagtctccaactctagtttctctaaataatacttttttatttcatcattttccctaaccacaaaagtcaagtataactcgcagcttgccatagagaatcaagttcacctaagtggtttgctgagtcccatggtctaatcccaatcttacttcccactaaattctgagaataatctgcttccaacaaacctaccggtgtatacatccatgtatttatcattctctactatttattcaaattctctccactttacaatgttctttatctaggcaagagcacagtgaatctcgtttcttttacctcacgagattttcattacctgtagctatcttatatcgcaccttgtaatgttccatgtttacgtggcatcatgctccatgaaggcaggaaatgcatccatccaagttagaaacttttagaaactctgtttgcgagtgggtggggaaagtgcagggaagtattttcagtcctgatgttaacataaaccttaacccacccattgttaaccatacctttaggcaattcagtaccaccttcaaagttataggactattaactgctttattgcctgtaatgatcttggtagagtgtaactggaaagccaattgagtctttcttaccactttctcttttatccagatgtggcaaatgatttttttctccccatgatcagcaaacttctcattccttttctgaacaccttctgagttatgaattgcctttttttcctttctttttctttcttttgaaatggagtttcactcttgtcacccaggctggagtgcagtggcatgatctcggctcactgcaacctacacctcccgggttcaagggattctcctgcctcagcctcctgagtagctg

SEQ ID NO: 31394 - DNA, 1077 bp, Homo sapiens
ttagtttatggtaattcccaattgagcctatttaagaatgaatcacaaacatacatgtggagaaaaaaatgccatattaaaaaaggagagaaattaaatttctctctgaagctttgtttacatgggcaacatgaagtcaatagaaaccatctctgcagcatttacttgatgctctatgttagaaataaatagagaaactgggaggggcaaccttctctggccctggaaaagttgactggatgaaatgttaccagtcagttatccctctcctaaacctaggatgtttgccaccaagggtatagtctgactggcaaggctaagaaggaatggaaatatgattcaagctagaaaaaaggatgattccaatcaagtctcttaataacttctcctatcatcaactcaggttcaactggaaagtgtgaaactcctctctaaggcttttactttttcccatcatgcctagctttttgagtacatctttgctcctttctggtctgataatttaatgctgggtatattaactatgtaatttgtagactgttagctccttgaaggaaatggtcatgccaaattcacatggggtgtacagagttggtattcagtaatcatgatttgtataaatggatgtgtaataaagagaagagttttaaccaaaaattgtatttgttctgtctggctaggattctttgggtaactttatatttgacaaactttgatggtgaagagaaaatgagatggaggtcacttactgaataatttggacctttaagccccctttacctggacttaaatggaaatttgattggattgctttcttccaatctgggcttcatttgacctgatttgaaagtcaataacatggtttgatagaaggactttaatctatgcctcatctgcttgatttcagaagtctttggaaaatctgaaaaaggtgggtgttttccgtcatgcctggtctccctttagagggggtggtgggaacaggaaccaaaaactctgctctctggtgatgttggttacatctgtgcagctatcagtgtttcctcctacacctctatcctaacaaatacatttttt

SEQ ID NO: 31395 - DNA, 1047 bp, Homo sapiens
ttatacttgcaaatctcaaggtgtaaatatatttttctgaatatattccttaatatttcaataattggctgcaaaaaggggctttatgtatgatgcagcctttagtcatttttctctcctagcagcagtgatacatttaagaaagataaaacttcttaatctacagagtggaaaagagcaaaactgtaaataagacataattagaaagatgtatcttcttacgtgatttggggcattttgcaagtccttcctctgcttatttatattttcagaaaaattcccctaatagccaatgcataattgtcaatttatagactctggggtaaaagaggcatctggattgtgcttttgagaccttgtctttactactttcagactgaatgtgatgaattgttaaataatcttcagttagtaaaaccaagccttaaaaaatgaaggcatcctataaacattcagtttgaaaatactaaaaagtatctgtataatattatgtcagaaagtgaaacatgacactgtcgtaattctaaaatgaaaattaaatagaaccagaatttatacaaatttattaccgtgagtttaccagtgttgctggagtttaagatgtcagaggaggaaatcattatgtctggcattgctggatcaattacctttatggcttctaataaattttgtcttctgattttgatggatatttaatcatctgcttctggagagatttccatttatatacctggaaaatgcttcaactgagtacttattaactgttagcaatagatatagttctgaaagatagatatagttctgtggttactgtgacttaaacaaacattgggaccacacgatcactttataatgagatttagtatccttttgtagttaagaaaaataaaaaatttggtaaaattattgtttttctttattatctataaatgcttcaaagtagttaataagagtaatttatactaaaactttaaactattgaacaaatggaactgttggtaaatactttgaaattttgtttctgtgaatgtaaaactttcattcagc

SEQ ID NO: 31396 - DNA, 1042 bp, Homo sapiens
ggctagagtgcagtggcgtgatcttggctcactacaacctccgtctcccgggttcaagcgtttctcctgactcagcctctcgaataggtgggactacaggagtgcgccaccatgcctggctaattttagtatttttagcagagatggggtttcaccatgttggccaggctggtctcgaactcctgaccttagatgatccatctgcctcggcctcccagagtgctgggattacaggccagagccaccatgtctggcctgttattaattatacaaatagagttttagcacaactctttttccacctaactggaaaaaatgaaaatgaagaaaattttctttggaaaattatttggtagtctttcagtttgttcaaatttgtctaatccatgcatatgtcatctgataaaatcagactccggttaagacctgtgttcaacctttttagcaattttgattagtatattaataactctgaagccacaaattggtctaccttatatcttctttttcctattagatgtaacctttctaagagcaggtatcattcttttttttttttttctttgttttgagacggagtcttgctctgtcgcccaggctggagtgcagtggtgcgatcttggctcactgcaacctcttccttccaggttcaagtgattctcctgcctcagcctcctgagtagctgggattacaggcatggatcaccatgcccagctaatttttgtatttttagtagagatggagtttcaccatgttggtcaggctggtctcgaactcctgacctcgtgttctgcacacctcgacctcccaaagtgctgggattacagccatgagccactgcgccaggccgagaccaggtatcattcttatctctgtatcctatataatacgtcttagtgtcctccaaatagtaaaatcaacatttcatgtatgtatatcccataccattcttgcaaattttaatgtgtgccttgcatattcacataattttattatggcttagtgttaaaccattttggttagatttttcacaacataact

SEQ ID NO: 31397 - DNA, 1026 bp, Homo sapiens
ttggcctgagtcccgaaggccatttagttgttaatcaggtgaagggcattttagctagaaggaatggcaatttaaggagtattgaatccaaatgccggaagttcagtgtggctgcagtccagatgttttatgggtaggtaggagtagattaagtaggaagggatgtggaagccagatgatgaagggctttgcttacaataaaaaaaaaagttggattttatccagagtgttaaggcatgaattaaagcttgaggatttatagaaggggtagattccagagctattagaagaacacagtatagcatagtggctaaaaggagctgcctaaatctgagcttaaatctaggccttgtcaactaagagttgtgtgacttgtgcatgttatttaacctataaacctaagtgtccttatctgcaaaatacttgcctggtacatcgttactgtgcagtaaagagtagctggtgctgctgattctggttgctacttgcacttcttaaaaagtggacttgaagactgaatactggcagtaatggaggagtagggtgctactggagaattcactagaaatataggaagaagaatgggtttggattttggtgttttagacgtgttaaatttgaaacagaaagtggaaatccaatggaatccatactagtttgtgagctgtcagcaatgttgtatggaaagatgaaaccgtgagttaatgacaaaactgcctacatggaggagatagacaagaagatgtcaagggtgaaaaactgcgtgcattcactattatttgaaaattatgtggaaaaataaaataaaatccctgaacgagaaagagggaatcataaagggatataagagaaaatggtgttacaaaagtcaaagaaagatttccaggaaataaattgtttataatactgattgccaatgagatgtcggttgtgataatgctagaaaatattcacaagaaggagccactggaagtcactgtcaatgttcagagaggaaaagggaaaatcaagtttcagtggaatagg

SEQ ID NO: 31398 - DNA, 1062 bp, Homo sapiens
gaatgaatgcaaaggcgcagaagaacatagaaataaataatgtacaaatcacacttatttggcattctggcacatttggttcagtaagttcccaaagaagtgtgagtggatagaatccacatttaggaaaattgaccttgaatagcacactttcacaaatgtggaagagaaagagataaaaatgagaaaagataatgataaaatttagttggaggaaagagctaaaagaacagaaataaatgaggagaaatttgacttgatgagccttttctgtgggaattgatgagcttccattctgtgagttaagagtcctggtgaggcagtgattagattggaagattaaaaattgagagaggtttggaatgaaacagagtagttgttctcaaagtgtggtccccaggctagtagcatcaacatctcctgcaaaattgttatacatccaactccttaagtctcaaccagacttcctgaatcagaaactctaggggtggagcccaacaatctgtattttaacaaaccctcctgatgattctcctgcacactgtagagtctaagaaccactgttaagagtttagtgatttaaagcacacgttctgtgtttaaatcacagcactgccgcttattgtcttttgcaaattactaatatttaacctctccttgtctcagtttcttcatctgtaaaatgaggataactagcaataacatactcatagtattcttgtaaagtctatatgacccaatgcactggaagtctttagaacaatctctagcatattgaaataataattaacaaatgtgtattatcattgtgggaaaatggaataaatttctaagtatacatataagaaaattgtagttctgattagtctagtgggctgtactttgtgacaattgcccgcttagtagccaagactctttgttttagtcccttgccacaagcctgtccgcccaggagtcctgttgtcttttctttttctgcaccatcttcagcagcataaggctattttgatgaatgaaatggaggaaaggaggaagaataaaccaagaagcaaagtaatgtgt

SEQ ID NO: 31399 - DNA, 1027 bp, Homo sapiens
aatcattagacaaatgagtagaatgtggatagtcatctaaagatcatagatagaatgagtatgatagagttccacattttttctcataaaaaacatttttattccatttcattctttttctctcaaggaaaaaatactaatatagaataattaagtttaaaaatacaagttttcgagttcttctgttttttcttcattattttgggtaagttatcatgtttctcataagtattgttaattttcttttagttcaccttcatatttgaagggcagcacattacttagtcttacttgggcactgtcaattgccatgtactagtcaatgccaaatgtcaaatgccataagctagaagtaacttgtaattatttgcagatagcataactccaggatacccttttctttaattttccctaatcagttattgagttggatatatgggctgtaagtaaaggagtactgatcccactgtgctcaggaaatgcttctggtcgagtccagcagacacccaaaggattagtgcagaatttccttaaacattttccatcctgaatcagagacatgtgtatccttgtttgaaaggcagattcctgagtccatcccagacctactgaatcacaatctctggggctggattccaggaacctaacctcagtgcttgtctctctacctactccttgatccttatgctccagcctcttgtagtctctgactcgtgcccagtatgtctccattagaaagccatgcacagctcttcctttgcctggatctcttattttccaactttctcatgaatggttccccctcattcaggtctcagttcaagtgtcaccttcacggagcagacttcataaactccccaagctaaagcaacccccatcctcaccataacattttctatcacattaatatgttttattttttaatgtttagtgtctgtcactttttactaaaattgaaactccactagcacaatagcttttctctgtcttattcgctgatatatttgcagaaggcactccaatacat

SEQ ID NO: 31400 - DNA, 1049 bp, Homo sapiens
tgaatgagaaacctgacagtcacatcaactgataaaacagcatcagcatgacttacacattccttaccattgggcaaatctacatgggaaatcgcatgcttgtactcagaacaatctaagtcagttttttaaaaagaagtaatccttagctaagagaccttgaaaaactcttgtccactataaagataactttgaccacagaataataatactccaaatctttggccaaaatttcctctcccatgggcaacacttgaatgtggaaagtcagggtttatttttctttctgatgtttctttttctatacttccatgtctgagaagcctcctttaggattaatatatttttaaaaaattctgatgatgcagtgaatcaagtatagtccaatctaggagtctcctgtaatgttaatatgactttgtaaatctctgatctcactcactataatagatggtgttcaacaaaagtaatagaaaatcttattcacagtggcttaaactaaaaggacatttacaaagaagactcatgggttgcagtcttaccgcaggtgcatcaagtagcttaattatgtaatcaaagaccttctcctcccacccttccttttccccgtgctcagcattttggcttcggtgttgatgactgtcatagcttcatgtcctcagagaacagcacacaaaccaagaagggagggaaggggccaaaagcctctctcatctcagagcactctcttatcagagccatttttgcactcaagctcttccttcccagtttacttctctgtgggcatacctggatcaccagctcacttacagacagatagaagaataaggttggcatattggctcagaataatcatgatccatcctcagcagctagacacattgttttgggtagggatggatgatgttgttgccttagtaagcaagaagtgggaatggctgttaaatagacaatcaacagatattatcacaccatactctgttgggtgattataatagtcttaggctttacccaaaatctattgatcaggcatctctggtgttgaggat

SEQ ID NO: 31401 - DNA, 1083 bp, Homo sapiens
tgtcatatatatataataggtttgagattatagataccagtttcaagtgatatagtagacatgttagatttggatataacagttaagcaagggcttcaatttctttgaggattttgatctgatgttaagttgccaaagcagaacgtagagcttacagcaataaaagtgaatcagacagtgaggagggaaagcaggtgctgtattgatatttacacatggacagtaacatcatcaaaattgtcatcttcaaacatgtacagcagcttttgcaaaaatgagagagaatagtaaattcagaaatgagagtaactttaaactgtaatgtacataatgggtgaagtcttccagatagctcctccagattttgcacaaagcagtgaatcttgagtgagtccaatttttggttacgggtattttctttgagttgataatagatatgtgggattctgagtgttcttgaaaaagtccttattccggcagccctcatactggtaatattttgtcataaagactttgaaaggttctactgttgcatgatttgcaaatgactgctattccccctcaaaataacacaaattggatttaagaccaatatcctcaaaactggctgaaatgaaaaatgaacaaagtaaaacataaaataatatttctgcaaaataataatattttaataactcaaaagcagttatgtcagtaagtgagagcttatctttggaaggatcaaattcaataatacaatgggtcaacttcagattagctattgcttaaaattattggtgattgaatagaacttgtaattccagactagtcaacagaatccaagcgtatgtgatgcctcacatacatttgttaaaccagagaaaacattagataaatatcgacttttctcttgtcattttgagtctaatgttttcttttctttcagttttttatttgtttgtttgtttgagacaaggtctcactctgtcatccaggctggagtgagatgaggtgatcatggctcactgccgcagcctcaacatgctgggctcactcactcctacctcagcctcccatggagctgggaccataggcatgtgccac

SEQ ID NO: 31402 - DNA, 1027 bp, Homo sapiens
aaatatttacataatatattcatgtgataaggatattgtaattcaattcaaatacatttattaagcagcaattatatgtaaaagattgattgtcttgggtgttcaaggacaacacagctagacgtataagccaaataaagcttggctaagtttggtctagttcaatttttttaaaaaaaaaaaaagaaaaagaaatatgaaaaaaaagcagtaaaaatagaaatccatcttcaccaagcctttaaagcaatataaatttatactgaggttcctgcatactataacacacagaaggaattcctaaaaatgttctttatccagctgtctacccaaagttctatcatcctggcaaactgctctctccaaaattcatcatcttggactctctctgaaactccaacccttctctcttataccctgttctccaacattcgaatttgtttagtttgtcttcttcctaatatagctatttctgtttaccattttgagctctggaactctaaccactacttaccaccaaaacaaaagactagcaagtaggttcaggggaaagactatacataaatacacaggtccacaatctctttggtgccagatgtatttcagaattccaaatttttcaggttttaggaagaaatttggtgaataataaacaccactaaggggacagggaagcactaatgtaataatgatatattattattactgcaacaagatatatagtcacactatataagacagagacacatcagttcaggtcaagttttgcccccaaatatattcaggatggctcaagttttgctgtctaatgaatttttaaaagcttaatttttatagctttataaattatgaaattaaagatgagggaatgtggtcctatacatcaatactcaaggatcatatgagttaatttgcataaaactcatagatcagtgcatatctgatacggtttggctgtgtccccacttaagtctcaccttgaattgtgataatctccatgtgtcaagggtggggccaggtggagata

SEQ ID NO: 31403 - DNA, 1053 bp, Homo sapiens
gagaaatgacagcaaaataagtaggactttcgtgttgcagcagtggtagctggaaagcttactgaagttgagctactgataagcccagaatggaaataaggccaaccctctgatgctccaaccacctccttgaaaatgatctttgtgaggccaatattcaaaattctcacaattcaaagacattactgtgtcctaattatctttgactttccatagcatttggctccccactattgatggtagtctctaatttgacatacaggttgccccattcctctgttgtctttttttttcttttttggcctactcccctcttttcagagaaaagggactaggggctaaagaaggctaaatgctcaccacatgtcttctgattaactctgtgtgttacgtaaggggaatgacggagagagcagtctgttactaggtgaggtcaaggacatccttcagaagaaactgagcaagtgactgcttggcaactatgtacagaagggatgaagaatgaaagttaagtagacaatctaaatgaattctcgaaacttctgaaaggagctatctttgaccttgaaggggaatgtaggcaaaataaaggataaaataactgacactcattaaagaccaaatttgtgtagggcacctcattttatacattatacaagaaaaaaattgataaacaaaaaaattagacatttctgctcattagaggacactactgagaaaatgaataggcaatccacagagagaataaaaagaaacatttgcaaaacatatatttgagacctcattgtctcattttacttcagcaaattctggggtgttaggaattacagttttcctcttttagaaagtaagaggtttttaattttggagaatttttaataaaaattctcaaacattaataaagccaaaagaattttacagtaaatgttcatatatctatcacctagattctatcattaacattttattattcttgttttgctacaaatttattcatcaatttgttttattttttaatatgtagttcaaagtaaattgcagttaacagtacac

SEQ ID NO: 31404 - DNA, 1027 bp, Homo sapiens
tggaacttttaaggacataacaacagtttgccagacttctattaaaaaagtagatttgctcaaaatatagcttctttgtgaactataggtatggcttcaaatgttttcactgactgcataatgagcaactagagagcaaggatttggtctaatttatggctgtatacctagtatctagcttggagctctgagtaactaaaacaaaatggtaaatggacttggtgtagtcccaattgctacatggagactcttgctatgcagcaaattacacacacatgcaagtaattttattcaagaattatttgacagtaaagacctaggcagttgtgagaaatagtggtatctaaaataaaatcaatcattaacaaagagtttacaattttgaaagaataattcaatgagttctataagaagaaattattatgttggcttacataacccttcattatctgatcctctctttattctctattttagtttctttccatccctcctccctaagctttaggggttctgaactggtgcttttcaaattgtgtggaagaatgatttgcttttgtttgtttgaatatttcatttctaatccactgtggacgtgtgcatggatcctgctgcatgcatatgactagtacactgctcatttcacatgacaatacaagaactggtccagactatattcaaggccatgatgatgagttcactgatactctaatgttgtaacagtgtccactttccataaaagtttctaagcacttattcgcaatgtccgatcttatttctgtgcatagtctgacagtgaattagtgaattagtggatcactctccaccaattagcacactcttaaattacttgcagtttgcaagccagttgatgccccctgccattttgcttttggtttctccttcctgtaatgaccctttcttctgctcccgactaatcttctactagtctgttgagacttagcactagagtcacctcctccagaaagccttccaagactgatacaaaactctattactatgctta

SEQ ID NO: 31405 - DNA, 1056 bp, Homo sapiens
ttttaggtgtctaaatattccttccagttttgtgtttaatgttgctttcaaggaacaaatcacttgaaatttaaatttggattcagtgtatgctgatactacagcatttacattagaagtaaaatcagaagccatccacatgttcctcaactatgtctggtatggtcaattgaaaaggagccaatgcaaacgcccctttgataattaaagacattttaaagaactgcaaaaacctaaatcaccatctttgttgaattgtgtagaatgttccacactttttttctttattttcattattttttgtttgttgtttttagagtggtatacacttgatttgtcatttttagaagtgaacattctgccagtacctacttcccaagacttgttaaagttggaaactacagatgttcacttgggtggcttctcctcagtgaacatttccctgatttgtagttaattctctattccattgagtactgtgctacatttccctgtagatttgtgcttgctttttccagcttttccacatctccacctctcaaatgaactaatcataacattacgtttggttgcttgcattattactgtgtttagtttttatttctatctagctgttttaaggggatgttcgttgtattttttcaggtaagattagatattattcctgtttttgcctggatccgacatccagaaaaagcgtaaaacctgaaaccaataagaaacaaatgattttattccttgctatttaactcttcaagcattttcgttgggtttaagtacattgtaaaaattaatgagtattattaaaagagttaactattatgacactaactccaaggatatgccaagtgcatagtgggtacttaaaaatattccaatgtacaaagaagtaaataatgaaaagcgttaaaggacatttgcttgatatagtctgttaaaatacataattctgacctaggaattcttttctaacatgatgactttttccctaaattatctggataaatgccttcattttaaaatatgttttgtatatgtaaacatagaatcttggaa

SEQ ID NO: 31406 - DNA, 1147 bp, Homo sapiens
aggcttagctataatatgtcactcccttattcgacttttcctcaacacttcatagaatttaccacaatttataatattgataaattgtgacagttgcattcattggacaatgctcagtatgatgattatactaatgtaagcaaggtaacatttcaaggacaatgttaaactcaattttccttaggtttgaaacaaacgtgaaggtggacatgatattcactttcccacatacatttaaaatacctataggtatagacagatgtagaattttgcttacagagaaaattgcagtgaatatatcatattgtctgtccagaggtcttgagcattatcttggtttctaacatcaaccctacaacttaataatcacatttgtatatatacttatgttttcatgattttaaaacaggaaacatctttgaaatgtttatgattctattgaatttaaattgagttaaagttggctcataattaaaatcacaatatgttatagtataactttttttcaaaaatcagctacatattgagctctgaagattctgaaattggccagttacagtggctcacatccataatcccagaaatttgggaggccacagtgggaggagcgcctaagcccaggagtttgagatcagcctgggaaacataatgagaccttgtctctacaaaaattttttttaagccaaacatggtggtacatgcctgtgctttgagtgaattcagctgaatttctctcctttgacttagttgctatttttccaaacactagccaattcaaaatggctgtgaatttctctatttgtgtattttattgtctttggcattcacaaaagagtgaaccacaatgtaaccaaaataaaatgtaactgtgattcacttccatatgtggttaatggcccatggcaaaattttgatgataattcatctttattgaattatattaggttattatggaatcaggaagacatctagaactatcatcattctttaagaatagcatttttttcttctcaaagttgacgtcagcagaaggcatcctggacagaaaatgaatcaccaaagagtttatgcttcattttataaagaacttcaataccagatttttaaaaataaattttattatttagggtgatagtataaatatact

SEQ ID NO: 31407 - DNA, 1054 bp, Homo sapiens
gcttgtataaaaatttgttttattgtgattcaatattttctatgattgtgttaccaaaacactagggtttagtttacgtcttgctgcttgccacacagaaagctaatcactgagacaactagtattgccagtgaagaaggctttaatcatgtgctgcagccaaggagatgggaaatcagtctcaaatccatctctccgactgactaaaattaggggtttctatagcagggaagaaatccaacaatgtataggaaaagaaggaattaggcaggggtaaggaagaaaggttagtcaacaggaagcaggtagcaagtgatacaatcatgacaggactagcgtctcattttccagttgcagtgatctggtaagtttcagctccttaatactatccacggggtctgatggtagatttcctgagaatggaactgatagaagacaaatgtaactttctcaagttttaagactgggaggatcaatttctatatgtattgaaagaaatcataaatgtcagttctgtggggcaattggactggtctcaattgtgagcctcactttccacctgcttccacaaaagcaggaattctagggttggaagagcttaacatggatggtccaaatcccatctaatataggaatcgtcaccattagctcaacaaacaatgacagttaactcctggggtagttacataaaaatacagccaaaactagttttggacaatttagtttctaaattgaggaacaacctgaccccccagaattctgtactcatgtgtgttagatatgattttttgagcaatataaatgtagttatatcatacctttcacacacaaatagaattaaaaactctcatattcttaggtttttttctccttctctaggctctgtttaatcagttcttctgtctcttactaatatgaaatggtttccagatggtaacgtcattctgtattttgtatcaataaaacatctaggagcaatcagtgtaatccagttatggattgagtttggagggactataacctctcactaatcagaaactattgccattggctc

SEQ ID NO: 31408 - DNA, 1083 bp, Homo sapiens
acctgaaactgattccatgtcattgctattgggtatagtgctgcatttaacatacaagtgcatgtgtctttttggtagaatgatttgggcttttaaatatgtatactcagtaatgggattgctgggtcaaatgatacctctgttttaagttctttagaaatctccaatctgcttttcacagtagctgaactaatttacattcccaccaacagtgtacaagtattcccttttctccacagcctcatcagcatctgttgttttttctttttgactttttcataatagccattttggctggtgtgaggtagtgtcttattgtcgttttgatttgcatttctctgatgattattgatgatgataattttgtacgtgtttgttggctacttgtatgtcttcttttgagaggtgtctgttcctgtcttttgcccattttttaatgaaattacttagcttttgcttgttcagttgtttaagttcctggatattagacctttgtcagatgcatagtttacaaatattttctcccattctgtaggctgtttactctcttgatagttttattttcctgtgcaggaactctagcttacttaggtaccacttgtcaatttttggctttgttgcgctttttcttctactattcttacagcttgaggtcttacctttaactctttaatctatctcgagttaatttttgtgtattgcaaaaagtacaggccattttattcttgtgcatatagcttgcaagctaatccagcaatatttattaaatagggagtcatttctttattgcttgtttttgtcaactttgtcgaagcatagatggttgtaggtgtgtggttttacttctgggttctctattctgttccattggtctaagtgtcttgtttttgtaccagtaccatgctgttttggttactgtaggcttatagtatagtttgaagttacatagtgtgatggcgctggctttcccaatgctgtttttttccagtgctgtgtaaaatgacattccaatgctgtgtaaaatgacattggcagtttgataggaatagtattggatctgtagattgctttgggctgtatgga

SEQ ID NO: 31409 - DNA, 1067 bp, Homo sapiens
gtccatcaaacatttcccacctcctacaatctttgataacactttaaaaaaattctaaacaaagcttttctaggaagttttagttttttcaaagctgctttgcttttgtgtctcagtaatggtgtattacagggcccagcagcacatggatgatccactgctgtaatccaccagcagggatccctggctccgtgatggattattgcattacatcatcagcccaagggctgacaggaaagaaagtacttcaaacagtcctccttcgtaaattgttttagtcttaatgaaagaaaagatatggttttgaatgggtatggatgagtagaaaaactgactatacctttcagctctgtattgaattacatacatgtgagagcagctaccaaaatgctcttggttcacaagatggaattttctgttcattttaaacatatggcactagctaatgtgcataacagtgaccacaatgaatataatattccataaaataatgaagagatttttagatcatctgaatcaaagaagaaatttaagtagtattagtataggttttataatatgtgcattttagttcttcaataatgtgtgctattgccctattaagccaaatgtttgtttaaccacatactacatttcatatccttgtcagataacagaattatcgctgaacttgaatgtatccatttacatatttttacatgaaaaatgtgaaatgaaaatttacattcatgtcaagggaaacaaatcacaaactctattaatcgtcttactcaatattttaaatttagtaaggtggtaagtttgttgaaagaatagataggcaaataaattaatagacctttaagttcacttttttctttttaagaaatcagtttcaaatgtacagtgatgttatgtttctgagagtaataaatcaaatatttttgcaaacaaatgaaatacatatcttttaccactctaaaataacttaaaatcaggtgtctaattggttgttattagagaattgtatggaaaacatagatttgaaagaccgaatttttattttaatttgcctacatttctcttct

SEQ ID NO: 31410 - DNA, 1040 bp, Homo sapiens
atggttattagtctttacaccttcattactgaagtagataataaggtgaagatattagctttactttaaagagataagaatagaggcatataggaggtcagtgactttctcaaggttatgaaatcattctgtggtaaaaagaatacatgattcaaattcattttaactaccacatcatcttttttcagattactttttaagtcagtagttattattaccagtgaaattatgataatcatattgatgagccaaaggttgtcattagatttctcaaatatccaacaattcctgggccaagattactacataagaaatgttgtatttatttttaaatgaattgtttgccttagaatagaatactattttaaactattaagttaaagcctagataagattaaattgagttcttggccacacagcaggttatcttattatcttgatttaaaaaaaataaatgaaattccaaggtccatgtgtacctgtagaaatatttagaaatgtaagtagttgaagaaaagagtagataggtaaagttgaatatgtgtgtttgagaaagtgaagggcacaataggatagaaaatatattgcagtattgcaatagaataatgaaaaacatcagtattcagacagcttctgatgtatacatagctgaggtcaaatatcaagcggattttttttgtctcccagactgagatcacaccgccttaatattgtttgttagatattggcagggaaaaagtttagtatggtataaatgtattttttaacttaaattatttcatagatttttaaagaattccatgttaactctggagaggaaggagtacaatatgtagtctgttgcaaaaccagagtagtatatattttagataaatgggtatttttgaactctagaaaaattgaatatttctgggggttattaccccaagactgaaatccaaatgtcatctcagctttctcacaaggcccttaatagttgaagaatagaactttaatttaaaatccatctctaagaagcagcatccacaagactaccctct

SEQ ID NO: 31411 - DNA, 1161 bp, Homo sapiens
tccactttacccccaggacactataatgtgggcatggagaactgaaactgtgcttctcaaagtacatgatgcatgcaagtcacctagggatgttactaaaatactgattcagtaggtcttgggtaaggcctgagattttgcatttctaacaaatccccaggagacgtgggtgccactggtctgtaggccatcctttgagtgaaaaaatattaaaatccattaaataccatatgacatacctcatagtgaagattctaagtgcaggcagacttcatgaaagtagtaaatgatacaatggaaaactctccatgtaagagaagaatggacactgagaaaatgcaagcccattccctgttcctactcagcttataagatgactcacttctcatcttctctctaaagcctttctgacacaatctcaccttcctggcacaatctcacattgccgctgtctctctacccctttctattcatgctctaaagtattaatacattcagaaagatctttctaaaatacaaaaccgactttgccactcttaggcttaaagttctttaattcctatcacctgccatttaaattccacaatggaaggcccttcccaattggcccctttcctgactctctagactcaatttccaccacttctaccacatgtcacctgcattcgcccagcttcaccacactctttcttacctctgcttgtcataggccattgcctgtgcctggcacctcccgtccccattgtctactaggcaacagtgcatccattcttactggaagctcaaaagttccctcctccacagggcctgccttctcctgccaggcagagttatgtatttcaacgcctttttgagtccatagcatataaaacattattgagttctatttatctctactgatttcagtactcccaagagagcccctattttgcaaggatctgaatctcatctttctttataccttctacccatattcaagatgtgaaagatgttttaataactgttggttaaaagaaaaaataaataaataaatccgaactagctatttactcaaacatccctttttaccaagaaataatttatgatggcactaataaacaaaaccaatgtgttctgtgatgagatttcagtacacaacagaagtaaatgttagggtgaagg

SEQ ID NO: 31412 - DNA, 1013 bp, Homo sapiens
tgctggctaaatcttatcagattatgataatatgatatcttggaaatttttcaggcaatatttttttcttaaattctatattattaaactcagatttatggtgagttgctttttgacaatggtgccaaaacaatttaatgaggaaagaagagtctttttagctaatggtgctgaggcaagtagatatcaacatgcagagaatgaagttttattcttacttcctactatatacaaaaacgaactcaaaatggaccataagcctgaatataagagctaaagctataaaacctcttagaagaaaatttatgaatatatcttcatgaccttgggctctgtgatggtttcttaaatatgacatcaatagcacaaacaacaaaagagagaatagataaattagagttcatcaaaataaacatgttttgttttgcaaattatacaataaaaaatgtggaggtgacccatagcatgagataaaatgttagcaaattatatctttaagaagggacttgtatctaaaatatattaaggactcttagaactcagactaaaatgaaataaaaaaaagaatcagagtagacatttctcagaagaagaagacatgcatatggctaataagcacatgaaaaggtgcttaacatcattacacatcagggaattgcatatcaaagccacagtgagagactacacccactggggtggcaaaaagtcagataatattggtgaagttgtagagaaatgggaatccttatatgtagcaagtatcgtacccttatatgtaacccttataagtaacccttatatgcatcagcaagtattggtgaagttgtagagaaatgggaacgcttctatgtagagaggggaatataaactggtccagctgttttggaaaacagttgggcaatttctcaaatcgttaaaaagacataccatatgaacctgatattccattgctagctatatatgaaaaaagaaatgaaaacatatgtcctcacaaagtcttgtacatgaacatt

SEQ ID NO: 31413 - DNA, 1047 bp, Homo sapiens
aatgtattccacatttgaataatgagcagagtaagaggtaccaacaaatgaaacaattaaaggaggccataaaaacaacagagatcatttcaacattctattgaggaaatttggggggacacactttaattaaataataacatcagtatttctttacctttgtaacttttaattaatgaagatgttttaagatgaaatataaaatgtgaacctgagaactgtttaacatttaacattatggatatacatatccatgtttagaatgttctctgtgtattaatgcatgattttgtcataaataccccactaggaagagaaaggtcggagagagtgtgtgtgtctctatgtgtgtgtatttgtgtgttttgtcctggcaaaaagacaaactgagagaacagaagaacaaaagagcagtactgaaaatagctagattaaaggttgtttttctgtcaccacacaccagatatggagagtagtaaaagcagacagatggacagttctgttagttttggagtgtgtgaatagagaaaagaaacattctgttccttttattcagaaaaggaatttctagactaaattactggtatcagcaataagtttcatattctgaccaaagaaacattattttttttttaccctagggataatgactcatgctgttctcagaattttgcttttgtggaaactaaagtgcagtcataaatacggcactgttatttagatcttagtgctaatgatactattgtgagtagactagtgatgggtaagaacactagtattataaacccagttgtaacaaagaaaccaagcacatcttaattagctgattctagatgggaaagtagattttttaaacaaattaactaattgttttaattctgtgaattatgcaatagaaataggacccataattttatttttttaatacttcattattttgaggggtttatgtcagaagttaaatttctaacttccaatattgacagtggagataattaaacatattttctctgccttttttccttatgttcctcaaaattagtataa

SEQ ID NO: 31414 - DNA, 1027 bp, Homo sapiens
taaaaaattaccctctatatgataaccaaatttcctttaagtgttgcttcagtgaaccaaatagtgttttactaagtgtaggagttctagctagataatatctaccatctctttacaacaagcctgaaacagtaagttctgtttccctttctggacacatgcatttagataacattgatccagtagataagagaaagggaggccgggtgcggtggctcacacctgtaatcccagcactttgggaggccgaggtgggcggatcacgaggtcaggagatcgagaccatcctggctaacacggtgaaaccccgtctctactaaaaatacaaaaaaattagctgggcgtggtggcgggcgcctgtagtcccagctactcaggaggctgaggcaggagaattgcttgaacccgggaggtggaggttgcagtgagccgagatcgcgccactgcactccagcctgggcaacagagcaagactccgcctcaaaaaaaaaaaaaaaaaaaagagagaaacggatcctttattgaatttctgtgttccaagcactatgctgagaactttacatataccatctcatttaattcttttgtttgtttttctttgggatggagtcttgctctgtcgcccagggtggagtgcagtggcaccatctcggctcactgcaacctccacctcccgggttcaagctattctcctgcctcagtcgcccgagtagctgggactacaggcgcccgccaccatgcctggctaattttttgtatttttagtagagatggggtttcaccatgttggccaggctggtctcgatctcctgaccttgtgatccgcccgcctcggcctcccaaaatgctgggattataggcatgagccaccatgcccgaccctcatttaattcttataacattactgtgagatagtaactatttttattcaccttttgcaaataaggaaactgccttcaaatgagcctacaaagaagacttaagaattggagagttctccctagggtcagtggaattcaggatgatg

SEQ ID NO: 31415 - DNA, 1049 bp, Homo sapiens
tgaaaatgaattgcagttcctcactaaaggaatttaaattttttgcatactagtgatgaggacttgattttccaccctgaagttgtaaaggtctttcagtctctctaaaagtgtgagttaaatctgttttctcacggccagcttttaaaggtcagtgaaggacggcactttgaaagaaatggataatatgcatccttccagagctagtatatattacagctgtccctttggactcactccagaaacagctcagtgactcttagaggaagagaattttagaggccctaactggggcccagaaaattgtactgaaggatacttgcttcctgtgcatctccactatagtaaaatttgtttaaaattacgcttcttagccctcaaatccaaatggtctcttgagtgcttttgatttttctttaaccatccgtttcctactatttctactgctacctcgctttgttcaggcccttgttacattttcactagagtaatttcaacaatttagtttttctacctgctcttctatgctctaggattatagtgcataaaaaaaagtgcactatatatatagtgcaccccccccaccacccccagcataaaagaccctatcctgaaaaagttcatagcctaataggaggtcaaacatgactacagataattttaatgagtatgttgaggtacagttatagaaatacatataaaaggctgtggtaacatttaaaaagggagtaactgactctagaaatatttaaagtaactttcaactgcagtaataagaccattgaattattaacccagatttgaatcatgttgtttctgtagcaaatgtagagggaagttttgttctcctgttccaaatcagactaaagattcatttggtaatttaaaaatcagaaaagctttttttttctctctctctctcgttaatgggttgtaggggggtgaaagaaccgtctctgtctcctctggaggctcagtatttgagtccaagaaataaacttgacagtagacagattaacaggagaaaaggcatgtaaatgtatcgtatg

SEQ ID NO: 31416 - DNA, 1050 bp, Homo sapiens
atagtgtagaaaaaaacacccttaacattatttccatagataaaactaattagaactgtaaattctaaggagattatttatctaaactaattttaaaatcagaagttaaggcagtgttttagatggctcattcacaactatctttcccctttaaatatgatttattgtctttctcatacacagatgtattgcttggtaaaagattggcctccaatcaaacctgaacaggctatggaacttctggactgtaattacccagatcctatggttcgaggttttgctgttcggtgcttggaaaaatatttaacagatgacaaactttctcagtatttaattcagctagtacaggtaaaataatgtaaaatagtaaataatgtttaattacaataataatttattctagatccatacaacttccttttaaaaaacctactgcactaactagttttatgcttaaaaaaaaaaattattaccagtaatatccactttctttctgaaaaaattttctttagatcggccatgcagaaactgaccctgatttgtttttttggaatcacctaggtcctaaaatatgaacaatatttggataacttgcttgtgagatttttactgaagaaagcattgactaatcaaaggattgggcactttttcttttggcatttaaagtaagtctaattattttcccattaaattcttaaggtacatattacttgctttcttaatagatttataaatatgtattacttatatacttttgtttatgtttggctggaagagttttccatactaaaagtattttgtaccagtgatgagcttctcaacttttgctctttgaaatttaaaaagcagtaaattcaaaactaaattttagtcatgaatgagagcttaaatatttttaaagatttttgttctacttaagtcaaattttctaggtccagatgaatattgctgtaggtttcactgtgtgtatggattacaatatccccaaacaaagaaaaaaatgttttaccttgaaattcagaacaatgtcaaactcccgtggttcttact

SEQ ID NO: 31417 - DNA, 1037 bp, Homo sapiens
cctgctgccgttgtctttacggaacctttggtgtcggggcttggaagtctccttggcgccggcttctgggcccgggcgaagctggtgcgtggcgccggggtggaggcggctaagtcccagggacttctgccctgcgcctccgacgggcatttgtctggctgcgtccgggctcgggacgatcctgggtcctcgctggcgctgcggccctgcccggcggcttcgtgacctccggcggcgaatccccgggctcgcgcaacgagttgtagccgcggagagcaggcgtcgatgctggcgcccaaagcctccagcctgagagtcgcctcactcgtgtgacggtgcttagaaacccccttttttggttttgtctttaagtactgtctagggaaacgaatcatttgaagcagtttatgccttttttgtttttttcgaagagaaagatttatgccggactgaaaaatagcgaatcaagtatttagtgaccgtgtgatattgcagtaaagactgcctccacgttggacatgtagtggattctagttcaggctctcctgcaacatgtttttgtttcaattcttttacaatttaaagcatatgcttattttaatgagaacgaaaaagaaagcttaactctttttaaactcgttaaaaatggagttatttactgtaaagacgtcttacagcaattaggaagaatatacattgcatgaaaggccttttgaaacgtttatctatttgatgattgctgactgcctgttgtatgtattctattttgtgcatagactttcttgttggttgaaaaaaatgacaggtggaaagatgttggtttctaggtgatataaaaaatttttaaacatttttctgatttttctgcagtgacacgtgttacatatgtcgtttgtatttcagagggaggggggactgtgataggttgcttgtgattcagaatcttcctgctaagaagactagtgagcaaatgtttatgacatccttgagtagaaagctaagttttttcaaggctgttatgcacacaaaaggcacat

SEQ ID NO: 31418 - DNA, 1006 bp, Homo sapiens
ggtctcgatcttttatttcttaaataaataatctataagggctgtaacagtttaaagtttataatttgggccaggcaaggtgactcacgcctgtaatcccagcactttgggaggcccaggtgggtggatcacctgaggtcaggagtttgagaccagcctggccaacatggtgaaaccccgtctctgctaaaaatagaaaaattagcccggtgtggtgccacatgcctgtaatcccagctacttgggaggctgaggcaggagaatcgctttaacccaggaggcagaggttgcagtgagctgagatcgcgccattgcactccagcctgggtaacaagagcaaaactcggtctcaaaaacaaaaagtttataatttggtttgctttcattatgcttgctttccttatggatgaataaattaattcagattcatagtcctattttggtgtcaaaagatttaactataggtcaggcatgagactgtctcaaaaaaaaagaactatagaaggtaaatcatttcaaagaaatgtggaaatttgcatataatcacatatttatcaagatatacagtttttagtatgtagtacattgttttcaaaataatatatcttaattagttctgtataactttccaattgattaaagatctggtgccattgtattattcagtaccagaaatgagctgtatttttgcttaataacttctttcatgttttacttacaggcattttttactgtctacagaaacttattgtaattcatttttcctcactccagtagtaagaattataccaagtaagtggactgtattgaaactaattaattttgtaacagttaatgagaatttaattggatagtggttgctgcatgtgttgtgttctcagtggaacgttgaatgtgacctcataaataggaaaatgatttttttcttgaaaattatttatattctgatctgtgtgatgagtacttttttctggaagccaggaggccgatacatatttgtgacaat

SEQ ID NO: 31419 - DNA, 2625 bp, Homo sapiens
gagccatgatcatgccagtgtactccagccttggcagactgagcaaaacttggtccctcgcaaaatgttgaagcccagttttcactattaacctgtatttcagtttccccatgctaactttgaaacactggggctggcctgagggtataaaggcttattcaaactcagtaatttaaacttaaaatcctaaggaacttcaaaaagtgtaatctagtccaaatggggcatcaattctaaagcatttgcttgtttgagcagattttctgtgtctgaggtatatagataacttatctttttatgactaaatccaagtccttagttcctgttggaattcaaaatcatatttaaaaattgatgctttgttctataattaatgctttgattgtataaataataagtattcttccaaatccctttttacagatgatgattctgataccgagacgtcaaatgacttgccaaaatttgcagatggaatcaaggccagaaacagaaatcagaactacctggttcccagtcctgtacttagaattctagaccacactgccttttctacaggttgggggaactaatttatagcattgatatattttgtattggtgaattttaaaaaaagtgcatgcaataaatttttttttgcccagttgtatttaacagatcttatttagttatagtcatataataggtttgttttattcttcagaaaaatctgctgatattgtaatttgtgatgaagagtgtgactcacctgaatcagtcaaccagcaaacccaagaggagagtcctatagaagttcacactgctgaagatgttccaattgctgtagaagtgcatgcgatttctgaggattatgatatagagacagaaaacaattcctctgagagtctccaagaccaaactgatgaagaaccgccagctaaactttgtaaaattcttgacaagagccaagctttgaatgtgactgcccagcagaaatggcctttactgagagctaatagcagtggcctctataaatgtgaactttgtgagtttaacagcaaatatttttctgacttaaagcagcatatgatcctgaagcataaacgtactgattcaaatgtgtgtcgagtatgcaaggaaagtttctctaccaatatgcttctgatagaacatgccaaactgcatgaagaggatccctacatttgtaaatactgtgattataagacagtaatttttgagaacctcagccagcacattgcagacacccattttagtgatcacctctattggtgtgaacagtgtgatgtacagttctcctcaagcagtgaactctacctacatttccaggagcacagctgtgatgaacagtacttgtgtcagttctgtgaacatgaaactaatgatccagaagacttgcatagccatgtggtaaatgagcatgcatgtaaattaatagagttaagtgataagtataacaatggtgaacatggacagtatagcctcttaagcaaaattacctttgacaaatgtaaaaacttctttgtatgtcaagtatgtggttttcggagtagacttcacacaaatgttaacaggcatgttgctattgaacatacaaaaatttttcctcatgtttgtgatgactgtgggaaaggcttttcaagtatgctagaatattgcaagcatttaaattcacatttatctgaagggatttatttatgtcaatattgtgaatattcaacaggacaaattgaagatcttaaaattcatctagatttcaagcattcagctgacttgcctcataaatgtagtgactgcttgatgaggtttggaaatgaaagggaattaataagtcaccttccagtccatgagacaacttgattattctctttaacttacagaatgttagtttaaaataataaattcatcctttttttggagatgattaaatggatgattgtaaacacaacttatgaaatctgcctttaacaagtaacttttttaaattataaaattttattggcattgctccattttctgtatataaatatatctttaatgtggtattttcaattgcgtgatagtttgtagtttcaaccactcttggtgactgtcatcctgtttcttccatattctctgatttcatgaattgaaaagaaacaaatgtattgaagaagtgagctacagttttccttccttaaccatgggtgctagtaactttttaaaactcaagacaagattagttttttatgtgtgaagtcattaaattattacacgaccagaactaaaatgcaatatacagttaagtccacggatactcccattaatgagaaataacactaggaagccactattacaggaagaaaagatttggttttcatggcagtctgtttttttaaaaaaaaatttttgagccactatctattgttgaatattttaagatgggatgagggaggaactaataagggcttacacaataaaaaataactatatcataactcattcataacttgatgtttcattttctgttgaggaaccataaattcattcacagacttaatatttttttcttagagatggtctcgttctgttgtccaggatggagtgcagtggttgatcatagctcccgggctgtagtctcccaggctc

SEQ ID NO: 31420 - DNA, 1076 bp, Homo sapiens
tgtccagagtggcattatttgtctttttctgtttttcattttcttttataagagaggcccaggcagatctcaaactcctgggctcaagtaatccacctgcctcagcctcccaaagtgctgggattacagtcatgagccaccactcccggccttattcatctttttttaaatacattatttctgaaattatattctatggctgattactgttatctttacaactcatcttatttgggttttcagaaagtttcaaaagattaaagttttcccaactaacaaggtaagttgccatgaactaaacatgtccccctcaaaattcatatgttcaaatcctaatccccagtgtgatgatatcagaagatggggcctttggtatatgattaggtcaggaaagtggagccctcatgaatgggattagtgccgttagaaaagggatcccagagagcgctcacctgttttccatgtgaggatacaatgagaagtcagcagtctgcaacctggaagagagcctcaccagaacctaaccatactggcaccttgatctcggacttccagcctccagaactgtgagaaatttctgttgtttataagccactcagtctatggtacattgttatagtagcctatattgactaagatagagtagatttgttttgattcttccttccgtctgttctccaaactcttaaaataagttactcccttcatgccatatcccacatcacttgcttgtataccgtgtaaatattttatatatacctgcctggcatcagtttgtgctgattttgtaaattttgaatgtgtttgttttagattttaagcataacattatggcacatatcttaataactttttatggttacaatattctggttaaattccttatggcattcatccattgttagtgagcaactaagatgccgaagaagaaggacctaacctagaatgacagaatattagatctgggatgaaccttagagatatagtctagactcaaaagtgaaaaacatgtaaaaataattgtgtcctgggtgtcaccacaggctcactcctgtaatcccagctctttgggaggc

SEQ ID NO: 31421 - DNA, 1046 bp, Homo sapiens
tgagctgtttcacctcatccctgggggaagcagatagaacgtggtaaagtagcaaggtctttcctagcttggagaccttgcactgtatcttaatttctgaggggctcctattcaaacctcacttttttctctcagtatgtggctcccccttctgagctcaagatctgaagatccattcagtcaggttggaacaataataggtcagtgttaggttctagtttctctctttagaaatgtattcttgtctcaagggtagcttgtatgtttgagacctagaagtccacttttgactgtgcccttgcaacttttaatattcttgaaattcttttgggcgggattcttgtgacccattgccacggagtatgcaccttttaccaaacattgagatgctgtgggtggcatgttaacataaagcaaaaatacatacaatcttaggtattccattatataactaacttaatattcatttatatcacttttctaatgccatttcaattttgcagcaacatataagaatccggaacttgatcgaatagccactgaagatgatctggtagaaatgcaaggatataaagacaagctttccatcattggtgaggtgctatctcggagacacatgaaggtggcattttttggcaggtaattatttattattacttctaagattagtttccaggaatcagctttgtgtctgatgtttcaacaagtaatatttctcccatcctcccccagccccgcaagtttctgcctgtgttgaatgttaaagctgttagcatgtgaaagaatttgtgcattttacctcctggtataaaatgaagctttatgaaagtcaatcatatttttaccttttaatgattctcatctctaagaattggcttgtagacagttttaagaatggaaatatagataaatgataagcatactttgtgttttactcttttaagtttacttgattatgtgaaagtttcagaagctaggatgaaatcacttttgtcatacctagacaggcctagaaggaaagaggctcttgtctgagataactattt

SEQ ID NO: 31422 - DNA, 1065 bp, Homo sapiens
gtctttcatagaggccattcttctacataggtacttgttcgcaatgaattttgaagagttctttcgagacatggtaaacacaaatagacctcagttcttacttcgccatgtgagagaaaaaaagaccatttctagccttagaaatcatttaatatagactgataaactaataggcaaattttgtagattcctggtactaaataagtgctaacattttgaaatgaaaaggttttacctgaatctgattccgcagttgttctgcttcttgcctcaactgttccagttcgctcattttttcaatttgtttacctcaggagctaatgagtgaaaacagctgttaaaaaacagagagcaagagaaagattcagttctctacttacatcttaatctggttttacaatactgacatataacttctttttggacctactgaaattcaatggaggtagtcaattattaaaggaatttaaagatgcttagtaaatatagaatgaggttatttactgaagggttgtatacaagaacatgatcagaggatggaggagaaattccaagttgtagtattcaaggctgaattatggggaattagtaccagaatggagtctggtgagaaatattttacaacagttcagaggacaccaagagacttccccacttggatgtctggattggcacctaacacagtacctcaaaactgaaccccaccccacccccaagccttccccatctcaggaaacggcaagaccatccttacttacaattgtttaagctaaaaatgtgggagcagtcctgttttaatcatagcctccccatcgaatccatttgcaaatcatgtcagttattccttaagaaattatccaggttctaattctgatttcctccacttctactgtctgggtccacatcaccatgaccatctctcacctggtctcctttctgctgccctcgaccactctctggtctaattagagcaactagagatccatttaaaatacaagtcactttaaatcctccaatggttttccactccactaaactctatcttgacccacagaccctgtatca

SEQ ID NO: 31423 - DNA, 1209 bp, Homo sapiens
tactttcagaccgtgctgaggtacttgcagttctctgacctcgctgtgttctcttgcttcttggtcttcccacatgctcctactcttgcccatattcccttccccagattttactattgaatatctcaggaataggtttcccttttacatcaccatcttccctgggacatcctgagcttttctttttacagctttattcatcatctacttcactaaacaggataaccttcagggaaaaggcagttttggtgcaccattgtgtgtctactgtgttaaaggaattttagtgccaggtgagcagcctccctccttcctccctccctccttattaagcaccagacttagtagacacctaatagatgctcagtaaatatttgatgaatgagtgaatgtccctactcctaaacatcagtttagtatattcaggtagtataggccatctgcagcacagaactgtggaaaatgggatctgccaatatttaccaactgtggaattcacctggaatagttttcccgctcattgagttggaggagataggaactgccatatggctgccaaactgctgaaacagctctttttcaatgctatgtgagaatggttatagtccctagctcaattatcacaacctcccactgttcttaccaagtttctgtatattttgttaaataaatgcatctcagtttgttgtaagctctttgatcagtctccagagacttttagtgattgtgttaattttgaccagcttaatagtagctgttcctaggataaaggtttccctgagtgcctgatacctccattctggaattcctgcctcttactatttgtttttaagccagaaatattattttataccaatttttatccctagattcactgtaatacatttttaactataaggtacatgtttaagaaatagtttctgaaacattataagagcctgccctttacaataaacattattttagcggccttgatactttcttttccttaatgttttaaactagatttgctaatggtcgttctactgggctgattttggacagtggagccactcataccactgcaattccagtccacgatggctatgtccttcaacaaggtaaatgtatttaaccaggatacactgagatgattttagatgccatgaggatgcacataatgaaataaaatgatgagtagcactattaaagcatatcagtttctgaata

SEQ ID NO: 31424 - DNA, 1027 bp, Homo sapiens
cattcacactgttttgcagttatcaccactgtctgtcttcagaattcttttcatcttgcaaaacagaaactctgtaccctttaaacaatgactccctgttctccccttttctcagcctctgacaaccaccattcaactttttgtctctaagatttggccactctaggtactttatacaagtggaatcatgcaatatttgtcctttttgactgattcatttcacttggcataatgtcctcaaggttaatccatgttgttgtgtcaattttcttcctttgtaaggcaggataatatcccattgtgtgtatataccgcatcttgtttatccagtcatctgtcagggacactgggttgcttccaccttttggctcctgtgaatagtgctgccatgaacatggctatctcactgtctcttttagcatcatatcccatcagtcaccaaattctggtatatcctcctctctcccttgcactgctaaggctcgggccctcatcctttctcacctggactgtggcagaagcttcctaacaaccaccttactttcccttccagtctgtcacactacactcttggatatttttaaaataggggtctgatcatctcatttgcccgccttgaaatcctcaatggtgccattcagacttttctaacatggcacatcacctcagtttaccttgttgatccagctttcctgcccctctgcttactttctgtctgtcccaaaagactttccattctctaggtgctccatgctcttgcccctccatgtgcttgctcatgctcttgcgttggcctggaatgcattctctcaccctcatcctcctggaaaagccctgttcgtcctttaaagccagctcagatgttctttgtgaggactcctcccatcctcagaagctgagttagatatctgttttcctttgccttcactttgtacatctctgtcatgggtgggatacagattgtggggatgtggaatagctgaggtcttggagaattaaaaggaaaagagtagagaactgaaaacta

SEQ ID NO: 31425 - DNA, 1024 bp, Homo sapiens
atcacttgaacccaggaggtggaggttgcgttgagccaagatcgcgccattgcattccagcctgggcaacaagaacaaaattcaatgagaaaataaaataaaataaaataaaataaatttccatcagattccctaataagtaaaaaactcttgacaatgaaattagcaaagactatgattacttaagaaactatagactcttggatatagagtatttctatatttttctttagaaaaatactgtccttgaacatttttgttcttctgattgctaatttcttggttcttctactagttgcctagtgtttttttctgacagattaatatttgttactcccagcctatgtggctgtcagactcacttattcttcctcctgcttgttttccccaattataaaatgattcagataatgagataataataattagcccataatgtataataaacaacatttatgtattgccatatagcacagaaagcactttgatatatttcaccccctttaaatttcatgcaactctgtgtcgtgggaattattgctacggccatgtttatagaggagaacactggagctcagagccctatatggcagcctgccttaggccagagagctagctggtgacagagcatgacctctattacagatcccatattttccccagtaaatcttctggttcaaattcattgactgaattacattttattagaagagaatggaactttttaaaaaaatcacaatggatttaatgaataattgactattatagtgatgcagtatgtttttcttaggaggtctatctatccaaagaacatgtttatttagaaaactcttgaaaatacttacctaatctgttgattaaatgcatgtaatgtgttgtctctagttgaaggacttttctaattttatttaaatgatttcaggtaaaggcagaaaagttatccacaagcacaagctatattataattataagcttttttggatgctattttttttttttgagacagggtctctttctgtcaccc

SEQ ID NO: 31426 - DNA, 1028 bp, Homo sapiens
tctcgacctcatgatccgcccccttcggcctcccaaagtgctgggattacaggtatgagccaccacgcctggcagtatcaccctttacacacacacacacacacacacacacacacacacacacacacattttgtttgttttttgagacatggtctcactctgtcacccaggctggagtgcagtggcgccaccacggctcattgtagcctcaacctcctgggctcaagtgatcctcccacctcagccccccaagtagctgagaccacaggcatgggtcacaacatctggctaatttctgtattttttgtagagatggggttttgccatgtttcccaggtgaccatggtgctccgtcttgtgctcctgagcctaagcaatccactggcctcagcctcccaaagtgctgggattacagctgagagccactgtgcctggctaccctttttatattttaacttgctgttcacatttgggtctctcttcactctctcagttgtgttctgttgatcttatttgtctgtctctgcattggtatggcaagccttgatatcttttagtgcaagcactttttccatgtttatttatttttctttctttttttttttctgatgctgtggttgaagccatatttatttttttttccagaattttcctgggtatttctagccatttatttttctatatggattatggaattagttcatctagcttaaaaaatcctattgggattttgatgacaatcacattgaatttatagattaacctataatccacatccttgtgtaagctctatgagggcagggactttctttggttttgtccactgctgtgtccttagcacttaacagtgcctagcatatagtaggtgcttcataaatatttattaagtatttaacatatcgtacctcttttttcacatttcctttttgtcattcaataatttttgtaattttttataaaggaactcatattttgttagattttttttttagtaccctataatttttttttttaaccattactgcca

SEQ ID NO: 31427 - DNA, 1026 bp, Homo sapiens
tttagctctaatgttacttgactttttgagtatttgcatgtttgagcttgttttcctttggaactgttcctctcctgttttctttgacaccattctttcttggcttccgcttatcctttctcagtttctttcaccaacatctcttcctttgtttacctcttagttatcggcatttcctaggatgccatttggccatcctgtcttcttcctcagaaggatacttttcttcatcagggttatccatatttttgtttaaccactttctctaagctgatgacattcaaattaatatctctctggaggtgaagatctgatcatcttattctgatctggatttttctactccagcatttcataggtacttcaaggttggtgtgcccagactgaacacagtattctcttgctaaaaaatttccttcctcttcaattctggagacctagatattctttgatctgctttccctctgtgtcttactggtgatcttgttacctgggcttcccaaatagctctgaggtccaccctgtcttctccattcctgctgttcttgtctgagtgctcattatccttaaaaggactagtgctggccaggtgcggtggctcacacctataatcccaacattttgggaggctgaggtgggtggatcacctgaggtcgggagttcgagaccagcctgaccaacatggagaaaccctgtctctactaaaaatacaaaatcagctgggcatggtggcgcatgcctgtagtcccagctactcgggaggctggcgcaggagaatcgcttggacctgggaggctgaagttgcggtaagccaagatcatgccattgcactccagcctgggcaacaagagtgaaactctgtctcaaaaaaaaaaaaaaaaaaaaaaaaaaggactagtgctgttgcttcctgactaaccttccttccctcaaacttgctgccttcaatcccacccagtctgcacactgctcccagagccatctttccaaatgcacatatctatggcacactggcacttaaatctc

SEQ ID NO: 31428 - DNA, 1086 bp, Homo sapiens
taagttttggagctagtcttgaacctaagtttgtcaactctaaaaccatacttccatattatgatgttgcaaaaaaaaaccccaagaaaccaaacaaccattccagcctattgttgtgaaatcaggaaccaggtacctgacacatcgtaattaccaatccttgcctttttaagagtttctaagaaattttctttctgagaaattccttctgagaattgagtatcttgcacatttgtctattttaactgtaaagctttatgaaatggctcagtcttcatacatcagtcactgatacataagtattcataacttgatggaaaggcctgctattggtggttgaggacagatggacggccctgtcagaggagaaagttgtaaatgtcacacccttggtatttcatcatcaccttggatttctggcttttccagtgagtgctgccatagtgtgggatattattttcctcacttcttgttctttgtttttgttttctcctcagatctagatactgatgacgatttaaatagcgacgattatgaatatgaagatgaagccaaacttgttatattcccagatcactatgaaatagcactaccaaatattgaggagttaccagccctggtcagtgagtgtgcacggctgctagctagatgcgcatggctctgtgtcaggtgtgtgtgcgtgtgcgatgtgtgtgtgcgggggtggggtggggtgggaaaagccggttgaatgagagaagaggatgaaaatgagcatgaacacgcacatacctcttctcttctgtgacaggagtcttgccggcttacatttcagtagtgctgggccttttgctgtctcttacttcaagtgctgttagggctttgttgctcattagctggtctcttccaggttgggctggcttcttgcctcctaaatcacaatctgttccttagattttcaaactctgcaccccagatctacagggactgctggagagggactcttttctgatcagaaggataacagtctttttatcatgtttattatgttggccttccatgtaacattttgtttggaaaaaaatagaagtgctccactgctgaaac

SEQ ID NO: 31429 - DNA, 1090 bp, Homo sapiens
agaaaattctttaacactgtcatttataagttgtgctataaagtctgagggaaatgatcaggactgcattttttaaagttagacattcgagcagaggtctcttgaaataatccagctttggcacatgagtatttgagccacctcttctgggagataaattgtgtcagggttctttgtagaagcaaagcccattagaagggtctctgggctttggaagagagaaggaggcagagatgtggcactcatgtttggtgccttctccttccatcagtctaagctggttcttcctaggcagaatagacaaatggcatttcttcgaattaacatcgtagaagcaaaaaagacaaaatagctgctggattgtgcatctcctgtgaactagtcatttttgtaaagttcagcaattccactatgcagccatgaaaaggaatgagatcatgtcctttgcacatggatgaagctggaagccctcatcctcagcaaactaacacaggaacagaaaccaaacaccgcatattctcactcataagtgcgagttgaacattgagaacatatggacacagggaggggaacatcacacactgaggcctgttggtgggtggggggaaaggggagagaacttagaggacaggtcagtaggtgcagcaaaccgccacggcacacatatacttatgtaacagacctgcacgttctacacatgtatcctggagtttttttgttttttgtttttttttttgagaataaagaaaaaaaaattcagcggttccctggatggccctttttgctctttcttgtgtgtggggggtggtgggtcagtttatgatgttagttggaaagtgatgattatgatgatttaagatgaaacgattttcattttctatatgctcatgcagtttttgatcagtttcaaaatccttttggtgtagaaacaagggaatgggagtctgctgtttgtttccttgttagaactaggctgcagtggtttctcttgtccgcctcagggttactgactcacgtgtctgctcatgtccatgatctttttttaactctgtttatcatttattagtgataactacttttttttttcaga

SEQ ID NO: 31430 - DNA, 2047 bp, Homo sapiens
tggaaaaaagctattattacaagggtagggattaaagaagtacaggtatcaaatttttccttttaggaatatgttaattaaaaatcactgtttccatttttctgaatgtggaagtaatgctactgcatgaaacgattatctaaatggcgtctaatttgtttaaaaaggttagtgctattaacacttgatgaaatagtggctgtcatttcctgaatgcctcctctgtgccaggcacttccttgaccacttttccttcactgcttatagggaggtattctgatgaggaagtggtgacaaagctaagtggtttgctagtggtagaaccaggttagaattcaggcctgtttgattttgaaggctgtgcagtttttcctttatccccgattgagtcatcttatttcacattttgtattggaatggagacgagagtctattttctaccatgttctgcacattttagggctagcacctaactttctgttgagttttttaaaactttaaagctagaaatcaggccgtcactctgacctatcggggcttctgctatgtgcaaaatcatttctgttttcatgtttcacttaatgagcatttaatttttcttaagaaaagaactcactgattgccaatgaaattaacatgtgattaggctgtgattactcagagcctgctctggctccttcagccactttggtgtaatggtttagatgtctccgatgctgctgagattttccaggcagggagcagagaggcgttcatttgcataacgctggggttcctgaggtgctgagctccctgaggaatgccacccagaagaggatctagggggcaaaaggtacagctccccagggaagctaagccccagtggtcgactggaaagtcacatagacacttcatgccactggtgctaattctcctcccacttagcacttgttgcagttcctaattttttcagcggtgctgttgaaagttaagaggcagccactcttgagtaaactgatttacactgaaggataaatgatggagaactattagacttggaaggaagtgtttgcctttcggagcattcggcattgtaaccgagagactggtaatttggagctggctagggttgggggaagcaattcgtagaccctttacaattctgttgctatcagctgccttccgatgttattgatttacctaggtctgtcttctctttttgagaattcagaaatttctgaaagctccaaatactcctccctcccacactgttttttctcagagagggcatgaggggaaatcaagctgttggagagattgaacttgttgtatattgcgcctgatatactttggatgtttgtcccctccaaatctcatgttgatatgcaaactgcagtgttggaggtgggacctggtgggaggtgtttgggtcatgggagtggatccctcatgaataccttgtgggggaaaagcatatcccagataaatacccagatattgggtgcttatgaggcaaatgttagtaagttggcaattttatttcccccgctttgtacagagggagttagagataggcaatgacacaaattaatcaagtaaagagcattggatgagaacccagtttttctcaccagaggactgctgtgcctctggggtcttggtagttattttagggagtgttttgatgtctctgtgttctgagcactctctgtagactaactaaataatgcgtcatgccctgatgagatactgctgctttgtaaatattttagatgctataatggcttataaaattaaattcatttaaagacacttctgaatccagagttgcttttggtcattacacttgttaaagcataattttccaaaaggcaagatcatgactttcaggtaaatgtaaaatgaacacatatcacagattttaaaaaactcattaattaatgagagaatcagtcagatgttactactggtttaaaaacatttgtggaactaggatatttaaagacaatttcaaaaagaaatgttaggatgagattgccaggttaggttaaaaattagtcagtgtctg

SEQ ID NO: 31431 - DNA, 1032 bp, Homo sapiens
tttacaatcctttagctagatgtaaacgttctcgaagtccccaccagattagctagacacagagtactgatcggtgcatccatgaaccccaagctagacacagagtgctgattggtgcatatacaatcctctggctagacataaaagttctccaagtccccacccgactcaggagcccaactggctttgcctagtggatcctgtgccagggccgtgggtggagctgcccgccagttccgcgccacgcgcctgcactcctcagcccttgggcggtcgatgggactgggcactgcggagcagggggcggtgcccctcggggaggcttgggccatgcaggagcccaccacggtgggggctcaggcatggcaggctgcaggtcccaaggcctgccctgtggggaggcagctgaggcctggcgagaattcgagtgcagtgccagcaggctggcactgctggcggacctggcaccccctccacagatgctggcctgggtgcaaagcccctgactgctgagcccatgctcacccagaactcagtgctggctcgcgagcattgtgcgcagccccggttcctgcctgcgcctctccctccacctgcgcctctccctccacaccttgcaagcagagggagctggctccactctcagccagcccagagaggggctcccacagtgcagcggtgggctgaagggctcctcaagcgtggccagagcagatgtcacggtcgaggaggtgctgagagcgagcaagggctgccagcacgttgtcacctctcaccaccaggtcccacctccaacattgggggtcacatttcaacatgagatttggaggggacaaacatccaaactatatcaagtagtaaatagtgagatgaactaagttcatccccctagatcaggagccagcaacttttttctctaatgaaccagataatacatgtttcaggttttgtgggccatatacatgtctgtctcatattcttctcccctttcttctccttggcagtacaggaacaggttgtgggccagatttg

SEQ ID NO: 31432 - DNA, 1116 bp, Homo sapiens
tgataaatgctgacaattatcaagattaactgtcactttaactgtggtggtgtcagcatttatcaagattcatagcccccaaatttccgtcatgcccttttcagtcaaccattcctcaaccccagcttctagagtgttttctgtccccatagtttttcttattcagaacgttacgtatatagaatcgtacactatattgtgtagtgttttgagtccggcttccatttagcgtagaagcaatttaattttaattagtttttttccaatttagaagataatacatggtcactgaggtaattttggaactcagcaaaaactagaagttgccttgagatgagagctgttaacattttagtgtatttctttggttttttttggtggtttttcaatgtacaggtgatctgaatttcccttttttcccctcctcttaccccgtataggcagaagacacacatttggccgtaagtgtgaattgccattgatgagtttcaaagtcagttatcatgccttgaggcagtactctgtagactttgattaaagtttttgtagtagaactgaaacttcatttcacaaattaattggaaccagtgaaacgctgaagatctgaatattttacctaaaattagggtagcctttaaaaaatagtatgtacacaaatggtggcatgctaaatacattgttctgcatttaacagtggctctatagttagagatattagaaacttgatttgtgcatgttcgtagccctataaatctgcggggatgagagagaatgggaagatgttaattaagcatttgttggtgggctatgctgttatataaaataacattataggctttgtacttttgtacttctcatacctaaagtagcatcttaggttttatactactggacatttaaggtgtcttgaaaaagaaagttttaatgaggtagaatgtatattctataaaacaaccttttttaagtgtacagttgaatgacagtgtatttacagagttgtgtaaccaccgccacagtcttccttcagaacgttccattaccccacagaaacctccggctcatttgcatcattaaagtgctttttaactgatgtataaatatatattagtctttgta

SEQ ID NO: 31433 - DNA, 1143 bp, Homo sapiens
acttttgggaaggagtgagataaacagatgtgttcatttttgtcttactttgaccaggtactatacatgtgtttatatagctagtgtgccttggacattatggagtctagtgtgataaagatgttttagaaaagtatttcctatgtacaccatggttgaaagtgtgtgtaagcatttgactaacattcagtaatttgcagttctgattcatagtaatataaagtcatttaatgttaattgtaattatataagtgccaaggactgcttgcctatggttacacagtggtggaatcaggatttcagcaacagtaattctacacccaagtcctttgctctttcttgagtatgtcagatcttatggtttctttcagctgtattaatcaaaggaagatagaataagaaggctaattttaatagtaattttaaggctgaaaaatgaccgccaattgttattgagaatctgtattcattccaacataatcgtgaacagtgtactcactatagcccaattttcttttaagggaagggaaagagaagtatgtaggaaaaataagattaagttaatggcaaagatagtattcaaaatggagtcatgcattttactgaaggtgaactataatgttgataacatttataacaaaattgggttcttactttgtgccaggtactgtgctaaacattacttcatttacttctgataaatttttcattaggtggatgatactgtaattaatttcattagatcaaaactgtattcaagaatatacaagtgatagagcttgggtatgaatcctggcagccagtactccagagcttgaactctttgtcacagtagtaaatactgaactcttagtcacaatactaaataactgccttgctgaactaatacctgaggtgttccagggatgtacatttacttttgctaattcccaggtagatgacaccgggtgaaaaatgaggttcagagaggttaagtaacttaaaagatcatgtgtctcataaatagaatagatggaaatcaaactcacatctgcctaattccaaaccttgtgttcttttagtactccctattatctttgaactaatacaaccttttagagttacgaagtgctttaatatctatgcttttataatgtttttgtg

SEQ ID NO: 31434 - DNA, 1017 bp, Homo sapiens
acccaggctggagtacaatggtgccatcatggctcacttacagccttgacctcccgggctcaagggatcttccctgtctcagcttcttgagtagctgggatcataggcgtgtgctaccatgctgggctaatttttgtattttttgtagagatgaggttttgccatggtgcccaagcgagtcttgaactcctgggctcaagcagtcacccacctcagcctcccaaagtggtgtgtgctaccatgcctagtctaattcagtattttatttatataaaagatatacatggattatttactctactttttaaaaagttttaagtttgattcttttggccagtctgaagtttttagctgtctgtatttagatgtagtttttctcatcataccaagataccaagaccattgttagtcttactgcttgggaaacgctcgcacataaaggagagacgaacatattctttgttacttgtttttgtcttgcagagtggccagtttctaggacttgatatagtaaagaaagctggtaggaaactgatttgttaaagtgtcagccttaaaggtgaatgagataatactattatttaggtagagaaatcatacatgttcattccagatgttaaacttttctaatgcgcattttcttcttaaaatgtcataatacaaaatggcagatacataatagcagtactcaataaatgtatttcacatgttgaaaatgggtccttatgattgattatttagtttaatagtaaataataggaaaatttctttggaaaaatggaaatatagttaatttactgaagactggtaaaaattctctgtctttgatacttattcttaatttggctacttgaaaggcataggttgggccaggtgcagtggctcacacctgtaatcccagcactttgggaggccgaggcgggcagatcatgaggtcaggagattgagaccatcctggctaacacggtgaaaccccatctctactaaaaatacaaaaaattagccaggtgtggtagc

SEQ ID NO: 31435 - DNA, 1054 bp, Homo sapiens
ttccattttagtctttatttaaagcatagctgagaataactgatgaatgttgatgaaattgtaaagtgtttcaagatataggaaaaataagatcactagattctaccttacatttataaaagggcccagtggatacatataataattacagaataagggtgagttctgttctagtcttagagaagtaaactttcttgttttttggaatatgtcgtaaggaagaatataagtcatgagatattgatccctttgaatagttagatctgtttataaaagaaatggaaaagctaaaattgagtttaacggaccctgattggtatattggacttcctgctttttctcatagcttttttctaatcatggtatacgataaagttcattagtaggttttggtttattcatttccagttccagtattcctaccacttccaagattactctcaaatcatcctgatagaagcttcaggctttctaaaagtctttgtttttagttgtttgtgtttatctcccagatggctgttaacagccactgataggtttccctgatgatctctgcaaggacagtcaatcttggtttttattggtttttagtttcttctcagccccccttttctacctttctctatactgaaaatataatacgttaaagaagctctgctgtgtcataagaaataactctaatcccaagtgaaagcttctgtgacctattacgttaataaaactgatatttatagatataaagaatatgacttgtttttttgtggatagtttttattttgttttttttgagatggagttttgctctaggtgcctaggctggagtgcaatggtgtgatctctgctcactgcatcctccaccctctggacatgattctcctgcctcagccctccgagtagatgagattacaggcacctgccaccatgcccggctaatttttatattttagtagagacagggtttaccgtgttggtcagccttgtctcgaactcctgacctcaggttatccacccaccttggcctcccaaagtgctgggattacaggtgtgagccact

SEQ ID NO: 31436 - DNA, 1026 bp, Homo sapiens
tgttcagttaaacaattttagtacatttgatttaggttctttagcacgggatctaaatgtcatatcctcgatggaatttaaaaattacgttaatcactttctgagaacaatttttaatattaacaatgttgacagaaacaggaagacctgtgttttacattatttaaaactcctttgtaagagcatttctttaaaataatacttatgtttagtaaacctcatgaatatggaattaatttctaagaagctaaattgcccaaaaaagtagttttatttttaagtagtaaatttaagttacatatcactttctttaaattgcatttaatatgccaatttaaataaaatagcatttttcattcttaagtttattgggattgggtattaataaaaagtcatttacagcattgaaatcttttgggatgaatggatataggcatttttttttcttctcaggtatattcaagagcaaatgaccaagagccatgtgggtggtggttggctaaagttcggatgatgaaaggagaagtaagtactcttcacacttgctttgtgactagtttctaaggaagtacctcagtgcttggtttttgtaaatcttatttcaactgttagttttatttctaaaagcctacctgagaaatagttgatcagacatttccattagcattaatttctgtttgtgttctgtattggcaaacaccaaagctgctctccagaggtacacctcaagcatgtaaggaccgccaaggttcatgcttgtaagaacctataatctagtttaggcaaatcagattgatgtagctaagctgtgcttagtattttatgccacatgggggagggtccgttggttaagctgagcaaggtaattagaacttcatttaaacttcattatttttgttcagatgggatttttaaagtattttgatgtcttttagttttatgtcattgaatatgctgcttgtgacgctacttacaatgaaatagtcacatttgaacgacttcggcctgtcaatcaaaataaaactg

SEQ ID NO: 31437 - DNA, 1021 bp, Homo sapiens
aggactacaggcatgtgctgccatgctgggctaatttaaatatatatctgtatattttgtagagatggaggtttcctatgttgcccaggctggtctcaaactcttggccttaaacgatcctcctatattggcctcccaaagtgcagggattacaggcgtgagcccactgcatctggccttatctgtggttattaaagaacacacgttaaaagtgaaagtgactttattgagaagtagaaagtctgtgtagagactcactcccaaccctctagttgtttaaaattgtactcattagaaattatgaattttgataatcttaccagtaggtacttttaaaaaatgcatctctgcaaaaatagctttttaagtcatatacctgattttgagaataaataaatcagacaattttaacaatttgtattgttaacatttaacatgagaatttcaagcaggaggtatagactagtatatttaggattgggttaaagttttggctgttcagcagctgtgtaatttaaactctgacactaaatttctcagcagcttaaagattttagagatgttattttatttttggttttaatagtactgactgatttggggtttttaaaaatgatttttttttaagtactttgtgaatcacttcacctgaaatctctccccagtggaatgagcataatcttttagtagaacataatcattcagaattttctcttttctcatcttcttgttttggattatgggttgctccgagattgaaacaggatttcatttttacttttcccctcatctacagagtgctgatgctgtaaaaaaggctagaggtttcttggaatttgtggaggattttattcaggttcctaggaatctcgttggtaggtacttttactaaatgttaaataagttaataaacattatttagttacatatagcgacttaattgaaaactagtcttgtagtctgataaccttattccagttatgtgtagatttatttagatagcaatacttcttttcttttt

SEQ ID NO: 31438 - DNA, 1761 bp, Homo sapiens
aaagtaaaccaagtctggcctaatactttgatttacttgaatacctctacgtatcttaataattcctttaattttacattgtgtaaatatttatgctctggaggtgatatttcttttagtggtcaggaagtacctcttgtagtacacagacactcaagattttgttacctgagcacatactgtagggataactgggttaatgtgctttattatgctttaaagctatacctactaaggtgatgtatctatctagtctgtaagtttatagacagtttgaaggaaaatcgttgttttttgtttctggagacagattcttgctctcttgtccaggctggagggcagtggcacagtcttggctcactgcaatctctgcctcccaggctcaagctatcttcctacctcagcctcccaagtagctgggactacaggcatgtgctaccctgccagctaatttttgtatattttgtagagatgggctttctccatgctgcccaggctggtctcgaactcatgaactcaagtgatccacctgcctcagcctcccaaagtgctaggattacaggtgtgagtcaccatgacctgccagaaaatcattttaactttaaaagttgatttatatacttggaaaattaaattaattataaatcagaaaacttgatataaactgattttttaaaattatttttaaagtgtttagcacacagaagacaatttacaacagtaaattggggtgcaaatatgacaagttattgaaaatctgagtatttcaacttacatggattttagcatttttttctccttaaatcttgaagtttagtacatgtaaattgctgcgtgtttcagaagagttttcctaattatatattggggctgggtacagtggctcacgcctgtaacctctttacgaagtcaataatcccagcgctttgggaagccaaggcaggaggattgcttgaggcaaggagttgggcaacagagcaagaccctgtctctacaaaaaataaaaagtaatagctggttgtggtgacacgcatctatagtcccagctactctggaggctgagacaggagaatcacttgagcccaggagtttgatgctgcagtgagctgtgattgtaacactgcactgtagcctgggcaacagagcaagacgtcatctcaaaaaaaaaaaaaaaaaaaaaaaaaaaaggtgtgtgtgtgtgtgcctgcctgtcagtttcatgtcacttttaggctagaactttgttaaaatattaaacactgaatacttttttttttttttaaacagggtatggttccatttgtatttgttggcactaaagaaagcattggaaatgtgcaggttcttctagagtatcatattgcctatctaaaggtttgtatacggttcatactatattctgatattgttgctgcatttactacataaatgttgtacatttgctacaaatttaaaatgtcctcacattaaacattttatatttgaagtaaacttcaaatctttaaatattttttgttaattcagcttcagatttgccattgttctacatgagaatttaaaaagtcctttgtcatcataaaatgattggccttgtgtgcataatttctcttctttctgagcttttatatttctttctttcttaagaaatgattcctttgtcttcatgcaatttgactctcagatcacttatgtatctgcatgttcatactggagccattttgtttttacttttgtactttacatacaaatagggtacagaac

SEQ ID NO: 31439 - DNA, 1050 bp, Homo sapiens
ctggtagtcttttctatactctgtcagcatccattatttgtaaacagtttaattttacaaaagttaattcatctcccagggccacccatttttggaagtttctcttgctactcattgtcttagagaaagtagtggaccatatagcagtatcaggaaaagccctcgtagagtgtttctcagtgaaggtttacttagaatatactggtcagaactttagttggcagcttttctttatatgatgagggtcagatgtttctctcttcaggttttggaggcttatttaattagaattttttttgttttccctagaattttggggttatgtttttttgtttgccagacagacccagagatttctaatgcacagagagatgtcagtacttttctatacttaatattgaaaacgaagtgaagagcattcttagctacactatgtagtactttgggaacagggaaaaattgtggaattaactaagttttttaattgttggaggaactgtgctgtaaagaggagtgtttggatgactaaagatttgagggtgtaggaaacgttttacttaattacttctgtcttctaaaatttttttatgctttacattaagttgtaggagtttccagaatatccttggttaccataacgggctagggagttaattgccagggatagatacatagactatattaaggatataactttaacatatcattatggtataccacgttaagaaacccgcaccttccttaatgttatacccatgaaaacttatgtagtattttaatattatagaaagtgtgtgtagatacattaaatatagatgccaactgtgcttacaaattacaaaaactggaacaaatcagggcaaaaattaggaacttgttctttgtttgtttagattttctccctttccacagtaatactctttgagccttaagtttagtttacaggctttcagggtaatagtttttatattttagtacactttgtacagttaccaaggtgtttaaaattacagtatactgaattgcaaaataaatgtacttgacctagtg

SEQ ID NO: 31440 - DNA, 1050 bp, Homo sapiens
ttctgggccactgagaccctctttaaagagaaggaaaaaaaggtattctggaagatcttgtgcagttgcaacaatgtttcagcatatatatgtgaattcatatatgacacctgaacggaatcatgaagtaacagctgagattatatggtggcaaaaatgacctgcttttcctgaagctttgggaggcctaggattcttgctttaggcatcacctttgttaagccttaaagggggctacaacttgtgcaaaatggtgtctctggtaacacttcagaaataattggcaaaagtgtaataggaatacacaaatctttattttgaaataatcttgtattttaatgtggaattagaagcagcacatcaaactggtgagttcacagaaacttacctgagatgatgctgggttccattgctgttgtgctaagtcacgtatttttgtagctgctgttagctgtgtctagcgttttgtaacctaaggagggtcttatagaagttggtatgttaactaaatcttggactgggaaacagcaccatttgtatcctctgcaaacagatttacgcttttgaggctcaaaccaactagtgttctcatgggctgttgcctaaggacagataaacatggaaaacaggctatgtccagggacagatgattggtggttaagaattacagtaaaggaaaattacacctggattttcttctgtaaagtttcaaggaacttggatttgaactgtgaatctactgttttggcaaaaaatctcaaagaaaaggatgtttgttactgtctcagtcttcctgtctttgctacacgatttggatcccttacgctttttcgttaagaatatctgtctgctatagtgaatttgctagccccttatttttttttttaattttagttctttattagaacgtgtacttgaatggactgtagttgctcataacccatgttaatctctgatagtatttgggttttatttcaggagcttttgcaataaagcagtaactgcaatctgctaaagtcagactgttagcaagtggtgttaaaactgatt

SEQ ID NO: 31441 - DNA, 1056 bp, Homo sapiens
ctgctggggttggtgtgttttttcctttccttttttttgctgaaacagtatatggtcattgaaatcctgtatgtaacattattcctttgctacaggcagtagtcgttattttagctttatgtcattcctgatttcaaatgatggagaaatggctagaaagctatcagctacttcattgtttaccaaaagtagcaggaaaaaccatatcaaaggaagagctgtcagcatgttttctgagccttgtttttctccagagtaacaatgtggtgttaagagtgaagaataaattcttttgatggcacagccaacagccctacaaatgttagtcatgtatgtgtatcacgtatgatatttactcctcgtgtaggaacagatgtatttacaaagcttgtcctgtgtctgtctcttaggtgatgaatacagctcactgacttgttgtgtgtccatcccttttctgtccacttatagatgtactccaacacagttgctttaagtgacgagttcatcgcactgcagccattgtcgagggcaaggaatcagctgagcaaacttaggtagagtaggaggagtagagcctcattaactcttctgcatgctaaaggtcaattaaacaatatcaaaagatgggcagaggcataaataaagagcggggcatttttgttagcatggccctgtctctgaataatttgacctttattaacatatacgttaaaacctaaaaaaaaaaatccatttcttctttgagaagaaaattcagataaaaattcaacgtgatcacagaacagagatctataccttgttaatatatctttacaccttaactaccttttctagtacaattctaatgcttctgcttgtcatgttattcatatttatgaatgctcctgcatgttgagtaattaaagctacatatttggaagtgagagttgcccattttttttatcttgccttaatctgtattgtaaatacatgtgcatatttatgtttgtgtattgtaatggctgctgaagcatttcatatcctggctactatttagtgcatctataaatcgaacaa

SEQ ID NO: 31442 - DNA, 1720 bp, Homo sapiens
ggtggggtctcactcccattactatgctttttttttcttttctattatttaaaagtggtctcccaaaacatgtaatgatttcccccaaaaatgtaatgatttcctctccttactttgaatgaaatgggctctaaatgctccactcccattctcctcacccaattatactggcaactatgtctatacaggtactctggcccgagctcccagttcctgaatattgagatcaaagatgtatatatgggaaagtagtagagcttggaggtttgctagagaacagtatagcattttctatagatagctttacagaaacacagccaacattcagcattttaaaagcagctgaggctggccacggtggctcatgcttataatcctagcactttgggaggctgaggtgggcggattgtctgagctcagaagattgagaccagcctgggcaacatggtgaaacttcatctctactaaaatgcaaaaaattagctgggcgtggtggtgtgtgcctgtagtcccagctactcaggaggctgagtcatgagaattgcttgaacccaggaggcggaggttgcagtgaaccaagatcacaccactgcactccagcctccagcctgggcaacagagtgagactcggcctccagaaaaaaaaaaaaaaaaaaaaaagcagctgagttcttttttttctttagagaaaaaaggaaacatatacatacaaactatatattcacatatatatacacttagttcaaaaagtgatctgaagaagtcatttcttaaaatttttgacatttcaagatgtttaccttctctgttgggatgtccatattttaataactgtccttcagttttaaagcaaaggatggccaggctcagtagctcacacctgtaatcccggcactttgagaggctgaggtgggaggaccactggaggccaggagtttgagaccagcctgggccgtatagtaagaccctgtctctactaaaattaaaaattagcctgacatgatgacgcacacctgtagtagctacccaggaggctgaggtggaaggattgcttgagcccaggaggttgagactgcagtgagctaggatcgattgtgccactgcactccagcctggatgacagagcaagaccctgtctctaaaaataataaaaataaggtgaaaggtgatgaatgcaaagcaagatgattaccagggtcagatccagaccaaggcagtgtcttgcacatatatggatactcaagcgctggctaccttctgggtgtcatctcgatgaatttctcccagttgattgagcaccagctttgagcaaagcacatgttgttaaactaaagtgtcagacaagatccttgctcttttgagtttctggtttagttctctccaagtaaatgtggtgaaggaccagtttgttattttcttgttttgttttaatttccagtttatcttgagccagtgcttttacaaatacaataaaaatgaattataggaaaattaaatctaaaagatatataaaataagccccaatttttaaattattgaatttaacagttataaacatactttgtccaactgctgtaaaaatttctaagctcttattctcacagattagaaatgcttatttcttcatgggccagtaatagtgtttatggatcagcattgatctatggaccacactgtgagtcacaactggtctttttgcaaggggacagtaccactccct

SEQ ID NO: 31443 - DNA, 1035 bp, Homo sapiens
tgaacctgccccaggagttattgaatttacttttacatgttctcttgaaggtagctattatcatctatacttcttttcacttaaaattgcgccatattgtttttttctgaatttttttattctcctaataaaatgtttaacttagtaattaatatcatattagactataaatgcccttccaggtttctccaacatcacaggttatattattggttactattattttcttaccctttttctcatgtgaataatctagaaggtcttttcagacctgttcattcttttctaggggataaagtcatataataacaccaagctacctggtgcttttcaagggctatgtgaaaattgccatagatgcatcaatattgtatttaaacttgcaaagtcattttgatacatagagttctctttttgtttacatataattgtatttgtgaaatgtgttgggcatttccattgtgactttagagtagcatctattctatgtttctatttcatgtctaatttaagaggtggggcaagtctgagactgccattccaagatgtagaagcccttagctgtgtgttccattgacatagtaaagtcaagagtaatgggcatcacttgagaaatgccaccagtgtttttatgtgacagatttctttggtgattacatttgtaccatccaggcacaaaaatttgacttacattttattaattgatgttgtcaatgaagtatcccatattgcaagctcagtttcaaagagagcatcatggtgctatataaagaatatgccatgttgcaccctaaagagctggattttagcaataaaagattttctgttcgtgtattactaacagttaagctactgtatcctcatcaaaactatcttctaaatagaaagtaatatgtagttcaagtgtttaatgttctgtcaaaaattatatttaacatatgaatgcacatgtgtgctttgaaaaaaaatttaaaatgaaggagactttacctaataagattattctgtgtaagcaatgtggaaagaagaaaaact

SEQ ID NO: 31444 - DNA, 1477 bp, Homo sapiens
ctccacaatggactcatctacttgttaaaggggcagtagtactttgtgggagccagttcacctcctttcctaaaattcagtgtgatcaccctgttaatggccacactagctctgaaattaatttccaaaatctttgtagtagttcatacccactcagagttataatggcaaacaaacagaaagcattagtacaagcccctcccaacacccttaatttgaatctgaacatgttaaaatttgagaataaagagacatttttcatctctttgtctggtttgtcccttgtgcttatgggactcctaatggcatttcagtctgttgctgaggccattatattttaatataaatgtagaaaaaagagagaaatcttagtaaagagtattttttagtattagcttgattattgactcttctatttaaatctgcttctgtaaattatgctgaaagtttgccttgagaactctatttttttattagagttatatttaaagcttttcatgggaaaagttaatgtgaatactgaggaattttggtccctcagtgacctgtgttgttaattcattaatgcattctgagttcacagagcaaattaggagaatcatttccaaccattatttactgcagtatggggagtaaatttataccaattcctctaactgtactgtaacacagcctgtaaagttagccatataaatgcaagggtatatcatatatacaaatcaggaatcaggtccgttcaccgaacttcaaattgatgtttactaatatttttgtgacagagtataaagaccctatagtgggtaaattagatactattagcatattattaatttaatgtctttatcattggatcttttgcatgctttaatctggttaacatatttaaatttgctttttttctctttacctgaaggctctgtgtatagtatttcatgacatcgttgtacagtttaactatatcaataaaaagtttggacagtatttaaatattgcaaatatgtttaattatacaaatcagaatagtatgggtaattaaatgaatacaaaaagaagagcctctttctgcagccgacttagacatgctcttccctttctataagctagattttagaataaagggtttcagttaataatcttattttcaggttatgtcatctaacttatagcaaactaccacaatacagtgagttctgccagtgtcccagtacaaggcatatttcaggtgtggctgtggaatgtaaaaatgctcaacttgtatcaggtaatgttagcaataaattaaatgctaagaatgattaatcgggtacatgttactgtaattaactcattgcacttcaaaacctaacttccatcctgaatttatcaagtagttcagtattgtcatttgtttttgttttattgaaaagtaatgttgtcttaagatttagaagtgattattagcttgagaactattacccagctctaagcaaataatgat

SEQ ID NO: 31445 - DNA, 1048 bp, Homo sapiens
caccctttaagccagttgaaatgctccttgccctactcctcccttctccttttctttctcccatccaagtactaaccaggcccaaccctgcttagcttctgagatcagccaggatcaggtgcattcagcggggtatggctgtagacttctctttctgagctgtgtcttcctcctttcctccccaaacccacatttgaattctgttctagctcctgctcatttgccacctctcccacaaagccttccccagtttccatcttctccctgcttccctcatctcagaggaaagctcttcattcacagagcacctggtttggggtccatagtttgttgtccctcagtatccttggggaattagtcccaggacaccacccccccgcccctgatatccatgcatgctcaagtcccttatataaaatggtacagcatttatattataacctatgcaatattcccatgtactctttttttttatttttatgtgtttagagatgggtctcactctgttgtccaggctagagtgcagaggcatgtagccttgagctcctgagtcaaatgatcctcctgcctccgcctcccaagtagttgggattacaagtatgagctaccacacctggcccatgtactttaaatcatctctagattacttataataactaatgcaatataaatgctatgtaaacaattgttacacggtattgtttagtgcataatgacaagaaaaaaatgtgcatgttcagtacagacacgaccataaatttttttttcaaatgtttttgatctgtagttggttgaatctgaggatgcggaacccatgaacgtacacgaccaactgcatatgggtttctaataacagatttgtggatgaagcccacccaacataatgcaacatttcaaatgtatcttagtcagtttttctggggcaaagccagcctaacaaatctcaagaatgtttgaaaaattctagcttgagtgaacgttgttcttctagtgactcaaataaagcagtcattgtgtctgaggagtcctagtggggtggcaggggtgg

SEQ ID NO: 31446 - DNA, 1074 bp, Homo sapiens
atgtctcatataataaggtgatgtcggaaacacgcaaaacaaaacgaaaaaagatttctcagtatacacaactgaatgatgatacttacaatttttagcaggtagctttttaatgtttacagaaattttaatttttttctattttgaaatttgaggcttgtttacattgcttagataatttagaatttttaactaatgtcaaaactacagtgtcaaacattctaggttgtagttactttcagagtagatacagggttttagatcattacagtttaagttttctgaccaattaaaaaaacatagagaacaaaagcatatttgaccaagcaacaagcttataattaatttttattagttgattgattaatgatgtattgccttttgcccatatataccctgtgtatctatacttggaagtgtttaaggttgccattggttgaaaacataagtgtctctggccatcaaagtgatcttgtttacagcagtgcttttgtgaaacaattatttatttgctgaaagagctcttctgaactgtgtccttttaatttttgcttagaatagaatggaacaagtttaaatttcaaggaaatatgaaggcacttcctttttttctaagaaggaagttgctagatgattccttcatcacacttacttaaagtactgagaagagtatctgtaaataaaagggttccaaccttttaaaaaagaaggaaaaaactttttggtgctccagtgtagggctatctttttaaaaaatgtcaacaaagggaaaataaactatcagcttggatggtcacttgaatagaagatggttatacacagtgttattgttaaaatttttttaccttttggttggtttgcatcttttttccatattgttaattttataccaaaatgttaaatatttgtattacttgaattttgctcttgtatggcaaaataattagtgagtttaaaaaaaatctatagtttccaataaacaactgaaaaattatcatgagatgtgtatttaaactttttcatgaacattgcttatataatcattccttctgtcttaatgtactacatggtctt

SEQ ID NO: 31447 - DNA, 1030 bp, Homo sapiens
taggaaattttatgtatatatatatgtagagagagagagatgcaaacacacatatttatgtacatatgtgtgtgtatgtacgtatatatacatgtatatttatatgtatacacacaccctccccacacacatccatacatgcatcaatccaggcacatctatatctgttttatatctatctatctacatgtatgtttaaaaaacagctgacttcatactgttaactcagttccagtgcagcatctcacggttcaatcagatttgccctttctgtaattgtaactgttttctgagagtgagaaagctggctctccttatccacaagatattcacttttttgctcaatcgtgtgcaaaaagtagattcaaaattgctaacccataccactgtgtaaaaacagaccaactagccagagttcaatattggtttacagttatgtttgtctttagtttctgtaattaaaactgtattatacaggttatgaaggcagtcatagaggttttatgactatagaggttacaaagtctctataattaagatgtggaactagtgtgtgaataatataaaaagacaagtagaatagaatagaaaatccagaaataaccccaagtgcaggtagaaagttaaagataaaggtgctatcacatatcattggagcagagttgggctttgtaatacacagagctgggccaactggttggccatttggaaaaagataaaattagatctacaccttatagcgtaacaaaaatgaagtctaaatggatcagggatctaaatgtgaaaaatgaaacaatacaagtactaaaaagaaaaaggctttctaactatgactcaaaaaaccataagcaataaaataaaaagttgataaatttgaccacataaaacaaatagcatggcaaatacatcataaagtcaaaagacaactgaaaaaaaaaactggattgggagaaaatatctgtagcacgtatcacgggtaaaggatgaagatctttcatatttaaatttgaattttaaaacttttccaaat

SEQ ID NO: 31448 - DNA, 1111 bp, Homo sapiens
tgaccataaatattaaagaagacaaaaggattctttgtgacactgagaccttctgcagtaccacagtggaggaaatgccagtgtacacaactggcctcatttaattcctgggaggagatagtttgggatgcagtgcttgttgttgctgagcaggcgatcacagcatgcactgtgtttctttctttgagaatatttgaatcctgcctgaatactcgtaacagatgagagacgcaggttttgatagcatagatttacgctgtcattagtcatgagctcttgggacgaaagtaattggttttatcctgtttagagttagaccctgtggttgggtatgaaagatgagtgtctgtaaaaatccttcttagaaatgtatttcctcaagactctgtctcaaaaaaaaaaaaaagaaatttatttcctagttctgtaaaaatcgctatattgagtgttctctatcacttaataatatacttattattaagtggacttaaagatatgcagtgtataaaatcagctaattacgttaaaccatggtatctccctttattgtgttagactgaatagaacaaactttaaaataattttttaaagaatatatttgaattcattttgtttgataatatgtttttattcagaaaagcattttattagcgctaggtgtgaacccgagccttttgctaaataccagcagcaatcatgtcctagagttaaatcccagaaaaattgccatattatatattaaaggttcaataaattacaataaagtattttttctttaaagtgatttggtccttattccttaaaaatcatactttttgccataactccatatttgcaaaggaagaagatgaaatgaaatagtactctatagtaaatattttattccagttacaaaattacatacaaatgtggctttttataaaaaggtttaatagttccaaattgggctgggtgcggtggctcataggccgggcacgatggctcatgcctgtaatcccagcactttgggtggcccaggcgggcagatcacctgaggtcaggagttcgagaccagcctgaccaacatggtaaaaccctgtctctactgaaaatacaaaatcagccaggcgtg

SEQ ID NO: 31449 - DNA, 1049 bp, Homo sapiens
ctcccgcccctgctgcgggcggctggtagcctcggtggccgccgccgccgctgctgctgcctgatcctgcaggcagttctgggcacgcagagatcggctaccgtggcctgccctccgaggaccggaaaattaacaccctttaactagtgtcgcgttatctgccgggtggttcgcaggaagtcctgcgaacacgttgttgccagttctgtaaacgtgtttagatagctaaatatagatcacagtgccacatcttagggggccccacggtcacccctgaggcagtggctgttcacaattgattttagtggattttaatgattaatcacttgctcttgtgggcagcttttcaaaaatcacgtctttgtatttgcagctacagactgggtccaccagctaagaggttggtttttattagggttgtaaaatagatttaaaatctgcttgttgttggctgagatttaaaagcagatttctactatttaaaaaagatagtttgaagatactcccctaaaaagtaaagattcttccatactcggctcggatgagttgttttccttgtttgagggattctaggtcacacacttctatgttttaattcccgtggtaattcaaaatgtttgagaagtgggttgcgactgtgtcgttttaaaattgtacattaagctgacggtaataaaatcttcaagaccaatcatttttagccatagtgtgttgaaaatggtttttctaatcgcttgagttaatagggtatttgcgttttgtcagattttcttctgcagatataggaattcactcaagacttaatacacttgttttgtttttgagacagggtctcacattctgtcacccaggctggagtggagtggtctcactccgtcacccaggccatctcagctcactgcaatctccgcctcccgagttcaatcgattctcctgccttagtttcccgagtagctgggatgacaggcgcccgccaccacgcccggctagtttttgtatgtttagtagggacggggtttcaccatgttggccaggctagtcttgaactc

SEQ ID NO: 31450 - DNA, 1119 bp, Homo sapiens
actttgggaggtcgaggcgggtggatcacaaggtcaagagatcgaggccatcctggccaacatggtgaaaccccgtctctactaaaaatacatggtggcgcacacctgtagtcccagctacatgggaggctgaggcaggagaatcgcttgaacccaggaggtgaaggttgcagtgagccgagatcatgccactgcactccagcctggcaacagagtgagactgtctcaaaaaaaaaaaaaaaaaaaagatttactatattgcaattattttctgactttctttcttttgagttactatatatctttcaagataaacctcttggttaacctttcttttcatctcctgtggtgttctttcaaggttaaatttgagaaaatggagtagcgtagaacatagtatgcagcagttctctactacaagttttaggggccatgctagtcaggatgttgttggttcctttgttttctggtattagtttttagaagcccctcattaatccatactatctttaaggatgttagtaacctcatcgtatagaatttctgcattctaaaggaaacataagcttgtttcagtacactcacgctgtagattaattctgatattacatatctccatcagactttgtaccctctctcttccatcccttacccttaccgattaggttggtattacctaaaaatccatagaaaatgtccaggtgaattgccttatgctttctaccccataaggtataattctagaccagatcggttatgagaggctctattccagtctgcacctgctaagaatttgaatctattttagtaccaatcttggagttcttgtttggctctactcttagccaaccccacagagtctaaaattggatctgaatccagtatttgccagccagtgacagacataaactaggttctttataaatgtttcatgaattgacctgcatccctgcattgattcaggatcttattgtccattgggaaggaagatttacttagctaggagtaacaattcccaaatttgccctagttgcaatatttttttaccaagggtacatacaagtcaggttcacttctgaaagtaaggaaacacaggatagcattcacttgatgatcata

SEQ ID NO: 31451 - DNA, 1045 bp, Homo sapiens
tttttgtagagacagagtctcactttgttgctcatgctggtctcaaactcctgggctcaagtgatcctcccaccttggtctcccaaagtgtgcatttacttttttagtgtagatgattgagcatcttttcctgagtttgaaagccatttgtaggttgttgatttttttctgcaatccattgaactctaatgtatccaaattctgattgcaaatagaaacaaactcaccagctcaagcataaaagggaaatttattaacaggatacaagaggccaggcacagtggctcacacctacctgtaatcccagcaatttgggaggccgagatgggtggatcacttgaggtcaggagttcgagaccagcctgaccaacatggtgaaaccccgtctctattaaaaatacaaaaattagctgggcatggtggtgcatgcctataatcccagctgctgcagagactgaggcaggagaatggcttgaacccgggaagaggcagagattgcaagatcgtgtcactgtactccagcttgagcaacagagtgagactccgtctcaaggaagaaaaggatacgagaatcagtgtcttgtaggacgtaagagcaaaaattcaataagacctcaaagaagactggaacaggctactaaaaagctatcagaaaccaagctgtgccttctctctacctcttgcctctgcttttctctgcatgtctgcatcattccctcccattagtctggcagaataatatatgtggcagaaacacataggtttggggttgacatattacaagttcagtcagtcagagagaatgaatctctccttctcttggggagacataatctctgatgtagccagacaacattttgtggatatttacctatggtcatgggagcagaatcacatagcagaaatgtgatgactgaaaatcccatcctgtgctaggttgagcagatgcccaatagcaaccgttaatagtaaggtggtggtggtgtttttttttcttttgttctttcttaacttgcagcagggtaggaaaggagcaatatgttaa

SEQ ID NO: 31452 - DNA, 1204 bp, Homo sapiens
taaaacatagtcaaaactttgtgttatgttttgaattatttaaaatgttgtataaaattaccttcaggctctgtgtgtaagatatttatgaagcgtaaatgaatttcatgtttagatttgggttccttcccaaagatatcttactatgtatatgcaaatattccaaaatccaaaacagtatgaaatctgaaacagttctggtcccaggcatcttgggtaaggaatactcaacctgaataaaatatttctaagaaaaaagtcttcattcctcttcccagtcagtccctaacaccagcacctccaactatgattctcatttctttcactatagattaatttgtctcttctagaacttaagtgggataatttagcttgtactcttgtgtttgccttctttggcttgccataatgattttgaggttcatttctgttgttgcctgcatcaagagttcattgagtataccacgatttgttcgtccattcctctggtttggacttttgagacatttttgaaatgtcattggctaatggaaaatggattgtagagtcttattcagatatttaataaaggaacactggttgtcttgtttacaaaagagaatgtattttcttttaagactgtagaaaggacagggccaggaactatgaaatcattatcagcatcttaggaatgcctgtctgtatggaagcagatagaaaatgattgtactactccccttccccacctatttttttttttttttttttttttgagacgaagtctcactctgtcacccaggctggagtgcagtggcgcaatctcggatcactgcaacctctgcctcccgggttcaagcaattctcctgccctgagtagctgggataacagtgcatgccaccatgcccagctaattttttgtatttttggtagagacggggtttcaccgtgttgatgaggccggtctcgaactcctgacctcgtgatccacccgccttggcctcccaaagtgctgagattataggcgtgagcagccagcatgcccggcgtccccctccccaactttaaaccagatgggaagtcttgagtgagagccccaagttcagtggttctgatattcaaatgatgtgaggcacatagaattattgagatgatacctcatatgatatatggcaaatctttcaagtgtctaatttatcagattttactcctttctcctcaagaatt

SEQ ID NO: 31453 - DNA, 1063 bp, Homo sapiens
tagggcataatggtcatagaaacttaacatgttttatacaatatgtgatcatttctatatgtatttatatagcaaacatttagcatttactatgtaccaggcacttatttctcattgaacagttttgaatattataaaaggttaaaaagagggtaaattccattgacccctttctctctttctattcctgtttcccagaagtaaccactgtaatagttttttgtgtatccttccaaatcctatttgcatattcaaagcagatgtatgtgactattaaaaacacaccgggagttacagtatataaactttgtataaattaaggcagcatttatagtaacttttttaatgctttgagaggtgctacaaagccagaaaattttgtaattttttaaaaaaacttagttattccatttatactttttacaattttgtggtttctgtcctattgaaagttgttcaaaatgagaatggatgttgattatgatttttttcaggatacttctagaattactggctcccataaaacagaacagcggaatgctgatctcacagatgagacttcacgactttttgtaaagaaaacaatagtagtgggcaatgtgtccaagtgagtatccagttgaatttatttttatttgtccatttgtgttaatattttggcattaatactcttacagtgttacagtaggaagcagcctcagggattctttttcccaagcccttagttgtttaaaaagtaaaccacagtctagagactttattagggtaattttgctccttagtgagcaaagtcagaatttgaatctaggtctcctatttttcttttcctttttttgagacagagtttcgctcttgttgtccagaccagaatgcaatggcatgatcttggttcaccgcaacctccccccgcccgggttcaagcgattctcctgccttagcctaccgagtagctgggattgcaggcatatgccaccacgcctggctaattttgtatttttagtagagacggggtttctccatgttggtcaggctggtcttgaactcccgacctcaggtgatccat

SEQ ID NO: 31454 - DNA, 1098 bp, Homo sapiens
acaggtgtgcgccactgcacctggccgatcttcatttttaattagggaaaaaattagtgttagtttttttttttaaagtttgcctttctgtgttagtccattctcacactattataaataactaccgaagactgggtaatctatgaagaggtttaatagactcacagttccacaggcttaccaggaaacttgtggctcctctccccttgtctcccctccctcctcttcccttccttctcccttccctttccccttccccttgtcccctccccttcccctcctttttttttttttttgagagggagtgacgctctgttgcccaggctggagtgcagtggagcaatcttggctcactgcaacctcctcctgggttcaagcgattctcctgcctcagcctcccaagtagctgtgactacaggcacgcgccaccacacccagctaatttttgtattcatagtagagacggggtttcactatgttggtcaggctgctctcgaactgctgactgctctcgaactgcctgacctcaggtgatccacccgctttggcctcccaaagtgctgggattacaggcgtgagccaccacaccaggctttctccttttctcttctcttttcttctttttctcttctctttttttaattgagacagggtcttactctgtcagccaggctggagtacagtaacatcatggctcactgcaaccttgaattgctagactccagccattctcccacctcagcctcccaagtagctaggactgtacacctgcactagcaagcccagctaatttttacattttttatagagacagtgtcttactatgttcacaggctggtctcgaattcttggcttcaagcagtcctcccacctcagcatccaaaagcactgggattacaggcatgagtcactgcgcccagccttggttcatatatatatgtgtgtgtatatatatatattttcaaaatgtatatatattttcttgagacagagtctcactctgtcgcccagtctggagtgcggtggcgtgatctccactcactgcaagctccgcctcccgggttcacgccattctcctgcttcagcctcccaagtagc

SEQ ID NO: 31455 - DNA, 1594 bp, Homo sapiens
cctggagaagggattgcccagtcagcaaaggttcagccctccaaggtttgtgttgggtagagatgggaaatttcacatgtaaatgatgttgtttgcctaaataattgacaagtgctgaaaagattcacggtgacagggttgatgatcccataagaacctgtgggtgaaagcctagttggaaaaacaagtctgttggtgtgaaactcttctactcctgtagtaatcattggcaagagccgcgttatgtattgcaaaggatcccggaatgggccaagaggcaggggaacactgctgtctctggcagtggaggcagagctgactcatgggcacagctttctacttgattcatctctaaaagggatccgctgttgacttgtttatttatggtaggagaatgctgtagtttatacctctgatgttcgggctgttacctgtttaatgattcttagctttctgtagagttcttttttttttttaataatttggaggtacaggagaattaatgtattgagagaattttaaaatagcacatagaggccgggcatggtggctcacgcctgtgatcccagcactttaggaggctgaggcgggcggattacctgaaggcaggagttcgagaccagcctgaccaacatggagaaaccccatctctactaaaaatacaatattagcggggtgtggtggcacatgcctgtaatcccagctactcgggagactgaggcaggagaattgcttgaacctgggaggcagaggttgcggtgagctgagatcgcggcactgcactccagcctgggtgacagagagagactctgtctcaaaaaaataaaaattaaaaaattaaaaaaaaaaatagcacatagagccatgttttcctgaatcaattggaaatgtagccatgcatcacctgatgatggtacattctgagacgtgtcattaggtgattttgttgtgtgaacatcgcagtgtacttaaatccagatagaatagctaactacacacttaggctgtatggtgtggcctattgctcctaggctgtaaacctgttccgcatgttactattgaatactataggaagttgtaatagaacaataagtatttgtggatctcaacatatctaaatatagaaaagatactgtaaaaatacagtgttataatcttatgggaccactgttaatatatgcagtctgtcattgactaaaacatcgttaatgtggtagatgactatggtatcaatattgagtgcttttgtgtatgccatgcttgtatttctacattttctataatccacacacaaccctggagggtggggattttcatccctgttttacaaatgaggaaactgtggctcagaggttaaacagtttccttgggagcattacagctaataaatgacaaagtgtttaaagtcaggcctgctaactccaagctccccatttcagaactaatgaaaagtggttgtctctaaccttggtatgctttcagagcatcagggttaaattacctcaacttttggcaggtatactctaaagctattaagtatataatatgggctcggcatggtggctcacacctgtgagccacctaacactttggc

SEQ ID NO: 31456 - DNA, 1044 bp, Homo sapiens
ttttttagacagagtctcactctgtcacccaggctggagtgcagtggcatgatcttggctcactgcaacctccacatcctaggttcaggggattctcctacctcagcctccagagtagctgggactacaggtgtgtgccaccatgcccagctaatttttgtatttttagtagagattggatttcaccatgttggccaggctggtctcgaactcctgaccacaaatgctcctcctgccttggcctcccaaagtgctgggattacaggcatgagccaccacgcccggccaaacttttttctttatacttctgaatttcccaaattttctattaaagtaaattataaaaagtagctgaggcaagacaacaattgttaagcttctattattgtaatacccaagtgtaagaaatacagttgccgttcacacctgtgtaggtagctttcctagatgactgaattaggctgcatgtattatgtgcaggcctttgttttgctctctgccaaaacggtgactgctgttctaagagctctcgaagcaccgttggactctgctctgttttgaacaggttgtcggggtaccagttgggtctgctttaccttcaacagtgaagcaggctgtggcgatcagtggtggccagatcctggtagccaaggccagctcttctgtctccaaagcagttgggccaaagcaagttgtaacccaaggagttgccaaagcaattgtgagtggaggtggaggaaccattgttgctcagccagtgcagaccttaaccaaggcccaggttactgccgctggtcctcagaagagtggatcccagggttcaggtaaaacggatcatcactgggagccctttcagcagaagctctgtccaaaatttcctttgctagtgattttatttgctatttgatctggtctaggaaagcctagttaggttgatgctgtaagaagtgtattgaaatgtttgttcttttttatgggacattttacataaaggtctgtgagtatttagctttaaatttacacacacacacacacacacccaca

SEQ ID NO: 31457 - DNA, 1026 bp, Homo sapiens
tgcatttatttatttatgccttttctggtttttttggatttggcgctgagaggagtattgctgtccacaatgaagataaaatggcacaaatgtttatgcagtgaactctggcagcaaaatacataaagtgcaaagactattaggaatatgaggagaatttgataaaactgcagtcacagagaagaattttaacatgtctctcagcatttagctaatcaagtggataaatcttttttattataaaggatttgtattggaataacagtactaacaggcttaattctgtatcattgagacacagaatacacattttgcttgtatatctgtggaacattaacaaattgattatatacttggccacaaagagaatctcttagcatatttcaaaagtagcatccaatgtgcttcattctgttactcaataaaaaagtcaaatcaataacaaccaaaaaacttgacaattaaaatactcttctaaattcttgggttaaaaaaatccaaataaattacggatgatttagctgttaatacaaatgacaattttattagggttctccagagaaacagaacaaatataatatatatagatattaagaggaaatttattatgagaattggctcctgtgattatggagaccaaggagtcccacgacatgctgttagcaggctggagatcaggaaagctagtggtgtgattcagtctgactacaaaggcctgcgaactggtgggcatgggagtgaggggcacactggcattaagtcctggagtctgaaggcctgagaaccaggagctctgatgtctaagggtaggagaagattgatgtctcagcttaagaagagagagagaattcgcccattgtccgcctttttgttctattcaggtccttgacagattggatgatgtctgcccacgttggcgagggcggatcttctttactctgtctgctaatccaaatgctggtctcttgcagaaatattttaccaggtatctgggcatccctcagcccactcaagttgacataaaat

SEQ ID NO: 31458 - DNA, 1047 bp, Homo sapiens
ctcggcttcccaaagtgctgggatttcaggcgtgagccaccgcacccagccagagtgattctatttttgttccatgattccactttcctgttgatggacatttggattatttccaggtttttttgtttgtttttgctgtcatggataaaactgccataaatattcttacacagatatttttctgcagaacagcctgatcatagggtacatatatgtttataagaaactgagaaatggtttagtaaaatggttgtactgtttgactatcccagagtaatatgaggaagtctgatttgctctacatcctcaccaacacggaggattgtcattctttttaattttagccattgttgtgagtgcaaagtcatatctcattgtggtctttatttgcataaagctccaatgcaaattatgccatggctattacttgtggaatctagtcataactttttcagatagtgctagctgtgtgaccctggtaaattaatctcttcatctctaagacaggactaaaacctactctatacagttagtgaaaataatgacttacgatgacataagatatgtacaagtgctttctgttcttcctggcacatagtaagatctcagaaactaataaatggtgtctgcttgtggagtgcattaatttgggacactgagcagtcacttagagcagatttcagcaaactacagccaaggcttcctgtttgcgttgttgctgctgttttttataatttaaacttttattttagattcagggggtacatgtgcaggtttgttacatgggtatattgcatgatgctgaggctagggtcatgattgatcttgtcacccagggagtgagcatcatacccaatagttagttttttaacccttccctccctgccccatgtcatagtcctcagtgtctattgtggccatctttgtgtccatttacccaacgattagctcccacttgtaagtgagaacatgtagcctttggttttctgtcctgcattcattcacttaggataatggcctccagctgcatctgtgttgcttcaaaag

SEQ ID NO: 31459 - DNA, 1028 bp, Homo sapiens
gttctccagtactaaaatgctaagcctatatctaatttagaagaccattaaccttacccatttaaatctggccctgtctagggttgattctcatgtttaaagattatacgtacatttaagagcatgttgtaatcaagtattttgaaaacaagtgacctgttacctttaaagatactgctgccaaatagtaacttgcaaatgcatttatttacttgttctatattggggtaaagggatatttataggtgaaaggtcataaaatttggagcttgttagaaaggtgtgtaaacacctcatgtaggttggattggtaagactttcttggttattctccaagtcatggggcgtatctcagctgtcagtaaggaatgagttatgtctattatccaaggcaacatgattatttctgcccatcttgtttctgcaggcagcccatggaggacaggcatctctaatgaaaatatccgatagcaccttgaagactgtgccagccacctcacagctctcgaagcctggaaccacaatgctgagagtagcaggaggggttatcacaactgccacttcccctgccgtggccctctcagcaaacggtcctgcacaacaggtgagaaatagcatgtcagtagagaatcctaatgagacatgaaagtggtgtagatacaaggaaggtgtccagcaggcacaccagtggaccttttaaaaatactcaactattgcttttttttttaaagaaatattcacataccataaaagtccccattttgtagtatatagttcagtagtgcttgtcattcacatggttgtgcaactgtgattaccatcatctaatcccagagcattttatcatcccagaaagaagcccaatacccatcagcagtcactcccattccatccttctgttctaggcgaccgctgacctactttctttggatttgcctattttagacatttcatataaagggagtcatataacatgcccttttgggtctgcttctgatgcttagcattacagtgcagagttcatccac

SEQ ID NO: 31460 - DNA, 1048 bp, Homo sapiens
cacaaaattcaagcctttgttttcttctaagttttatacatttagctcttatatttaggtttcagattcattcgagttaattttttttttttttttttttttttttttgagacagagtctcgctctgtcacccaagctggagtgcagtggcgcgatctcggctcactgcaacctccacctcctggattcaagtgattctcctgcctcagcctcctgagtagctgagattacaggcacccaccaccacgcccagctaatttttttttttttgtattagtagagatggggtttcaccatgttagccaggagggtcttgctctcctgacctcgtgatccacccgctttggcctcccaaagtgctgggattataggcatgagccactgcacctggccgctctagttaatttttgtacgtggtgtgaggtagacaccaaactttattcttttttatgtaaatatccagttggcctagaaacatttgttgaaaaaccatctctcaatcgtcttggaagcccacagacttgaatgatgtggcttgacttctcaagcttcatctcctgcagctgctgcttccccgtgcctcttcacaggtgacaccactctgctttgcagcttcttgaacatacaatgttctttcatgcctcaccaactttctacatactctcctctgccaggaaacactgtcatctctccctttctctgtcttaaatctggaagattcctctaaagtgcctaatgttttacctgaagctttttcctgtaccctcctgtttctattcctaggcagaagcagtgcctttcttcttggttgtgttggtgacatttgcctgtgcttgccgtagcatcattatacttaggtgactgtttccttggtcgcttttctctcagagccttagcacttaaccattatgccggccatgtagtagatgtttgttcaatgaagtgacagactgtagatgtttgttcaatgaagtgaatcattgtcatgtgttcttaataaagctcatttttagtccatgtgtatattctgagaatatgtcctcctagt

SEQ ID NO: 31461 - DNA, 1034 bp, Homo sapiens
atgtaagagctggaaggtagttcagaaaccatcttcccagctttctcagtttatagatgagaaaaccgagctgggcttggtggctcacgcctgtaatcccagcactttgggaggttgaggcaggcagatcacctgaggtcaggactttgagacctgcctggtcaacatggtgaaaccccatctctactaaaaatacaaaaattagccaggcatggtggtgcctgcctgtagtcccagctcctcgggaggctgaggcaggagaatcgcttgaacctgggaggcagaggttgcagtgagctgagatcacatcaccgcactccagcctgggtgacaaagtgagacaccatctaccacaaccaccttgtgagttaatggcgggtccagggctcctagtggagcaccagttccacagactttaatagtctatggcagtgattaccttctctaccaaagaagcaaagtgcccaggaaggtgtgttgctttgagtacacacggcaagacaccttctcttctgaggagacgccctcctgtgttaggctgcatctgagcttgcccagtaaggaacatacatgcgataaagaggtctgaagaagtgactggcttgcctccagcaaatgacgtgtggttggaatcgtaagagctttattcaggctttgctgggtgtgtgcattctaggtgaagatgccagctgcttttctgcaaagtctgtggagcagtactatggctggaacattggaaaaaggagagccgctgaggtaacccacatctgcctgtccactctggctgcctccagaaaccttgtcttatggaacagggataagattgcagcatatttggttgaaatatttgatggcagaatattttcctcagttaaaaaaaatctcatttttcaaagacctgtatccagctgactttcaggcgtgccttcttttcctgcactggcagaaacatccctcacagtttctaaatttttttctgagtttcagagttttaaatgaactcgagtattgagtccttacagtgggaaggtgct

SEQ ID NO: 31462 - DNA, 1105 bp, Homo sapiens
gggctggagttaccagtagctccagcagttaccctgaagagagattgggcttcagccttcagcaggtggttctctcccatgcctggccttggtgtggaggggctgtactctgagcccaagtgagtcagctataggaagaggccatacctagagccaagaaccatgaaggcctgagagacggcagactgagcagaattccttttttgagcacgagagcattactagaaccattgtcaaagcagtggcaagggacggagaggtcccaacaggagtcaggaagaggtttgattataaccaagaaaactcactatgctaggaatagactgtgtgcaccagtcccagacacttggcagaagtgtagcagcgttacacatgtgtgcgaagcagatcgcaggttccacgccatctgcatggcctgcaggagcttctgctgctgaccccatgctgagtggccagtggggagcggcgcccggcaggctcttctggggtcgtctgtcctatccgtggattgtatatactcttctctgttaaggagtttttcccaagaagaaaagtatttaaaagaaataccagtgagtgccttaaagttggagaagtaactgcccatgcccagaaataaggatgccagtgcccagaagcagtgagattagtctgtgtccacaagcagaggccccctcgatgggagggagtggcaggcaggagaaggtggcgctgccaggtgcccgggtctattggaggcgccccatctcagacttcctaacacagcctgtgtggaaggcagaacaaagaatgcatgcccagtcagaaatctgttctattctgctccaggaaaatcggaaacctgtgagtcagagtcagagaaacttacccaagcaacgtaattcctgttttcatgggtcctgtagatgtttgagtcaggaaggtaaggcggggagtgactgaataaactctgccttttaaattgagcatctgggccgggcatggtggctcacgcctgtaatcccagcactctgggaggtcgaggtgggtgggtcacctgaggttgggagttcgagaccagcccgaccaacatggtgaaaccccgtctctactaaaaatacagaaa

SEQ ID NO: 31463 - DNA, 1061 bp, Homo sapiens
agcccagaggtcgagggtgcagtgagtcatgatcatactactgcactccagcctgggtgatggaatgagaccgtgtctcaaaagaaaaaaaagacttggtttctaaaatgtaccagaagaggtggaattatttggttctgcttgtaggcgtggatatgattctaataaggttttttgagttcagagggtccccagaaatcctgaaggttctcgggttcttaagctctgtgtgtagtctataattgttgtaaacttggtgaagtatcttctcaggcctgggcttagggggtgagtgggtgtttctggtgacttgcgggatggggaatgagagctaggtgggagctgtgctggtgtcagtcagccctgtcctctatgaagggctctgctctgcggttggaaccctgagttacccagaggtcttcccatcctgagccaggtgataacgtggtgctggaccagacctacctgtggcagggtgttcgagtggcggctggagcacagatccatcagtctctgctttgtgacaatgctgaggtcaaggaacgagtgacactgaaaccacgctctgtcctcacttcccaggtgagacctgatctatactgtgcacaggccctgaattgcatggcagtcacactgagccagaaggggcattatttccacccataatcctgtctaaaaaagttgctctcattatcaggatgcacttttcctccacaccctaatggttctgtgttttttttccccttaggtggtcgtgggcccaaatatcacgctgcctgagggctcggtgatctctttgcaccctccagatgcagaggaagatgaagatgatggcgagttcagtgatgattctggggctgaccaagaaaaggacaaagtgaagatgaaaggtgtgagactcaacaggtgtggggcatctgtgtgtctcgctgcctcatagaagaaccagtgtttcctcctggagggattggtgcttccgccgggccctctctatagatcattgccttttccaggttacaatccagcagaagtaggagctgctggcaagggctacctctgga

SEQ ID NO: 31464 - DNA, 1170 bp, Homo sapiens
aggatcacttgtgcccagttcgaggctgcagtgagctatgatcacaccactgcactccagccaggaagacagagcaagaccttgcctccaaaaaaaaaaaaaaaaggctgggtgtgatgtgactcacacctgtaatcccagcactttgggaggccaaggttggcagaggataacttaagcccaggagtttgataccagactggccaatgtggtgaaaccctgtgtctattaaaaatacaaaattaggcctttcctttcagtggagcgtggcggcaagatggctgtgcaaatttccaagaagaggatgtttgtcactgatgacatcttcaaagctgaactgaatgagtttcttactcaggagctggctgaagatggctactctggagttgagatgcaagttacaccaaccaggacagaaatcattatcttagccaccagaacacagaatattcctggtgagaagggctgacggattcgggaactgactgctatagttcagaagaggtttggctttccagagggcagtgtagagctttatgctgaaaaggttgccactagaggtctgtgtgccattgcccaggcagagtctctgcgttacaaactcctaggagggcttgctgtgtggagggcctgctatggtgtgctgcggttcatcatggagagtggggccaaaggctgcaaggtcatggcgtctgggaaactccgaggacagagggctaaatccatgaagtttgtggatggcctgacgatccacagtggagaccctattaactactacgttggcactgctgtgtgccacgtgttgctcagacagggtgtgctgggcatcaaggtgaagatcatgctgccctgggacccaactggtaagactggccctaagaagcccctgcctgaccacgtgagcatcgtggaacccaaagatgagatactgcccaccacccccatctcagaacagaagggtgggaagccagagccatctgccatgccccagccagtccctacagcataacagggtctccttagcagctgtattctggagtctggatgttgctctgtaaagacctttaataaaatctcatacaaagacaaaaaaatatatacaaaattagggctgggcatggtggctcacacctgtaatcccagcactttgggaggctgaggcgggcagat

SEQ ID NO: 31465 - DNA, 1082 bp, Homo sapiens
gggcttcccaaggatgtccagcccccacacccacacgttaacataatgagtcactaggcttctggggagggcccaacttcacccatgcatgagagactctcctcctttccagagagaatcggatcgcaccacgtgtggcagcctgcggcggggggaggggggcctctttagctctctttatctttctctctcactcatgtatgcatacatgcacagagatgcatacacaggtgcctatgcaagttcatttaagcctcagggctggtccctgcccaaagggctggaccctcctaatcctctcctaggttgtggggctggtcccctgacacccttctccccttcctggtagaccttaaacctcgcacacatgtccccagcattttctcacctggataaagcccataagctgggtctcaggctgggctcagcaaaggactcgccttgcaaccgacaggccattcccacccccacacacaacctcccctgttttcacattcaccatggcatcccagagcaaggacacaggagcccacaggccagttgaggttgggcaaggagacttccaggacttccagacagagtaccaggttttatttttcaccttattctctactttaaacaaatcataactttctctttaagcctctgctataaattctcctggctctcctgggcttccatattttgggggctggggtgtcaaaagtgagatgaagttcttagctccaggttttggggtaaaccaaggtaggaacattttggcatttatttcaattaacaatacttccttggacgggtgcggtggctcacgtctgtaatcccagcactttgggaggctgagacaggtggatcacttgaggtcgggagttcgagaccagcctggccaacatagcaaaaccctgtctctactaaaaatacaaaaattagatgggtgttttggcacctgcctgtaatctcagctactcaggaggctgaggcacaagaatcgcttgaatccaggaagcaagcggaggttgcagtgagttgagatcgcactccagcctgggtgacagagtgagattctgtctcaaaagcaaactaac

SEQ ID NO: 31466 - DNA, 1112 bp, Homo sapiens
ggtgggctctcaatgtttctggccaggcctgtctttttgtctcttaactttttgtcctgtctgcttccctcagttattctaggcaaatcacactatgtattgtatgggctggtggctgccatgcagccccgaatgctggttacgtttgatgaggagctgcggccattgccagtgtctgtccgtgtgggccaggtgagaggctgagtagaggggagggctcaggctgtattctcaaactggagaatgtacatatacttgctttgctgaaactggcgtgggcggtggcttgtcgctacttttccatctctcttttcaattttcttaccctacaggcagtggatgtggtgggccaggctggcaagccgaagactatcacagggttccagacgcatacaaccccagtgttgttggcccacggggaacgggcagaattggccactgaggagtttcttcctgttacccccattctggaaggttttgttatccttcggaagaaccccaattatgatctctaagtgaccaccaggggctctgaactgcagctgatgttatcagcaggccatgcatcctgctgccaagggtggacacggctgcagacttctgggggaattgtcgcctcctgctcttttgttactgagtgagataaggttgttcaataaagacttttatccccaaggtctctctgtgtctgttttctggggtgtcatggctggagtctaaactagagtaaggagtggaagtgagagggcattgttaggagcaacgctgagtttaggttagcagcactgccctggatggaaagaactgagccccttccctcccctgggtggaaaaaactaagcccctcctttctaatcatcttctctttgcattttcttagaacccttgagaagccaataaatgtaatggatcttctttttgttttgttttgttttgtttgagacagagtcttgctgtctcccccaggctggagtgcagtgaggcagtctcggctcactgcaacgcctgccttccgggttcacgccattctcctgcctcagcctcccaagtagctgggactacaggtgcctgccaccacgcccggctaatttttgttttttgtttttgttttt

SEQ ID NO: 31467 - DNA, 2477 bp, Homo sapiens
ttttagtaaagacggggtttcaccatgttggccaggatggtctcgatctcttgacctcgtgatccgcccacctcggcctcccaaagtactgggattaaggtgtgagccaccgcgccccgcttattttttttttttttttgccgagactttgatttcagtttctcagccctcaaccagcacttcgccttgtacttagcatgcactcaataaatggttgcttaaaatatgaatgaactaaagaatcgcggaacagagagaaacacagaggggaatcggtctgggagtttcaaagttcgggaggggacacgggggcgggctgtggctgtcacgtgacggggcgggggcaaatcccatgtgctcggcggcgcagatcgcccggcgcggctccgccccctgcgccggtcacgtgggggcgccggctgcgcctgcggagaagcggtggccgccgagcgggatctgtgcggggagccggaaatggttgtggactacgtctgtgcggctgcgtggggctcggccgcgcggactgaaggagactgaaggtaaagccgccatgtccgggcccgacccggcccccccaccccctccccccgcatccgccgccatccgggccgggaccggccaccctgcgccgccgccccggcgccctggccccgcggcccgacccagggccccggcccgccagggtcccgatccccggcccacgtgtgcctggcccggccgggcctggctgctgggtgggggtggggagcgcagggccggactatgcgggccccgcgggctggtagggcgccgggttcgtcgccgcgaaatgccacctcggcctgacccgaggaggcccggcagcccacgggcgcaggcaccacggctcccggcccgccgccccctccccccttcgcggccaggccgccgggaagtgacacgttgttctttggcactggcccgcgctgcgcagggagggcgcaggggagggaggcggtggcggcgggcagggaggagcccccggccccgcccgccctccgggccgaccctcacttgcctgaaaccggctcctcgacggccgccgcccgcctggccttttagggcctgactcccgcccttcctggcctacactcctgggcggcggcaggcctagcttctggcccagtgcgggttccccggcggcaggcgtatcctgtgtgcccctgggccaggcccgaacccggtgtccccgggtggggggtggggacgccacggccgaagcagctagctccgttcgtgatccgggagcctggtgccagcgagacctggaatttccggtctggttggtctggggccccgcggagccaggttgataccctcacctcccaaccccaggccctcggatgcccagaacctgtaggccgcaccgtggacttgttcttaatcgagggggtgagtgaggggtctgtttcagtaggtcaggggttggttggaagtgatgcgggtttgacagcatgttggtggggacaggctgtatcttttctgcttcaccctcttggcatctctgggactccgtatgggacccagcccttgcatcaaccctttcaccgccccatttgccttaagcttgggtcccttcctcttcctgagcgccactctttcccaacaggtgctggggggaccctgatgtggcaccaaatgaaatgaacaaagctccacagtccacaggccccccacccgccccatcccccggactcccacaggtaattagggaggaattagcaggggtgggggtgggggagaccaggcagtctccagcctctggatcttcctacccccatctgtgtcagggcaaagtgcagccgcctgctgccaaattgagacagggcccctgggctgtccccgggggctgtcacggggagggggtatgtggattgttaaggctcttgccgcagatctgctccccttatttcaccagcttgggtttctgccccacctgggcttcccctcttgctgaactctggtctcccctcttcagccagcgtttcccccggggcagacagcgccggtggtgttcagtacgccacaagcgacacaaatgaacacgccttctcagccccgccaggtgaggggctgtggggaggggagtaggggacctgggtgggagcagtggaaagctttggccagtttaggtctaggatggaaactggaggccccatacctggccttaatcctctgtgttctttcatgcggctctgcgccttgccctgttgattactcacggtggctggtcccttggatagtatgttgtcaatgagggtggcattactgggatcctagtgcctctgagaattgggggcagtgctttgggccctgctgccagctcttgctttcctatttgctccttttaccggaggctgctattgctctattgctctctctgctttctctttggactgtggtgaggtaaacactccagctggtccttgcctttctctgttccccagcttcttccttac

SEQ ID NO: 31468 - DNA, 1088 bp, Homo sapiens
ctcacgcctgtagtcccagcactttgggaggccaagacaggcggatcacttgaggtcaggtgttcgagaccagcctggccaacatagtgaagctccgtctctactaaattttattgttattattttaattttctttttgagacggagtctcgctctgtcacccaggctggaatgtagtcgcacagtcttggctctctgcagcctccgcctcttgggttcaagtgattctcctgcctcagcctcccgagtagctgggattacaggcgtgtgccaccacacccagctaatttttgtgtttttagtagagatggtgtttcatcatgttgaccaggctggtctcgaactcctggcctcaagtgatccacctgcctcagcctcccaaagtgctgagattataggcgtgagccaccacgcctggccctgtctcaactaaaaatacaaaaattaggcctggtgatgcactcttgtaatcccagctattcgggaggctgaggcaggaggatcgcttgaacccgggatgtggagattgcagtgaaccaagattgtgccactgtattccagcctgggcaatagagtgagactccatctcaaaaaaaaaaaaaaattaaggggaaaaaagaactcacccactttggagatagtttgctttaaggaattaatttttcttcatcttgagcctagttcataatgttactttgtttctttgcccctttgtaaagggctggagacaggaactagactcaagttaaatggaacagggttggcagatctctttctctcattaccagccaaagacctggttctgtttcaggttcagagtatgtgtgtacatgttgatagcgggtggggtacacacacgagagtaacttgtacggtggaaggacagacataagtcctcctggtcactggtgtgtggtaggaaagagtgcctgcctacgaggggtgtgtgtgtgtgtgtgtgtgtgtgtgtgtgtgtgtgtgtttgtgtgtgtgtgtgtgttaggaattcttgtaaacgcagttcagactggttccccagctttgacagacacctaattccctgggggaggagggcagggcagggcaag

SEQ ID NO: 31469 - DNA, 1980 bp, Homo sapiens
gccccaggttgctgtcattgtccggccaggtaagtaagccggtgggacggagcttttatggggaaagggaatgttaacagttaaatgctgaggtggtggagtgacttgaactgggtaccagagaatgatgacttagatttcaggttgtgggattttgagggtgaattgggttttggatgaaagtggaagtatagcttaggtggggagaagatgatgcggggttattaagttgggaatgcctgggctggaggatggggaggaacaacagcagttaagcacttgcctttagttgctcattcttccttcctatggtgcagatgaccggtcacagggagcaatcattgctgaccggccagggctgcctggcccagagcatagcccttcagaatcccagccttcgtcgccttctccgaccccatcaccatccccagtcttggaaccggggtctgagcctaatctcgcagtcctctctattcctggggacactatgacaactatacaaatgtctgtagaagaatcaacccccatctcccgtgaaactggggagccatatcgcctctctccagaacccactcctctcgccgaacccatactggaagtagaagtgacacttagcaaaccggttccagaatctgagttttcttccagtcctctccaggctcccacccctttggcatctcacacagtggaaattcatgagcctaatggcatggtcccatctgaagatctggaaccagaggtggagtcaagcccagagcttgctcctcccccagcttgcccctccgaatcccctgtgcccattgctccaactgcccaacctgaggaactgctcaacggagccccctcgccaccagctgtggacttaagcccagtcagtgagccagaggagcaggccaaggaggtgacagcatcaatggcgccccccaccatcccctctgctactccagctacggctccttcagctacttccccagctcaggaggaggaaatggaagaagaagaagaagaggaagaaggagaagcaggagaagcaggagaagctgagagtgagaaaggaggagaggaactgctccccccagagagtacccctattccagccaacttgtctcagaatttggaggcagcagcagccactcaaggtaaggtgtggttggacggtagaggtagggcgggctaggggatatcgttccttgccctccttgatgaccgcccatttttgacatgtttctgggtccctgcaatggaatctaagaactagattaaggacttttaagcctaaaaagggtgatgcaaaggggaaatactgttctttggctgctttctatttcccagggattaagggtactccttaaattattggcaaagatccatgcttttatttatttatttttaattagtggcagtatctgtgccaaagaggagacggaaaattaaggagctaaataagaaggaggctgttggagaccttctggatgccttcaaggaggtaagggagcagaaaatgggaggggagagggccaagttgaggtatggagcagtggtcattctgcaaccaaaactggatgttctgttgttctaggcgaacccggcagtaccagaggtggaaaatcagcctcctgcaggcagcaatccaggcccagagtctgagggcagtggtgtgcccccacgtcctgaggaagcagatgagacctgggactcaaaggaagacaaaattcacaatgctgagaacatccagcccggggaacagaagtatgaatataagtcaggtatgctgaagaaagggttgagaatggcttgagttttcttattagggccagaggaggcagtatgattgcttcattctgttttccttgcagatcagtggaagcctctaaacctagaggagaaaaaacgttacgaccgtgagttcctgcttggttttcagttcatctttgccagtatgcagaagccagagggattgccacatatcagtgacgtggt

SEQ ID NO: 31470 - DNA, 1044 bp, Homo sapiens
atggattggggaggagcctgaggtcctgaaagagtagtcaaccgctctagcctgcttctgagaccttttcctgtcctctttgcaggccaataaaacaccactgcggccactggatcccactagactacaaggcataaattgtggcccagacttcactccatcctttgccaaccttggccggacaacccttagcacccgtgggcccccaaggggtgggccaggtggggagctgccccgtgggccggtgagtggggctgggtaaagtggcaggtgggcaaggagtgggagtggatgattccgtgtctcagtgcccgcggggaggggtttgccctggaggcgtgtagtagtggtgtcacatattgtgctgactagttccatgtcccctcttgtcttcatcccttgcttagcaggctggcctgggaccccggcgctctcagcagggaccccgaaaagaaccacgcaagatcattgccacagtgttaatgaccgaagatataaaactgaacaaagcagagaaagcctggaaacccagcagcaagcggacggcggctgataaggatcgaggggaagaagatgctgatggcagcaaaacccaggtactggcaagtcctgcttttggtctctctccatttcttctccaggtctgccatctgtgccctctttgcttctttttgtccttatcactagcatctgtcatgcctaagtccccaccaccctctcctgtccctcccaacagcctgttctgagaccctcactggaactcttgtctcttctccctccaggacctattccgcagggtgcgctccatcctgaataaactgacaccccagatgttccagcagctgatgaagcaagtgacgcagctggccatcgacaccgaggaacgcctcaaaggggtcattgacctcatttttgagaaggccatttcagagcccaacttctctgtggcctatgccaacatgtgccgctgcctcatggcggttagtttccagtgggttctaaatctaatggtctggttgcccattcctattcccaagactcctt

SEQ ID NO: 31471 - DNA, 1893 bp, Homo sapiens
acttacctccttcccttacccagatgctactcagctgtagaatttggaatggaggtagtggtgtcttggggatttctctggctcaggacgttttttttcctttttgagacagtcttgctctgtcacccaggctggagtgcagtggtgtgatcttggctagcctccacctcctgagttcaagcgattctcctgcctcagcctcccaagtagctgggattacaggcatgtgccaccatacctggctaatttttttgtatttttaatagagacggggttttaccatgttggccaagctggtctcaaactcctcctgacctcaagtgatccgcctgcctcagcctcccaaattgatgggattacaggcatgagccactatgcccagccagccggcctcaggactgagtgcttattgctaggtttggatatccaggtagaaaagggttttagccgagtggctggttatctttttgacacaatccctgtcctgtgaatggcaggcagaggaacgaggacgcctgaaggaagagctggaagaggctcgggacatagcccggcggcgctctttagggaatatcaagtttattggagagttgttcaaactgaagatgttaacagaggcaataatgcatgactgtgtggtcaaactgcttaagaaccatgatgaagagtcccttgagtgcctttgtcgtctgctcaccaccattggcaaagacctggactttgaaaaagccaaggtagaggtccttgcatctggagggggatgggctgaagcatatgtggggctcactgagcccacaatgatggggcggaaggcctgaggaggggtggggcctgcagttataggtgggacatgagaagttcctggtctgatgcctttctccttcctagccccgaatggatcagtatttcaaccagatggaaaaaatcattaaagaaaagaagacgtcatcccgcatccgctttatgctgcaggacgtgctggatctgcgaggggtgtgtgtccccctcctccccactgccagcctgctgcctccagtttctgacactgccttgtcttgccttccctgacatcatcgtgactggccctctgtctccacagagcaattgggtgccacgccgaggggatcagggtcccaagaccattgaccagatccataaggaggctgagatggaagaacatcgagagcacatcaaagtgcagcagctcatggccaagggcagtgacaagcgtcggggcggtcctccaggccctcccatcagtgagttccaagctgggattgagaagggagcagtgaagggaccgggaggttatactttcctctgatgacttcctgttagtgccacgtgtctgggccactgagacaccatgatggaactgaggatctgaggaagggaggctgggggtggcccaaggggaaggggctgctaggatttattcattattccagtatgcccctctttttgtgtcaggccgtggacttccccttgtggatgatggtggctggaacacagttcccatcagcaaaggtagccgccccattgacacctcacgactcaccaagatcaccaaggtaggggtgtgtgtgggagtgggtgattcagctcaggtttagatcttagtcccttcacttttctaaagttgagaaggtgacagctgaatgtttcctcttagactaactggttggattgctggagacaggactgccagctgtagagggagggtggtactcccattagtctggaccagtgtttggcaaacacacacacacacacacacacacacacacacgtgccagatccagcccattcatacatcccaggacccagtagtggtttttacattttaaagttgcgaaaaatcaaaaagtgaatggtaatttatgctgtggaaat

SEQ ID NO: 31472 - DNA, 1091 bp, Homo sapiens
aacctggaggaatcacacttgggatttaaaggaattgttatgtcaacatcatttaattcttttaaatagacgtgtaccaggacaagttgttttttaacaacaaataagcatattgaactatttgtgtatttcatcaactccaaggtgccatagattataagacattctttatgcgctgttaagaaagaaaagactgggccgggcgtggtaatcccagcactttgggaggcagaggtgggtggatcacgtgaggtcaggagttggaaaccagcctggccaacatgatgaaaccctgtatctactaaaaatacaaaaaaattagctggacatggtggtgcgcacctgtagtcccagctacttgggaggctgaggcaggagaattgcttgaacccaggagggggaggttgcagtaagccaagattgtgccactgcactccagcctgggcgacagagcaagactctgtctcaaaataaaaaaagatatatatcggctgtaagacaacttttagttaaaatgtgaaaaaatgggcatgttttaaaatctgtgaactgcaataatcttgctaagagccagtgccattagtctgttataaagaaaagagtgatgtcttcatagtctattgccccttacagaaaatgcactcagactgctggttttatgaggattttttatttgtgttagggatggggtatatttgtgtcttaagattttctgggtttaggaaacaagcatacttgttagaagttgtcccttcctagaggcccttacatcatttttcctaccctagtgtcatagcactttggtggacaagttctcttttattttattttattattattatttttttgagacagagtctcgctgtgtcgcccaggctggagtgcagtggcgtgatctcagctcattgcaaccctcgccttgggttcaagcgattctcctgcctcagcctcccgagtagctgggattacaggcacccaccaccacgcctggctaatttttgtattttctgtagagacggggtttcaccatgttggtcaggctggtctccgactcctgacctcaggtgatccgcccacctcgacctttcaga

SEQ ID NO: 31473 - DNA, 1039 bp, Homo sapiens
aggggttataggacacgttgcttgggaaggctacccagcagctaggggttgaggagaaagagggcccgaacaggtgatgcttgagttgagtcctgaaggaacaagacacgaggaagtttccggcaaaggatatagcatccacaaaagtgtcaaggccagagaaggtgtgtatgtacaggaaatgtgtggggaaggaagggaaattgagatcaggagttgtcaggatctgtttggggggcagtgaatgttcaggttacatgtaggatatatataggactttatgtatgatatatataggacttttagcgatttcctgaattcaggagtaccaattctgaatatagttttctccattaaatacatcatgggcagagaggtttcaggctgccaaggtgaggccaagcaagtttgtaaggtttttctgatggccaagtgactcattgctgtgcagcagtctcagatcatgagattagcatcctgtcagaggcctagtcactctggaatggccacaaatgtcaggctggtgcatcagggccttgtttgaacagtggaacttgggagggttccctggggtgggctggggtggcggtggccagtcacctctaactgctgtcccgcctgcttgcagacctgctgcggatgttctttgacgcactgtatgacgaggacgtggtgaaggaggatgccttctacagttgggagagtagcaaggaccccgctgagcagcagggcaagggtgtggcccttaaatctgtcacagccttcttcaagtggctccgtgaagcagaggaggagtctgaccacaactgagggctggtggggccggggacctggagccccatggacacacagatggcccggctagccgcctggactgcaggggggcggcagcagcggcggtggcagtgggtgcctgtagtgtgatgtgtctgaactaataaagtggctgaagaggcaggatggcttggggctgcctgggcccccctccaggatgccgccaggtgtccctctcctccccctggggcacagagatatatta

SEQ ID NO: 31474 - DNA, 1047 bp, Homo sapiens
taagaggcggaggccgggtacgggttggggagtcgggctgcggccgccggtgcgcgggccgcgggtgggtgggggccttgaggagggggccggtgtcgggagagggaggagcctgcaccgggaggcgggccaggcaacaggagggagcgggaatgagcagggaaggggccagaccgactccggttcgctcccacggcctgcctgccttggggttttgcagggcagacgcatggtctcgccgctggctgccgtgtgcccactgctcagggtggccggagacgcacagccccgggaggggctgggcagcccgatgcccccaccactccagccctcggcgactggccttgcgcgcccacacacacactcccctccgcctacacctctgccttcacagtcctgggagtggccctgtgctgggaacctgcttctcccagccgtgtccccatcttcttaaagaggtagcctttcggtcctggctaagcaccctaccacagaatttttgtcggacattgactcccctcttcagtcagtcggcgaagggggactgaggtcccgtttggggcacctgtgaacactgaatcacctctcacctattacagttgttttaatgtcctgcccccactcagcaaaaacaaatcactctactctgtggagggaaagaggaacccagaggcaggccatcagggcttccttcccacagtgctgacccctgcctgggcctcggtttccgtgggtggccatgcacaccgggcctggccgtagtcctgtgcatcagaggtcggccagcttcctttactccggtgtggtggatttctccacgcataaggcaaggcaggactgggtttgggatgggtcctggaccttcagggcaggtggtcagtcacacaggccttggtgtggttggtacttgatgttctttggagctaagactggctgagatttgtacttcccttgaggaattctgggatttgtagtcctaagttaacctcgtggcttttgaagctgaggagcagctgactgctctgatctctctggccctatcaaggc

SEQ ID NO: 31475 - DNA, 1048 bp, Homo sapiens
gaacgccagggcctcggcggctgctgaagggattctatggctcagaggtaaggatgtgatggtaggcggcagcttggaacatttctgttttttagcttgaagggctgtgtgggcctgtgttggggaaagcagagagcaggcagcctggtatagaagagctggcataaataaaataaattaaacagtgatttgtaggctgggtgcagtggctcaagcctgtaatcccagcactttgggaggccaggtgggtggatcacctgaggtaggaagctcaagactagcctgaccaacatggagaaaccccatctctactaaaaatacaaaattagctgggcgtggtggcacatgcctataatcccagctactccagaggctgaggcaggagaatcgcttgaacctgggaggtggaggttgcagtgagccgagatggcgccattgcactccagcctggacagaaagagcaaaaatccgtctcaaaaaaaaaaaaaaaaaaaaaaaaaaaaagagctggcatgggcttgggagtcagatagacctgggcatgactctgactggctttttattattcattctcctttctaagtctttttttggtggggtgtcttggatagtatgtaatatcctggacctcaggggggtaggtgggatggactaagcccttcaagtggggtgagttctcatggacttggtcagagagacctggcttccaagctccacactattgccaatgggctttgctaccatgaagactttatttaacctccctggctctcagtttcttcatctgtgaactggggacagtaggctcagccctaaagtgccttattcctatccattgtcctgtctatgtgcaggcccagggtgtggtgaaggacctggagccggaactgctgcggcacctggcaaaaggcatggcctccctgatgatcaccaccaagggtagccccagaggggagctccgagggcaggtaggtggcgagtgtgggcagtgggggcagtggggagggtgcagagttggaggggcactgtgtgccattgcactagtcac

SEQ ID NO: 31476 - DNA, 1013 bp, Homo sapiens
cttgggataggcccatggacagcatggaaggagttctcatttccctagctggtgatagagtctggcccttctgaaggcttttataattacaatggggcaataactaaatccaagtagggtaaggaagtggagagaggaacaaggcaataccacacctacttagcagctggtaagctcaagtcattcttttttgctcaagctgattggatctgggtttctaccacttgtttctgaataaggcctgaacaataccatttatcttggctcatctgctacagtcccttctttttatttgtttgtttgtttgagatgaactctcactctgtcgcccaggctggagtgcagtggcgcaatctcagttgaccacaacctctgcttcccggttcaagcgattctcttgtctcagcctcttgagtagctgggattacaggcgtgcaccatcacgcctggctaatttttgtatttttagtagcgatggtgtttcaacatgttggcaaggctgttctcgaactcctgacctcaagtgatccacctgcctcagcctcccaaagtgctgggattacaggtgtgagccaccatgcctggccagtcccttgtttttgaatgcaggtctttgctgcttttccaagtccagaagggtgtgtccactgcctggcagtttctagatacccagtcccacccatgctcagagacttgctggttgtgtttgagtcccaaattcccagagaaggaatttgcttagagaatggaatcacacaggaatatgatggctgccaggggcccacctttgtggaggtgtggaagtgtaggtcgggagggatcacagagagagaaagaggactgttctgagccagacaggcctcctggagggatttcttaagcgtcactttgcatatttttgcgtgggcggccgtgatacagtgccactgattccttagtttctcttgccctgaagatgtcaggatctgccttttgctctgggccccctgcctcctgtctcctactctgggcct

SEQ ID NO: 31477 - DNA, 1031 bp, Homo sapiens
gttagtgatgttattagggctgtttggggccttgatcacagttttgggattcatgcatggaaaacacttggagagatgaaatttttgcaattgtgaagctcattttttaatttgggatccttttcaaagtagtatgacatgtgactatactttaaaataattcaaagtaacttttttttaaggatctttattatttttatgatcaacttgaaaatactagagatagcttagtgtagtgttttttttcaaaatgcgtccactgtataagaatctcctagggtactgattaaattgcagattcctggggctcaccccaaacctacagaatcccgagcatacaggcatcccaggtgattcccatgcattttgacttttgagacccactaccctcagatattgcaacaccagtactaaaattctgtaatctctacaatgcttcctaatatctgtgttttttttagcttttgaagtcaggtgacttctgattccattattcaggttctattttgaatatagaacagaccttcgaataacatcattttgttcaatgtcattttgttataatgttaatgaagaaaaaacaattggtttaagttgttttgcttaaagtcagtttctaagaacttactgacaacattaagtgaggtcttactagagtttttgaccttcatctgctgtctcatttctctttccctgtctagatgcaaatcagtcatttattaactatgtattacatgcttcttaattgtcgagcattatgttaggcatgtttgacacacagacatatacactcaaagttggatagatgctgctatccagagcattgtgtgtagcagccttgctcattgcttttttctcctgtttccatgtactggagtaagtttaagtgagtgcccaggaagctctacagagtttgttaaatagagtctgtagagtctgccttctgagagatgataataattgaccacgctgacaaggacagacatagaaaagaagatgtgtaagtgatacaaggagcctgtcctgggatt

SEQ ID NO: 31478 - DNA, 1062 bp, Homo sapiens
cagagtagaggtatatatggaatactgttgcccaaccatcatatcatgacagtttgcaaattaaggtatgtggagaatccactaactatacagcgtggttctgatgaaataaggatcatgcaaaacattattttaggtaggtagttttggaagagcaaaataaaatgtgatgttatatttagagtcaggaaaattatagaataaagggaagttttataatttggattaaatcgaggaagggtgaaaaaattgtaaggaggagaacagtcagaatgtattgaaaaatatctgtagttgtaaaattctagatgtgaataaagacagtaacttttaaaatacatcagaccttgtatatttatgagttattccttttcagtgttcaccttggaaggctaaaatccaaaatgattgaaaaaaatagagtattttctatgtgctatgtagttatactcattgtttcagaactcttttttgggaaggagggattactatttaagtcattttatgagcacagaaaaggactcttacagtattcactctgaatgggcaaaaggactgacctaatattattccctagacctgagaatgagtgactgtgtctgataactagatttacttttatagaaggagaactggcaaatgtgaaagctattcagatgattgtcagatgccttctaagcacaaggcattaagcaaggtgctttgggagtgttaattcactcatgatcttagccctcagagaggtcatagtgtaataggggaggtaagacataccccaaaattcacatgtagataattaagggagacacaaacagtgctggggaagttgcgaaaactccaagttgtggaaatatggtgttttttgcatttttctaaatagttaaattttgtaggcatgcattctgacatttaaatttttaatttcattgttttcaagtgggtataataatgaactctagacaaaataagcattgcctaggagaaaccctagagaaatttcttttaattattagataacagaatttaataaatatttgagtgcctcctggagaaatcagaggt

SEQ ID NO: 31479 - DNA, 1064 bp, Homo sapiens
attttaagagagattttgaaggaagtagattgttaaaatagcttctattttaaaatatgtattgtttcagtgctaacaattgtcctctgaccagctaggtttatcggctttactttgttcttttgtttcagcaatatcagaaaaactagaaatgcagagtttgtcatgataatgaagtcatttgtgccaattgctttaaaaaatcttttataaaaaacgatatgctctaatccacctacagcttttagtcttcttttacactatgaaagtgtcattttaacattttcaaaagtcagtagtatattgtacctactgttctctggcctgtcactgagtagttcttgctttgattgtgttgccatgtaaattgttaaatggatcaagtcctcaatgtaatttaatcgagcagccaagctttcttcttgacccaaatgatgaagcgggtgtggtctcacttttgttttgttgtgtgcttgaattacagtggataaattcacgcacagttgtgctcttagacagcgtagagaagttgcatgtgattgatcggcaaacacaagaggaattggagacagtggagatctcagaagttcagctggtctacaatagcagccatttcaaatcactagccactggaggaaatgttagccaggcactggtaaggataatcacttatcttgctatcctagaaaatactttgataaacttggtattttgttatagttgttttagaaataggaactctggggagttacctttttctgtcttgaggtgtttctttacaagccactaggttgaagtgggtgtggatgtgcttataagtgtttgggaatacaagctaaaacaatcatttttcttcccttctattcagaaatgtgacttattttacttaataacaaagagttttaatttttatactaaaataatgacgtataatggaaaatttgtgagaaaaattgtaaaaatcaaaatatttttagaaagcttaatttggcagtaataagcctgatagatttaagggataaataactacagacaggtactctatgaggctttggaaatatttg

SEQ ID NO: 31480 - DNA, 1026 bp, Homo sapiens
caaagatggctttgagagaaagaagatattctagaaataggtgatagatgagatgcaggagcctagagagaaggaggacgcaacaaagttatggccttagcattaattttattgtatcattaagcaactacagtaatggccttaagcaatttccacagatagtttatagttcagtcaccttgaattgtgatctcatgttcctaaaccacaaatctttaagtaggaaatttagaccattgtgcgaacttccttggataattttttgaaaaaaatagtaatgatggtcatatttaatgagtgactacagcatgatgtgtaggctttgctcaaatctccttcatattataacttcagagcataaaatatatatgaaagggtcttccagcctcccactttaaaaaccaagaaaagtcagaataagaaatgatagtgtaatataattcactaagtgataataataattactgttccatactttattttcttgtgtttgaatggtattaaaaatactagtggactttgaacttgtacttttagccaagagggagttatggggaatcagatttactctcctgcttgaaataacccaggaagaggaaggagaaggagaagggagggggaggggaagggggaaggaagaagaagaagaaaagtaaacagcagttcttaagacactggacatctgtagtgatggacagcaatctctcaccaaatggggaacaaatgctgtgaactctgtgattgtcctagcttccagccttgagagagcatctgggctgtggaggaacccaaatggagcctggaagactccatgatttgagaagacagagccaagttgcaggaagacaaaattgggttgagtttgcaagagagagtactggagaaaagagcactatgaaagagtccctcttgagtgttcctcagactcctaatcagcaaatgcatagaaggaaattgcccaaggaccagggaagagccatttgaaaggtttagagggaaccgtatctagtgctcacacagggctga

SEQ ID NO: 31481 - DNA, 1054 bp, Homo sapiens
tatggtggtgtgcacctgtagtcctagctacttgggaggcgaggccagaggatcacttgagcctaggagtttgaggctacagtgagctatgattgcggcactgcactccagcctgggcaacagagtgagacctgtatctaaaaaaacagtcaggttataattccctgtgtcatcttgaatacttttaaaattccttcttaatcaccttttcttttttcccttgctcactcttttatgaagataataaagtacatagccaaaagacagcaggaaggaggaggaagaaaacctgggaatctggattatttctgaaccaagtaatagcccacagaaaattgacatttgttagtttttataaacttactagtaattatgagaactagtgtatgtgcaaatgtttgtgttgcccagaactagcagagaggattaatgttttaatgttattattaattagcatcaatataattgatgctaatatttaatattgaccttctgttcctactctagactgggctgaattaattgactataggattccctcccttttgttgtgtaaatgcattggtaaaaattatattccaaattagtataaacatttgtggaaaacctggatagaaattggttactccttagactccgaatgatttgctcatctgtgctctttagggaaacacctacagcgaggattactgaagaacttgaatgtttcatttcctgagcagtatagatgccactgaggtctagaacatggagatatttcttaagaaagattagcaaattagtactagccctgagactggaagaaatgaggctagagttttaaaaagttggtaaataaagccactaaaattttcagttaaattttaataacaaattctaattatgtattatttaggagagccacatacatattgaaaaactttagagatatattttaatgtctatgccaggctgttttccttacagatggtagaaatcctattccattatgcagatcgagctctgaaaaagtgcccagaccaaggaaaaatccaagtgatggagcagcattttc

SEQ ID NO: 31482 - DNA, 1029 bp, Homo sapiens
gggaggctgaggcgggtggatcacttgagctcaggagtttgagacagccttggcaacatagtgaaaccttgtctctacaaaaaaaaaaaaaaaaaattagctgggaatggtggtgcacagctatagtcccagctactctggaggctgaggtgggaggttcacttgagcccgggaggttgaggttgcactgagccaagatcacggcactgcactccaacctgggtgacagagcaagaccctgtctcaaaaaaaaaaaaaagagttgtctccatttccttacctccttctcatcccttaacctattccatgtctataaattctgtggacccttttatttctcatcttactggtcctcagcagcattcagcacatgaagacttcttgaaatagtctgtccatttttggcttccctgatatcatgcattccagttttttccctacctctctgactgcttattgattctctttgtttattcttcttccttttctttacttaaccaagaaatgttaggattcttcacaatacccttctatttttatatcaatgtttgtcaagatgtctgtgtaccatttacttcaaaatcatttgaagatatttgttaaaaatgcttttttttttttaatttcccaggcctactgaatcagactctctgggattggtgaccaggatttgtagtcagctttcaagatgtcccttaagcacattaaagtttacaaatcactgctttacattcttccctaggtgatataggcacatggctatctaaccagtgttaacaacctagattgctcttctgaattctgaggtctatagagtaagttgcccatttacatttctgcttggatgttttgtaggtacctcagactctgtttcctcacaaagccttttctgaggattcctgtgttagtgagtggatccaccatgcacctaatgcaaattgggtgattcttgtcttttacttgttcctggctattctgcctcctgacagtttctctcatctgtttccaccatgctgttaattctgccac

SEQ ID NO: 31483 - DNA, 1040 bp, Homo sapiens
ttggttaaaaggcattattcagaaagaatcaactgggaaaggatgtgcagacagaaacagaagttctcactccaagttgcaggtttcatccggaccagtaatctggtctttcagccttcaggctgttttttggcttgaaggtggggtttcacaagggacccgcccctatctgcctaggcatttgactaccccctgtcgctatcaaacccactgtgttccacttgttttcacagctgcccaagttgtaaggcaatattggttttcaaaactacagtagagctggagaaagggagatggcaatacataaagttaaaactctaaaattcactggtcttcctgagattcaggcatttttctgaataaacattcctcagattatggcaaatttttagttaatttcaagagttctgaaaaagccaatttgacagtttttaccagtgtttgtattgcttttatggaggagatttttgcaggtccttactccaccatttctgaggtctgtttctctgggttttgattgtgttctgtttggtcttttttcctctctgtttttcaccttggatgatttctattgctcttccttcatattcatttgctcttaactccttcatgtcaattcaactgttaaatctgctcagtgatttttttattttcaacagttatatttttcggtctaatttccatttagttcttgtttttgttttctctgctgcaactcttcatttatctgttgaaattttcatgcactgaaaccatttcttttgcttaaggataattataatagcgctttaaaatctttgcttgttctcacattttgttcatcccaggattggacttgattcacttttaagaagaatatattttattttcttggtttttcatgctggataattttggactgtatctggatattatgaatgttacattgtgtggagagtatgggttctccagtgagtatttttctccattgctctatcaggtatttttcaccactgagtatcgtcttccattgttttatcagataattttcttggtgggct

SEQ ID NO: 31484 - DNA, 1005 bp, Homo sapiens
atggaagttttcttctatttctactatgccaagagtttcctcatgaatggattttgaattttatcatgttttcttccttattctgtttttgtgttaaattttattggtattaaaccaaccttgatttttgcagataagtgcagcttgatcctgatatattatttttatacattgctgaatttcatttttatttaggatgtttatatcaatatttgtgattcagattgatctgtaattttgtcctattgggtttaaggtgtcaaaatgttactagcctcttacaatgagctgaagaatttttcttttttctattctctgttgtaagaggtttagttaaggctggaattatttcttccttaaatggttgctagaacttaccagtgaggctatttgaccctacagtttttcatatggaaagtttttaaactactcactcagttattttaatggttaaaaatcaaatcagggtcagacacggtggctcatgcctgtaattccagcactttgggaggccgaggcaggatgatctcttgatcccaggacttccagaccagcctgggcaacatagcaagaccccgtctctaccaaaaaaaaaaatcaattcaggctatttcttctcaagtcagtttattaaattatactttttaggaatttattttgtctgaatttccaaattcttggcataaattcattcatcgtagcttgtttttgaatggctacagatcagtagtagtgtctcctttgtaatatttagttataccttctcactcatcaggagtattgcattaaagttatgtaaactacagttatttgtggcagctaattattatgaatctacaagtactacctaacacaataattaagagatacattgtgaatgttgcagtcatagtggtttgtctgagttttatttaataatacctattttggtctacatttggtctttgtgttttagccgtgtattgtggttgtgtttgatcatagtgtccccacagagaaggtaca

SEQ ID NO: 31485 - DNA, 1024 bp, Homo sapiens
agatgagcccaagtctttgctctgtttacttagtgtcagatccttacttacattctatttttcagaattaggagtccttggtggtttttatggaagggactgatctgtttgaacttgtgcttaagagaaccctagtgacagtatataagaggatgagggaggcaagattgggatgccaaaagttcaactaagagactattgcagtagcatagacgaggtgatgaaaagctccaccagggtaaaagttgtggtcatatgcaagcacagaagtagaatcaacaaatattcgcaagttatctgaatgtgtggggtgaaggagagggaagcaccaaagatgaagatttataaactggttgacttaaagattatgattccattaacttggtttgtaaatggaggaggaggagcagatttgaaatgagaaaaataagttgggttttgcacatataaagttgaaagtgcttgcaggacatccatgtggaaataaatgtcttaggttcattagaaaattcaacctgtagattttgaatggaataaagattggagatgtgtgtttgaaagttatgaacaaagatatgagagttgaaacaagaatggctgaaatcattgagaaaatgaagagagacctaaaatagcatcttgggggaaatatctacatttaagaaataggcagaagaagagatagtataccaagaaaggtgaatgataatctctctagtaactaatccttagacagatgattggggattttccatatttccatagcatattgaaatgctaagtgtgatgtgctttatctgtcctacgaatgtaaaacatttctgtgggaaactcttatttcacggaataatctgttttttaatctataaaacattagcatcaggttttattaattattatatactagaaaatgaaggtgatgcaaagaaaaagaagtttaacttttcacagaggctctgagattatcagcaacatatccttaaatgatgtttacactttttctaaatctagataccaaagagga

SEQ ID NO: 31486 - DNA, 1053 bp, Homo sapiens
atactgatatcaaactcccgattctgttcacatgtgctattcatgcacatacccttggtttctggagccaagtgcaaggcattgcttatattgtttcagtttctgacccttgggaatcatttttttcctcccaaggataggcctcttttccctttaagccattgataaaatatttgtatataaaaaagccaaggttggccaggcgcggtggctcatgcctgtaatcccagcactttgggaggccaaggcgggcagaatacctgaggtcaggagttcgagactagcctggccaacatggtgaatccctgtctctactgaaaaacacaaaaaattagctgggcatggtggtacgcatctgtaatcccagctattcgggaggctgaggcaggagaattgtttgaacctgggaggcggaggttgcagtgagctgaggtcatgccattgcactccagcctgggcaacaagagcgaaactccatctcaaaggaaaaaaaaaaaagccaaggatagagccttacagctcatcatcagagacttagctaacatcatttattagctcccatgctaatgcaactgagagctaatggctgtgggttttgcgcttgttaatatgacacttcagcttgagtagttgtctgttcccactcagattgtcatatgtgtgtcttattatggggctgtgtgtgagaccatctcggtgccagtagttctctatactatcctatgccctctatggaagggaactccctcagcaaaacaggagttgcctcacggctaccgtcttcttggatgttgagattattgatcgagttacaaataggcctttcccctccaacatgtttcctgatgaagcttttaggcacttcccaaaatacatggcagttatcttctttctcttcagtatgtgtgacagagccactagcagcctgttactgtgcattaaaagaactcagtaggccgttcttaattgtgctgtgctgaattatcacccgtttgtaaaggtcatggaatttgaacagagcttcgcagattgtgctgctctaatgtgtgtggt

SEQ ID NO: 31487 - DNA, 1047 bp, Homo sapiens
cactttaaatatatatctcatttaatttttggtaatctcaaaaggtaagcattaccccttccttcccacaggtgaggcaattgaggcttagagaagtgaggtgacttgcctaaagttacatagcaggttactgtcagaactagtatccagattctcctctgactccaaagcttatggccgcctcccccaggatcccatttcttctctctgcatatgagctggatcaggtccactgagagaagaaccgcagtttggcaggtcccaccacaataacaggtggaacaaaacatggctgctgtaagagcaggctagaccggcccttttcccaaaagcagcagacgaatcttgcaaccccataggtggcgaccagctttataatgagacagggatgagatttttaaatgacagtgcgtctcctgttaccatgacagagaaaagcggtatctttgctggccgtatgaagtgatggacatgggaatgcaaggctggaaggaactaactagctctgcataatggtgccaaagagggatcaagaaacctgaaaggaacctatacatacgggacatttggagactccattgggaaaagggtccacagacaggtcaacctgcagccacaccaaggagggatcttaggggacgtgccgatttctaactcatgttcagtatatatctcactaatagctggtagcatggattgttttcaggagaatgaaggaagcaccatgttatgcttcagcatcgtgtagagcaagttgagaggctgcctagccacgtgatgttgttaatcgtatcggtttttatttttcagggaacctcagaacctgttctggatccacagcaaatccaagcatttgatcagctttgccgtctctaccgaggaagctccagggtaatgtttgcgtggttgtttatatttttatttccctatttatagtttactgctttagacaggcagtgtcttggaacctccctctagcctccttctagcctggaaggtgccctggcatccctgttatggctacatggacaacagaccctggcccca

SEQ ID NO: 31488 - DNA, 1047 bp, Homo sapiens
ttgagaataggctttataagatacatacctatatgataccacttattgtgtgtctgttaaaattaataatgaaggctgctaactaggggttgagtcatgattagtagaataaaagaagttataggctcatgcctgtaatcctagcactttgggaggccgaggcaggcaaatcacctgaggtcgggagttcgagaccagcctgacaaccatggagaaaccccatctcaactaaaaatacaaaaaattagctgggcatggtggcacatgcctgtaatcccagctacttgggaggctgaggtaggagaatcatttgaactcgggaggcagaggttgctgtgagccaagatcgcgccattggactccatcctgggcaaacttggcagagtattttgcatatagtcatttctgttaaatgatgctttgtttcctaatgtccttgggattaatcactatcatcatgaaggggaaatcagtgagtgggatgcctagattaagactccttattcttgctaagtgaatggatagcaatgaattgaatccaaggacagattcttttcctaaatcaagaggatagaatatggtaaaggtgacatggaaagaaaggagatgaacctgaatgtaaaagttacatgtagaaaacacagaaatgaggaaagctgcttctgtatgtgtgtgtatatatgtgtgtacatagatacatagtatattatacctacatctatgtatattacatacatatatatgttccagaaatatatatatttatatagagagaatatatatattccagaaaaatatatataatttatatagagagaatatatatattccagaaatatatgtgtgtgtatatatatagagagagaaaaagagaatatgtgtgtgtgtgtttgtgtgtatatatatattccagaaaaccagataggaagttattgagttagtcaatgagaaaaaataaataaataaataagtgcattaaggccttagagctgggcctgtcataggctaattgatgattttgcgagtagcttaaataattttcgaagt

SEQ ID NO: 31489 - DNA, 1035 bp, Homo sapiens
gtgatccacctgtctcagcctcccaaagtgctgggattacagacatgagccaccacgcctggcctaccttcttttttaaggctgaataatatccattgtgtgaatataccaaattttctttattcatctgttggtggacatttaggttgttggctattgtgaccaatactgcaatgaacatgagcgtgtgaatatctctttgaaatcttgttttgaattcttttggatatatacccagaagtgggattgctaggtcatatggtaattctatttttaattttttgaggaacttccctactgttttccatagcagctgcactattttacattcccaccaacagtgtacagagactccaagtactctacatccttaccaacacttattatttttatttatttatttatttttaattaattaattttttaacagtggtcatcctaataggtatgaggtgatactattctggttttaatttccctttccctgatggttattgatgttgaggatcttttcatatgtttgtcggtcatttgtatctcttctttggagaaatgtctgtcaagttctttgcccatttttaaattggatttttttttttttattattgagttgtaagacttcattatattaatatattctggatttttgtcaagttctcttgagaaactttttaaggttgccttttcactcttagattatttcctttgctgcatgtaagtttgtaagttcgctgtagtcccatttgtctaatttttgcacttgttgcctgtgcttttcatgtcaatatccaaataataattgccaaacccaatgtcattaagcttttcccctgtgttatcttccaggagtgttatagtttcaggtcttacagttaggcctatgatccattctgagttcatctttgtagtcaaattttataggacctttgtatggcaagggtccaacttcattcttttgcatgtggacatccagttttcccaatgccatttgttgaagagactgtccttttcccattgtgtgacctcagcaccctt

SEQ ID NO: 31490 - DNA, 1034 bp, Homo sapiens
gacttttgcttgttgaattctttaagttccttatagattctggatattagaccttttggtggttgaatagtttgtgaatattttctcccattctgtaggttgtctttttactctgttgatagtttcatttgctgtacagaagctctttagtttaattaggttccacttgtcaatttttgtttttgttgcaattggttttgaggacttaataatacatgctttaccaaggctaatgtccaggatagtgtttcctaggttttcttctaggattattacagtttgaggtcttatttaaactccttcagttttgaaggacagttttgctggctacagtatttctgattggcagttttttcttttagcagtttgaatgtatcataccactctctcgtctgcagtgtttctcctgagaaatccaataataatctcatgcgagttctcttgtatgtgacaagtcacttttctcttgctgctttcaagattctttgtgtctggcttttgatagttcggttacaatgtgtctctgtgggcctctttggattcatcctagttggagtcctttcagcttgttcaatttagatttccatttctttcttcatgtttgggacattttcagccattattttttcaagtaacctctctgtccttttctctctctctctccttcttttgataatccagttaatgcatatattggtcaactagatggtgttccataagtcccttaggcattcttcacttttcttcattctttttactttttgttgaattatcaagcaggagctggataattcttaatgggtttgctgattttgtcttctgtttgatcaagtttgctgttgaatctgcttagtgtaatttttaattcagttttatattcttcagctctataatttccatttggtgcaccaccccctcccccgccaccccgagatgcagtcttactctgtcgcccagagctgtagtgcaatggtgtgatctcggctccctgcaacctccgcctcccaggttaaagcaattctcctgcctctgct

SEQ ID NO: 31491 - DNA, 1034 bp, Homo sapiens
attttgagttctttgtctggtgattcatagactttcatttctttggggtctttttttttttttttttttttttgagacttactttgttcccttggtcgggcccttatttctttgtattcttgattattttttgctgggatttgcacatttttaaaaaacagccacgctcccagtcttctggactggcttcatacagggaggaagagatgttaagactctctttagcccagctatagagtcttagggcctctcaaacctttaatggggttgtatctcctctgaactgtgcctgtaatttcccaattacagaagtttgctggtttcttttttaggcacttgctccctctggtgtctttccatggtactgctggttttctggtgttcctacaagctgcctaggtctcttttgttctcagcagttcccaggcatgcaaaagttgccagttctgtcagcattccaagtcaggtaagacagaaagccatctcttaggcagtccccagaaaagctgaaaggttggatatactttctactcttctcttttcttcatgagagaaaggccatgagttgggcattttctcccaataacactgagttctgttgtcttctgtcggctgtgctgcaggttctcaggtgctgcagttagctgctgaactctccgctgttctcagtggaccccaagcatccaaagtattctggttctgtcagtgttccacatcaagctggacagtaaccattcccttgggcacttccctaaaaagctagaactttggatgcacattctatccttttctttcccttctgatgagaagatgcaagtttggcatttacttgcaattatgtagggctggactggcttggggaaggcctattatgggtgaaatgcattagcttttcttgcctgtttcaatgtggctgttcttggctttgagcttgcctgggatactgtgactttttaactggtttctggagttctcataaagtctttttgggccatatgttgttgttaagtcagtatctctgtgggggaatgagg

SEQ ID NO: 31492 - DNA, 1076 bp, Homo sapiens
aaatcgttgtatgacaactggtgtcattaaaatttatttccaaccataggaattttttgaatagatgatatattcacatttccaagaccaaaacatatcaacttcccactccagccagttctccatccattcagctcccattcagggtccccaaaccacggctattatttttccatgtatctttccagagtttcttgatatatgtagtaaggaaatataaaagtataaatagattcttatttccctcctttttacacataacattatacgtaatgttctaaatgttttcagttgtaatatatgttgaatctctttccatgtaagtacatagagagtgtcctcatttttaaatagctgcctactaatccattgtacggatgtactgtaatttatataaccagtcacctgttgatagacattttggttgtttccagtgtcttcctattgtaaacaatgctgaagttcatagccttgtacatgtatcattttatacatgcatacagtatatccatatgactaaattccccaaagtagaattactggatcaaaaggtatcataaatattgcctaactgccttctttagggattgtaccaatgtgtactccccccccccattataagagtactgtttctcatatccttgccaacagaatcatcagacttttggatttttgccagtttgataggttaaataatggtttcagcatagtgtttgttttttagaatttacaataaaatttgtgttgaagttttaaaaactaattttcatttttaattgtggttaaaaatcctataacataggtaaccatttttaagtgtacagttcggtagtgttaagtatattcacgttcttgtgcaacagatttccaggacacttctgtcttgtgaaactgaaattctatactcattaaataacaactctccacttcctcctcctgctaactcctagcaactaccattctactttctgtttcaatgaatgactagtagctatctcatgtaagtggaatcacacagtaattatccttttgtggctggcttatttcacttagcctaatgtcctcaaggcttatcc

SEQ ID NO: 31493 - DNA, 1056 bp, Homo sapiens
cagctaaaataggtgaaaatatcaccattaaaaatatctggctgggcacagtgggctcaagcctgtaatcccaacattttgagaggctgagcccggaggatcacttgaggccaggagttaaagaccagcctgggcaacatagcaagacttcatatccatttaaaaaaattaaaaatatgaaaaaaatagaaagaaaaagaggctgggtgtggtggcccatgcctataaacctagcactttgggaggctgaggcagatggattgcctgagctcaggagttcaagaccatcctaagcaacatgacaaaacgctgtgtctacaaaaaatacaaaaattagcccagcatagaggcacgcacctgtagtctcagctactcaggagggtgaggtgagaggatcgcttgagcccaggaggtggaggttgtagtgagctatggtcatgccactgcactccagtctgggtgacagagtgagaccctgtctcaaaaagaaagaaagaaaataagaaaaaatacctaacacacaggaataaatctttcaaaagagcacaacacctctatactcaagactgtaaaacattgctgagaaaaacttaacaactcagaaatagaaagtgcaatatatatataccatgatcatggatataaattgttaaggtgccatttctccctaaatcagtctgtagatctaatgcattcccaatcaaaatttcagcaggcaatattgacgaaattgacaagctatttctaaattttttgtgaaaatacaaaagatatacaatagctaaaacaatcttgaaaagtaacaaaaaggtaaatgacttataatacgtgacttgaacacttaactctgaaacaataatcaagacagtgtgatattgccttgaggacaggcagatttgtcggtggaacagaatagggaaatcagaaatagattcacacatataaggtcaattgatttttgatcaggtggtgagtcagttcaatgaaaaaagagtagttttctttaacatgttgctgaaacaatggattttctttttttttttttctttttttctt

SEQ ID NO: 31494 - DNA, 1042 bp, Homo sapiens
caggatggtctcgatccctgacctcgtgatccgcccaccttggcctcccaaagtgttgggattacaggcatgagccaccgtgccttgcatgttcgttcttaaataatgtggtacactgaggcctactgggcgtgtaccaatgccgtatttgccttgagcactcccatgttacatgtgtaaacttctttggtctatcttttttgtagtgatattccacaataagctcctttagagaagtttgttaactatgttgtttgccaacgatattctattgcttcaatatagacagtacactgaatatctttgctgtgtgtaaaattatcctgaaaagttttccttttccaaatgagctaagaagtgtgcaatacttactagtggtcaggtttagaccctccagaaccacttagaaacaggccaccactttccttctctcacagttgtataaataatctgattgagaaatagagcagatctctgttcagaatgttcttggtcactggacacctcataactgaggctttatattaaccacgatcgttctagtttcaaggattgaggccatttcccaagttcagaaaaatcatgatcagtatttgtcaagtattagtcattgtgaagtgtagtgatggggagtagggacaataaatatattcatctccaattttgtataactgaaaagtgtaaaaataaagaagaaagagatgcctcttgagtgaatttaatacagctgtttttgctgttaataataaaacatcttactgaaaccaaaatttgttcaaagtttcattaagtgcccttttggagctgtgtcttaatcgactgccagaagttgaataaaccaatgaggaaacactgtaccctacttaaaagtagcagtaaatttttcttccatatccacttttgatacatcatgaaggtcagcaagatgttactgctgtgcaaaacagctacattcgtgtaatattattttccatatgtctgttttcttagttactagattattgttcccatgcgttcttcccgacaattttgcttttacaag

SEQ ID NO: 31495 - DNA, 1072 bp, Homo sapiens
aactcgagctgaagttagatgaaggatgaagactatattaaattgaaaaaatgaagacccactaaattcataaatattataaccagcctttgtaaaaataagatattattctgtatgataattgctagcttttgaaaattgttctttcataattttcccaataacaagttggtcgatagattggtattttaaatttgtagattttgtcaaaaaaaaaagataaattttaaaattacaaaacaaaaaactcccttttcatttgtatgttcatttcatcagtttggaatttttcttacacccttcttcatttgtataattgtcaagccaagagggctgatgtctagtcctaacagctataataattttcatatagcattttcatttagtaacaatacatatctgtgtagcagtgtggtaaaaacatcttacaaaatgcaatcatgtgttgcagggcaaccctaagagaatgtgcagtaactgtacaattttaattgtttaaaaattttcaggaaaaacaatgtagaacatcctgctgacagatggtgattgtcttcagtgtgctaatttgcattgtgaattcctgggctggggtaatagtagaattgagcaattctgaggacattttagtgaaattctggattcacaaaaggccagagaagtgaaagaatgaattgattcaaggttaaggtagccaaagatgaaggactggagaaagatgacagaaaaaaaggagagcagagcccagggagacggtagctcagctgatgaggcaggtggcagccaggacagccgtttccaccttaaacagaagggagtggatctgggactcagactgaaaaagactctttggagtcctaaaggggggctgtcacagttgccattactaaagagggctcaatttgcaaaataagcccactaaggctccttattaccctgaggcattgtgcctgcatttttagtagctggcctgcctgcctttaatgggacacattaggctatctgcaggcttggataaccatggataattgagactagtgagataaagctcaccaaaatgcaaagccatgattgc

SEQ ID NO: 31496 - DNA, 1016 bp, Homo sapiens
tcccggattcaagtgattctcctgcctcagcctcccgagtggctgggattacaggcatgcaccaccatgtccaactaatttttgtatttttgttgttgttgttgttgttgtttagtagagatggggttttgccatgttggccaggctggtctcgaactcctggcctcaagtgatccactcacctcagcttcacaaagtgctgggattgcaggtgggaaccaccatgcctggctgaattctaccaatcttataaagaagaactaacacgaattcttctcaaactattccaaaaaaaatgaagaggagggaattcttcctaattcattctgtgaggccagaattaccctgatatcaaaaactaggcaagaacacaacaaaaaaagaaaactacaagccagtatctctgatgaacatagatgcaaaaatccccaacataacactaggaaaccaaatccaacaaaacatcaaaaagttaatacatggctgggtgtggtggctcacgcctatagtcccagcactttgggaggccaaggtgggctgatcacctgaggtcaggagttcgagaccagcttgtccaacactgcaaaattctgtctctactagaaatacagaaattagccagtcgtggtggtgggtgcctatagtccaacgtactcaggaggctgaggcaggagaattgtttgaacctgggaggcagaggttgcagtgagccagtatcacaccgctgcattccagcctgggtgacaaagcagaccctatcttaaaaaaaaaaaaagttaatatgcttaatacacatgatcaagtggaacttattaagatggatcagcatatgcaaatcaataaatgtgataccagcaaaaaaaactgtcaacagaataaacagacaatctacggaatgggagaaaatttttgcaatctatgcatccaacaaaggtctaatattcagcatctataaggagcttaaacaaatttacaagaaaaaaaacaaacattcccattaaaaagtgggcaaagga

SEQ ID NO: 31497 - DNA, 1023 bp, Homo sapiens
aaatgccatctcctctaaaagtacaaaaattagccgggcatggtggcgcatgcctgtgatcccagctactcaggaggctgaggcagaagaatcacttgaactctgatggtataggttgcagtgagccgaaatcatgccactgcactccagcctggaaaacagagtgagactccatcttaaaaaaaaaaaagaagccgattagtttgatttgcatctacaacaaccccaaaagggaggtttagtatatcctgtatacaagtgaggcaactagaattcagaatatttacataactgtcaaagacttcacagcagataagtggctaggaatcaaacaaggtatttctgatttgaaaacctgcactctttgcaattacagcacatcataagcattatgtaataaacatgggacaacaactatttataatataccaggcttcattacgatctgatttattacagtcctagggcaaccttgcactaatgggaggttagtcatgaaatttgctctgtgtgctgtttttggccaactcactaccacattgggcatcatcagaaggcgtctaccaatgaaatgtataaataaataaatatatatgtatataaaaaggtggactagagttggacatagatcaaacaagggcaactgagatgattcaaggagcgtgtgtcctgccttagaattgcagactggaggccaggcctggtggctcatgcctgtcatcccagcactttgggaggccaaagcaggcagatcacttgaggtcaggagttcaagagcagcctggccaatatggtgaaaccccgtctctaccaaaaatacaaaaattagccaggcgtggtggtgtgtgcctgtagtcccagctacttgggagtctgaggcagaagaattgtttgaacccaggaggcggaggtcacagtgaactgaggtcacaccactgcactccagcctgggctacagagcgagaccctgtctctaattaattaatttaaaataagcttaatatctctgattatcagggaagt

SEQ ID NO: 31498 - DNA, 1071 bp, Homo sapiens
aaagctatcatcggaagcaaagtgttaggtaaaagggcccttggtttttcctggcttcttcaagtagagttgtcttttcttgtccttactttatgagatgtcctaactgtagattataccatgattcaagaacagctagacatgcatacacatgaatttgcaatcagttatttagaacacagaaaaaaaaatcagaaaatgaagggaaaaacatttgcacatagccagaatgtacgtcacaaaacccatgtacaaaacctcacagtttactcatatgaagagtcatcaagcctttgtacaaaatcttattactgttattttgcacacagttctaacatgtttgggcacatggtttccaagcccatgacaaatactgacttctcaggtagatttgctggacataccacctactcagggaaatttattgagagctatgaaattgacatttaattaaacaactaataccagacattgaaacaacagaaaattcaaattaagcaaacaagtacaataataaaacaatcattagcatttcagaaggattcttcattttgcaagtagatttatcagtgatacttcaaatagtaatttctattagtgatttttaaatgttattttaaaaatgtgatttatatgcaactttttaggagcacttaatgaaaccatgtgcacttgtaatgaattcaaattatgattcctaaagggaggcagttatgtctttttttttttttttttttttgagacagaatctcattctgttgcccaggctggaatgcggtggcatgatctcagctcactgcagcttccacctcccaggttcaagtgattctcctgcctcagcctcccgagtagctgggactacaggtgtgtacaacacgcccaactaatttttgtatttttagtagatatggggtttcaccacgttggccaggctggtctcgaactctggacctcaggtcatcctcccacctcggcctcccaaagtgctgggactacaggtgtgagccaccatgcccagcctaaatatgtctttaaattctacctttgtaatattaacctttgtattgaggg

SEQ ID NO: 31499 - DNA, 1037 bp, Homo sapiens
ggcccactgcaacctccgcctcccaggttcaagtgattcccctgcctcagcttcccaagtagctgggactacaggtgcccaccaccacacccggctaatttttgtatttttagtagagacagggtttcgccatgttggccaggctggtctcaagctcctgacctcaagtgatccacctgccttggcctcccaaagtgctggaattacaggcgtgagccaccgtgcccggcctgggtctccatttttaaggaccttatatgataatatggtagggggtataagacaatcacataataatgctaatgtcaatgaaaatataaaaaataaaaaaacaaagatagtaacaaaatcctatccaattttcagctcatcgagtctcagtaaatgtttgcgggagttagtatgagttagtatgttagcccaggtcttgaaggatggataggatatcaaaggagagcaataggaaggaaaaatattctaggcagagggaatagtatgggaaagttgtgtaaattcaagaaatagtgaatagagctcagggaaaaaaaatggctgaagacaggtagatcaaattatcgttctgttttgttttgtttagttttttaatagagacagggtcttgctatattgctcaggctgatctcgaactcctgggcttaattaagtgatcctctcaccttggctttccaaaatgttgggattacaggcgtgaaccaccatccccggccaaggattttcaaatgacaggaatttatactaaattcattagaacagtatttcccaaagcacaggatagataccaatttaggaaatgattttaggggattcaacattcacagcattatgtaacatttgaatgatgattatgtactaagaaaggtgtatccttttcagttatttatttgaggtgctcacatcctgtttatttcacacagaaaatcttgatttaatgctagtatatcttcaatacttgtctaatatatgctaatctcccattttttaacaggcccaactagaacttagtattattgtgtttt

SEQ ID NO: 31500 - DNA, 1033 bp, Homo sapiens
cggccttcttgctctttttaaaaacattttttactaattcttttttgactgtcagtttttaagttagaaaagttctccccctgcctattcccagtgttttttttctttctctaagcatcttgttcttataaggatgcaaaatctttccttatctctctaaagctgtttattattttaaaatatgttttgagtgctcccttctggtttatgccgtctccctccatgtttgtttattttggtctgatctttgaagttagagtctttattcaagtacttggtactccttggctatccacttatatttaggaatgagaaactaaaaactagcgccctctggaattgaataaatggctgattgtagggctaggaaagaaagtataaagtgagtctgaacatcttgtgccagaaagtaaaggagtgttcaaaaactgggcatgccaccctgacagaggaggagatttcaaaggggctttcactggccagatgggataatttaaacatcaaaatgaataaagacagggactcagatgctaataaataaatatatagtgtcgaggagggaaagatctttatagtagaatgccaactagtaagtgtggaaggaatgataaaattagaaaatcaccattttgtaactgtcatggtaataactgatatgggcaggaatcatcaattgagccaaaactagtaaatacaagtttgcagcctggccaacatggcgagaaatcccgtttctactaaaaatagaaaaattagctaggtgtggtggcacacacctgtagtccctgctacttgggaggctgaggcagtagaattgcttgaacccggaagcagagggtgcagtgagctaagattacaccactgcactccagcctgggtgacagagtgagactctgtcttaaaaaaaaaaaaaaaaaaaaaaaaagtttgatgaggcactggtatttacataaactcaaaatatctccttacacgttactttttttttttttttttttgggatggagtcttgctctgtcacccaggctggagt

SEQ ID NO: 31501 - DNA, 1041 bp, Homo sapiens
tcttggctcactgcaacctccctctcaggttcaagcgattcttctgcctcagcctccccagtagctgggactacaggcatgtaccaccatgcctggctaatttttgtatttttagtagagacagggtttcaccatattggccaggctggtcttgaactcctgacctcaggtgatccacctgccttggccttccaaagtgctgggattacaggcatgtgccaccacgcccggtgacatcactagtttatagtaagggacatccaactatttataatgatacatcaggagtgcctcaataatgtgaacttctttttttgtttgagacggagtttcgttcttgttgcccaggctggagtgcaatggcgcaatctcagctcactgcaacctccgcctcccgggttcaagcaagtcttccgcttcagcctcccaagtaaccgtgattacaggaatgcgccaccacccctggctaattttgtatttttagtagagacggggtttctccatgttggtcaggctggtttcgaactcctggcctcaggtgatatgcccaccttggcctcccaaagtgctgggattacaggcgtgagccaccgcgcctggccaagaatgtgaacttccgtatacactagaaggactagttgtactacgggtaattttggagttgctttttgtgttgctgctttgcaaattgcccatgtagtgattctcagttaaagcagaatcatttattaagcaaaacatctcattgtttcatgttgccaaatagcaaagcagttggctgttctctgaacctaataagatgagattttaaagggagaagttgctgtttgaacagaattggcaatgtacaacgcctggtagagcagaaagaaacttgtagattttgttgttttttatttaaataaatacgtttttctcataaaaaaacagaatatgttcattttagaatgttttgaaaattcatataagtagaaaagttgcctattgtgccaccacgtggatatttgcaggactgtgaagttgtactatactgtataattc

SEQ ID NO: 31502 - DNA, 1880 bp, Homo sapiens
ggcttttgcctataaataatctcagcactttgggatgctgaggcgggcggatcacctgcagttaggaggtcaagaccagcctggccaacatggtgaaaccctgtctctactaaaaatataaaaaataagccgggtgtgctggcacatacctgtagtcccagctacgctggagactgagggacaagaatcgctcgaacccaggaggcagaggttgcagtgagcagatcgcgccactgcactccagcctgggtgacacagcaagactccatctcaaaaaaaaaaaaaaagtgcttatggtacatatcatgtaattatgaactgttaaaaatggttttataagtatgttccatgatgtaaaaatgtcaacacttagaaaaagcacatggacatcctgctttattacatgattacacctgaaggttgtgctgccatgcacattaatatgtaatgcgggcgttgtttatggggttctttgcagcaccagatgcctctcttccggaagaagatggtgtgggaaatccttcatcagcagttgctgtgagaaaactttgcctggtccctctagctgctggtggttctttcacagacatttccatatacctcatgcattgtgggttaaaaagtccctgcatcacttctgttctcacaggtactgagctgtcaaaagtgcatgaaggcctctcactgtactctagtcctgacttggggtgcagagggctgcttgcaatcctgtttgtaaggctgtgcctgctcagagctttggactgttcaacccacacaagaacaaacgctaactaatattttttttaagagattcttttccctatgaatgtgggaaatgcaggatttattctgtgaattgtttgtttctgtgtgtttgttcagcgtattcattcactcactcgtttgcaaacataatgggcagtggtcatttactgctgctcttttacagttagctctaaattacttgtttgaactatttatttctgaaaggaatgttactcaagctgccactccctgctgaagagcaggagggaactctcactgggggcggaaggaagtggagctggagcagtaactgccaacatgaagctggagggtttgggattttttttgtttttgtttttttgaggctcaaaaaatgctgggagaaatgaaaatgctgtgggatagggctcctgttgcctttcagaggaagtctgacactacagcgttggcacagtgccgtgaacagtggaactgtgcccaagggactctgattatccaagcatcttccgaagagtgttgtggtcaccttaaagagacttccccttctggaaatgtggtgacttggcttagtcttcaaactggattcatggatttgaagtaactgtaaaccctaaatcttcattttcatcccagatctggttgagtataaacctcagaattgtaggggctggcctgagctgtttatttcaaaagatactattcaatttaaagctatttttcctcagagtttttgttttctatatattaagtctaaattaagttttctactcattaagactaacatctccccactccatccccactgaaatttgtggaagaaaatttagtacttggctctgaggttgccagttatacaataatctattttgcatatgaaagtttgtatttaacttttttgttcattaaaaaccttactgatatggttataacttcagacagtttagagttggtcagaacatattttgcaagatctagtgcctagtgttgcttttctgatgtaataaaaggtggtctggcagaacctaaaaaagtatatgctgaaatgatttctaaccctctccctacttaaacctcccagacttgttctggttcataaaagcaagaggtaaaac

SEQ ID NO: 31503 - DNA, 1027 bp, Homo sapiens
cactttgaaattttttttttcagagaaataattgctctttgctgcagttgtcagctgtcctgctggaattttggaaacagcagggctgcagaaggagggcttgaactgtaagtgtgatggagggcatgcttccactacacccctggtttgcagcatctacagtgccttatcttagaatgcagagttatttttcacatgatagagaaggggttggggacctttgaagacaataggggacagcctccaagtgcaaagtcagaaattcagaggccttgctcctgccaggcaaaacttattttctacctgttttctctcgagttcccctacttatccctcccccagagagctgaaacagagaccatcttgattgatctagacttggtttacacctgataagccaagattttatgaatgtttaacagaggtcagaaatttggagaaaatcttatagtaggcatattaccttttaaagcatgaattaactaatgttttcctcaagagtttcaaaggcagtacagatcctcattgtttcccagcgattcttttgggcaagacagtgataaggtggctgggacaagctttcttaatccttcttttcaggtaagaaaactgaagctcaggaaagtataattttttcttaatcacatggagggcctgaaacacacctggaaaaaacattttagtctaacaacaaagagttcataagtgttaagtctttttcttttctttttttttttttttttttaaaaaaagtcttactgtcacccaggctggagtgtggtggggtgatcatggctcactgcaatctcaaacttccagactcaagcagtcctcccacctcagtctcccgagtagctgggactacagatgcatgccaccatgcccagctaaaattttttttaagagatgggatctcactgtgttgcccaggctggtctcaaactcttgagctcaagcgatccttttgaacctacaaagctatagcggaatgtttttttgctcaactgataatgtagtcagtataacc

SEQ ID NO: 31504 - DNA, 1030 bp, Homo sapiens
atacagaataaataaacatcatcctgatctcaaggaatttatggtcagtggaggaggcagatatataaacagaccatagcatggcattagaggtgccacagtagactttgtgagcatacaagatagagcatcccattcagcccagtgttggggaagggaacatcaggaaagaattgattttggttttgaaggataattagggatttactagaatacaagacgtaagagaggaaatacatcctaggcagaaagaatagcatatgcaaaggcacagacacacaaagtatctgttccacatttgaaatccaatccaaatgttaactcagaaatgtttgagaacaagacagaagaaataatgcaaaacaaaaaagattctcagaatcaaagacatggatctccagatcaaagagtttgcagaaggcccagcaaaatgaatgatagaagatctaaaaatcacatcatcatgaaattctgaactcaaattataaaagcatctggacaaaataggtcgcatacaaaggagttggaacaggaatgagaatgtattttcctaaaacaggaaactagggagtcaatagagcaatgcctttaaaactgagtggaaattatcttcaatctagaattctaaacctagtgagaccatcagtttaaaaagatatgcaagaattcagacatgcccgttttggggaagctactgggagataagtgccagcaaaaccatggaagaagattacatgggatttgggaaataaggaatccaacatggtagactctgaatttaaaaatccagaatgcctgcaatgcagccatcccacgagcaaccagcacagattggaacaagaggatagatggctcagaatgaggtcttcaaggaacaacaacaaaatggaactcatttctgtgagtgcataatgattatttctgataggatagcagacatgttggagcatttggaaaaaattaatcacaagtatatggaaagccagacaagtgggaaaacaaggaaatcattaactgaaggaaaaatacg

SEQ ID NO: 31505 - DNA, 1047 bp, Homo sapiens
gttaagacagtgtgtcagtatgtatcaggtttcttcattgtaaaattactaagtatctcttggggagatactttgaaactatgtagatgctctgttacccatcaaaatttcaaccacgagttttagtatctagtgttgagtcttgcttggattattattagggttgacaagcggtgattctgatttaatcatttcttttatatttattagttgactttctactgtaagagctttcccttcatcccatgtattgtatcactgtggacaaatggattcttttttttttttcctttgtttgttttatgatggagtcttgctcagtctggctctgtcactctgaaccacgttggccaggctggtctcaaactcctgacctcaggtgatccgcccaccttggcctcccaaagtgctgcgtgagccaccactcctggcctggattcctattgtatttaaagtgacatcaatgtttactattagtaagtattttgatgctcaaattgtctcagatttggccagcaacagccccttcaagctggcacgtgtgaacttctgttactattttaggtttgtactttatctgccttgcctataatcaaccacttatccaaggagtctaggtactttttagtatttataaaccaagatctgcatgctacatatgctcactgctacaggaatatcattgattctacaccctcttagttgaaggaggtaggtaatagattatatacataaacacacacatagacctacacctgtctattctggctagtgctgtattaaaaatcacaagtttgggctgggcacagtagcccacgcctgtaatcccagcactttgggaggccgaggcaggtggatcacaaggtcaagggttcaagaccagcctggccaagataatgaaatcccgtctttactaaaaatacaaaaaaaaaaaaaattagctgggcatagtggcaggcacctataatcccagctacttgggaggctcaggcagagaatcgcttgaacccgagagacagaggttgcagtgagctgagatcatgccac

SEQ ID NO: 31506 - DNA, 1319 bp, Homo sapiens
gaactggaccacactgtaaaagggaagatgaggtagactgtagaaagattagaagcttatgggtgcatgtctaggatgactggttgagaagagggccccactgggggtcctaaatagtaagagaaaggagagcaatgaaggaggtaaaaactgaaaagaggatacagaagaaggaatggaagactgagctgaagagttttctttcccttttgattgcctcttctcattcctcatttcatagagctttgtgggacatgtatgtggtatgtgggcctaaaagacaagggatcatcctggacacacatgtgcatgtgtggggttacctacatgcaattacgttggagattggtagttatttaattcacatccatgtttgtcataaggccttttatgagctttttcttgaaatatgctctttaaacgctaggaaagtaacatttttttgttaatggagtcatttgttcattctttcttcaggtatcaaacagctactgaaacaagggtcagtgcagaaggtatacaatggactgcaaggatattgagagtgaataaaattggactttgtttaaaataagtgaataagcgatatttattatctgcaaggtttttttgtgtgtgtttttgtttttattttcaatatgcaagttaggcttaatttttttatctaatgatcatcatgaaatgaataagagggcttaagaatttgtccatttgcattcggaaaagaatgaccagcaaaaggtttactaatacctctccctttggggatttaatgtctggtgctgccgcctgagtttcaagaattaaagctgcaagaggactccaggagcaaaagaaacacaatatagagggttggagttgttagcaatttcattcaaaatgccaactggagaagtctgtttttaaatacattttgttgttatttttttcatgactcctgtttcttctgtgagctatttgggttgtcctcccatcaagcaagatggatgcacacgcatgcaaaagagtgatatagatccagtccccatgcccaattacacatacggcatctgctagaaaggagcttggaagaaactgaatggttgattggggtccatgaatgaaggttacacaaagatctaattgtccttgaagtatattttctctcatttaatttgggaataataatctgatatggacactttactgtttagaaagcacctttcatgtatataatttcagttgacctcatggttagaaagcctttggtttgtttaggaacaaggactaccactggttctagaaaaggaatttagagttgcaaattatgtttgctcatc

SEQ ID NO: 31507 - DNA, 1286 bp, Homo sapiens
aggaccggtgccggtgaaccgttggcatcgccctcgccaggccgctccgcccgcgtcaatcacccggcttgcgcattgttgggggcggagttcggcgctccgagctctcgcgagacgctccgcagttgaaacgggatcgccatgcgctcgggcctggggggctgcctttccgggcatccgcaggccccaacctttagggaaggcgcacagtgtggatattcgccctgaggctgctgctttagcttgtgcaggggaggctaacgtgctgagacgggttgcaaagggctatgcgcttaaggtgcagttgaggtggcctggaaggggtgtctgactgcagtattcttgtcagcagagaacatggcggcccagagggaatggaccccgatggtgtcatcgaggtaagaaacggttgtggatcttgaagctttggaaaggtgagtgtgttcatctcatttatgcgtgcattattttttctaacttacagagcaactggaatgagattgttgataactttgatgatatgaatttaaaggagtctctccttcgtggcatctatgcttacggttttgagaagccttccgctattcagcagagagctattattccctgtattaaaggtaaaagaaactggcatttttaggaaattgttctacatagacatgaaccataaaagggaaagtaacctctgggggactagcacctgtttgtattccttaaagtgaaatgatggcaatcatctttcgggactgacctgaaatgaagagaatactcattgctgatcacttgattatttgggcataatgttccaaatggaatacatggtgtgaagtagaagtgacaatttgatgtgggatcggtaaatgtgtatcctactttttttagggtatgatgtgattgctcaagctcagtcaggtactggcaagacagccacatttgctatttccatcctgcaacagttggagattgagttcaaggagacccaagcactagtattggcccccaccagagaactggctcaacaggtattgatagtgtagttcaaaaaaactgcttgcgtgttgcataggtttcaggtttcacaactgtgaagaatttaaaacttagtataaattggtcctaccagatccctccttttaattgtccatgcatgcagggagtttttgttgaaagttttaaaagaactgggtatgcaggtatggtttgtagggttgtatactaatagattgagaatccgaagcgctctcttggatgtactagatctgtccccattttttaagtttgaatgc

SEQ ID NO: 31508 - DNA, 4090 bp, Homo sapiens
atcaaaatgtttgttttggatgaagcagatgaaatgttgagccgtggttttaaggatcaaatctatgagattttccaaaaactaaacacaagtattcaggtaagcattacttcacccccctcttaaaggtagagatggggtttatttaatgcaggtactgttacaatacaactgatgtgttttgttgtcgttccccctgcttaaagcacttgatgcataactctgtctaccttcattccgtagtaagacagagacgcttggcttcagacattttcctttgggtattaatgtgtaagttgtgctacaacataattttctctttttaaggttgtgttgctttctgccacaatgccaactgatgtgttggaagtgaccaaaaaattcatgagagatccaattcgaattctggtgaaaaaggaagaattgacccttgaaggaatcaaacagttttatattaatgttgagagagaggtaactgtctgattgttagacattattttaccttcttgtataagcactgtgctaaaattgcagacactaggaccatgtcttggtttttgcaataatgctagcagagtacacacaagaagaaaagtaacagcactagattgtaaagactggggtggacctctttcttaatgtccaatgtcctttgtcttaagatttggtgcaatatctcattagacctaacagaatgaagttaatttttataatttctacgttttgagactgggttatgagactggctaagactggccaattttggtattttgggtagagacagtttcactttcttgaaaccctggtctggttggaactctgggctctaagtgctaggatcccaaagggctgggattacaggcattagcactgtggctggcccagaatgaatttttaactgaagagttggaaaaactaaatgactgttaactttaacttctaaacattacaggaatggaagttggatacactttgtgacttgtacgagacactgaccattacacaggctgttatttttctcaatacgaggcgcaaggtggactggctgactgagaagatgcatgccagagacttcacagtttctgctctggtaagaggtgttctaaaatgtctggatttccactaaagcaggattcagactacaatatagctgctaagtgctgtgttgtcgttccccctgcttaaaataaagttgtttcttaactatacctgtctgctattctcctgtagcagccagggacgcttggtctcatacatgttgattaaaattaaataccgacctgactggtgattcttgaattaaggtttattaatttgcagcatggtgacatggaccagaaggagagagatgttatcatgagggaattccggtcagggtcaagtcgtgttctgatcactactgacttgttggtaagtctcttaatgctttttaaaaatctaccaaaagttagctttttggggggcaggtttttaagtaacctttgccaacttgggctatttggaagagtaaaagaccacactccacagtgggctataccacttagtatagttcgctactattttgtggcctacatgacaggtgtcaagtttttttgaatcaatttttaaaacatgccattgtgtttcaggctcgcgggattgatgtgcaacaagtgtctttggttataaattatgatctacctaccaatcgtgaaaactatattcacaggtgagaagccagcatcttggctgtattgaaaaaaattcatacgtttttctactgtgatttgtatgaaaggtaacatcaaatcaaggaatagattcagtaaagtcagtagtgttcagtaagatgatgtaattaaatttgtactagggaaggttgatgagaacaaagtgggaaaacttgtaaacattgcccagattgtggacatagggtttttttccacaattgttggtcttaccttatgcttgagcttttagtgatgttcttgtgtccatgtgtttttcttggtgattttttctatagttgggattttcttggtgtcgcctggtagcaatttgagtgaaccctggtttagttatagtggctttatccctaaataaattgaattgtactttgttatatgatgtaaaaaaagactttttaaaaaatacaggagtcgatagcagcagttggtgacgagatggcactcagaaacggcgttgacgtaatttaggacgtggaatcataagcgaaacagcacactgtttgaataaagagcgagtcggtatttatatttgtttttcttttgtcatgattatttgatttttaagttgctccagctaaggcatttttttgtattagtatttctattagggaacctttcttattaggtggtttgtattgtctggtttctaacatgcaggtagctgtttggcagttaaacacgtttagagtaatttgagttacaacgtgtgaaactgagcaaaaaagcagtgataagtttgggttaccataccaaatatttgttttcccactggaaaaaagtaagttttagaaaatagttaacctttgcagcatttgtttacagtttacagttccagaagtgcgtcgaaatggattacataactgctcttttattcctggtgttcacatctgtcccaggctgacacctgctcttggctggcccactttggtatgggctttaatttcactaccccaaacacgatactgtcatctgctttataataatgctcaagatgcctgataaaaatctcattttgcagccagacaagccttgaatccttttggcactaactgcaaaggaagatttttttctctagatatgcattagcagctagtgctccagttagaagcacgaactataaccttgataagtaaacagcagctggtggttaacaagtggatcgtcatgttcagtagtttatacattatgtgagaagtaacgttctgattctttttcttacacagaattggcagagggggtcgatttgggaggaaaggtgtggctataaactttgttactgaagaagacaagaggattcttcgtgacattgagactttctacaatactacagtggaggagatgcccatgaatgtggctgaccttatttaattcctgggatgagagttttggatgcagtgctcgctgttgctgaataggcgatcacaacgtgcattgtgcttctttctttgggaatatttgaatcttgtctcaatgctcataacggatcagaaatacagattttgatagcaaagcgacgttagtcgtgagctcttgtgaggaaagtcattggctttatcctctttagagttagactgttggggtgggtataaaagatggggtctgtaaaatctttctttcttagaaatttatttcctagttctgtagaaatggttgtattagatgttctctatcatttaataatatacttgtggactaaaagatataagtgctgtataaaatcagccaattatgttaaactagcatatctgcctttattgtgtttgtcattagcctgagtagaaaggcctttaaaatttttttagaaagcatttgaatgcattttgtttggtattgtatttattcaataaagtatttaattagtgctaagtgtgaactggaccctgttgctaagccccagcaagcaatcctaggtagggtttaatccccagtaaaattgccatattgcacatgtcttaatgaagtttgaatgttaaataaattgtatattcactttaaaggtgcttttggtcattttatttttattacaacttcattatttacaaaaccccccatccagatatattcacgttaacaattctgagataactgctgcatcacagttgcacaaaggctgatgagttgcaaatgttcatcagcaccatctgctaggcatttgtcaacttcctacgagaaaaatttaagaaattagcatccttcaggtagttaaatgttccattgacatgtgcaaagtacctacttacggcaagtttttctgtgataatagacttctgtttatcagataagttattttctacaaccacatcatggagttgattgacgagctgagttgctgcatgaccctcatctattaaatcctataataa

SEQ ID NO: 31509 - DNA, 1050 bp, Homo sapiens
ttagatctttgctgttgtgaatagtgctgcagtgaacatatgcgcgcatgtgtctttatggtagaacaatttatattccttcgggtatttactcagtaatgggattgctgggtcaatggtagttctatttttagtttttcgagcaatccccacactgctttctacaatggttgaactaatttacactcccaccaacagtgtatcagcattgccttttctttgcaaccttgccagcatctgttactttttgactttctgataatatccattctgactggtgtgagaccagcttttaaagtggtagggaatgttagtgggagaatgaccccgtagggtaagctcatgtgctcagattagaagacctcacctgtcacaaagaggtgtaaagcaaggcctgccaaactatcaagggaggctttgagcagttgtgaagtttgtgtgactctaaggtgactagaactagtaaaaaaaaaaagaaaaaaacccagaaccttcacacataagtgagtaatatctcaagtcattctatttatgtattctgtatttaccgacaaacaggtggtgggagtggagggggtcttgtgcttagcctgggattacaaagagcatggagacccacccattctttgtccgagggaagtccagcctagctccaccacccttgcttaaaacacttttggctctcccttagaaattgccctcaggagctcagagaaaattgatctaatttgtctcagtattgacctctggggtccccttctcttcatgaataaagggaagagcaggtggtaaatgacagaatacaagagggaaggcttcagagaaaatctggccctccataaatatgaggacatggttgcattaaaaatatacaggaataattcattaatgaaattcacagtaattgttctggaccattagattcctgagaatttagacagggaattagttgctctgatgtagtatcagtgatttgttccataagaactgaattagaggcaaatgaattttttcttgcttgtctgcagaaaactatacgatggcagtctg

SEQ ID NO: 31510 - DNA, 1055 bp, Homo sapiens
agtctgtgactatggggcaagaagcagaaaggtgcaaactagaactaaaggggtgggacaagttatagacaatgtagtgaagtagttttcacctgctctgaaaaggtggaataagatggaagccatcaaaggaggcttaagccttgtttcccttggatcttggcaactctctccctgttctgtccttggcttcagctccctttgaccttgtattcttaaattatttccacaggaataaataccttacgtacactttagatgatcaggaaatctggcacctggaaaagaactgcatgtcccaggaggatggttgtaagttttttcattgcagtctttgtaaatctgcatccgtctgttggttgatggagttttccttagtacagtgccgagcttccagctttaattttaggaatgctgtaccctttacaacctctcgatggtcctctgtgctggaatcgagggcacccaccgtgtttaaggctgatccctttctttcctgcaagtgaagaagaatgttttgacttaagtcttaaccaagtctggtgaaggaaacgtggcaaaatttaccatcttctgggcttttgctgtgtgcctggccctgattaggcatgttgtgtgttctctcatccaatcatcacaggaagatctgctgtgtcggtatcattagctccattttgcaaataagaaaaccaagcttcagaaagggctagaaactcatctaaagtttcaggtgcccaccactacgcccagctaatttttgtatttttagtagagatgaggtttcgccgtgttggccaggctggtctcaaactgctcacctcaggtgatccaccgacctcggcctcccaaagtgctgggatcacaggtgtgagccactgtgccgggactgcagtgctcatttttagaacatagatccaaataatccccatagtctgttgcttccagagcttagttgaaggcagatatgcacatattaattacaatatagtgtgataaatattatgatttgggtgtgcacagatgatgggaagaagatccagtaagtttgggaaaga

SEQ ID NO: 31511 - DNA, 1042 bp, Homo sapiens
aaacgggacatgtgccttacccaagttcagtcagcgaagagtgtccattcactcattcagcattcaatcgactttttaaatgaacacctactgtgtgcttgcctctgtgctgggcactgtgaacacatgagccatggcgcttgacctcctgtagcatgtgagctaaagagagagagacaaatgctaattaaatagtaacacaatcaaatgtgaaaccgtgaattgtgggggttgctgtggaggaagctctgtggtgttgcgtgaatgaaccacagcctgggaagccagtggatagatacttcctcgggaaagtgatttcatcctggggtttgactctctagctttgggccactggagaggccagtgtggaagattcagtaggatcagtccactttatgctatatcctgactataggctgaccaggcgcctggccaccccagggccctcaccccgcctccaacagcctagaccgttccttgagattacccatatccaaccatccacaggtgctgccgatactgcaggaaccgactgagcttggatcccacaccttacagacccggagcatcttttctgttgtttatttttgggttagctcataactcactttatcactcagccgaacagtgagccaccatggaccatggtggttttgatcatcatacagatatttaaagacaactttattgaggtacagtttatattccatgaaatcaacccatgttaagtatacaattcagtgattttttttagtaaacttactgagctgtgcagttgtcaccacaatccagttatagaacatttccgtcattagtggggtcagctttagatgcaaaagacaggagaattatttttgtttttatgggattagttctgtgctcccagcaggaagatctcattaattaattaattaattcaattagtatttactgagagcctggttggggggggggcgcccacagcagggttgggtgcaaagggaaataaataaataaacaagtggtgggggctgcttcactgtggctgatgagcttccactgt

SEQ ID NO: 31512 - DNA, 1027 bp, Homo sapiens
gaacccgggaggcagaggttgcagtgaatcaagatcatgctactgcactccaacctgggcgacagagcgagactctgtctcaaaaaaaaaaaaaaaaaaaaaccttcccatgagaggttcctaccctatgccctgggggaagaaatgctgacgtcaaggaagcttctataaaaacccaagaggacagggttgggtgaactttctgatagcttaataggaggaggttcctgtagggcggcacaaccagggagggcgtggaagctctgcatcccttctcccataccttgctctacacatctcttcatctgtatcctctgcagcatccttgatgataaaccagtaaatgtaagtagggtgtttccctgagttctgtgagccgctccagcaaattaattgaacccacggagaggggaaccccaatggaagctggttggtcagaaagaagttctggaggcctggacttgtgactggtggaggggggatgtcttggacactaagccctcaatctgtaggatctgacactatttccaggtagatagtgttggaactgaattagaggacaccaagctggtgtcgctgcttggtgttggggtgggacccccacacatatggtcacataagtcatcttctgtgttgattgttgtggtgtgagagcagaggaaagatggctacagagagttttccctacacagggacttggggggtagagggttaggggagggctgaggggccttacaagtcttaagtgcgttttagggattctttagctaacagtagctgagagagtcaagttattgtctagtgacttgaagtcagtaggaaggaatgcctgagtaagataaggaggttgtgggggcctaggtccttggagcctcatagatagcagccctctgggtgaatagatagtgattgtctcttctcagacctttgggtgtctgactctcagttagaatctctcctagatctgggaaaggcctagcaagggaagagacattaatatcgattctctggagatgcacgtttcccc

SEQ ID NO: 31513 - DNA, 1029 bp, Homo sapiens
ttctccttgagaactgaaacaagacaaggatgcccactctcaccacttctattcaacatagtattggaagtgctgtccagagcaatcaaacaagaaaaagaaataaaaggcatccaaataggaaaagaagtcaaactgtctctctttgctgacaatatgattctatacctagaaaactataaagacactgccaaaaggcttctggaactaataaacaacttcagcaaagtttcaggatacaaaaccagtgtataaaaattcatggcatttccataaccagtaattttcaagctgagagtcaaatcaacaacacaatctcatttataatagtcgcaacaaaattttaaatacctaggaatacatctaatcaaataagtgaaatatctctccaaggagaactacaaaactttgctgaaagaagtcatggatgacacaaactaatggaaaaacatttcgtgttcatggattaaaagaatcaatatcattaaaacagccacactgcccaaagcaatctgtagattcaacactgttcctatcaaactaccaatgtcatttttcacagaactagaaaaaacctatcctaaaattcatgtgtaaccaaaaaagagtacaaataactaaagcaatcctaagcaaaaagaacaaactcagaggcattccagtacctgacttagaactgcactgtaaggctacagtaaccaaaacagcatggtactggtaccaaaacagacacatagactaatggagcagaatagtgaacccagaaataaagccacatacctataatcatctgatctttaacacagtcaacaaaaataagcaacgggggaaagaactccctattcaataaatgatgctggaataactggctagccatatgcagaagaatgaaactagatcccttccttataccatatacaaaaattaactcaagatcaattaaagatttaaatgtgagacctcaaactataagaatcctggaagaaaacctaggaaacaccattctggacatcaaccttgggaaaggat

SEQ ID NO: 31514 - DNA, 1089 bp, Homo sapiens
tggcatgatcagatttgcattttgtaaccatcactggctttcatctgagcagaggggctgcagtagatgaagacacatagttaggaaggtcttacaagtagtctgggttagatacgctgatagcttgcacaagagtaggggtgaaggtgaatgtgagaaaagaatgtatttaagggctgcttgcgatttgcagtcaacaggttttaatgtcgcattagatgtgagaagtaaagggagaggggccaaaggtgcagctcagtttctttcttgtgtaacttggcagctagaagttgaaattagaagtcagccccttatccatggtttcactctctgcagtttcatttatttgtggtcagctgcaggctggaaatactaaatgaaaaattccagaaataagcaattcagaagttttaaatgacacgttgttctgagtagtgggatgaaatcttacacatcttactttgtcccttcctcatcacaggaagaaggatgggtacagtacaataaaatattgaataaataagcaaattcaataaagtagcaggatccgaagtcaacacccaaaaaatattcattttttctattatgtgcaataacaatgaatgatctagaaaggaaatttaaaaaacaattccatttacaatagaatagcataaaaaagcataaaatacttaggaatgaatttaaccaaggagttgaaagacttatacaatgaaaactacaaaatagttctgaaagaaattaaaggagacacaaaaacctggaagacatcccatgttcacagattgaaaaaagtattgttaagatgtcaataataccgaatatgatatgcagatttaatgcaatcgttgtgaaaatccaaaagatatttctttttttgcagaaatagaaaaagctatcctaaaatttatatgaaacctcaagggaccccgattaaccaaacaatcctgaaaaataagaataaagctggagttctctcacttcttgatttcaaaaaatacatatgttacaataatcgagagagtgaggtacaaagacaaacatataaaccattggaatagaataaaagtccagaaataaagtcttgta

SEQ ID NO: 31515 - DNA, 1034 bp, Homo sapiens
aaggtaagatgatgactctcatacagatattaaaaatgaattcatcatgaagattttattttactcgtatgatggaaccaggcagatattacaactggttcaaaggaaaagtcaaagcaacacaaatttggagtaaaggagttgaactagtttttctgtgagataaggcagggggaggggagaaatcaattgaaactctcctgggcagcatcctgcccagtaggcacatgtattagttgcctacaattcacaaagggttgcgaaatagctcccgtggaatcagaatctgacagggaggaagagtgtgctcagaaaatgcatggctttctactgaagcagatttttttcccattacacttctagatctctgtgcaccattgtgccagggctgcgaggaaggtggcccacttcccgggatacactacccaccctcaagagagcctttcctgctgcttcttaggcaagtcagctctcttttctcacctcctgtaagcaacactaagtatctggctgttcctttcgtactcgagtcctggccgctccatgacagcacttgtggtggtactgaactgtgatggacactttctatcattgccctttcttaccttgatatcctaaaaagctggtggtctgtcttctctatcttttgtcctggtcagttatcctaactattttgtgtctgtttctgtggattagtaaacggggtccccacccccactccacaaggagaacatctggcacccagaagtcactgagagaatagctgttgctttggtagaattctgcctctgagtggcttgttcttttcccagacggagaggtctcctgacagcagctctcttctttttctttttttttttttttgagacagagttttgctcttgcgctcaggctggagtgcagtggtgcactctcggctccctgctctgcctcctgggttcaagtgattcccctgcctcggtctcccaagtagctgagattacaggcatgcaccaccatgcccagctaattttttgtatttttagtagagacag

SEQ ID NO: 31516 - DNA, 1024 bp, Homo sapiens
cgtcaggctaggaggcgcccccagatctcaccagcccttttacgcaccattagcctcgcaaaatcaatcacagaagacaggggaggtgacaagatctaaagtggcttacttaaaaaaaaaaaaatactgcacacgcacaggcacacacaattccacatgccccacgatttatacaatcttttattttcactcagtgctatgagcatacacattccacaatttcactcccacacatgcacactcaattacacacaaacagaggctcaaacactcagctcttaaagagcaaatacactatcacccttaaatgcacacaaatgtacccagacaactccatctgtcatcatactctaacattttaggaaggcccaacaagcaacagggcatgtgtatggtaggtggagatcagaatcattcctctaataacagatttgagaatgaaatatggacagtagaaggactgagccctctttatttcctccattatctcataaaaagccttgaagatgtaacggggctctaaaagaacttcacttttctctacaatgggggagaaggtacctctggctcaccctccctccctctttctcagcaactgagacttctgatctacctgcctttctattgtgaccatatatatgtatgagtgtgtgtatatgtacgggagggaaagagagagagagagattgaaatggacttcattttggtgctgagaaatttagagctggaaggcaatctaagaaattattcaataaacctcagaatttgaatcagtaaggcagagtaatggtcagtaaattgttctccttcacatactgcacactttgagcaaaaccagacctccacattccaaagccagtgttccttctactgagctctgagttttctaacagattcctggccggtaagcatagttttatgtcaggaagccccagtttagacatataaggtctaggaactcccagaacatatgtgaccactattgtatatctatatgtggaaaggatcaaaagattcttggtta

SEQ ID NO: 31517 - DNA, 1960 bp, Homo sapiens
aactggatcatcacccttattcactggaattgtttctcggtgactttgggaaaaaccagattcattcttaaaactcaaagaggaattcccattgagaatatgctacaagatctacaactgcttctacacgtggtatataaggaagggtttgaggaatggcaggttgttagaatgaatggactgctgggaagaaatacatagtgatgggaagcatggtaattgatgtattgaagatgctgcatcattgttggtcaccctgcaccatggtattactataaaacttcatcaggctagcaacatttactctatggttatggatgaaatctgcatcacataattacacaaaaataggatccttgtctttgaaaagcttaacaattcatagatgaacactgatcatactaaaagaatatgtacctgttgccctatggaaaagacctaagcttaatgactcacagtctaattattttggttagtgggtgataatgtattggaggtgatgatgagacacatacatccaaaatctcacagcttggagaggatgtggtccaacagtgctattttatttatttatttatttgagacagggtcccactctgtcacccaggctggaatgcactggcatgactgaggctcactgaagcctcaaccacctcaggctcagtttgtcttcccacctcagcttcctgagtagctgagactacaagcatgtgccatcatgcccagctaagttttgtattttttaatagtgacagggtttcaccatgtttcccaggctggtctcaaactcctgagctcaagtgagcctcctaccttggcctcccaaagcactggcattacaggcatgagccaccgcactaggcccataaggaagagtttctgagatgtgcgagagtgataggcaggccagggccctctctcaggatataattggggccacgctgtggtttctgatatttgaggaatttggaattctgatttatttttgcctaagacacctcattctctggaatacaaattccacatctataaaatgatagggttgtatctgatggcctgggctttgtaaacccttctgttctgagttccataactctgtgattctgggttctgtcccaagtccaagatgatttgaaaagaataaaaaaaaaagaccttgctgaatcagtaccagcgtcacctgcttcagtctggctgggaagtaggtcagaacttggcagacacgagaatgtggttggctccaactgtgagctctgccagggtcctttgtagacacctgccttagaaagggtctgtgaaagaggggggtgctgacactcggaggtggggaagggtttatttttggctgtagatgctgcaagcgaagaggggtgattgatgagaggaggtattgggggacagggaatgaaagactgaaagaaggagaggagcaggcacgtattgggtgcataacttgtgtggagaaatggccaatattttttttactcctcccacacacactgtaacgtaggtggtaggtgtcattctgtggattttttttttttttttttgagatgaagtttcgctctgtcacccaggctggagtgcagtggcatgatcttgactcactgtaacctctgcctcctgggttcaagcaattctccctgcctcagcatcccgagtagctgggattataggcatgggccaccatgcctggctaagttttgtatttttttagtagagacggggtttcaccgtgttggtcaggctggtcttgaactcctgacctcatgtgatccgcccgcctcggcctcccaaagtgctgggattacaggcctgagccaccgtgcctggcccattctttggattttaattatgaggagattgaggcttggagatgtttaggtacctgtccagctaggctgctggtaagtgagggagaaggagtcaatgtggggtctgactccatgtcgcctcttcc

SEQ ID NO: 31518 - DNA, 1011 bp, Homo sapiens
gcagtttgtgtgtaacataatgaatggatctaattttacttttttccaaatggttatctgctgtctcaacaccatttagtatgaaaatatcttctcatacttcccgtgtgatttgagattggtggttactttttaacctacaccatgactaggtgtgaaggagaatgatggtaaacagtggaacagggtagttagaggaaaatgaggtcccaggtagataatgactgaaacccaataagaacatacatatttttgacttcaacacagagctctttaccttttacaagtcatcctctctggtccatttttgtcaaaaattaacgtatttaatagagaaggtgtttaaaacaaaaggagggtttagagattatctgtgctttccctcccctcagtaaaacctgtaatgccccttcttccccaaataaattatgagaatggggctgcataaattttctgtgagcatgtgtgactatgtttcctctggttcctcgccgcatggtaattactctgtgctctctcctgcaaactgcccatgtttcactgcttgtaggtcaaagctgtattgagtaagaagtgaatttgggaagttttgcaagtaaagtgctacctgagtcagtgactgtgtcttaattcacctttttgcttccaggttcttgctcagggccatctgtgcacatggttttcactcaataagtgcctcatgaattttaatgactacacattaaactaaaacaaggtctgcccacctattcttaagaaattaaactctacaaatgatgtattccaaaactgcaaaagagagtgaaagccaaaacagatgaagctgtccttatatgggcaggaaaaactcagtaagattttatcagttcagtaggtgttgcatatggtgatttggaactgtctgccagttccaagatggccttactttattgtatggtcagtacagtttgtatctagtcctcatcaggttaggcctggaactccccaacccctgttaaaaacagcaaatca

SEQ ID NO: 31519 - DNA, 1035 bp, Homo sapiens
ggtggtggttgtttacatgtctttaaatgaccttcttttttttttaatataaaggcaatatattctcatagaaaattcagaaactgtaaacagggttaaagaagaaaataaaaatcaacactatcactttcacctatttattattcttattttatttatttatttatttatttttaaggcagagtctctttctgtcacccaggcagtggcacgatctcggctgactgcaacccctgcctcccaggttcaagcgattctcctgccttagcctcccaagtagctaggattacaggcatgcaccaccaccaagtccggctaatttttgtatttttggtagagacagggtttcaccatgttggccagactggtcttgaactcttgacctcaagtgatccgcctgccttggcctcacaaagtgctgggattagaggcgtgagccactgtgcctggccacttccacctattattaatgaaacctgtcctatttaacaaaaacgataatgtggggtgtcttgtgcttggagcttggagaaaggaatttgcctctgtttttttaatgacttatggcaaggccagtatgaccagtaagtgggctgtttattattattattattattaatcaccattgtcactgatagaaattgtcactattgtcactgatagaaaccaagatagaaattgtcactattgctatagccccaagaaggacctcatggctgcataacgattgagcaccttatatttacacaatgcttggttgttgttttttaaggcaactgtgactcaacaacagctgtttgagaacagctccatcccagatgaaatcagaggaaccgaagtttaaaaagaaagtgtttctgggctgggcgcggtggttcacgcctgtaatcccagcactttgggaggctgaggcgggcagatggtttgaggtcaggagtttgagagcagcctgaccaacttggtgaaaccctgtctctactaaaaatacaaaaaaattagcagggcgtggtggtgcatgcctgtagtcccagctac

SEQ ID NO: 31520 - DNA, 1024 bp, Homo sapiens
tcggctctctcccaggctggtgggaagaggacacatctagaagccagggtatataccccgaaggggtttgaggcagtgcagagttgatgatgatggtctccagcctgcctttcctttacaaaaatgaggagactgcatctcacattgccaacgagctgcttgactctaccgatattccctaccaagcacgattatgggtagtcttaaaattcttaataataaaatagatattgaaaatagtgtttttttttttaacagtgaaagtaatatgtactcatgtataggttttcaatatacaggaaactataaaatgaaaaggattgtacctgtaatcccaccccttacagctaactactgtgacattttatttgtagaagtccattttgctatcagacctcaagttttaaaatcttaactcaccctctgtaacctagttctcagctctattttatgtaacgtttttaaaggattcaagatttaaaataaacttatctcaccccaaatgcacttgtatatttttgacaccccctcatctctctctctctcttgtctctctctcttctctgtctctcactctatctcagttctctttctcctcttctttctctctctcctctctcctctctctgtctttctctctctgtctcacacacacacacggggaaaaaaaatcactcgagttaagaatcagtctctcattttacagataggaaaactgaaatctagaacttgtctgaaatcatgttaaaaaaaaaaaagtggtaatctgtgctcgaacccaggtctcctgaattttcgttcagtgctttttccattctacagtgatgcctccttactaggtcatagaaacagtggcagagggagaaaaggaaaaatacgtcagctccaaagagtgcagtttttttttttctgtgtcctttagctgagctatttttgtgactattcagtacatgtacaatgctgcctcttggagtgttccggctagactaagaggccattcactgctgactgcagccatgccatc

SEQ ID NO: 31521 - DNA, 1032 bp, Homo sapiens
ctttgttgagatggggtctcactatgttgcctaggctggctttgaattcctaagctcaagtggtcagcctgactcgacctcccaaagtgctgggattacaggcatgagccactgtttctggcctcctttttaatattctgccctgtgcaaagcaccagcaccaacagcctccctcccacaacccccaacagctgtgcattaagtatcactttggtttgaggatttcctagcttgctgtttatcctgggagaatttctgagtttcttggtctttgtttctttacccaaaagttggggatagttcagctttgtctgcattgtggacactacctccagaaagcaatgggaagaccctttgtaagctgtaccgaactctttgtatttttggagcacattttgtcttttttctcccttcttctggtggctgaggtacctctttggtcttgaaaagacccacttatatggaggcggaaatgggcttatagagggaagtgactttccaagggccctggaatgaattggattctgagatctgtgcccgtccttgtcacaacgtgtcagattccattatttagtgtgggcctgatttgtccatgcctgggactttcccagaggaagtcatactttctggaaactctctgaggtcttgaaggggtgggagaagtctctgacacaagtgctgctgtggtcatggaggcttccattcctctctccttgtgttgagcagggaattgctccttggatattttaggtttgagtgactcaacatgcttatgacccagaggatgctgtggtgtgtttggcagcatgctggaattagtcagaaggcaaaactgcttgtcctgaccccagaacccacttactctaggtggatgagaaagtcctctcggatcctctatttcctaattcatggcaacttctggagaacagtattttctctgttactgctttatggggtttagtgtggaaattaaagaagagaacttcttattttttgtaaataataatacaatattcagatactgttagtttc

SEQ ID NO: 31522 - DNA, 1055 bp, Homo sapiens
ccaagagcatcagcaagtttagtttagaacataggagttgtatttacacagctactaatgaccttggaaaagttcttggcttctctgtccttgacctttgtttatctgaacgagtaaacttcagatgacagagtgtgtggggaatggaatgcatccgcatccttgataagctgccctagtggaatgttgccatgtggctactgagggtcaattcactggtcaaaggtggcctgctggttggtattttttctgtgtcttccgggcaagttctgtctttcctcagtctgcacatgcctgggtctgtcctcagagctctctcccatttccctcttctctagaaagcattgatataatggggccacctcttccttggactgtttctgtagcatcagaaggaggtgggtgggaatttggcataccactttttgaaaggtaatacattctaacatatgtatttcacccaccttcaaagagtaagaatacactgaatgatacttaattttaaagatgtgttgctgaggtgaactctaagacgaacaattcttcagaatcttttactttcttgggcttcttgtcccaaacaacaattatctttataaagcctgtgtgtgtatgtgtgcgtgtgtgtttgtgaaacttcctggaattggtagtgttgattttgagatgtttctttggcttattcaaaatataaacagaaaggctaaagtgtttttcatgtcattaagaatgtctttataagaaaggacattggccgggcgtggtggctctcgcctgtaatcccagcactttggcaggcccaggcgggtggatcacgaggtcaggagatcgagaccatcctggctaacacggtgaaaccccatctctactaaaaatagaaagaaaaaaaaattagccgggcatggtggtgggcgcctgtagtcccagctactcgggaggctgaggcaggataatggtgtgaacccaggaggcggagcttgcagtgagctgagatcatgccactgcactccagcctgggcgacagagcgagactctgtctcaaaaaaaaaaaaaaa

SEQ ID NO: 31523 - DNA, 1027 bp, Homo sapiens
agtgagattatttgaaaattctgtgtgtgtgtgtgtgtgatcgagaccatcctgaccaaaatagtgaaatctcgtctctaatgaaaatacaaaaattagctgggcatggtgtcatgcgcctgtaatcccagctactcgggaggctgaggcaggaggatcgcttgaacccgggaggcagagtttgcagtgagtgagattgcgcccctgactccagcctggcgacagagagagactccatctcaaaataaacaaacaaacaaacaaggaagcttttcttttttctttattttgaaatagtttgataacatttacatgggttatttctttaaaatatggtagaattcccttgtgaaaataccttcacttattgccttttttggagtgaagaacggagtgaagaaagttatttctttaaaatatggtagaattcccttgtgaaaataccttcacttattgccttttttggagtgaagaatgtgtttgctctttaaaattttttacattttttttctgtagtaattggactaattagcttttatatctattctgtgattacctttgttaaattatagtttttttagggaagtcacctatttcaaattcatttgcatggtgtaaaataatttctcatgattgttttcatttcctctgtatttatggttatatttcacattattatttaaagttttatggatttctgctatgtgtatccatctttctggctaaagcatcagagtttaatttattatttatttaaaaaatagcttttgcatttatgtgttggctctaccactttgtaattctttattttctctttaaaatcttcaataataccttctactttttctaggtttattttgttgtttttctcattgtttgaacttggctcttaatttccatatttttatttctgcttttttattcatataaataagatataaattttcctgtaagagatgcttatttgtatgccttaagttttgctaaatagtgtttttaatcttattttttagttatttgactatgc

SEQ ID NO: 31524 - DNA, 1034 bp, Homo sapiens
gcatcttcacagatgagggcctctttctcacatcttcactccaaacacattactgtgtagacagccacttattttctgggaagaaaactttgcaaagcagtagcagaataaagtcgagggtaaacagaggccatggaaaagcactagagtttgagtgcagagacatgagtctgagcatgagcagtgaatagctcatgaaacactcaagttgcattctccttatgtggaaataaaataagtcatggttgttctatgcacgtggcacctgaccttgggtccttattgctatgctgctagagtctatgaatcaagatttgccagttgtgatcttgaaatttagtcagattaaaagggaactctgactttgagggtgaatgccccaagtgggcatcttattctcctatggattcagcttgttaggcagaatggaagtggaggtcatagattttagggttttctcctgggattgaatccagctgaagcaggaatgattctgggtgagctatataacgtctctgagcattagtttgtcattttcttacataggaatagagttattgccagatttggagatagtacatgttgcaatgtggttgacacagaataagctttcaataaatgattggtattgttgttgttgtcgttattatctataactacaataatttccctagccttattttatagggataggttgtggcaacatgaaatgtgacttggaaaactgatttgcactagatagatagaaaccatgtttttctatctatataatgaacaatgtcatttaagaaagcttagaggcaattccaccagcaccatcttcttttttatttccattcctagattatttgccctcaagtctttggtaatttctttttgccacatctcttgaatgtttcttctttactatattccatctattattaccataagtccaacgttcatcacctcctgctccactgttgttcctgtctcctggctctcctagagccttggttctcaaagtgtcattcacagagcagcagcatcacccg

SEQ ID NO: 31525 - DNA, 1048 bp, Homo sapiens
cacttacaaaatatcaagtattttgagttagctttacactggttcaataacacttagaatttttgttcataatactaagataatcatcttagggatggttacattttgttgtgaggtgtggtggaaaattcaaaggacaccatggtttgtgaaaaacccattgcagctgatctctgcacttttcatttccatgtcattccattttcttctgctttttctttaccccctgttattttcttgcttctctctctttattatcttaccttcatttactccatcctgtttttctccaaaatatagttgcttctgtaaaattgcttctgagggtgagcatatttttgaggggagagaggatggatggtttgacaaaggatgcagacatgtcaggttctgggtcagcagttagttataaaatacacagaggcagccaaggataactggcttcattaccaaaaggctagagtgggatttgtcagttgtcccagatgtctgtatggaattatggaaaactccattgcattatgaaacactcaggagctactcaggacacatgccactcaatccacgtgaagagggctggtgaacttcttagctagaaagacttcagctttcctattgcttaaaatgagactgattggtgaaggatttgtattagtccattctcacgctgctataaagaactgccagagaccacgtaatttataaagaaagaggtttaattgactcacagttccacattgctggggaggcctcaggaaacttataatcatggtgaaaggcaaaggaggaacaggcaccttcttcacagggcggcaggaaagagtgactgccagcaggagaaatgccagatgcttataaaactatcagatctcgtgagactcactcactatcatgagaacagcatgggggaaattgcccccatgatcggattacttctacctggtatcacccttgactcatggggtttacaattcaagatgacattttcggtgtggacacagtcaaactgtatcacactcttcacaaaacttcactggtacagacttgc

SEQ ID NO: 31526 - DNA, 1028 bp, Homo sapiens
acagagtgcatagagagaaggctgggagaggaggtcaggtcttgtttccctgcttgttgatgttccagctgcatgcacggcactgagccctgcctgagtgcgcacttcagtcctgaaagctgcagagggatgggctggtgacactgccgtgcctaggagtgggcagagaaggtgaagacacggagagtaactcagtgcagaggcagcgacgggaaagtgaaggagagtaagaagcccagagtaaatggccaaggtgccactaacatgtccatccacagaaacttttctgggggagaatgtttcttatcagattccgcagatgggttccttgagaagtgagtgcttaaaggggctgggatagataatcataatgccatgttctcactgctctgaacccttttctgacctcacgtaagacctcacctaaaacttccacaagagccgttcattgtcagtaccatgctttttttggagtactgtataatgtcaagtatttttccaatagtttatatgtgaaatgtggtctccgccacaagattacagggtcctcgggagcagaaattgtgacttaaatgggcctttctcccttccactttttattcttgccctaccttttaatcaggcacctggaagagatctaaacacaggatgagcatccagtaagtttttgttgagttgaacttagttggattcggatgacctctaaaaaatgtttactaattgctggtgaaaattggcaaatgattattttgtggaaaaatgttctcaccgaattagattttgttaagaattcttatgtgtgattatttttcataaacccaatacactgtctattattatccttattttacaatgaagaaaaaaaattcaattgactgctcaaatttacctctaggaacaggtgatggagatttgatttgcatttagatcttttgtctccaaatattgtaatgttacttctgctttcccccactacataccgaagaggtcttacttcattgacagtggttcagccttctgctgaggag

SEQ ID NO: 31527 - DNA, 1031 bp, Homo sapiens
catccacttcttaagcctggtaaacacttttattagataagagagacagttttgcataaatgaacaaaaatctagatgaaaagttctcgaatcctgaatcacatcttgccataacctcttactagccgtgtgttcttggacatcttatggactggagtttccttgtctctaaaataattattccatttccttgtactgcagaagctcatgaaaaaggtcaaatgagatagcgggtgtataaagtgctacacaaatgcaatgatgctaatagtaaattattgttgatgttttctttgtttctgtacagttgactcatttgctttatcattaatgatgaggcatgaaagaaatgctgcttgtttttaatgaactatggaagactaggtggagctgacgggatgttgggatttcaggaaagctcttttaggtttctggaaatgatactcataccaatagttgtgagcttaggttgaagagcaatgttgtatttatactataatttttcttcaaataaactgtgataaagattttgaatattactttcatattctgaacttctcatgtacacttgaaaagagtcatgaaatagtagtagcggttgccatttataggggtcgtagggtgttgttatggttaaatttataaatccttaaaattatgatttctatcacaaaaatgcctaaaagggtgcattctctaggttttttccttctttcattcccttccttccctcccctccctccctccttcccctccctcccttccttccttccctctcctttcctttcttctcctttccttttccttttccctctcctctcctctcctctcctctcctctcctcccctctcctctcctctcctctcctctcctttcatttttcctttcctttctctcgctctgttgctcaggctacagtgcagtggcacaatctcggctcactgcaacctccacctcccgggtccaagcgattctcatgcctcagcctcccaagtagctgggattacaggcgccctgccaccacaccagga

SEQ ID NO: 31528 - DNA, 1030 bp, Homo sapiens
ttatttcggctcactgcaacctccgcttcccgggttcaagtgattctcagcctcagcctcccgtatagctggattacaggcatgcactaccatgcttgactaattttgtatttttagtagagatggcgtttctccacattggtcaggctggtcttgaactcctgacctcaggtgatctgccagcctcggcttcccaaagggctgggattacaggcgtgagccaccgcacctggccctcatttatgttttcaatgtttccctttgtcagcttactaggggcattgttattttgtctcctaacttttggggaaagcttcagtggacctctctctaatctgaacagaatacagacatggccagttatagagcagaaggcaaaggtgtgaggaagtctttgtaggtatgagagttcttataggcctgagcgttatggtgagggcaggtcctatattaagtgggctcataaatggcatatatgagataggtagaagagaagcatataatggcctcgctttagactcctttactgtgaatttgacatgccctccttgtactatgtgtggttcacccactgtcttactctctaggaacactgaagtgatttgtttgcgtgccctgcagcacagtccttggtcccctctcaacatgccaccccacacgtttttgttacctgaaaattctatttgtatcactttctccaaaatggctaggtgcagcctaggtcagaattaatcgctccctttcccgagtttccacatcttattctttgacttatccaaatttctaccacttttgttattgctcctgcttacattctgtcccatattgaacatgtagtatatgccaggctctatgctttctctttattattttattgccttcttatgtaaccctacaaaatgtttttttttttttcttataaagaaatggaagcttaaaggaggtgacattctctatgatttgcttggagtatgtttctgaactaaggctgctgtccatatccagcatgcggtactgcctgtccttctat

SEQ ID NO: 31529 - DNA, 1099 bp, Homo sapiens
tttgatgggcagatgtttcagtgaagtctggtacagccatacaatggaataataccattcagcagtaaaaaagaatgaagtattgttggtatatgcaataacctggacatgcttaatgaaaaaactgtctcgaaaggttacatgtattatatgatttcattttaagacaaagctctagagataaaggacatattcatgattgctaggggacagaaatgggtgggtcgggggggggcaagtactggtcattcctacaaagaggacgcagcaagagtctttgtatgggtggaacagatctgtacctcaattggagtgatgattacatgaatctatacatgggataaagttacatagaactgtatgcacacacaaatcaatgcaggttataaaatggtaaaaactgagtaactcctagttaacaataaggtaacaatgtcagtttgctgggttttcgaatgtattacagctttatgagcattaccatttagggaacctgggtaaaatgtacatggaaactctgtactatttttgcaactttctatgagtccatatttaaaaaaaaattaataatagtaaaataaaggaatgcatatagatatcttaatgtattcttctcttactcaaagtgctatcttacatgccatctgaattgcttgcatgatactttgaaagatcactgctatatgtatccctgccaaaatgtatggcttaaacctgtggttttcaaagctggccagtcatcagaaagacttggagaacatttttcaaaagaaaaaaattaaagcaagtcctaggtcccatcacaattttacagaatcaaaatatctggccatggggcccaggaatctgcattaaaacaaagcaaaataaaaaataaaacagaacttcccgggaattgtgattgatgctcaaccaacgtttgggaaccactcatttatttcattaacttcagggaccagtgccttaatctcctttgaaccttctccaagtcctgagagtgtactcttcctcccgtagttaatgatggtagcttttgaagtcttgagagtctttatcttgtgaacattgtacagattcagagacctagagcatctttcat

SEQ ID NO: 31530 - DNA, 1042 bp, Homo sapiens
gtaagggtttgtatcattgcatgtatatgttaagaggataagaggtatgtataaaagtaaattttgagaaattataagtataaaccaaaaagtcttatacctttagcaatgcctttaaatcttgaacttgaaagaaaaagttatgcccgactcgttgattgcatattaaataggaaaatacatttgttatacttgaactagattgttcttaggattttgtgaaagaaaatatataagcatgaatttattatagaaaataaaaatgaccctagaagaaaacctaggcaataccatttaggacataggcatgggcaaagacttcatgactaaaacaccaaaagcaatgccaacaaaagccaaaattgacaaatgggatctaattaaactaaagagcttctacacagcaaaagaaactatcatcagagtgaacaggcagcctacagaatgggagaaaatttttgcaatctgtccatctgagaaagggctaatatccagaatctacaaagaacttaaacaaatgtacaagaaaaaaacaaacaactccatcaaaaagtgggcaaaggatatgaacaggcacttctcagaagaagacatttatgtggccaaccaaaatatggaaaaaaaacctcactatcactggtcattagagcaatgcaaatcaaaaccacaatgagataccatctcacgccagttaaagtggtgatcattaaaatgtcaggaaacaacagatgctggagaggatgtggagaaataagaatgcttttacactgttggtgggagtgtaaattagttcaaccattgtagaagacagtctggtcattcctcaaggatctacaaccagaaataccatttgacccaacaatcccattactggatgtatacccaaacgattataaatcattccactataaagacacatgcacacacatatgtttattgtggcactgttcacaatagcaaagaattggaaccaacccaaatgcccatcaatggtagactggataaagaaaatgtggcacatatgcaccatggaatactatgc

SEQ ID NO: 31531 - DNA, 1044 bp, Homo sapiens
aatataaagataatttttataacagggtctatattggattgtaaaaagagggtcataggatttggatctttagggctctgtaattcaaaatttgggatgttcattaggactatttgtgttatgttgtaaaacaattgtacttgttggcagacgtcttgggttcaagttatgattttgcatttaggaggtttgggaacgtggacaaactcccttttgagttttccttcaccccgtctttgtaatggagataatattctcatttccctgggtttttaggaaggttacctgagatgactcgtgcaaaagctaacacataatagataataatatctatctatattgagatatctatatttagataaagatatctatatttagataaagatatctatatttagatatctatatttagataaagatctatatttagatatctttatctaaatatctatctaaataaatgttaatttattctgaagtgtggtaagtttatctaacatttactgtagcaaccaaggtggggctaaatatggggaccaatcagaaagacgatctctgtcagttttgcctaggacgttcagtgggacttgggtaggagactgtggactaatctcacctctggaaatttgtgtggcctgtgctataactgagaggaaccaagtaagcctgtgtatatggcaaatggtagtcctctcccaaacaacatttgtaaagaaaatgcattttgcactatttcttagtgtgtctgaggctttttatgttcataaaaatcttagtgagttgttgaaacgtgcttttctgaaaaaccttggaatttacctggtttagaattagaatcagaaatgtgtctttttaaactgtattctaccttcttaaatcttttgccttctgcagcaacatggagcaactctgatacttttttctacttgagggcctttcgtagtcagagattatactaagatagcaaaaaatagaaagtgacacactagtcaaggttggtttattgtgtggtaggaaatccaaaagacgttggaagcaacaaca

SEQ ID NO: 31532 - DNA, 1883 bp, Homo sapiens
cctggctaacaaggtgaaaccccgtctctactaaaaatacaaaaaattagccgggcgcggtggcgggcgcctgtagtcccagctactcgggaggctgaggcaggagaatggcgtgaacccgggaagcggagcttgcagtgagccgagattgcgccactgcagtccgcagtccggcctgggcgacagagcgagactccgtctcaaaaaaaaaaaaaaaaaaaaaaaaaaaaaagaaagttggcgctctactgaagactggagcccaagaagacatttatagggattgtttattttcatgttgttactacactccatggtctgcaaaaccagagtgccagatgttaaattctatcagcataatgcatctttaattaaatattatatacgccatacaattaataatgtggtctgtttccaaaactttattaagaaattaccataattttgtataataggctaataaaaaggcactgtactttgaaacagcctttcgtaaagtggttatatgatttgtatctgttgaatttggaatttagattaagagattgtgggccagaattatctgatgcaatgtactcaggactttaaataagttgcgaatcttgtagggtctactattatttggcttcctttaaaataaaataggtttcttatttgtcgatgagctcactctttaagaggtttagggaataatttacctactcgctttgtgtcccccaaccctactttgtaaaaacctcaaacaatacaaaacatgataattccaaatatacagtacattgggctatgatatttcttaatgaatggaaagtcatgcatctggttctgtggtcatcattgatgttttaattttcacaatgtgttaacctgatacttaaattcccctagttgtcctgtgaagaaagaattttaaattcacatttcacatgcagacaaactctgatatttaaaaataatagttatcttttaaactgagatcctatgtggatatggaatagcgtatacagctctgacaatagggcttcagtaaaataacattttgcaagctgtgtttttcaagacaaaatgtcaccctcagctaaacagaagtaatttgcatcagaggtgtgtgtgtccttactcttaatgaaaaaacggtcccctctcttcagaaagtatttgctatctctacaatgtattattttcatcactgtgtccctcccctgcccttcttatgccctaatatttgtcccttaattctattaaattagttgtcaactaaaattaaaggtagatgttatccttcacaatctgtcctggtctaatttttcagtcttgattcgtcttctttactttatggagtgtagaggtggctaacagaacaactctggagccacaatgtgtagattcagataccaacagtagcttatgctgaaacctgggtcaaattacttaagctcacatacctcagtttcctcatctacaaaatgaggataataataggttcttcctcacttatatgtaaagcatttaaataaggactagtagattgtatgtactagctgttattaaattctgccacatttgtttgttctccatacacaccttagccttttgtctatgtctctgttcacattgtttgctggaaacaggatccacccttctcctccaaggccagtgtatgtgtgtccacaaacacacagccatccatgtgttgtgattccacgcacctccgaagatacggctcagagagccaccctctgcttgccagattgagcatagttcatctggaactttcatacacttctctgtcttacttagcatttgcaactatactttatagttattttcaagtttattttgcctcttttgctggtgtgtggacttcttgagtccatggactt

SEQ ID NO: 31533 - DNA, 1055 bp, Homo sapiens
ttcacatccttccctatattggttaaagcttccctctgttgtgcagaaacttcctctacaccttgcatttgcttggacattaaacaggtctgtagtatctcaagcctcagcaagggtagtgatctatgggtgagacatgtggagggcaaaactgagtgaactgctgtcaggctgtggccctgtgaaggcgattataactcccgcaatgttggtaccacagcggttgctgggccagaacaagtggccaaggacccaggaaatgggtgaggccaagcaggtctaagataatgcaaatgccttggacagtttctcctttgagaaggggctgcagtataatgcagcttgtttgtgaccccttgtttattcattttactaatcctccagaaagaatcttattcttcagcctttagcactattaagcaatgtttaaaaactccttatgagtgacagttacttcttatttgatttaattgtccatatgtggaccttttaagttaacactctctgttacttcgtctgaataggtaaggtgtaatactacacatgcccactcaccacaacttggatttttcattagtactggaaccaacacgatgttgattcctcccattatgactagaggaaccaataagaataacttggaatcggtgaaaatagaggaactgagccagtttccagccacttgggttggaagagtgcccttgcttcttttcagttagaactgtgagaaatcagaaatttgagagccctcaattagctagaagttcaatggtagttttgggggatggattgggtagaagtttggactgtatttttaaaaattctttccacatttttacaagattgtccatttcaagacagatctattcacatattcaacattgtatcaaaaatttccttatagggtatttactaaactgtttttcttatatgaaagcgtctgccatattaatggtgtcctatgtgaatttcacattctataggggaatagagctcttcctgacagtggggactgtgaagagctggagaaatcctatagccttatgtgtgaccac

SEQ ID NO: 31534 - DNA, 1070 bp, Homo sapiens
ttttgtatgtttagtagagatggggtttcgcattgttagccaggctggtctcaaactcctgacctcaggtgatccacccactctggccacccgaagtgctgggattacaggctgggattacaccactattttttaatggcattttagcagttaaaaactgaatgctctaaaagtcagggatggcatgggcacaggtgaaagatgaaagttttgtctatttctatttctatgatgaaatcagttgggttaacaagagcattcttctaagcagctagagattctgttggtctcatccagccatcacccagatggcaatacaaccagtaaaaggcagataatggtatctgtttttgcagactttatgttcacaccagtgtcactcatcttaacctggactcttgtcatcagcttgatatttcctcactttcctctttctccccttttcaagttatagctgtgccttgacatgacttacccaatactctgtattctcttcgtgttcattaataggctcattttccagaactaacattggggcatttcaaggactttttacgtagcacatgagctgcttacaacgtaattctgtctagttgggacatatgtcatttagccagattgtttatggcattaccacagccaagcatatattagtttcatagtaatttctagggaaaaaaatgtggaggaaatatgtggtttttgttatacttgcaatgttactatattactgcttttttttaagttttgatttcaataaatacctagcatatattttcagatgccaaaggacatacaatgatgaacaaaaactcagctcgtcctcaaaatcgatatgtattattggtgatgctggactccacccactcatagatgtttctcattattgtgaaacattactttttggaaaaagagagctgggccaggcacagtggctcacacctgtaatcccagcactttgggagaccgaggcaggcagatcatgaggtcaggagttcgataccagcctgaccaacatggtgaaaccctgtctctactaaaaatacaaaaattagccaggcgtggtggcg

SEQ ID NO: 31535 - DNA, 1055 bp, Homo sapiens
acagaaacagcttgtacagtaggaaagtgtttttatgcatatcagactgaaaatctaggtgccttatttttatcagcaacttgtccacactttgggctctccaatctctcctaggttcatacctgaaaatactaaagaaaagtctggaaccccatgttttataaagtatgtttcctgttattttctaagagctatccatttttataatattctgtttagataattttaaaattataaagagaaaaactcaaattaatcataatatcacaatcctgacataagtcttgttaacatttggatatattcacttctagtagctgtttgataatacttacataggctaacatatactggcccttttgcatatatatttttatacatttgtaattatcagatgtactattttcatatcttcttattttttggcactataatggcaagaattatgacaatccaagtatctaaaataacagattaataaaatcttattttgagcagacaggaaattagaaccagtcagggctggagccgtggcaaccgaaactctgtgccgtctttttgatagtgctttattaaaactgtagcttgtaattgaggatagtttttctatgggacaatgcatagaaagctgtgcatggtgataaaacctttttttcccgacattagagcaactagcccattgcattcttccaggcaaccaaatgaagatgaaacgtgtgcctggagtcactgccaggcatgtggggcacagcaaaggccaaaatatggttttagtttgaaaacccaaccttgaataatggttcattctattcatcaaacttttaggtcatgggtcttgcctaggtgaagccatccaatggaaataatgtcttggaattctcttgcctttattatgtcaaatctctaatatataacatccataaagcctaattaatgggaaaaactgagtgtatgttttagccataacattgtggaaataggttcttttagtttcacacaaatagagatcttctcaccccaccgagaaaactcgctttctcctttacggagggccc

SEQ ID NO: 31536 - DNA, 1023 bp, Homo sapiens
tttaattgaccgattctttcctctacaaatatttattgagtgcctactactcaccaattattgtagtgtatactatgggagataatggaaatgatataatggccaaggagagaaagcatttgtcaaatcctctagggccaagggctttgatagagaacagatttcacaactggcagtggaaaatgtattcttttccatcccggttcagaggattttgccactgtacttgtgccatataaaatgctgaaatagttcatgagaagaggtacaggcatacatcttcctggtgtgtgaagatgagtggcaatgcactgtctctggttagagttcccaccaaaaattgtaaaatacttaaaaagaaaaagcaaaaaatatccgaggcaattaaaaaaaaaaaaaaaaagggaaatcacagaagcaggtccaagttaatgaccttatcccaattctgttcctaagtctgactctgatgttagtcatgttgtatttaattcttccagatttcctatagtactgtacagctctgatctcagtcctcacttggttctaaggtttgaccatcaaactttgagcttgcatgagccttgaacttggctctactcctatctggcagtgagcatcatttgttaaaattcaacaagagcaaacagaaacagtgtacactagtgacttgctgaaagagcctaagaagatacagtaggcaggagtaatggaaatgagtttttaacctccactgactcaccctttctttcctagtcacccttagggtcatggcaaagttacagaggcatttagaaatcatcttgcttgaaagcttccctttcttcagtcattagtgagcatcttcataattttttttaccatatatgtaaactatccatagtattatttgcctaatatttttatttaaatcaattaactttttatccgactttgtcttccttcatgtcaataacatctataatttgattctgtgggttgaagtactaagttgcttctttcctgtaaaagatattaaactga

SEQ ID NO: 31537 - DNA, 1004 bp, Homo sapiens
gatgccagccccttcttctttggtttgttgttactatactatgcttatgagaaggaaaactatccgggagatatttaatcgcgtacttggaagaactgggtgaattcaaataatggaaattctaaccatttttttttttttacttctttccctcataagaacatttaatcaaggtttttctttaatgagatctattcgtggtgactctaaaatgtaatttaattcttatcagaattcagttaagctttaccaaagacccttgttcaatattgattcgagttcagcacagtcctcaagccctcagatggatgtatcagaactttaatttcttctgaacttttatatgtccaataagctgcatactagaagtgtaaggaggttgaggaaattgggcaaatgaaataaaacaagttggctttgaagatagtttgcattaaggagaatcctagaactatgcgtctctcttggaaccaaaagccttagaacaggaagcatattctgtgtgatccagcaaaattgcctttggttacactgttgaaaactgatgtctaaaaggtattccatacaaaccagagcaaacctagcccttggccatcagtcagtgtgcctgtcttttttttttttttaattgatggaatgagaatattcaagatagtggcttaattatttttgtataaggaccagcatgtttgatactctgagttcaggaatgagaccagtctaatgtaaattaaatttacttctgcctaaattggttgttgatcaacttaagatcctattaaaattaaaaatttacatgattttgagggaaaatgcaccagtaatgtctgcagctttggttcaatgatttttaatattttcctgtggtttattgagtttgttcttaatctttgtgcttaagtagttatgattaaacagtttgattcagtatagcattgtaattctctttaatcattttacatattttgttttctattttttatttattaacataatacaaatgt

SEQ ID NO: 31538 - DNA, 1049 bp, Homo sapiens
tcaaaaaaaaaaaaacgctttagaaaaacactttagacactttagatttatgtgacttcaaaagtcaaaaatggtaataatcctgcttaggcagaagccttgccctcagtcccaaaacatgatggacaagcgggtgacttacctgtggcttttcttgtatcttgcagtctgtcagcaatcatgaaatgtaggcctcagagtggaagggcccctagagaccatccattgcctctcaggagcatggtcattctgcagatcaaggtcctgctctgggagaaatgggtgcacactcactctgcgttctgtccagcccttctgccacctacatttctatgcttttctcttactgctaaatagcttcctaaaggaaaagtgaatggtctttgtgaattcaaacctcattctgttgcttccctatttaaaactcttcaatgagtccctcttcccaatgctctgtctctagttgttctgtatataaaagctaaacttcttcacatgtttctgtttctcttgtttatgcgatcgtttgtcattggccttgtgttggtgatgtatgttctgaatgaataggctccagcaattaagtgactgagatgaaatgcttttgtatctctctagcctcatttcttttttttttttaccactgtgatgcaaacacatggaactactgttctccattgcaccatgattagtctatccgtagtcttttgtgtgtgatctttctgtacctagaacactcgtcttgggcttttgcctggccagtacattgccatccttcaggtctcagctgatttttcacttcttccatggagccccctctgacttcacaagattgcgttgtcctgctcatatgtcctgctcagagcatgctgcatgtctcacttcatagcacctgttatttttttagtatagattttggttttgtttgcctgcaccccattccttgaggacagggaaagtttctgtccccctgttgtgttgaggacactattaagttccctgccattacctggtgcttaacacatagtagatgctctattagtgttgga

SEQ ID NO: 31539 - DNA, 1052 bp, Homo sapiens
atggaaatgaggccaattggtaggaaagaatcattactcagcaagaatacagtttatgtcttcccaaagaggaagaaccttgagattgaacataaagcccaactaatatctttttttatacagaaatatggcagattcatttcattagatacagcccaactttttttttctgcaccagtcacagtggttgttcctggagactcagagatggagcaaagtcctatcttgtggaaacttagagtttagtgccccataaatatatccaaataattactaccaaaatggataaattcaatgacagaattcttatcttagaggagtaaataattctatttggggaaattggagaaggcttatggatacactgaaaaggaaaacatacttctgctcccacagagtttggggaaaggaaattttgcagttgatcccagaagcctacttatttcaccactgatgacccagatttaaaaataatctggtagtccaaagcaattttttgccactgaatataaacttcttgcataaaataccaattataacaactctgattactgctgcagtggtaccatgatccttctaacttttctttcacagcaatcaattgatctgctgcttaattcatatttatttagattgcagccatacagatgctttttgggtgctgccaggaaaattaattacctacatatagaatataatgtatgtagaaatgctttgacaaccgtaacgtgctctgcaaagagttagattattatcattatttctttttaagtctcactacaaatagataaatttttaacatcgtttatcttaaaaccagtaccatgaaaaaactgagtcacagtctgtttttctttttttaaatctcttcagttcttatccaggtccatttcaaataatatgtcatttcataccttcacaaataccatctccaatttccagaagatacagagagatacatggcttatattttcagccaattaacctgtcatagaaaaaaaattgttaggtaccattgatcatattgagaaatactaagaaattaataagta

SEQ ID NO: 31540 - DNA, 1050 bp, Homo sapiens
aatcgccctttaactgcacctgcagctgcaattgcaggagcaaaacttaggaaagtgtcacggatgggggatgcctctttcccaagcagagggaatgctactggtgtgaactcggcctcatctaaaacagatacaggcctacaggccatggaaatggactccttcctttaggtggtagtggtttagtgaaataaatgagtgccctgctgccaggaggaaaagaattgctgaaaagggatcaaaaatagaaacagaagaaaaaggacaaaggtgaagattcagagcttgtaacttctaaggcctcttcaacaagtacacctgaaccaacaaggaaaccttgggaaagaacgaatacaatgaatggcagcaagtcacatgttatctccaaaccaaaatccacacccttattacagcccagtggcaatggagtccagatggaaggacttaactaccacaggctgaagcaggacatcttagatgaaatgaaaaaggaatgaacaaagctaaaagaagagctcattgatgcaatcaggcagacactgagcaagtcaaatactgcatgcagaaacagagtaaggtgagataggactttaatctggaggaaaaaaaaatcctactaaccgcaactgttcacaacagcaaacctctacattttatgagctgtgagaagaaaatggagacaaacagaaggagggaaaaatcaacctactctgaaagtcttcagatattatgactctggcgataagctctttccctcacagttggctgcttttttctggcctttacaacagaatggaagagaatcatataagaattcctgtaacagttacgcagaaaatactaaaacccatcaggcaagatcactgtacattgaaatattttcatgtcaagataaaattgcacattttccacaattcagtgctaaaataaagaggaggaaagcttagaaagttttttttgcagagagtgctgataaagaattgagcaagtttgctattgtattgtaatgtttctctcaggtttgttcttcctatcatgtgtgatattcca

SEQ ID NO: 31541 - DNA, 1024 bp, Homo sapiens
acagttttaaagctattttccctttagtgagcattagaattaaacaacaaatttcattaacagaattgcctacaattatatactaatgttattttctatttttaggtaacatagttttatatcaagaaatatttagttatttggggatttaggtacagattaatgtatgaaaaggagaaatcctaaagtttagaggaatgattatttgaggttagtgatgcatgtaactttcattagaatgagaatctgtgatgttaaatactaatggatgtatcaggattccagcatgaacttcatcacattttactgtagctgtagaaacataggctaatctcttatcttccctctaccttggttttcgtatcaagaaagctgggatattagtatctgccccgcattcctgtttaccttccacataaggctgctccatgcattcattcaacacacacatttgaccctgtgccaggcattctgtaaggtgctgagatgcaatggtgaacatgacatggtctctgccctaaacgagtttataacaactaaaccctttgttaaacatccagatctgggggtttaaaataataatggaatctttctctaaggtggcattgtaggtttctggcttcttaatttttgcaagaaagagattagtagcattaatcacaaatccaaatagaggaaaaaaacagacagagatagttaaaaataaaattttaagattttggaaggcaaagtatctaaaaaagagtgaaaatggtgccaaatagaataaaatcagttaacacatgttctagtaacttatcattcttcctaatttgttgccttcagggacagtcattttaaaatgtaggtatctgccacattaataacactgcatccataaaaatattactttataaaaaatttgtttgggagatagaaaagggttttacacttacacaaataggttatactcgaaagagcatgaaactgggagtctgaaaatgaaagttgttgttctggctcttcttctaactggctttgtgac

SEQ ID NO: 31542 - DNA, 1061 bp, Homo sapiens
atcgtttaaagttgaaatgaatttactactcctaataggaaggaaagtgctagctaaagtatctagttgcaaaagagaatttgaaaatggaaatatctgactcaaaggataaatagaacttgcagtagctggtgcttaaggaagctcttttgtcatatgaagccaataaactaaaatggtttttcttcccctggtgtaaacttgtacttaagctgggctggaagtgatctttgggttttaatgggcatggctgggtttatcctacagaggtttaaggagatgggtggcttttctttctaggctaaggcaaacagagtactggctgccaaaccatttgagggcttgtgtaagtgccaggaaaagtgccattcaagtagtgaaacaacagaaggttggagtttctttagggatacatggaataaaaataaaatgaattcttactatctggatatgctttgtgaaaaattgttttgaaaaaattgtctactactgcttatataatggtatttaccctgttgaggatgccttatgactatcagtggcctgtttttttcgtagaatgtctgactacctccatgagaataattgataagtacctttaaaatatcctgcagtgctcaagtacagttgacccttgaacagtgtgggtttgaactgtgtgggtccatttatacacggattttttttcaatcaagtgtagatcagaaataacagtgcttggcgggatgcaaggcctgtgtatactgagggacttttcatatacctgagttccgcagggccaactgcaagaagtgagtatgcacctattttggtatctgtgggggtgctggaaccagtccccctcacgtatacccagggatgactgtacttatgatggctattatttctctcatattacaggggcgtaaacataagtgatgttagtttgtttaagattatttagttggtgagtgatggagctagggttggaatcaaagtaagagttctcttggttacaccatgctgcttccttgtgcaataaatattcactgaatatctcaaagagccagtgttctgtgcag

SEQ ID NO: 31543 - DNA, 1050 bp, Homo sapiens
cttctgtggaacaggtttgtttttacatattagcccagaagtctatctcattaattaaaatgtaattaaaaatgactttaaaagagcttaagagttcatttagatttgttttcccaagttatgtagaacattaattacctgagtttttttaaaatgtgaacagaagcttctgtcataaatttggaaaattataggttactggaagataacaggttttttttttcttttaaagttttaaaatgtgctaatatgcatcttaaagagttatatatgctgcatgctttctattgaaaggtgtgttttttttggataaagttttgaggccagtgttctcaggaagaggcttgggaagtgctgttctagacttatcattaacaggaaggaagctgaggaccaaggagattgtttatatcaaaggtgactaagctggttagctacatccaagtactgtgactgataattgccatcgtcagcttgtttcagggggatttactttacactgaaattatctgacaaaactcattgcatagtaatgttggaaagctgggaggagaacggacttgtgctaaacctcagctataatatagtggcagttttccattgaatttttgtcctttctttcctcaagcctagtagaccttttctttcaaaaaagagctgagagcttagaagagcaaaaaggtttgggtgctaaggtgcatgacatgttatgattattattatttttttacttgattaaaagcactttctttgactagctaatgcattacaaagaagggctgtaattcttttttctctcctggttctttacactgagagagtggcgtattactatgcttccattaggactaaattcagtagcaagagggcagttataagcaattctatgaataggactctgaatttttaagactttgatggaaaaactatcccctaaatctcaatgttaaaatgaatctctcttttctccaaatgttaaaatgaatctcttttctccgaatgttaaaatgaatctcttttctcctacagttcaagttagacacggtttta

SEQ ID NO: 31544 - DNA, 1058 bp, Homo sapiens
cttgtctttgcaggacatagctcgccttttgcaagaaaaggagttacaggaagagaaaaagagaaagaaacactttccagagttccctgcaacccgtgcttatgcagatagttactattatgaagatggaggtaacaattcctgcatcatgatctattctatccttagactcaaccataaaacactcctttaattttgttcataaagtgaccttagggacctgggactgtttctcttatccccaggcactgggtacatttagatgtgtggcaggattctatttgaatctaataaattcatgttttgttttgttttgtttttattatactttaagttttagggtacatgtgcacaacgtgcaggtttgttacatatagatacatgtgccatgttggtgtgctgcacccattaactcgtcatttaacattaggtatatcgcctaatgctatccctcccccctccccccaccccacaacaggccccggtgtgtgatgtttgccttcctgtatacatgtgttctcattgttcaattcccacctgtgagtgagaacatgcggtggttttttttgtttgtttttttgtttttttttttgttttttttgagatggagtcttgctctgtcacccaggctggagtgcaatggtgctatctgggctcactgcagcctccctctccaaggctcaagcagttgtcctccctcagcctcccaagtagttagaaatacaggcatgtgccaccacgcctgtctaatttttgtatttttagtagaggcgaggtttcaccatgttggccaggctggtcttgaactcctgacctcaagtaatccgcccacatcagcctcccaaagtgctgggattacagatgtgagccaccgcgcccggccttatctgttctttagttggacaaccagagccactttcatgatggctaaaatttgaatatgattttatgagaattggcatgcattctttttaaactttagcgacttggaatgctttattataatctaagcacataaatggggtgtggaaaatggtcgatgagtctctggacttaac

SEQ ID NO: 31545 - DNA, 1051 bp, Homo sapiens
gtggcgtatatgcttgtttctttggggagagacagactttgagggagttttgaggaacaggaagtggtgacctcctgaacatgtgtatgtaaatactgaaatttctcttgcctcagctgtgttgttattgggaggttatgttttgttgaacatggagtcctcattaatatgcccctgtgttagaccaagtgcagttccacagaaaccatattatagttcagctcatatttacaaaataatccttctggtctttgcagtggtccttttccaacacacctgggatattctttcattgtacttctctgtatgcctttgtatatctatttgattttttgccttacttgcacggtaatcacagtatatcattacagaaatggtcagtttttcaacttttaactcaaactttaatacattatctattagaatgattatggattttctacaaatttgaaattgtataaaaacatttgtcaaatttatatcaactcaaatgatatatattatttattaatgaatccatgtttttctttcaaagccacttattgaagtcatattagtgattttttaagttgtggtctttggagtcataggactgtggttcaagtcctgtcccctcctaagaacaatattaattttaatgaagttacgtactaaataaaatggagattataaaagtaaatccttcatttggatttgagaagatcaaataatgcaattttggtgaagtacttatttatacatatatcggtgttatatgtgtataatgtaatattttgtgtatcttattttgaaagccaaacatggaggcactcatataaaatgcagatatatatgtgtataaatatgtgtgtgtgtgtgtatatatatattatgtatatgccaatacataatacctatgtatgttttggcagtgagggagtaagttatatttgccaaataacttggtctcaagaaacatacaggtctcagtcctcaactgtatgaggttttaaagcattcagatagattcctcacattatctttttctttccaagatttaaagctgtcacag

SEQ ID NO: 31546 - DNA, 1066 bp, Homo sapiens
aatatcaaatgaaacagtttaaaggaaaacgtatagttttttattttctttacatctcatcaacttacggtagctctttcaaatgcagttcagcaagtggttaattccatcggggaatcttagctttcatagcaattttccatggaattgggatttttcgttgttatttccaaaacgtagtaaaagttttagaaaatgttaaaatcagtatattcttataaagtgcatatgcatttgctgcctttgtcttcacattatacttgtgcctaaaaaagacctgaaaaagaattatttttgtgctgtttttgaagtttatattaaatttggggacatatacttagcatatattatatttttctacaaagaatacaatatcatacagttttttgaaatgtatttaggaagcgactcctttttatatattccatcaaggcaaccctttaaatttttttcctttgccaagtttcaactaagattgagaacagaattatctacagataacagggtcatgaactcaaaattctcatctacttgatcctcttttatattgaactgtaatagagggctaatttctgaagtgactgggtatgtttgctttggccacataaagtgggcagatggaggcatataaaaatctgtggatcattcctctgaactcaagagaaactagcaatattctgatagttttattggcatttccagtaagaatatttgaaagcctctgtctgaaattacaaagcttaatttttttgttttacaagattcctcaacctctactttttactctatactagtttcaaattggtttataaatagaacttaatgtttaatggctataattttgttattggcaaatattaaagtgttgttagctctacctaatcgtgatcaagctcttctttcacatttgtttcactttagtttcttaccattttggctatgtacccagaattctttaggtatgcatgaactgtttcagtaatgctcatcccctcttctcaatttaagttgaaaaagcaattttctccatttttaaagtacgttaaactggagcccagactccccc

SEQ ID NO: 31547 - DNA, 1958 bp, Homo sapiens
ttacttcagtgaacccagaagagctgatgagcctgtcttgatagtgtttgtctaactaaaaggccgatagagccggaaatactgtattttttagacctcatctttctcatttgtaaaatgaggagttggataggcagtcttttaagaaagtatttttcaaataatatgcctcagttcattttcatcagaatcagctgttaactaacaatggaaatgtctgggtttcacatgtattatcatctctggagtgaggcctggcagtttggacatgttttagacctggaggtggattcttaggaacttaaaagtttaaagtcattgcattaagttactttttatgctgtaactttctccagctctaactctacagttggtgttctaaagtaccaatacaggtaagttcttggtacctatataagaatgaggtaaatattatagataaacctcaaatttctggcacccctgaggcttaactctgaagtccatcattgacgcagtaatggctctattttctataaactgctgaggtgatgttttccatgtgtctgtaacactaggaatcatagtaccaaggagccagtcaagctctatctgtggtcagagaacttgtttctaggttgcggattcaggttaagttggtttttcctgtcatgttatttcttattgaaggacttggttatgcagaaaattaaaatttagttccagaagccattctgagtagctgccacaaatatccttgtcttaggctttgtgcttggatttcagccagaaagatggctttgtaaacaattccaaactagatccactttgttaggaagacataaagagctgcggaaaaatagaggaaagtgtgatataatctgtcttgagtaggtttatgaggaggttacacccctagcattttgaggtttacaagttccaaaggtgtgggggaagtatggaggaagaatgatgtacactgacctctacgtttctgcttctgtgaatctgactttcacgagtgctctgagggctagttaggctttatggcttttagttatgctccaggatattttaaataggctgaggaagcatgacactaaacgctgactcacaggctccactactggaattgcaaatgttttgttttttattttgccagcacaagggattgaaaaacaatgttaccaggcggatattaaaacgactacaacatgagctgctgcttttctatcattttatattcagcttgctttttatattttacctttctagcccccgtaggcatttgattttgtaactccctggaacaggtcagaggattacattaaaatataattactaggtagtggcatctattcttgctgttgtaaaagcacaattcttaaagttgttaggacaggccaaacttacattaataatgaagaaactagcaggatgacacggagctggttctaagagcatttgcagagcagcattaatagaatcagttgaaagggactgcaaaataaaattttaaattaagtataagataactttctacagggcaatgggtacttaacctttcggagttacttctctattggactataaattcttaatggctcatcattttctgcaggttaacttctaaactcacagggccataaaatatctgcactgttctgctgtgaattgttagtcagatatactgtggcattccctaaatgtcagactggcttattacaaatactcttacatgatatcaaaaagaatctatcattttaccttattccaagctcagaataaatttatcttgactgtcagtactttcaacaattttattctgtaaatttatttaaggctgaagttttgtgttcatttaaggatgttcttgtgttctccatctgaaggatgatgaacagaaaaagacaaggaaatgtgaaattaagatatatatggaacttgaaaataccactcacctgattttttgaaagcta

SEQ ID NO: 31548 - DNA, 1059 bp, Homo sapiens
gacctcaagtgatccacctgccttggcctcccaaggtgctgggattacaggcttaagccaccatgtccagccagccaagtatttggttttaaacatttgtattcctttgtgcaagggattgtattcctctgtacaagacctttaagcacctcttcaagaaatttagtctttgtgtagctgctaaccttactgcaatatttattttcccttattttcccatactacttagttgacaaatggcaatcaagctcacttgttctccctctctctgtctcccccccatgtacacatatatatatcccttcagcttgacttgctattatttttcattgtataaatatgaaattcttggcatttcaatatggcatttgtttagggaaaaaatatgtaggtcactagagaaaaatgttaatttttttcccactgtgaattgccttctgtttgccttatcttttcagatagtctttaaagttgggcaatattcaggcagctatttagaacagtttctcagagtggatttgggtctctcatttgagaaagatttgtagtttcaatgaagtttgtatattataggaatttaagtaaaatcatctgagttaagttttgggcaaatgttaatcagaaagataatctacatccctactttatgtagtcattttggagaaatggaggaaaaggaaaataacaggactttttatagctgtgataaaatgggtaaagaaaaacctccatttaaataaggaaggggagacaaaatggaaggtcctggccttaagtcaaattccagatagtgctttcaatatccaaagcttaggccttgtttacttatagtaatgctatatttttctttatctgccctgtgatttcgcttcgtgtccttcaaagtttttttattgtaattttaaaggaaaaaaacaatgtatttttatttgataactaggcaaaatcatttgccattttttatttcataaatatttatttttctatctcatacaatgatcagttttactttaaaaattctgcatttctcttgcctctcatgtacttcatccagttatt

SEQ ID NO: 31549 - DNA, 1052 bp, Homo sapiens
aaacattccatgctcacggattggaagaaataatattaaaatgttcatattgcccaaagcaatctacagattcaacactatttctatcaagctaccaatgccattcttcacagaattagaaaaaatattctaaaatttgtatggaaccaaaaaagagcccaagtagcaaaaactaaaaaaaagctgcaggcacattacccaacttcaaactctactagaaggctatagtaaccaaaacatcatagtactggtacaaaaacagacacacagaccaagggaacagaatagagaacccagaaataaagccaagcacataaaaccatctgatcttcaacaaattcaacaaaaataagcaatggggaaaggtcttcctattcaataaatggtgctggaataactggctagccatatgcataagaaaaaaaactggacctctgcctttcactatgtacaaaaatttactcaagatggactaaaagtttaaatgaagaactcaaactataaaagtcccagaagaaaacctaggaaacactcttcttgacctcagctttggcaaataatttatgtctaagtctccaaaatgaattgcaacaagaacaaaaatgacgagtgagacctaagtaaacaaaagagcttctgcacagcaaaagaaattatcaacagagtaaatagtctacagaatgggagaaaatattcataaactgtgcatctgacaaaagtctagtgcccagaatttacaaggaatttaaattaatcaacatgtaaaaaataatctaattaaaaaatgggcaaagacaggaacagacacttctgaaaagaagacattcaggcaaccaacaaacctatgaaacaatgctcatcatcactaatcatagaaatgcaaatcaaaaccacaatgagataccatctcacatcagtcagaatggtgattattaaaaagtcaaaaaaaaaaacagatgctggtgatgttgcagagaaaaggaaatgtttatacactgttggtgggaatgtaaattagttcagccactgtggaaagcagattggagatttat

SEQ ID NO: 31550 - DNA, 1072 bp, Homo sapiens
cctggtggaagtatactttggcgtaatacattaaagccttgcagtatttagtcatatcagagtttaagagagcaggagaagcatgagatgctattattagggacatgggcctcccagtgactatttcataaggggtcaatttatgttttccaacaggattgaatctgattgccattaaaaccaaaaggtagtacctttggccaaggcaactcaattgattcagttaacttggacagtttcagttttcaaatgccatttgttctttcaagctttcctgaagactgagggtaataaggacaatggtaatgcaactgtgtcagtaacaccttatttaactgctttataacttgctcagtaaaatgagttcctctatcactggagacttttagagggatcccccataaaggaaaaacattttctaataatttcttagctatggtcacagcatcagctttcctacatgggaaggcctttatccaaccagaaaacatgcaaactattacaagaacatactgataccccattgagggtggtaactgaatgaagtccatctgtaaatgttcaaatggtccatcaggtggtggaaatatactgcctctagtttttctgggattatgagtttgacaagtcaaacattgattataagccattttagtaatgtcagaatagtcaccccaccagtattttttcataatttggatcactttgtctgttccatgatgagctgtggagagctttcaataatggaagcttcaaagattcaggaaggaccaggcggccgtccgggccctttgtgagtctttgcttcacgttaaatttacatccttttagataccagttttgtttttgcaaatcagatgcgttgcactgtttattaaataggtcatcgtaaggaaattggcttggattaatcttatggagttcattcagattgcgtatcttgatggttccagcactagctgattgagcataaaaatctgctaaagcatttcactgatatttgggttcatttctacaagtatgagcttcagtcttaataacagcaatctgcatttgtaacaggatagcagaa

SEQ ID NO: 31551 - DNA, 1048 bp, Homo sapiens
taatctgaaactggttcatcttttcttttcttttttttttgcttacaagattgtatgatggaccaattttttgtggaaaaattttaggaactgaatgttaaaaggttttcagcgatttttctagctatttttggtccttcttgtgaggagctcttagagggccctttaaaatgtcctcctcaggtttgtcccattctgctgctgccatccatttctgagcttcaccagcccccagtatcatatgaataaattggtaaattcatgaagtcctggatcgtaagctcctattaggattctaaattcctcagtaaatttttgagacttttcccttggaccagggaagtccttcacaatggggctaagctcagttttagaccatggagtgaaagtagttacagcaggcaggcctggctgatataaggtctcactttgtaagacatctgtctaacttccttttttttttttttttttttttaaatcatcttcagggtgaaagtgtaatttaacaaaaagtttagtggactcagagtatgtaggtagagatggacaaagaaggaacagtccgagttagatcagtcaaagtacagtcctctttcttcatgtccttggtctgttgcttaagcttttcatttggtttttgcaaagaatcttttaaggaggcactttttgattcacttagtcttttggaggcctttgcgtatccatgagacaatacatcccactgtatttgtgggggctttgatcccctttttctaatatgccttgcaaacaattttatccaaattaaaacttctccattgtggccattttaattctaagttttctttagtgaggttaacccattttactgaaaatgcacatgttctgggcccataatttttatacgtaaaattagctggagtccctgaagatggagtcccagactccttggattgagatgatcccattattaaataaggtacttatcagaggtctgaggcctctaactgaatccaatccagttaattatcaaatccaatttgatcttggatccagtccaggctaagta

SEQ ID NO: 31552 - DNA, 1051 bp, Homo sapiens
ttatgtatggggttatttatggtatgttattttcaacacatattcattaacaaaatccatatgaaagttataggagaattgctgaggtagaataacatactttgtttgtatttataatactcatatatttacctgacgttttctgagtcttcacttttttcattcttttggaattggtaaaataactgattccttgaaagtttttttctaaataatacctagataatagatttatagaaaaaatattgtatgaatgttttaacattcatgtaatatggaacatgtaatttttatactggaggttattatagttttaatacatcaaagaaataatgtttattttggaagcagaaagaagaaataatttctatgaataggttttcatctctttccttgttcttcaactttgaactttttatattccaaattttaattatatttcaaaagatttttttcttttgccttttaattttatcttttggagaaaaatgtatgtcaaaatgtatgtacgtgtatttgtcttttgatttgatcttttttgaccctcttttgcattgacattattttaaccaaaggacactcttgattgttcatgctactgggggaaaaaaaaataagtagaaattagcctaatagttgtggcttattttgagtgaaggccttagcccttaaggcaattaaatttactgtggagagaagagctaatctaatggggagaaggagcctttgttacaggtgtggtagtgtggttctttgagtgacaagatttctgtttgccagattggttaggagaagtctgtgtgtctgctttctctcttatggcctaggatcactgtggtgaatgaaaaacctgtctcagggcctgactcagataattcccttaaaacccggctaaggtcatagatgaataatcagtaattgaacagaagctctgcaatagaaaagaagccagataattatttttggaaatttaattatatttacagattttattttatacagtagacatggaattaaatttattacattatgttctaatttactctttgct

SEQ ID NO: 31553 - DNA, 1027 bp, Homo sapiens
aaaggccccacctctcaatactatcacattgtgaggctaggtttcaacatatgaattgtgggagacaaaaattcagaccatagtataatatttcaagattacttaaactcttctctaccaaactcattaacttttaggttagcacagtattttcattgatattttggtttctggagttattactaattttcttgatctgatgttataattaaaaaaaaacaggactttgtacgtgaaatgagactgagataaggaagctgattcagagatggagatttaaaaaaagagagatgagagattgagatctgcagtgtcaaactgacaatagccaggagtcaggagatattaagagactatatcatctgtgattgttaatgattatttattgttatttataaatactactgtattttatatattatatacattgttttaaaaattatttttgtaccatttcttgaaagaaaaatgtctaagcttgggaaaatatttattgaaaaatgtggtttgtacatctgaggagtgtatcttgcacagtaggtgcatagatttcttcctcttcctgttccacatggccttagcttagaggctgtgtggccatcacttggtatttagggtaagactggtgcacaaaatcaaagacaggtaaccttggtataagtgtagtatcatgtaaatagcttttctatgtctaattcttgttttcttcctactttttcaggaggtcaatttcagttcatttcaactatctttacataatagtgctttagtaacaggcatggaaggaaagagacatgtccctagagtgttttcttgaaatctaatagatgattggagtatttaccatgcagttgtgtatatacataagcagtgaattcgagaggaatttttaagctgtaaaaaaaagcattgtgtgccttatagacgcgagtgagaaatgtggaatatggctgatccaaagggaatgagttatctcaattgattaatcacagtcagttacagattgaactctttgttctactctttg

SEQ ID NO: 31554 - DNA, 1030 bp, Homo sapiens
atctgttcatggactccaaatacaagaaattaatttgacaaagtgaaaatataaaagatgcatcatataaatatgtaacttttctggagtgggtagtataggtaaagccaaaagaaacaaattcaagcagaggaattttggtttctgaaaattaggttgtctgtagggtccctgtatttatacttagaacaaaattaggaatttctgtttatgtggtccagttattgagtcaccctaagtttgtaggcatcttacctacctacttgctccccaagtttttatttctaaaatgaaaagcattgctgtagatgaccagtttacactaaagaataacatttatttatttgttttagctaaagtatatggacagggaacattcatattcttgtagaagaaaattattttgacttttgggcaaaagcatgtagttcttatacactttgacaaactcattgcgtacatttttcacattaatcaaagtcagcacaaataaattttcaccttggaccacggagggtttgaacactggaaatttgatataattctggttgctaaagaacaagttctaataaaagcttaagtgtataccaatatgtggctgttggtgcaatcagcaggtccgtaaaaatatgattttaatggttaggtaatcccacaacggagatcccaaagttcatgtttggaagagacttttgggtcaaagtgaaatcagtgtaatgaatttaaaattatactctgagatcttgaaatcagctaattatgttacatcttattagctcagaaaagttttgaagttatatacaaatgctagtcaggaaaaaagattcagtcatgtaattcttgtacattctactatttaaatcaaccaatattatagattatgatttagtgcagtaattctgctggctaaccttatctcatttggtggtggttagtacttcagagtactcaccatagtttcatttatgttttcagcatcacttcctggtttttctcaattccatggctgtggaatcaattcatatgtata

SEQ ID NO: 31555 - DNA, 1035 bp, Homo sapiens
tctagtaataatctaagttctgcattgctttctcctttccttttctttcttcctttaaatattcttctttcgagacatatctcattttaacttttattttcattttctgtcacttttggtttttctcatgccaccttggcaatgtagttaagtttgtgctaacgtagaagattagtgctcaaatctgaattgccatttactactagctgtgtcatcttcggcagggaatctcccagagccttagcttctttatttgtaaaatgactattatagtggttatttctcaggattgttagaattacttccgcaaacatttgcaagtccctggttcataatttcatgctaaattagtaccgttacaggaagtggtatatcattgtcacagtgtatacaaatatatttcttttatatccctcgtgatataattatcaagacagtgaaacaattcaatgaattttaccagcataacacatttttaagtgattggaaaatcataagtatcttttcttatgtttttagtagaggctttgcaaccccattactctccgctcccaatttgattatttaaaggaagtggattactaactcagatatgtacactgtcaagccaagttctatgttctactgctggttttcctgagaaagcagtcatataactcccttgaaatgatttactacttttgtacatataaaattataatggtgttaatgtaccaaataatgtccttggaagcaagggttttgccagtaactcagctgcatcagtcaccctcaaggagatgagccatgactttgttcattagttggaaaagagtctggagagtgccttttcgttactgtttatctttggtctgacacttgggaatagggtcatggatacttcagccagaaaactttccaaatttaagttattaatgtattataaggatcaaagtttctagtatagcctgttcaattagaacatagtgtgttggttgattggatttggagaaagggaggcaatcaaatttttactacagtttcagcctgttacag

SEQ ID NO: 31556 - DNA, 1032 bp, Homo sapiens
ctttcattattaatcccatgaagtccatgttacagaagattttgtctacaacagtgcagttacattcttctcgttagaaatacaaccaccagttagagttcctaatcagtataaggaagtagttgttaggagaggggatgggtttcttgtccaaatgaagttttccatttgagtttttgaagtagtgaaactaacccagcgtttacaggccccagaaatctgggaacctcagctttcaaagtactgtaccagtctttaacagttttcctggacgtgtgaattgatgcctccttctgtaacatgcaggagtgttctgtctgtcttcattgagtgttaaaaaataatcatgcctatttcaaggaaaaaatctacagaactaagatgcagaagataagtgctagatttaatcatattccttcatctatctgtttggttcaacctttcatcaactaaaagatgcaccttttttcttgtgctaactctaagattttagctacagttttgagaatcttgagtgtagtctcttgtttaccttttttcctttttttgtttcccccacaccctagattcatttaaatactgaacttctaaagggcaagtatatagtgtagtttaataaaaagcaaaccttttcatgaacaatatatattacataataagaagcgttcctttacttttcagtactctagtgaatagctttctacagtagaatctcacttagagggtgtcttaaagcttaacaccaagtgctcaggcagcatgttatacaacagttccattaaggtacatttggatctttggatgtgtggtttgcttaaagtacactgcattagtaagttggcagcttgctttctttaaaaacatcaaaagttttaaaaggtttatttcagggcatgtgttagtgttttgtgtgtggttctttgttcctgttctaaactgttattaaccactgaagtgaaccttctcccgggtttggccttttggtattcacagtgtattcaaaacctaattacagattagtctatatttgag

SEQ ID NO: 31557 - DNA, 1050 bp, Homo sapiens
tctaagacccttttcaacccttgtgacttaagactctgtgaacttttacaaagtatcttgtgatctggacagatgatctgttttgtaccctgcagatgcatttaaaagaataaatctggcagaatggtaaccttgcttcattctgaccattttatcaaagttaccaaggaccctaaggaatactttctcaagtatagttttaacacataggattcctaattaattgttattctaatatttgctgaaggtgtttatatgctatacagtcatacacagattcttcttcaattaattttagtatatgcttttaacttatgtttgataaaaaaattatgccaatattgttaggtcggtgatagactatataagtttagtaaaactagcaaaggtaagcggttaggcttcaacattgttgtgatcatgcagtcatcaactttgtttagaaattttgcatttatctcccctgacctcagtttgttaaatgggtttatttttacagaatcgtactcataatcagctctgcatacatctgaagaacaaaaacatcaacgtcttttgtccagcctctttttcttctgctgttccacctttctaaacatacaataaagtcatgggataaaaataatcgatgtatgttacgggcgctttaaccatcagctgcctctcgaatggaagaacagtggtaatggattaacatcctattttgttgtactaaagtgacaaatcggaataatataattggtatggccattaggttcagtccttgaagataagaaacttgttctctgtttgttgtcttatttgtggtggcactcgtttaatggattaactgaggttgctcaatgttcagtttcttttccagaaatacaatgctaggtgttttgaaataaaacttatatagcaattgtttaaagttatcaattgtatataaaatcacagtagcctgctaaatcattgtatgtgtctgtagtattctattcccagaaactatttgaccatgataattcagtttatattcaccacatgaaagaaaaatgggtaacagaagaa

SEQ ID NO: 31558 - DNA, 1829 bp, Homo sapiens
attccaagctggagaaggcggacattctggaaatgacagtgaagcacctccggaacctgcagcgggcgcagatgacgggtgagggcggctcgccgcgtccccctgtgcgggcgtcccgctcgcctcgcggtgatttcttccagacttccgcccgtggttgtgagaggcattcagctacattttactgccttggctcactcttgcgttcccacggtctggggcttatttatagccacaactccaagttgttactgttccggaaagggagggaaagaggttgcagccgcgagggtggcgggcgccgggtaggggcgaaaggacttaggactgtggcggtttggaactgcgtggagcctgggggtcactggtttagcactccttcccgttgcagaaggggaaatgaggcttggatgatggattgggaggcattgtccaaggtcacatcgcgcgcgggggtgggggtgacagatctggggctgagataggtttaaatgcagctacagggaatcgggaaggagtggctcggcttttggcagcaacgctagtgtggagaggtggctggttttttctaaacccatctcaccctccctgccggaggcagtttcacgggcgcatggtcagggaggcgcgccacagggacctcccagggcggaggcagtggccacggggccagggccgttcggtgacccgtctgtctctttctggcccgcagctgcgctgagcacagacccaagtgtgctggggaagtaccgagccggcttcagcgagtgcatgaacgaggtgacccgcttcctgtccacgtgcgagggcgttaataccgaggtgcgcactcggctgctcggccacctggccaactgcatgacccagatcaatgccatgacctaccccgggcagccgcaccccgccttgcaggcgccgccaccgcccccaccgggacccggcggcccccagcacgcgccgttcgcgccgccgccgccactcgtgcccatccccgggggcgcggcgccccctcccggcggcgccccctgcaagctgggcagccaggctggagaggcggctaaggtgtttggaggcttccaggtggtaccggctcccgatggccagtttgctttcctcattcccaacggggccttcgcgcacagcggccctgtcatccccgtctacaccagcaacagcggcacctccgtgggccccaacgcagtgtcaccttccagcggcccctcgcttacggcggactccatgtggaggccgtggcggaactgagggggctcaggccacccctcctcctaaactccccaacccacctctcttccctccggactctaaacaggaacttgaatactgggagagaagaggacttttttgattaagtggttactttgtgtttttttaatttctaagaagttactttttgtagagagagctgtattaagtgactgaccatgcactatatttgtatatattttatatgttcatattggattgcgcctttgtattataaaagctcagatgacatttcgttttttacacgagatttcttttttatgtgatgccaaagatgtttgaaaatgctcttaaaatatcttcctttggggaagtttatttgagaaaatataataaaagaaaaaagtaaaggcttttatgtcttcgaactgattcttccagaatatgtaaaaaggcttttggtggaatttgaattacatgtaattggtaattcaggaattgactcttttgttattaaaagaacatttgtaaaaatccatcaaacttttcaccaatcctccatgaactaaaaagactaaattccatttactttacaagcagccatc

SEQ ID NO: 31559 - DNA, 1096 bp, Homo sapiens
atttaaaatagttggcatgaatgaatatgtaacttcttggtacttagaaaaataatttaggccattctaaaagtacaactaacctctattagaggagaagggctgacttagagtgaacaggattcccaccctctacggacagattcgatttcacttgctggttttcttttcaggatagcgtcaaataatgtgcaggaaaaggaataccgtgtgtgggagtgtgagtcttatgtgcacgaagaacaggacagttagcatcgttcccacctccagagatcctcacggtggtcatgcagcctcgtgtgctcagaacagtgtgaggtggatgaggcactggtggatgtttgcgtggcaaggatggtgggaccccaggcccacgttcttcccgttagctttctctggtgttaactgtttagcatcatttctgctgtttttatagaacaggcgctttttgctttttgtatggactcaagtgaaataaaaactagcaccgccgtaccttataaacatgacccttttctatctgtagttagaaaggtacaggcagtattaaaagggtagctacttcagacactgtgtctctgtggatctgacgacagctcaggaggccagcacatgcagagccggcgtctcatccccagccgttgctgatcatcggcgaaggcggagttcaggtgcctcgctcctgacgccacaggttgtgcttgtctcactccatagccctgcactttgtcgcagtgaggtctgataccacttctctcagagcagtgtagaaattttgagcttctctttctttgaaaatgcagaaaagaacattttgtgagaataccctatacttgacatctgagaaaccgctcacacatgcagcatctcacgcagaatgctgtggagtcggactcaaaaggctgcacgcctgtggtcctgttgataggacattctggacaaggcacatctagggaagaaaagggattggtggttgccagaggctgtttcctgattgtgctgaggcttacagacacagctctgtgtgtgtcaaagtttgaaaaacctacattaaaaatgatgagtttattttactgtatctttacgctttaat

SEQ ID NO: 31560 - DNA, 1041 bp, Homo sapiens
gtgtatttttagacatagtctccctctgtcacccaggcttgagtgcagtggtacgatcaggtgcacgccaccacatctggctaatttttaaaaatgtattctagggacagggtctccctgtgttgcccagggtggtcttgaactcctgacctcaagtgatcctcctgtctcagcctcccaaagtggttacatgcatctatccatgtgttaaaatcggtagaactgaggccgggtgcagtggctcacacctataatcccaccactttgggaggccaaggcaggccgattgcttgagctcaggagttcgagaccagcttgggcaaggtggtgaaaccccgtctctaccagaaatacaaaaattagctgggcatggtggctcacacttgggtagtcccagctacttgggaggctgaggtgggaggattgttggagcctagaaggcggaggttgctgtgagccgagatcacaccactgcactccagcctgggcaacagagggaggagacactgtctcaaaaaaaaaaaagaaaaaagaaactgtagaactgtccaccgaaagaaaaaagtcaattttaatggatgatcaatttttaaagcgttataaacaaaaggaaaagagacaccagcaagcctagaagcatttgagcagaccgtcaagagacccacagcctggtcccgaggagaggcggtaggcgggacagggcctgtttgactcctgcatttcatacctcctatctcctgcatgtgttacctattgaagaaaaaatacatataattttataaaaaaaaaaaacctttaaaacttttttcaagacatcttggaaacacaagagttgcaaatcttggccgtgcgcagcagctcacacatgtgatcccagcactttgggaggctgaggcaggtggctcacctgaggtcaggagttcgagaccagcctggccaacatggtgaaaccccatctctactgaaaatacaaaaattagccaggtatggttgcaaactcctgtagtcccatctactccagagtctgaggcaggaggattg

SEQ ID NO: 31561 - DNA, 1049 bp, Homo sapiens
tttgaggtgcactggaggaagcacaccctgtcctatgtggacgtcggcactgggaaggtcagtgtggagctcgttctcaccacagcccagcacccacacggccccgcccaggtctgcgggctggccttgctgatggtgaacgcggaggagcaggccagatttaaatcaactcccgacagatttgaggcaccgctgaaaaaggcactctgacagcagtcgggcttcgggctggaaacagaatccagtgcctgcaggtggttcagaggagccttaaggaagggttgctctgtggtgtgggccagatggaagtcactgggcaggagcaagtgtccaaggcctggtggcaggggaggagatgatgattgtggacctagcgagaaagtcagcatctgtgtggtggggacagagccactaccagaaaccagtcccgagccaagggagcccagaagagacccctcccctctcttcccatgggctgggccaactggaagcatctgcaggggagcagaggggatgtggtgcagcccttagcatcccctgggcactgagcaagcagagaagggcagaaatggaggcagggttggggtaagcagcgtcctgggaacagccagccgagggtgtggtaggggggttgcagcttgttccacacaagcacagcgtcttgggaacagccagccgagggtgtggtagggggttgcagcttgttccacacaagcacagttcacctgtgtggcatttccactgggcattgagattcagaaatcatgaagatagaaagcttttacccttaagcttttcataacttgtaagggagagtcgtataatcacttagctgtgtctgtggaagttacctttggactctcactatcatctagtgtgtctgtgattcaggcagtgggtcattttcagaatttatcatgaaggccatttcctgatagtatagagaggtcacacttcactcgcttagcacaagtctatttttaatgtttccgggttcaggttttttgttttgtttttgttgttctgagatagagtctcatctcttttgc

SEQ ID NO: 31562 - DNA, 1027 bp, Homo sapiens
agatcaacatcttcaatcactggaatgatggcaataatctaattgggttcattttatcctctatctaacaatgacaactcattgcctacacagcaggtagaaggagtttgttttcagaattgccctctgacctatttaagacgctcagatattccctgaggctccttggcctggccacaaaggccctacacattctggctgcttcctcctttccagcatcctctctcacgtctcctctcctcagttccaccctcaggaggcaccagaattcctcacttctttgactacaaggcaccgtcttactcccaagaccagtgaatccgaaggtggaccaccagctgagggactagattccagactgaatagaacaactttccctgtctctccacataaagtgtgtttgtttttcctcttacaggtttccttaatgacaacaaaaaagggagtaatcctacccactgtaagagtcatgactcttgattgcagctgacagaaactcatgacagcctgctttagatgaagggggagagaaggactggaagaatcttggagttgggaatgtcacacgtaattgaaggaagaacaagaaaactatagtaaagaaccctggggtggtgatgtagtcatgggccaagtgtcctggaaccctggggtggtgatgtagttgtgggccaagtgtcctggaaccctggggtggtgatgtagtcatgggccaagtgtcctggaaccctggggtggtgatgtagttgtgggccaagtgtcctgggttttgggtggagaaagagtcccctagataagttattaggtgggtgcaaaggtaattgcagtttttcccattattttaattgcgaaaacagcaattacctttgcaccaacctgatggagtcccccttgccatgcttctctctgtgaaaaaccccaagccgaagtcagcataacatccacaggactctatgtttgcaaaagccagcttagctatattacatgtataagcacattttttcaataagtcagccttagcttactg

SEQ ID NO: 31563 - DNA, 1044 bp, Homo sapiens
ggtaagtagctgaactgaggttttgtcttggctgaaggttaacaaccagctggtctgaatttcttcttcccattagagcagtctgtggtcatatcatttgacttttgttgttgttgttttttctggtctttctctcatcagatttgaccaactctacctgacttggtcaaatccaagtgagaattccaaattatgggtaacaaagcctctctaatttggctaaaattccttgcagctgcaaaagaggaaaaaactaaacgaaaacaacaaatcacgtgcttggtttctgtgtttgctttctgtcttaaaaaacaaacaaacaaaaacaacaaatgctctttcacttacttttcttcctccctatacctcctcctgcctttgccatctgcgggaccaaaaaaatctagagaaggcttccaatgactcgagcccctttaaaggatccggaacaaaggggccactcaccccttccagggtgctctgttttctttgtggagtttcaagagtgatgggcggattcttcttaggtctaaagctctgctgtcttcctgtacggcatgacctgacctctttggctttgggggaaccagagatgaccctgcactgtgagaggatttgaccttggcgtgtgtaatggcagacgagaactacaaagaaggggtggctgagcacagtttacagggaatggtcttggctgtttttttgtttttttttttttctcttctaggaagctgtgatttaaggatcctaattctagttcagagatgcatcctaaagggtcttctctattgctttttctcccaaaatgaatctcagtttgggttgtctatgtatttgcatgaggaactgaactgttgttgtcataggtaaatgagagattgagttttctcagctccaaagagaaagggcgtttgctcctcccagccgagtactccatagggttcatggcgcctctacttgccagagtttatgtaaagtggaagtaatatggtctttctgcacatttacattaaaaaaaaaggagccctgaggttgacctgcaaa

SEQ ID NO: 31564 - DNA, 1028 bp, Homo sapiens
gccaactgccgatgacagcatttttctgttttgcggttgtaccgcactctattaggtttcctgcaggtcccatcaaaatgcaaaccctacctcctcgctttgaagcgactctccccgtactcgccccccagcctctaaactaatggcttagctaaccgattgcgacgagtgaaataccagaacccttcatgccaaagaaagcacttagcgcggggttgccacccagtaggttttcataaacgattgtttagtctgctttccttaaataaattggccatcacgtctcccgttagggtcttaatgagaccccaagaggcgtcatttgtataaaaagaaactctgtatatgcagtagaggaaagaaaacatatagaaaggagactggaaaagtgtgctcaaaacgctggtaacggttacctccagagaagagaacgatcgggacgatggtcaaagcggaccttacttcgagtttcttatttatctttttatttttaaacaaacattattggccgggcgcggtggctcatgactgtaatcccagcactttggaaggccgaggtgggagaatcgcttgaggcaaggagttcgagaccagactgggaaatatatcaagaatccatctcaaaaaaaaaaaaaaaaaaaagatattcgtgtgttccttgaataattttaagtattttgcaaaacagttacatgagtggggtgcgctcaaatccaataatcccccaccttgcccataaagttaaaagagattccaagtgattccgtttgttttagcctcccaccttccaacctccacccacatattttgcatcttcataggaaaatggcccaataaaagatgggatgagctgtctgaagaattgacacatcctaagagtaaacatgctattggggagaattaagaaagagccatgtcaaatcaaggggtatagttttttgttttgttttgtttgacagggagtctcgctctgtcgcccaggctggagtgcagtggtgcaatctcagtttactgaaagctccgcctcc

SEQ ID NO: 31565 - DNA, 1024 bp, Homo sapiens
ttaattaattaaaaattagctgggcatggtggcacaggcagcttgctcggagggcttagatgggaggactctaaccacccagcaggttcaccttgcccactgcctagatagagctgatttaccaagacaggaaaatttaaacaaagaaacagcgattcacagccggctgcatgggagaccagagtgttgtgttttattgtgttttgttttgttttgtttgagacggagtctcactctgttgcccaggctggagtgcagggacacaatctcggctcactgcaacctctgcctccagagttcaagcgattatcctgcctcggctgccctcgtaactgggataacagtcgagcgccaccacgcccagctaattttttatatttttggtagagacggggtttcaccatattagccaggatggtctcgatctcctgacctcaagatccgcccacctcggcctcccaaagtgctgggattacaggcgtgagccaccacgcccggcctgggacgggagatttattactactcaaatcagtttcccctagcacttagagatttttaggataatttggttgggggttgggggttggggggcagtgagtcaggagtgctgattgattggttcggagatgaagatgtaagaagtgggagctgtcttcttgtgctgagtcagttcctgggtcggggccagaagatcagatgagccagtttatccatctgggtggtgccagctgatccatcaagtgcagagtctgcaaagtatcccaagcgctgatcttaggttttacaatagtgatgttatctccaggagaaattcagagagggtcagaatcttacagcctcctcggaggttgcagtgaaccaagatcaaactactgcactccagcctgggtgacacagcaagactccgtctcaggaaacaaaagaaaaagaaaatgaaaaaaaacccacaatcttacagcttccagcttcatggctcgtaaactgtaatttctatcttttggctaatttgttagtcctacagaag

SEQ ID NO: 31566 - DNA, 1048 bp, Homo sapiens
ttgtagaagagtttaacattaactcctattttgacttacaaatcttgtttctcatcactaaaatgcttttgaattaataatccaacccacatgagctgagagtttttcttttgttagaaaagaaacagacatctttctgtatgaaagtataaattgtatggttttagatacataagaattgacaaaagcgagcgaaatctttgtacttctgagttcttgctgtatgtatgttttgttttaaatctgattagggacacccagcagctggccgggattcttggattgctccttgggagttaagattgtcaatactcctgtgaagcaagggatttcagccatagaacaaagatttattgttgccacctgaaaagtttacaagtatttattgtgtatttgatacattgcttgaaaagatgaaatctgttaaagattcttttcgatgtccaggttaagaagaaacctccttgtattgagtgaaattatatgttaaatgtattagagaatgtaggtggtatagaaattgatttttcttggtgtagaacaactcagttcggcaaagtttaaaatttgattaaacaagagaagtggttcaggttgaagatggacttgttaggaagtgatcaagtcctttaagtacttgtttctttttcaggttgtgatgtggccattccgaattttgttgagagtttggtttataattgtctcttttgtcttgttagtaaacattcatttgcaacagttttgaaggtgctgagtggaaaaccgaaacacatggttattgcgtattggacctagaatgaaataattgcctcaatatttaacaacaagccattcttatctcaaagatttaaattcccgaatgtcccattcgcaaatcatatgcaattgaagtgagcagcatgagcatctgggtcatgagggccttcatttacgtaaatttgtcactaaaacccagtagtagctctacaaaatcttaaactgctgcagtgctcaaggagatggaatatctttgtcattggtgctgaggagagcatttcggtagaagaca

SEQ ID NO: 31567 - DNA, 1281 bp, Homo sapiens
aatatatttaaaagaaaaaggaaataaaaatatccaattaaaaatcaaagaaatagtggtctcaccttatgacatttattttattttactatttttatttatttatttatttatttgagacagagtcttcctctgtctcccaggctggagtacagtggcacgatctcagctcactgcaaacctccgcctcccgggttcaagtgattgttctgtcttagcctccctagtagctgggactacaggcacctgccaccacacctggctaatttttgtatttttagtagagatggtttagtagagatgttggccaggctggttttgaactcctgacctcaagcgatctgcccgccttggcctcccgaagtgctgggattacaggcatgagctaccacaccgggcccatgacatgcattttcaatgtctaacttctctctctctctccataggtatataagaatgtgattctacaagttccagtgggactgactgtacatacctctctagtatgttctgtgactctgctcattacaatcctgtgctctacattgatccttgtagcagttttcaaatatggccatttttccctataagttttatgtagttaaatgcttcctagaaacctaaataagatctattaatttctgacgagaggtgttcttctagaattaattacttttatcttttgtcttcatttgtggccaaaattatgtttactagaggaaatttgggatcattctcagctaattccaaaatgtagtgctctattgcatggatccttggtaatcctcaagcatcagatgccataaggggaaacttaattctgctaaattaatgtttattttgtgagaagtgactttatcttcatttggggtagaaaaattatttctttatgtagtagagacaaattattctcattttgcaagtactttcaatttaagctacaaattgagaaaaccgttataaataagaataaaataggccaggcacagtggctcacacctgtaatcccagcactttgggaggccgaggtgggcggatcaccagaggtcaagagtttgagaccagcttggtgaaaccctgtctctactaaaaatacaaaagttagctggggctggtggtgggcatctgtagtcccagctaattggaagggtgaggcgggaggatcgcttgaacctgggaggcggaggttccagagagccaagatcgcaccactgcactacagcctgggcgacagaacgagaccctgtctccaaaggaaaaacaaaaaagaagaataaaata

SEQ ID NO: 31568 - DNA, 1027 bp, Homo sapiens
tactcaggaggctgaggcaggagaatctcttgaacctgggaggtggaggttgcagtgagtcgagatcaggtcactgcactccagcctgggtgacacagtgagactccatctccaaaaaaaaaaaaaaaaatacagtcaaatacatagaccttaagggtttttattttttaaagcatatgtacacaaaatggaagacagaaaaatagcaaaacattttggaagctggaatgcagattgatttaagcagtctgcccgccttggcctcccaaagtgctgggattacaggcgtgagccaccacacttggccgatataactttttcgtagtgaagcttcagttaacctgtacggtggctgcgctgtgaactttcacccaaatattgggctccttaaggggctgtttaggcttggggctgtcctagggtcggtgagtatctagtaagagtgtaaaccttctatttcccttgtgtgcgtgttttatctttgaaggaatgttgatatttggtcagtatgaacatacagcagcatggctgggaatacaggggcagaaatgtaaaggaaacgcatgtgaagtttgcttttaattactggaccgttgtattcaagaaccttcaatggcagtatcttgtctttgctccagggtcagattccctaaagaagaagggatctcctacttggagagtacaaattgggcttccagcagtctggcttctatacttagggaaaggctggaggtcttagtattcgttatgtaaacactcattcttgttcatttaactcaactattttcagtaagatgacctcattctcaactggaccagttgaaaagctttccagtccaggaattctttgtttttacataggattgttttaagctgctacgtgtggttagtggctaccatattggatagcggagctgcactatccagtgtggtagccactagccacatgtagcagcctaaatctaaataattaaaattaaaggtttagttcctcacttgcactagacatgtttcaagtgctcaatgg

SEQ ID NO: 31569 - DNA, 1034 bp, Homo sapiens
agaagaatgggaaaaggctagtgtagctgaaatgcagagagttaagaagacagtggcatgaagtgtacctgatccacagatcagggccttgaggtttgtattttggattttatcctaaatgtaataggaaaccattgaatggtttttagtgacattatccactttgtagtctttgttctaacagtactgaagaagatggatgggtatgggagcaaagttgatgtgggcagaacaggagaccatttcagattcatggtactttgaagtagaatgatagcaggagagatggaagatgagtgtgatgtaggaagtaaaattaacaggatttggtgataagttggttatggagatgaaggacaaggaagtgtgaaagatgacttccaagtatgtgacttgtatgactggacggcctatggttgtatttacattagaaaaatgtaggacaactagtagaggattgttcaaatttaaaatgtacagtcatataattggatgctacttaagcaggaaaagctgtgtagataatgaacgatgggccgggcacagtggctcacatcagtaatcccagcactttgaggggccgaggcaggcggatcacgaggtcaggagatagagaccatcctggctaacacggtgaaaccccatctctattaaaaatacaaaaaaattagccgggcgtggtgacggatgcctgtagtcccacttactcaggagactgaacccaggaggcggagcttgcagtgagccaagatcgcaccactgcactccagcctgggcgacagagagactccgtctcaaaaaaaaaaaaaaaagataatggaagatgcttatattccatttggggtgggaaaaattacaagcagtgtgggcaaaaaatatacattcatggaaaagtatctgaatgataaacatgagagtgaaagaataaagtcaaatatgtgagttgtttcattaaataataaactaaattattccttcctctagatcaggggtgtccaatcttttggcttccctgagcctcactggaagaagaa

SEQ ID NO: 31570 - DNA, 1128 bp, Homo sapiens
gctcaaggaagtaagagaggacacaaacaaatggaaaaatattccatcctcgtggataggaagaaccagtatcttgaaaatggccatactgcccaaagtaatctttttttttttttttttttttttttttttgagatggagtctcgctccattgcccaggctggaatgcagtggcatgatcgtggctcactgcaacctccacttcccgggttcaagcaattctcctgcctcagcctcccgagtaggtgggactacaggcatgcaccaccatgcccagctaattttttgtatttttagtagacacagggtttcgccgtgttagccaggatggtctcgatgtcctgacctcgtgatccgcctgcctcggccttccagagtgctgggattatagatgtgagccaccactcctggctgcccaaagtaattaatagatttaatgctattcccatcaaactaccattggcattcttcacagaattagaaaaaactactttaaaattcatatggaaacaaaaaagagcctgtatagccaagacaatcctaagcaaaaagaacaaagctgtaggcatcacatacctaacttcaaactatactacaaggctacagtagccaaaacaacgtggtattggtaccaaaacaggcatatagaccaatggaacagaacagagacctcagaaataacaccacacatacacaaccatctcatcattgacaaacccgacaaaagcaatggggaaaggattccctatttaataaatgatgctgggaaaactggctagccatatgcagaaaactgaaactggaccccttccttacaccttatacaaaaattaactcaagatgaattaaagacttaattgtaaaacacaaaatcgtaaaaaccctagaagaaaacctaggcagtaccattcaggacataggcgtgggcaaagacttcatgacaaaaacaccaaaagcaattgcagcaaaagccaacatggattctaattaaactaaagagtttctgctcagcaaaagaaactatcatcagagtgaacaggcaacctatagaattggataaaatttttgcagtctacccacctgacaaagatctaatatccagaatctacaaggaacttaagcagattt

SEQ ID NO: 31571 - DNA, 1066 bp, Homo sapiens
gacagggtttcaccatgatggtcggactggtctcaaactcctgaccttgtgatctgcctgcctcagcctcccaaagtgctgggatttgagtgaccacacccagctgagattgacatatttttttaaaaaaataagcagaggctgggcacagcgactcacacctgtaatcccagcattttgggaggcctaggtgggtagatcacttgaggcaaggagtttgagacaaacctggccaacatggcaaacccccatctctactaaaaatacaaaaattagccgggcgtggtgacacaggtctgtaatcccaggtatgcagaacgctgaagcacaagaatcgcttgaacctgggagacagaaattgcagtgagccaagatcatgccattgcactccagcctgggcaacagagcgaactctgtctcaaaacaaacaaaccccaacaaaacacaaaaaacaaattctggagctgaaaaattcagttgacaaactagaaaatacatcagaatctctcaacagcaaaattgatcaagcagaagaaagaattagtaagcttaaggacagactgtatgtaaatacacagaggagaaaaaagaatgaagcaaacctacaagatctagaagtcacagggcaaatctgagagttattggtcttaaagaggaggtagagagagagagagagggtagaaacttcactcagatagtaacagaactttccaaacccagagaaaggtatcaatattcaggtacaagaaggtcctagaacaccaagaagatttaacacaaataagattacctcaaggcatttaatagtcaaactcccaaaggttgaggataaagaaagaatcctaaaagcagcaagagaaaaggaacaaataacatatgaaggagctccaatacatctggcagcagacatctcagtggaaactttacaggccaggagggagtggcatgtcaagtgctgaaggaaaaaaacgtttatcctagaatatcatacccagcgaaaatatacttcaaacatgaaggagaaatactttcccagacaaacaaaagctgtgagggattttgtcaa

SEQ ID NO: 31572 - DNA, 1028 bp, Homo sapiens
caataagaaatcatccaaaggtacaaaactcactggtatcagtaagtacacaagaacagaatggcttgacacactaattgccgtgtgtaagccatattttgagtaggaagactacaaagcctatcaaaaattataattacaattttttaagcgataatataaaaagataaatagaaacaatggccgggcacggtggctcacacctgtaatcccagcactttgggaggctgaggcaggtggatcacgaggtcagatcgagaccatcctggctaacacggtgaaactctgtctctactaaaaatacaaaaaaattagccgggcgcggtggcgggcgcctgtagtcccagctactcgggaggctgaggcaggagaatggcgtgaacctgggaggcggagcttgcagtgagccctgattgtgccactgcactccaagctgggcgacagaacgagactctgtcaaaaaaaaaaaaaagtagaaacaacaaaaagtcaaagagggggatggagtttggagttaaactgtagagttctgttttcgttttctcttgactttttttttttttggtaacgagttatcagtttgaaatagttgtttataagatgttgtttgcaagcctcatgaggcttttattttgaggtaaccatgtaacctcaaaacaaaaaatctacaacaggtatacaaaaaatgaaaagcaagaaataaaactatactaccagagaaaatcatttcaacgcaaagaaggaagggaggaagggaagaccataaaacaagtagaaagcagataacaaaatggcagtaggaagtccttacgtatcaataataacattgaatgtaaatggactaaagtctctaatcaaaagacacagattggctgaatggaaagaaaaataagacccaaccatatgctgcctacaagaaactcacttcacctataaagatatacacagactgaaagggctggaaaaaccagaactcctctttttccatacaaacagaagccaaaaaaagagagcagagtagctatact

SEQ ID NO: 31573 - DNA, 1055 bp, Homo sapiens
gtctcattatgttgcccaggctggtctcaaactcctgggctcaagcagtttttccgcctcagcctcccaatgtactgggattacaggtgtgagccaccgtgcctggccccttataccattttctaatactatgattcctttctaaacaagagttgaatccaggttaaatatgtatatgagaaaatgaggtaaacaaggagccaagtcttcaggcacttgacacacaggtttagtagattaactggaaaactgtactttgtatatctttatttttgtattattgttgtgtattatagcttaatagttacaagcatgggcttagagtaagacctgggttcaaattctggttcattgcttcctacttttttgcccttgtgcaggtcaaaggtcagcaaatggaagctgctggtttttggtggtttggatagcctgtggtgatggctgcatttctttctcttttcttgatcaggtggatttgtttaaaaagagtcttctgttgattcctattcacctggaagtccactggtctctcattactgtgacactctctaatcgaattatttcattttatgattcccaaggcattcattttaagttttgtgtagaggtaagttaatatactgcctattttttcatttattttgtaattggccaaatagcatcttagctctagatagaacagcagcagtcaaaaccatataggaacagtttatgtcatgaaaatcctccaaagtgttagctgagaaaaggactagaagaggaatctctggctgaggagaggatctgtctaggatccagatccccctctgagatactccacttggattttctctgcttttcccttaaaactacatcttgaatgtggttagaaattgtttttctttgatcatcttagagctaaaattggcctgtatctgcaaaataactcctgtagaataaactataacctaatggaatcaattgacaaaatattagtgttcagctaataaacagatggtgggatacaaaatcaagaaaaatgagtaggtttccggattttcctgcactaccaagaa

SEQ ID NO: 31574 - DNA, 1026 bp, Homo sapiens
agctgggattacaggtgtgcaccaccacacctggctaatttttgtatttttagtagaaatggggtttcaccatgttggtcaggctgatcttgaactcctgacctcacctcatgtgatccacctgcctcagccacccaaagtgctgggattacaggtgtgagccaccgcgtctggccctggtccacttttgttggggggtggggtgggttattcacataacctctgacttcactcttgatgtggagagagacgcacagaggttgagagcactggggacattttgaaactccagcaggcttcatcttggtagatagttcaacagtggacttgagcatatttagtattcagaaggaattttagtattactttccagaagctgaatgttaaccttttctgcagccctcaaaaataaggagtgtatcagaatatctaaggctggaatatttttcatttagttttagttattaatgatgtctgccatgggttcctttcctctgttgagcatgggcaatgatgaagactttctttttgacttgccagtatgtaagtttcaaatgcagcaagctgacttactgctgggaagggctggctaaccatctcataaaacgttctgattacacaaatgccagcgtccacagtcttgatgcataccttgaatacagaaggtctgactcccccttaacaatatgaaatgaagagtctgaaataaagtcccggctttagccgggagcggtggtgtacacctatagtcccagctacttggaaggctgaggtaggaggatctctgaagcctaggagttcaaggctgcagtgagctatgatcacgccattgtactccagcctgggtgacagagcaagatcctctctttaaaaaaaaaaaaaaaaaaaattgttccagcttcttaatgcatattctgcccagttatggggccacagcctcctcctttccttctgtctgctatgggcatgttccatttttcaccaactgatggaacacagcatctgtgttgtggtttctttttaacc

SEQ ID NO: 31575 - DNA, 1043 bp, Homo sapiens
cctggtgccaaaaaggttggggtcttctgccttagacactattaggtctgcatttagtaaaacagaatgggctggtccacaactccaagtgccactgaagtgtttctgggacctttttttttgcagtactgcaagtgcctcgccttagagcagcctttccagttttcacaagaagacatgccccgagtgcggaagaggatttacaaggagctatgtgagtgccggctcatggactgaaactcagcagggactctgggaagtctgaccaagttggagcagatggtttgttacttgaatctccaaacacttagttgaatttttacagatatttcagatcagtggtgttgggccactattgttacctcaaatttattttttgcccttattcatttctccagctaccatgtactattgtttaatgttcagtttggtttcatttttaattttatggttctgtgcgtcccccatatttaatatttattattcaaacgcatgcatatagacagagcatgcagtgaagagtattaaaaaaaaaagcttagtagatttggtgcagcttttgaaacttagttagacgtgaactgaatacaggtttcaaatttactcccagaacctaaaaatgcaagatgtttttgatacaacataactctgagaatagtaagtgttccctggggcattaagggtagctgggggtggttttgacaaatccagtcctgttttactttaccagcggcaactttcaccaacttccctctccaagtgagtcttagagagtgcagtccattccttttgaagggtgagatggaagtggtcgtaaactgactggtgtcttctgtttctggaggcacacttgtaagcacagtggctgctttgggaggagtaaggtgtgagaaaaagcaaccttggaggccagtaacaatgacagatttcaatcgtggttttaggaattataatacgtggcatacatctcataaaggcttttgctgggatattgaattccctgaatttttctgttttcgacctgttaaaaaaatcttaacatc

SEQ ID NO: 31576 - DNA, 2050 bp, Homo sapiens
ccagctactcgggaggctgaagcaggagaatcgcttgaacctgggaggtggaggttgcagggagctgagattgcaccactgcacttgagcctggacaacaagagtgaaactctatctcaaaaaaaaaaagtccacaggacaatagtcattgtatgttaaaaagaggttttcggaactttggagtgagacattagagaaagtaaattcctttcattttactgctgttactgatttgtgaacatggaaaggaggcatcttctttttctacttttctcacacatgtaagtaagatccaaataaatagcctacagtttaagataactgtggtgtaagtgcttaaagtatattaatatggattccattcacagaatgctagaaattccacatgacagtatggcattagcatctaaaaaaagctacaggtttagactgaggagatgaataatagacaaagtcagaaggttccagttttcatctcacaggatgctttaagttcaaaatggtcaggatgtggaactgtctaaagtagtaactaaaagtggtagaagtgcaaatcatgcctggcacttaggcatcccagcactttgggaagccccaggcaggtggatcgcttgagtcccagagttcgagactggcctgagcaacacagggagaccctgtctctacaaaaaattagctggatgtggtggcgcgagcctgtggtcccagcttctcaggaggctgaggtgggtaggatcacttaggctcaggaggttgaggctgcgtgagccgtgattgcgccactgcacttcagcctaggcaataaagcgagactctgtctcaaaaaataaaatacattaactgaataaattttttttttttgagaaggaatatcgctctgttgcccaggctggagtgcagtggcgcgatctcacagcaacctccacctccccggttcaagcgattctcctgcctcagcctcccgaatagctgggattacaagcgcctgccaccacgcccgcctaatttttgtatttttagtaagacggggtttcaccatcttggccaggctagtcttgaactcctaacctcgtgatccacccgcctcagcctcccaaagtgctgggattacaggcgtgagccaccgttcccagccttgactaaataaatctaagagcttccctaatttagcgtcaaacaaaatttccctttccctactctagtaacacatttcacacattctccacacttaccctctgctatatgcgccccttcctttcccagtcacaaggggatttttcccttttctgaatcctcactacaggggattatgagctcgcagagcgcagaaactgtcttccctctccctctagggtttagcacaaggatttggcgacagcactcgataaacgtttactaaataattgggttaatgagtcccgccccgccaacccccaaccgtattccatccctacctccgctgatactgaaaagtctactttgaatatctgctgcctcccctttttccacaaaatatactgtgatatagtccggactaaaaatttccctcttctgaaatccagcaattctccgatctttacatccgaacaccctcaaagtgccgagcttggcgggtccacctccccactccgaagcttccccgagggcggagtgaggactccacttgtgtctcccacgcaccgcgtacagcttccgtaacaccatcctcccagagaaggggcccgaatcgccgaagggcactgcttcgccgatttaaaaaacaaagcaaaaagccccgcatctgcatcaggaaggcgcctctgcctactctgggagagagaagggcacccctcccccttgctacgtagtcgtctgcggaggcacaaccgtggaaacgggagccgccaccaccaccaccgctcaaacctctcggcactggctggggtacagggagcggctgcgagcgaatgggataagcgagcctccagttccccgtcttccagagcaagtggcttcagtgatatccaagcgcccttccagcacccattccctgcctcgccagcaggcaccg

SEQ ID NO: 31577 - DNA, 1050 bp, Homo sapiens
gtgttcctcagtggtagaatgtatagagtgttcttcagtggtagaatgtatagagttgttcctcagtggtcgaatgtatggagttcttcagtggtagaacatacggagttgttcttcagtggtagaatgtatggagttgttcttccgtggtagaacgtatagagttgttcttcagtggtagaacgtatagaatgttcctcagtggtagaacgtatagaatgttcctcagtggtagaacttatagagtgttcctctgtggtagaacgtattgagttgttcctcagtggtagaacatatcgagttgttcctcagtggtagaacgtatagaattgttcttcagtggtagaacgtatagagtgttcttcagtggtagaaggtacagagttgttctttagcggtagaatgtatggagtgttcttcagtggtagaatgtatagagttgtttttcagtggtagaatgtatagagtgttcttcagtggtagaatgtatagagttgttcttcagtggtagaatgtatagagttgttcttcaggggtagaatgtatgagttcttcaggggtcttcacgggtagaatgtatagagttcttcaggggtagaatgtatagagttgttcttcaggggtagaatgtatagagttgttcttcaggggtagaatttatagagtgtttttcaatggtagaatatatagggttgttcttctgtggtagaatgtatagagttgttcctcagtggtagaatgtatacagttgttcttcagtggtagaacatatagagttgttcttcagtggtataatgtatggagttgttcttcagtggtagaatgtatagagtgttcttcagtggtagaatgtgtggagttgttcctcagtggtagaatgtatggagttgttcctcagtggtagaatgtatagatttgttcctcagtggcagaatgtgtagagtgttcttcagtggtagaatgtatagaattgttcttcagtggtagaatgtatagagttgttcctcagtggtagaacttatggagtgttcttcagtggtagaatgtata

SEQ ID NO: 31578 - DNA, 1027 bp, Homo sapiens
tcccatcttttcttaccctcaatagcaatgtcttataagaatttaactcgttatttgggaataaacctgtatttgccactcgttctcatgtaggaattccaacagggaactgttgccagaatagcgtgggcccctctgctgcactcacgcacacaccccactgggttaggaagttctagaatagcacgggcccctccgctgcactcacgcacacgccccactgggttaggaagttctagaatagcgcgggcccctccgcagcactcacgcacacgccccactgggttaggaatttctagaatagcgcgggcccctccgctgcactcacgcacacgccccactgggttaggaagttgtagaatagcgcaggcacctccgctgcactcatgtacacgcaccactgggttaggaagttccagagcaggatcgctctttggattcaaatcctctgctttctgtggtacctactgctttttttttcccttcaggtgcaggcccagttgaatacagaacaactgctagacgatgtagtagcaaagagaactcgtcagtaagtttccatttgttttttaagatgttatttcaaaactcccagaatactaactacccaaattatcatgtacctcagtccagaagaaattaattgaaacccaaaataaaattcagtctgaaagctgggcatagtggtgctacacacctgtaatcccagctagttgggagactgaagcaagagaattgatggagcccaagagttcaaggctgtgaagtgccataatgtcacctgtgtatcgccactgcacaccagcctgagcagcatagctcgatgccactgcacaccagcctgagcagcataacttgattgccactgcacaccagcctgagcagcatagctcgatgaccagtgcacaccatcctgagcagcatagctcgatgaccagtgcacaccagcctgagcagcatagctcgatgaccagtgcacaccatcctgagcagcatagctcgatcgccagtgcataccatcctgagc

SEQ ID NO: 31579 - DNA, 1094 bp, Homo sapiens
aaagtaaaaaaactgcccttaaatagcttaatatctttcgaagaataacagttttaggaagcccaggataacaaaaagctatatatgcattggataaatgttatttgctggggatgacaaatacgtcacctgccattgtgacccacgctcataacatgtatgagctcataacatatgtatggttatgtatcatggaacttgttgctgaagtaactagaatgtattgagagtttatagaacagctctctgggcagctgttactaatcaactttggcactgggattaaacatttttataccttctagcatttagcaattcatgccaattgaggtgtcattgaagagttggggcttgaatgagaggatctctccatccttatttttcttttgctctctgacacgaactttctgatctgtggccttcgtatcctccacatgttaccactttaagtcgtatctggatgtgttcatgctgatccatcttctagtctcaccttccagtttgtcctactttataatccttcaggtttaattcaaaaccgaatttatccatgatatagctttcttttctctggactcataagtaagccccatcactcttagcccttttttgtgggcctgtctgggttccataattagattgtgatcctctaggaaaggattgtacctgacagcctcttctatttcccatagtaaaactagttgattaattgttggtaaaatttacatcatatagcagaaatggcttcttcagtaaaacagactgaagaatatgctagagactggctgcaatataagtgaggtctaattggttttaaatgaagtattttccactctttcatttcttgagtggtttcaatttagagcatctcttcggttctacctttaattcccacatttagattacagtgagatcattttctgttcctcaattttggttccagaccaacattttagattttaatactactataatcttgctttatccaacaataaaatcttgccaaaagtacaagtactattgaagatatttgttgtattttcattaagaaaagctattttataaaagggatggatgatataaaataatacgtt

SEQ ID NO: 31580 - DNA, 1069 bp, Homo sapiens
cctggtacactgagatcatactggacaatgaaaatgtacaaatgctgattgaatttatttaaaaaaggataggagtccaagatcactgttaaacctgtaagactagaaagatggtaatgctattgcttataatagtagctaacatttattgaggtcttaacatattccaggtattgtgctaagctgtgtgtgtctatatataacatgaacaaaaacaaccatagtaagttgtaaatactatttttgaccccattttacgtgtgagaaaattgaggctcaggagattaaataatttgatcaaggtctcccagctaataagtgacaaaactaggattcaatttctgatacatttgaccctaaaatttgtgttattgatcaataattataccgacaagttggtttcctgtaatttctttggtttgcccaatatctttgaagggttggtagcacatctagtgaatcatgtgggacaaatagaaacaaatagaaactagagctttagaatgtagagtgacactttaggaggctgaggtgggtggatcacgagatcaggagttcaagaccagcctggccaacatggtgaaaccctgtctctactaaaaatacaaaaaaatttgctgggcatggtagcacacgcctgtaatcgcagcactttggggggccgaggcgggcagatcacccgatgtcaggagttcaagaccagcctggccaacatggtgaaaccccatctctattaaaaatataaaaaattagctgggcgtggtggtgcatggctgtaatcgcagctacttgggaggctgaggcaggagaatttcttgaaccctggaagtggaggttgcagtgagctgagatcacgccattgcactccagactgggcaacgagcaaaactccatctcaaaaaaaaaaaaaaaaaaaagatgtagagtgaagttaattaaggctatggaataaattcaagagagtcatagtgagagtttataagattcttggaggaaggacgtagagaatggaaaaggtaggcactgtcaactcagggagataccagcattttaaaaggtggaaagagga

SEQ ID NO: 31581 - DNA, 1051 bp, Homo sapiens
tgatggtgaaaccctgtctctactaaaactacaaaaaaaaaaaaaattagccaggcgtgctggcaggtgtttgtaatcccagctactcgggaggctgaggcaggagaattgcttgaaccccggtggtggaggttgcaatgagccaagatcacgctgatcgcaccactatactccactccagcctaggcgacagagtgagactgtctcaaaaaaaaaaaccccacagttttttaaaaatgattttcatatcatagagagtgggaaggtaagccacagtcttcttaagatttccaataaatgcaacagattagatccagaatatttaagaatgtctatacacaagtaagaaaaagacaacccaggagaaaactgagaaaacacttgaactagtactttactaaagaggaattccaagtggccaataaatgtttgaaaaggtgctgaacctcatcagtaatcaagagattgaaaaataaaaccacagtgggtactactttacaagttgatgattccaagtactggaaagaacgtggagcagtggagacactcatacgatgctgtgggagcttgtgggagtgtgaattggtgcctcaactttgaaaatgctctggaacgatccaggaaggtttaaaatacacatattctgtgactcagaaattccactcttgagataaatctctcagagaaagttgtgtgtatgtataccaggatatatagtatgataagactgtccatagcattattcatatttgacaaaatagaaacaacttaagtgatgatcaccagtagaatggataaatcaattgtgtgaaaatgagctggccaagtgcggtggctcacacctataatcccagcactttgggagtttaaggtgggtggatcacaaggtcaggagttcgagaccagcctgaccaacatggtgaaaccccgtctctactaaaaatacaaaaaattagccgggtgtggtggcgggcgcctgtaattttagctactcaggaggctgaggcaggagaatcgcttgaacttgggaggcagaggttgcagtgagctg

SEQ ID NO: 31582 - DNA, 1033 bp, Homo sapiens
catatcattgttgatgtgttagggcctaagtctgccattttatttgttgtttcctttgttttcctttctgtgttctttttcttgccttcctgtggggttcgtgaacattttttagaattccatttttatttctctgtagtgtttttgagtgtatctctttgtgtagctctctttgttgctgccctaggtattacatgagagaagtccaacttgtcagtctattggtatccttattttatgagtttgagtgacgtatagaaaccttacccccttcatgtcccttttctttccctgttatagttgtcttaaatattttctctataaatatttagaatcacatcaaacagtcttataatttttgcttccaatataatttggaaaactcaagagaaggaaagtcttttatatttacccatatttttgcttagtgttatgtactgaattttgtccgtcacccacaaattcatacattgaagtcctaactctcagtatctgcgattgtgtttggaggtagtacttttaaagaggtaattaagttcagatggcatcatttggctgggctgtaagtcaatacaagtgatgtccctgtgagaggagattaggacaaagacaaagaggaaagatgatatgaagactcagagagaagacagcatctgcaagccagtgagagagacctcagaagaaagcaaccctgctaacaccttcatctcagacttctagcctccagaatttgagaaaatacatttgtatcgtttcagctgcccactgtgtggtattttattgtggcagctctagcaaactcatacgctgtgtcctttcttggtgttttaagattcctttctttcaccacttactttctatttagagaacttccattactcattcttttagattacatctgctgctacagactctctcagttttcattcatctgagaatgtgttgatctcctcttgattcctgaaggacattttgctggatatatatacaattctgggtgaacagtctttcttttagtgattggaagatgttg

SEQ ID NO: 31583 - DNA, 1041 bp, Homo sapiens
actcaggaatgtaaatgaaggttagcaaaaccaaaatcatgacctctaggaccttataaccccaaatttctccctagggttacctctgtactcaggactcgcctactgtggttggtcttcaaagacttactcctataataatatttagtgtgaaatcaattaatgagaatattagggttttaatcaaaatgaaaattgagcatttcagatgacaatggaagcttaatagttttatcaactaatttatttctgtatcttattttgattgtagactgctgacaaaatggtttatcacacaaatagtttcaatttttttaacagtttattttataatctcagcacatatagttgaactgagttagcaagtgaagctttattccaacagctacattcgttcgtgtggaagtttgtgttacttaattggtaatttctaacattgcaatttggtacatgtcatatatcttttgttatattgccattttgatttaaaattaatttttaccaaataatatgttacatcattcaaaaaatattaaaaaatattaagaatcttttttttttttttttcttgagacggagtctcactctgtcacgcaggctggagtgcagtggtgcgatctcagcttactgcaagcttcacctcctgggttcatgccattctcctgcctcagcctcccgagtagctggcattacaggcacacaccaccacacccagctaatttttgtatttttacttctttttttttttttgagacggagtctcacactgtcgccctggctggagtacagtggagtgatcttggctcactgcaacctctgcctcccaagtagctgggattacaggtgcccgccaccatgcccagttaatttttttttttttttttgtatttttagtagagacggggtttcattatgttggccaggctggtctcaaactcctgacctcatgatccgcctgcctcagcctcccaaagtgctaggattacaggcgtgagccaccgtgcccggccttttttgtatttttagtagagacggggtttc

SEQ ID NO: 31584 - DNA, 1034 bp, Homo sapiens
tgtgtttgtatgtcttggtgggtgggttcataaatgtggctgtatcaatacagatatatatgtagatattttaaatctatatatatataatttatggagtcatgaatcttttatattttttgagacagagtcttgctctttcacccaggctggagtgcagtggcacgaccatggctcaagcagtcctcccacctaaacctcctgagtagctgggactacaggcttatgccaccatgcctggctaattaaaaaaaatttttttttagagacatgctctccctatattgcccaggctagtctcaaactcctgggcttgtcattcccatcttggtctcccaaagtgttgggattataggcatcagccaccactccagaccagatttttatttttttgaaataggatctcgctttgtcgcacaggctggagtgcagtggtggaatcctgtctcattgcagcctcgaactcctgggctgaagcgatcgtctcgcctcaacatcccaagtattaggattacaggcatgtgtgagcacatctagctaatttactcctggcctcaagtgatcctcctgctttggtctcccaaagcgcatggattacaggcatgatctgccaggctctaaaatgattgtttttaatgtttctgcttcttttttaagcctacagatgaattttcagatctgcctcttcgagtagcagagattactaaagaacaaagactacgaagagaaagccagtaccaagagaaccgcggcagtttggtagtaacaaacggcggaggtaaacataattccggtgacagctaaagtgtttgcaaccatttaactttttaaagttgtctttttcatacccactccttttgttggtgtatctatagcttcttcactcttcttttaaagacttcttttcatatatgattgaaaaatactattttccattgggatgaaactatgatttctggtttcagtcagagttaaaatacactatttctcccttgtttttattttgggaggaaactttattagagacagtacac

SEQ ID NO: 31585 - DNA, 1031 bp, Homo sapiens
gactttgtcaaagtgagtcgtttgaatgatgctgttcaagctgctgactggctaagtgcttatttgtttggtcaggcccgttggtttttattgtccattaaaatgtcgaccatttttctctctgtaaggaatcttgactaaatagagtgtctcttttacttgtgtctatctgcatgaggacagaacaagtgattatcttgttaacggtaaatctgtcattggacatgtcactttactatccagctgccatttcctcaatttctagtgtcatagtaaagatcagtaagatgaaagtgaaagtgctgtgtgaaccataaaaggcccgtgcagatgcaaactgttactcagacctctctccagcttcctcgcttttgtaaataacaaaagtttgctagcctcacaggcttaatcctttgcaggaactttgatttgttcctttctgctctccacacacatccaattaacaacgccattaatatttcttaacgttttgcagcctctatagtagtgcctgaaatgttgtcattttattttacctgtattgcttatctttttgttctgaaatcgtcattttttcttcataattaattatttgtaattttgtttacttaatatctgtctctcatttatctgtaaactccatgaaggtaagaaccatgtctgttttacttactgctgtgtccctagaccttagcaggtcttagctcatagtaatggtcaataagtatttgttgaatgattaaatgaatttttcttgtccactaaagactttcctgtatttcatactttaactagagaccatctcctttaagtacgatgcgtatgtctgttttactgttttacctgataaactctttttttctgaatgtaccagacccttggcaatgacgtttaactctctttctcacctgattcctcttcatccaacaagttcccttgtctcttgttttctataaaaatgcaggcaaatctggccgggtgtggtggctcacgcctgtagtcccggcactttgagaggccaaggtgggtgg

SEQ ID NO: 31586 - DNA, 1302 bp, Homo sapiens
aattctaaccatttctagaatttctttccccatcatgttttatgtgattgttttcatagtagtacgttcagaggtctagtgcctacagtgctagtaactgctgccagggtgcatcctgctgcgtgagctgcatgcctcagcatgacattcctgttacatcagcttccgtggtctgttcgcattgctgtgtattccacaaccttcatttcctttgagatggataaagcaccttttaactgggcggtcttataggtgaatacaatcatcacactctagagttttagtttaagtgaattggcctaagaagcgaataataagttaaaaatgtagacaaatattgagagcctccgacgatccaaacacttaccaaaattatctcatttactcctcgcagcaaccttaagagtgaaggttaaacttatcacctttttacaaatgattactgaggcccagaatgtgacttgtccaatgtcgcatagacagtaagtgcaaggctgggaatccacatctgtctggctgatgggagaacctgcattaaacaccatactgaaactgaaaaccgtttaggaaaccgaaggtttaataacacatggaataagtggtataagtctgagtgccaagacttttttgtcaacaaaacagtggaatttagaaaaacaacaacagcaaaatccccttagtgcgtaacttgaaattcccttcggccgtttgtcaaaacacactcacttaagtcttagttctcagtattcatatctgatcctccaaattagacggcctttaaaacacatctcacatttctttgtctgccaaatagtgtccaaccaacactgtgcaaaaagagtcgtattttaaataaaacctcatattatcaaaactgtgcttcagaaggctcccgttgcttagagtgaagtccgaacgtggcctcgaagctccctcgtgctctactgcctccctctccagtctcctctctgggcttgtgccataccagcattgtttccagctcttcaaatatcataagccctttcccatctcagacctttgcaaatgctgtttcttttacatagaatgcctttccctccctgcatgtaccccttgattaattcctactcacctatcaggtatttgtttaaatgttccatctttaacatgacttttcggcagcccaccacccttaaatcagcccacagtttgacagttaaataaactgacaggagctccagtgcgtttgatgaaaaggaggcccgggaagtatacatagtgtattactgttgtcacggtaatttttttatcatggtagtttta

SEQ ID NO: 31587 - DNA, 1035 bp, Homo sapiens
atttaattttattctttatttttatttatttatttaattattttgagacagagtctccctctgttgccgaggctggagtgcagtggcatgaacatggttccttgaagcatcagcctcttgagtagctgggactacgggtgcatgcaccacacgtggctaatttttttatttttttgtagagtcagggtctcactgtgttgcccaggctggtctctaactccagggctcaagcaatcctcctgccccagcctcccaaagtgctgagattacaggcatgagccaccgtgcccagcttgtttattcttttattatctcttttctgttggactactagactataagcttcatgaacacaaggatattctattttgtcttaatgtaccttaatacactccatccctaccacagttcctgggatatattaggtgctcagtaaatatttcctgaatgaacatataaattctgtgcatctactgattattaaattgttttgtgatgaaaaggtctgatgaacgatatcataaggtaaatgctgaatttgatttaaagaccttgaaacttacgatttgaaatgaagatttataacagctaatatcagtttacactgacattgtcttcgggctgcccctcaagcttctattaatatcagtttacactgacattctcttcgggctacccctcaagctcctgttaatatcagttacactgacattatctttgggctacccctcaagctcctgttaacatcagtttacactgacattgtcttcgggctacctctcaagctcctgttaatatcagtttacactgacattgtcttcgggctacccctcaagcccctgttaatatcagttacactgacattctcttccggctacccctcaagctcctgttaatatcagtttacactgacattgtcttcgggctacccctcaagctcctgttaatatcagtttacactgacattgtcttcgggctacccctcaagctcctgttaatatcagtcacactgacattctcttccggctacccctc

SEQ ID NO: 31588 - DNA, 1647 bp, Homo sapiens
aaagattgcactccggtgactttctgcctcattcctgtgcttggtaaaggaggtttgtttctcatccagaattatttacataagtgctttttctccctgctggccctcaaagagctaacccataaaggaggtaaatcctttctttatatttgcagatgagcaccccctcacattagtaaacatttacgattgctaacaaagagtaaaagaccagcattttttctcctggtcatccgtccattctcctggcctgtggccttgtttctcttaccataaatgctgaagcatttttactaatacaattctgaacttgtacttcgaatatgacatgtagagctttatttccaagtcacacaatacaactcccatctggccatttttccgtgcctcagcacaagtgttgaattgtggagtgactgaacctttgcagcagctgctcacgaggagaaccgtcgtgccttttctggttttggccgcacccggttacttagatttctgctttgaactgtgtcctgagatcctgaatccccgctttgtcggtaggcacaggtccatataagcatttgcggtctggacgtttcaaaggtattggccataattttaataattttagtttggtcagaatgttcagtttgaagatcacccacattccctagactgctcttctgagcccagtctatacgctgtatgtgctgcacacgagcagatgggctggagctggcctctcagggtgggcaccttccagattgtgtttgttatgtgtgactgaggttcactcccagcattctgtttaaatttggaatttatgtgatttctaacatattcaaaccttcttaatagtgaaacagtagcaggagaagtattagggcagcagtccctgttctgtgctcaaggcagtgaatattgtctagctctttcagaatgcgtagcacttagctgctagacgttaatgctggaaactataattgcggttagattctagtttcataagtggtgtttctgaatattcaggaaccttctgaactctgttaacaaaattgggataaaggatgaactcaagtgtgaagagagattgtgaggagcataatatccggtttagaattcagcctgagggaggagcataacatctgggtgtagaattcagcctgaggggctcactggtttggttttcttccatatgaaatgggacagctattttcacaggtcaaaagactgttcactattaatgctgaaacactcaacactgtgatgatgaaaacttcagttttctgtgtcagtaggtgcctttcagactttggggaattgggttggttatatttttaagatgtctcagagttgaaacacctgttaaaaaacacacacaggctctcatgtggtttaggggttgtaattgtacattctcttgagaacacacggcactccctctagtccagctgggaggtgagggtgccccagaaagcacaggcttctgagtgtgaacaccggccgcgcaggtcctagggcgctgctgagaggaagagaccagggaatcagccttggagaaagcacgtctcttccgacagcaaaacactgggcaggttcattttaagtatcatttatctagacttgcagttgcactcaaagtatttctacaaagttgctagtttt

SEQ ID NO: 31589 - DNA, 1052 bp, Homo sapiens
cgcaagagtgacacacagattcgtgaagcattccatatttgtgtactttctagaaacaaaaaatttaaaggttacccctaaaagaacagaaatgtgtaactttcagactcggggacgatgcacctcaagagtgaaacattgagaagttccttaggtggcacatagcatagaattttttaaaaacatggctatagtcaatcattgcgattacactgagcggggtggcttgtgcctgtaatcccagcagtttggaaggcagaggtgggaggactgcttgaggccaggagtttgaggccaccctgagcaacatagtgagaccccatctctacaaaaatgtttttaattagccaggtgtggtggcgcctgtggtcccagctactcagagccgaggcagggtgattacttcagcccaggatttgagggtgcagtgagctatgattacgccactgcactccagcctgggcaatggaatgaaacccagtctcttaaaaaaaaaaatctgattatgttagaacaacatgtcagtttggtgctgtcacatctcttacatcttctctttcttcctcttgttaacacttaaaaacaaaaacaaacaaacaaaaaaaacaaagagggaacaggctccagacaggcaaaaaggtctggctacaaggtaataacatcatttggtattttttgcaattctatttacattattttatttatttatttactttgagataaggtctggatctgtcacccaggctggagtacaatggcacaatcttagttcactgcagcctccacctccagggctcaagtcatcctcccatctcagccttctcagcagctgggactacaggtgtgcaacaccatgtccggctactttcttgtattttttggtagtgatggggtctcattatgttgcccaggctgatctcaaactcccaagcgatccacccacttcagcctcccaaattgctgggattacaagtgtgaggcaccatgcccagcctatttatactaatttctatttatggaaggtgatactggtttttccttttatagtaatg

SEQ ID NO: 31590 - DNA, 1050 bp, Homo sapiens
gagcccccgggccctgaataaccagcaggggtccacaggggtacaccatgggccttgggtgagactcttgagatgtgctgccttcgaagacatggtagtggctatggtgagagactcctgcttgagaaaagcagaggaaaaagtaaaaggggactctgtcttacaccctaggtaccacctcaactataatggggtagagtaccaagaggctcttggagtccccagttcaggccttgactcttttttttgagatggagtctcactctgttacccaggctggagtgcagtggcacgatcttggctcactgcaacctccacctctggggttcaagcgagtctcctgcctcagcctccaagtagctggcattacaggcacttgccaccatgcccggctaatgtctgtatttttagtagagaccaggtttcaccatgttagccaggttggtctcaaactcacgaccccaggtgatccacccctctcagcctctcaaagcgctgggattataggcatgagccaccgcccccggcccaaggccttgactcttggatggcatttctggtcctgttctgggcaagagggtagcccactcccctgaagagtaagtcccaggcctggcagcattcaccacaaactgactggagagtccttgggccttagctgaacatcagcagtagcctggcggcactctccatgggcctgtggtagtagtggccatgagcagcggctcctccgcatgtggaaagcagatggaagaggaggaaggactttgtcttgtggcttgaaggccagcttagctgcaggagtttagagcataaggtagacttctaaggtttttgactccagctcttggctcccagacagcatctctggacccgcccagggcctggggggactggccactctgaagggaaggatacaagcctggctgatttcgccacctgctgattgtagagtcctagggccttgagtgaacataggtggtagccaggtagtggttacagccttgggtgagaccaggtgctgtgctggcttcaggtatgacctagcac

SEQ ID NO: 31591 - DNA, 1031 bp, Homo sapiens
cagagtctcattctgtcaccaggctggagtgcagtggtgggatcttgcctcactgcaagctcccaggttcaagcgattctcctgcctcagcctcctgcgtagctgggactataggcacgtaccaccatgcccagctgatttttgtattttttagtagagacagggttttaccatgttggccaggatggtctctatctcttgaccttaggatctgcccgcctaggcctcccaaagtgatgggattacaggtgtgagccacagcacctggccagtacatgttttttatgagtgccggttcttacggtatgttcacgtagagactgaaggctataaaaactttccttaccactagaacatgtaattggtagcctttcagagatttatccgtattacggttcttgatttgtagacgtatatataacattcacctaatgttttgtgttcttttttccctgcagatgctgtacccctcaaggatttaaactaacgaaaaatcaataaataaatgtggatttgtgctcttgtatttttaagtggattaaaaaacttactaccttaaattgatttgctacatgcttaaaatgatagaggttgctcagcatttttggagtacaagggggtcagagagacatgtgatgaaaattacagggcgagtacagagatttagaagggaacgggttttaatgcgagtatctttgacagagtcttgctctgttgcccatgctggagtgtagtggtgctcgctgcagcctcacattcaaaggctcaagcaatcctcccttggcctttgaagtagctgggaccacaggctcatgccaccatccctgggtcatttttaaattttttgtagagagggtctgactcttgcctatgctggcttcaaactcctgggctcaagcaatcctccttccttggcctctcctgaagtgctgggatacagttatgagccaccacacctgccaagtgctttgtgatactatgcatttgttcaatgcagattgggaaacttaaaatttgaatggagattatgt

SEQ ID NO: 31592 - DNA, 1030 bp, Homo sapiens
ttcttgacttcttttattcatccctgaaaaaatcatgtaaatagtaaatgagaactggagaaaaaattcaaaatggaaacctctttcataaataaatttttgtcctcttttaaagtaattgaagatacttttggtctcttcctgtcattttctcaagactcaaaattggctaaactagaaattatgtaagatcactacaaataagtgacagagaaccctaaaagctttttggcagctactgtatccataatgatttagtcatgtgacttgaatttatggttcttgccttccaaatggcagcccttgcttgggagagctttgaggttcaagaatgctgacacagtggaatatgggtcacagaactttttctctgggtattacacttgaaatttagttcattaattttaagtttggattgcagtgggttaatctgtatgtcttaaacagttttcaaatccgttccttttttcaggtcataaataaagttcatcttaaggcaaatcatgtggtcaagagagatgttgatgagcatttaagaatcaagactgtctatgataaaagtgttgaagagtaagtacaccattgtattgtcatctttttcattattaatctaaatgttaaagatatttttgtctgttacctgaagttctaagaatccatagataaaacttaaggactagtgtagcttcaaaatggaattaagctgaaaatgcattttagtctgaaaatatgaaagccatgggatatgattaaagtctttatgaataattttcttttaccatcttcctttcctggtcaatcatgaataatttaaacagaacaaatgtggatctacttggatgtggacagtaacagacctggaaggtactcttcaataagtactagtgttaccagaaagaggtctggcccagattccaggagagggttcttggatctctcatgagaaagaattagaagcaaatccatagagtaaagtgaaagcaaggttattagaaaagtaaaggaataaaagaatggctgctccataggc

SEQ ID NO: 31593 - DNA, 1043 bp, Homo sapiens
cactgtgtatctcctggtaacgcctcgtgttgttgtaagtattatcagacttcatgtctcatgagccatctgttcttttcctttactgtggtcctttctttactcatcattattgtttaagaacttataattagagcctatagtaggaaaagtcatataaagggaatgcaatgaagctacgggccacgagaaatctgaggaaatggaaacttggcaatggctctcacagctcctatcccacccagtgctttaggccagtgcctcctctgttgtgatgcctcttaggaccactggtactatttctataatgactgatcattttctttggtgtctgtattagtcaaggttctccagagaaacagaaccaataggatgtgtgtatatatctatacatctgtatacacaaagaaagaatacgagagaggaggggaggaagagatttctttttttcttttattttctttctttctttttttttttttttgatacagggtctcactctgtcacccaggctggagtgtagtgttttcggctcactgcaacctctgtctcctgcgccaaagtgatcctcctacttctgcctcccgagtggctgagactacaggcacgcaccaccacgcccagctaattttgtttatttttttgtagtgatgaggtctcgctatgttgcccaggctggtctcgatctcctgggctcaagcagtcctcctgcctcagcctcccaaagtgctgggattacagacatgagtcaccacacttggccaagaggtaacttttgaggatttggctcacatgactgtggaagttgggcgagttcaaatccgatgggataggccagcaggctggagactcaggggattgttgcccttggagtccaaaggcagaatgacttcttattcaggggaggtcagtctttgttctcttccggccttctcctgattgggtgatgcctacccacattatggaaggtgatctttacttcagagtccactcattgcaatgttactctcattccagaaaacaccttcacagaaacatccaga

SEQ ID NO: 31594 - DNA, 1089 bp, Homo sapiens
cccaaatcctttctcctgatattccagccaagccttttgcattttctgcaattgcttccaaagtctcaggatcatggtcaccaggtttgtctacaattctcccataaaacctacaagacaaaatcttcacagggtattacctctatattggcatatcacaagcaaaatctgtttttcatttttattggtactatcccatacatctgcttaatgaaaacaacatataattagttaggtctagaagggaccttagaaagcaactggtcatttctccacctcctctttcttttcccagataagaaaacccaggatcgaataaaatataagtagcctttttgaggttagcaagaactaaaacttcaaggtctccacctcacttccaaattactgactcaagacattccgaatggtcatcaaatgcaattcctgaattggcacttatactagatgaaaaaaaaaacagcattcttgtaaaggcagcaaaccaaaacaagactgcagtgccttaacagagtagtctgaattcctcaaagcttgcctgtctgtacacattagtactttcaaggaaaaccttcaaatacgactcatctagttgcgcaccctggagtatatttcgcggaatcttagaactggaagccctaacgtgcatgtgtttccctctcatgcccttaaaattctaatgaattcatcagcggtccaaagtgatgctaaataagtaaattaatgctaaatctggattagtgatacaaatacagctaagtcttaatctatgttctattatttataagacagactacaaatactcaagtttagagaaactacattgacaaaatatccatgttctgttatagaatattctgagagcaatcccaaccagtgaaaaatgaatattacttgacataaactagccaattcggatagttttttaaaaaggttagtgtgtgacatttaaacatcattgctacccacaaaactagtcatgcgtttcatatttaccaagtttatccaagatcttctttttttttttttttttttttgagatggagtctcgctctgtcgcccaggctggagtgcggtggcacgatctcg

SEQ ID NO: 31595 - DNA, 1076 bp, Homo sapiens
ttttgtatcttttatcattgaatgaaaggaagaaaaggttgacaactgcagttgtcctcagattactgtatccagttaaatccaaaattgtttttttctgtcagtcatgtaattctgaaaatcagctgtcttatgacccagtagaactttatatctggaccatattctgtagtaatgtaaaaccggagaatgtttacaaagcaatgatagactaagaaggtgcagaacccattgaatcctgcttttcttctagtttgccttttgtttgtttgcttcagcttaatgattctctatgatcctgggaacctgttcagttccctcagctgtactatcttcagttttcaaagagggatgctaagaagggattacatgctactctggggttaggactatgtatcttggattgccctatcttacttggcaccctatgtgaggactaaaactagaatacatttgttactataaataaatgtggcatggtatacctagggaaaaaaataaggaaacagttgcaattacatggtttatcttaagaacaaaataccatggtttgtatttctggttgcattatctgacaatcgttcttattttagaatataaatatttactttttgagacgtgtccttcctggcccatccagtttaactcagacagaagtgcattatttctgcaggtaattgctgttttctaacttgactgcaatacaacaaaggaaaagccagtacaagttagaatgtggtgccagtacaagttagaatgtggtcttggcaaccagcaatttctataaagaaattcttaagattactctttatttctatgcagtagaagaaaaatgtaaacatggcttaagagcataaaagtcatacatattacaaaattagaaaatgtttttagaaatgtttttaggtttcagggaactgtatggatcaaatctcaacttagaatctctaatccttagaatttgcctctaaagtctgtcttcatgataggtttatatgataggcttggagtacagaaatgtttccttagctgatatctttccttaatttcttaggtatgcctggactgttgcccag

SEQ ID NO: 31596 - DNA, 1036 bp, Homo sapiens
ctgccccatgcctttataactgtgataacatttccttagcctagaaccagaatctgtttgtttttgctatcttctataaaatgagtcagaactcatacccccaaagccatttttttggctcctgcaccttgtcctcattgttttcacagctgaatcttttgatattttcataaaaggtcctcactgaaatttaagttaattaattaatccttcacctggtatattggtgtgaggttttggaggtgaggaatctatgcatcttagttaatttcagcttcacattctaaatatttaataccatcacttagtcccaggagacttcaacggatgtgtattagaaagaagagaggcaaattgatagagttaaatgtctttttattggcaagtcaatgccagaatcaggactagtggcacagctacaattgctgaacttctaagttagctccttagagtcttactttttatgtaaaattccattatgcccacagtaagctctgggaagctgtgtggtctcataaataattccgttcagccttctactatgtacatgttggttctgataatagaactgaatcctgcctagcctctcctctttgtcttctcccatacacacactccaagaatggagccttctgtgaacactagttcctaacttggataccagaacatgcaacttgtgcttgatactgtcctcccacattgaccgccacattgctagatcctagaccttggtcccagtcagctaactggagtcgcgactggattccctgctttcttgtcctatactcattgacagaaaaggaccttttgcattattattagcactgtcttcccaaagtaatgaacctttgagaagtcaaaagcaaaataattcagagatgacgacactgaaaataagacaggctttatttgcctgttggtttagtagtgtatttctaaacctgactaatttttataatgatctagtaaattgttcagctccatttaaaaggtgtaccacatcagcaaaatgtctaggagatatagattcctcgtc

SEQ ID NO: 31597 - DNA, 1073 bp, Homo sapiens
tatgcctcaatttatccaaaacttcttttatatgtttttatatattgccagattgtatggaggttttgtttttaatttttggagaaaactctatattgttttccataatggatctgccaatttacatttccaccagctgtgggcaagggttgcttctggcagtttgtcagtgatgttttgcttttcaaatattataatagtgtcatctctgcttgattttttttctctatgtgtattcactttttctttgatattatattagttagaacttgggacataaggtagatagcagaggtcatgtatgtcttggtcctatttctgatccccaaaataggatcaaaacattggtaaaattagttccatgagtggggctttgctatattttctctgtgtgactcttggtttgaaatgttctatgtaatatgtatctttttatttctagtttacaatactttattaagaatagatattacagtgtcacaactctttcagtaatattttacataagtacttaaggcttctagaaatttaacattgatatacagtcatgtgctgcataattgtgttttggtcaacaatggactgcatatatgcatgtatgatggtggttctatagattacactggagctgaaaaattcctattacctagtgatctcttagctttcataacatcatagtgcgatgcattatgtatttgtgtttgtggtgatgctggtataaacaaacttgtgatgccagtcatataaaagcccagcccacaccattatgtatagcacatggtatttgataataataaatgactatgttactggtttatgtatttaccatactttttactgttattttagcatgtactccttctccttacataaaaaataataactgtaaaacagcctcaggccgatccttcggaggtattccagatgaaggcattgttatcttaggagatgacagctccatgcatgttattgcttctgaagaacttccagtgggacaagatgtggaggtggaagacagggatattgattattctgaccctgtgtaggcctaggctaatgtgtgtttgttttta

SEQ ID NO: 31598 - DNA, 1077 bp, Homo sapiens
ctaactcagaattcctgagtgatagattattttctactctgtggttattgaagtttcacctgttctcatagttgcagctcagaaagcaggttcaggtggctttcaatttaggtgaagagtaaagaacttcatccctgaattctggaatttcacagtttggaatgtttacaaaagcattatttgagttattttttttttagtctgacaataaaagcatttttattgcaattatgtttctggtccaagatgaaacttttcttttaaaagttccaaacgaagacattttgggagcttttttctggagggtggggtaggcgtgggggtggggctgggcatttatgagttgtaagaaaagaggttggtggagaacagatggcctcctccaaccatacatattcatgagtgcatttatttcattatgtcatcccctgggaaaccctatacttcagcttttataagttcgaatgccgtcaaattgagcagtcagaaggccctctgtcaaaaactgtgttgctgaaaaatttgaagaaaagtatgtgaaagccttcacttcacgcttttgtcttgactttttaccgctgaaacaactgttatttcgagagccaagactagagtgtcattgagcataataaatgttaagtgttgatagctgagctgacacgttccattaatcagatggtggtgtgttatgtttagagtattgccaagcacattgtttgctaatgtcgtatgaaacatgagatgaaaacatgtctgtgtgtctgttggagcatcttcaaagttgattccaggccctctccatttgcagaaggggaatgggtcatccgacgggttgaaaaatgttcattattaaattccctgtgtgtctaatcatttggcaggaagttctctcttatgtgcttcatgcaatcttttccactggaccaagaaagagcagcacaggtttttttccccctttcctgctgagtgagctcctgctagtgattaatgaaggcatctaaatagcctttggtttaaatgatgttatcactgtctccatttaactccacatgtctttacctcaaacaggaataagac

SEQ ID NO: 31599 - DNA, 1027 bp, Homo sapiens
aagatgttgcacaagtaaagcaagtgagggtctccagcagcccagagaaagaagaagcagaaggaaggtataaaggcattgagctgggcaccataggacttgaactctattcttgtctctgcttgtaactgatatttaaaaagtggggactagccagcgaaggcatctcttgttgcgaatcctgttcactgagtgtcactgcctggagtgtagtactaggaagatgccctggccacatgtgggcccagtggtgaatctgtggatatgggcagtgtgagaatgctgtaagggccagggatggaaagactctaggtagctgaaagaattccagctgtaacattcaagctccaacatttggaaactgtggttcttcccatcatcttcttggacactcataggggattccaggagccatcacaattgagaaatggtgtgattttcttctacactgacctctcccaggactctgagaaaatggcatacaatttagctagttagctctgttgaattctgctaagtggtcccctaagaggagcactgtggactagcacttgaagacctaaaaggtttaaagtctttaaattcttgagggcacaatccatgttccaatttcttttgccttcaaccattgccagcaccataccaagtgcatactacacaggccagatacaaaatcatttctttcacgggagagacaaaagccctggaaatgctgaggggttttcccctccctgttgccgatattgttagctagaagttgaagaccatttcatagcccgagatatttttgcttagtcttccctctagccttttagatgttcttttcctagcacgcatttgccctttggcccttgttcgtatctgtcattgactttgggacccttttcccatcatagagcaggttctttttgcaatgggatgggggcccctttgccctctataacctcatatgacattcaaagcccatgatatagcaaaacacaggggagttgctttgctgtgactgactctgccaacccagggaccc

SEQ ID NO: 31600 - DNA, 1050 bp, Homo sapiens
atcagccccatcatgtcccttggtatgtgggcttgatgcatcttgaaggcctgccctgtgtctttgtaatcaataggtccattgcttattgttttattatatacaggtaactttttaataccttatattcttattcatttaacacattgattgaaaacttgctatgttctggacagagtttttaggcccttgaagtattttaggcatgaatttgacatggggagatttgttttgaaacaggatgaagaaaagagaaaaactgtggatagaagagcaatggcaagggccttcttgcacctgtccagctaagacattatcagagcctgcatacttttctattgtgcgtaacaaattgtcacaaacttagcagcttacagcaacacacatttattaccttacagtttctgtggatcagaagtccaggaatgacttagctgggttctcactgaggttgtttcagggtctttcacaaggctgcaatcaaggtgtcggctgggttgcattgtcttctggggcttgactggagaagaatctgtttccaagctctcacaagttattggcagaatttacctgcttatttattttgcaactgtagtgctaagagctgccctcagctcctgcaggggattggcagggtggcttgtttccctgccacgcagtcctctccataggcagtttattatctttcagctcacctttttaggccagcagtgcagagacttgaagtaagtctggcaaggaatcttataaaatgtgagcacaggagagacctattttgatatatactctttgttagaagcaagtcacaggtccaccttcccacatacactcaaggggagaagattacacaaaaagattaccatagcatgtggagactagttggggtcagcttaccgttgttaaagtaggttcttcaccaggcctgaagaatctctgagcagacaaagccagtgcccttaactctgattacattgcaaacgtaagtgaaacataatttgagctctttcttgtaaatgtctgtattaaagaaaggcagaacttaagctcaac

SEQ ID NO: 31601 - DNA, 1037 bp, Homo sapiens
tcctagcactttgggaggccaaggtgggtggatcacctgaggccaggagttcgagaccagtctggccaacatggcaaaatgcagtgtctactaaaaataccaaaattagctggctgtggtggcatgcacgtatactcccagctactctggaggctgaggcaggagaatcgcttgaacctgggaggtggaggttgcagtgagccaagatcgtgccacttcactccagcctgggcaaaagaccaaaactccacctcaaaaaaaaaaaaaaaaaaaaaagaaattgagaaatgaataaaagctaagaacttattccttagacaaataaacacacaactaaaactgtctttattttcagcaggttagtagatgccttgctggctagctgtggacctggcttagggaattctgcctcttagttcttagtacaagatggacgataaagaacagatagctaagagattgtaggcagttattttttacatctacttatagctgtatgcctaatacttagcatttcagctggcaggtagaacgtgttcagtagatatccattggatgaatgaattaatgaaaatgagactgtatttctataatttgactttcaaccaagcatcttaaagtgttattatggtcatcccttgattgctcaaggctagttgtggttttcaggaatatcagcaggaaatattcaattcaggtcacttttttttttttcctgctgtatcctcttgtctgacttctaaccaagtgggtactggttcttatgtctcataagcagctttgtgactttgaacaaatcttgtctttgccaaagttgagatgctaatttaatagcttttctcctgatcccactgggatgttagagaaaggaagtaaaatatgtgtgaattttgttttaaaggggccaaatattttttaaagtattctaacttaccattggtgtggtgccagaggtaagacttcaccctgtttgtcgttgtgggaggatgtacaatatgctattaaacatcaggtggccaaggttttgtcagccacac

SEQ ID NO: 31602 - DNA, 1089 bp, Homo sapiens
tactagagctgtcacagggaagggagatgctcgtgttctgcaaagccaaattgcagtgtttccattgaatttcacagcaacagaagacaggagcgttttctctagttatactttgctttaaatcctgaaaaacctggagatattacacatccacctaactttttgaaaacggaggattcctctggggtgtttatttctttcataaccacaagatgaattgatagtgtgtgtgctgcgagagaggaaacaaatagaccatttccaaatgcttttgcaatgaatataactaaactgtcttaaaaagccagcctagtcaaaataagtgcaattattttaaaaaataagtcatctttataggagaagcagtctgaaagtgtaagttgggaaaagctgtgtgtgtgtatgtgtgtgggtgtgtgtgtgtgttcccgcgtgcatttgggtgtcagtcttcaaaggctgcaattatgtgacagtgcttccttaaattcttcagagaatttttcactgtagtgtatatcaaataaagaaggataagaaaatctagcaaaccattgtgtagttcaggatctagcctatacattgtgcccagggttcgtatgatgaaaagcattaatttcccttagttcctaagagggtttgtgaacataggtgtctattcccagctctgtggggatgcatttttatgtatttattatattcgtaaaagccatgaaaacctggtcccatttagcctcaggatgtgctaatgtcatttaaaaatatgcagaattaataaccatttaaaaatttctattgtttttgtatcttaaagaaaaaagaaattcaggaaggcaggatggaaggaaagaaaaataggaaactaaaaacatatcaaactcgctggccagtgggatagcttgagagctgagtccctcttccctcacttcataaatgactttgtgtggcacagtgacatctttgcaacacagtggctgctcattcaatatttgtctttctttggaactgttggaagaagaaacctacaaattgagtagtaatggccataacattaactattatttgtatatagtcctttagagattacaa

SEQ ID NO: 31603 - DNA, 1087 bp, Homo sapiens
tgtaagcaacaaaactccaaaacaacaaacaccaaaatcatgataaattattccattctgtctttaccaattgctgtgagtgctaaaacctagatttgagcttctgttctaccagtccctggctgtgtgactttgagcaaatggccttgcctctcccactctctgcttcttcagaggtcacatggattaagtgctttaaggacatgcagtgaaggtggcacagctgggactttatcccatgccttcattggtatcaaaacacacattgctccctcttagaaaggggtttggtgcatagtaagggctcaataagttaagctctgggtcaccgcactgccactgtggggaatctgtgaaggaggtatgaagtatgtgctcattgctctcagcagctttctttctgtcctaaacttcacacactcagaatcctttacatctttcccctttaccccatcacacctgctccttcaaaagagcctggaatttggactccaaaattcagaaattcttggacgtgggttcctgctctgccacttactggctgcataatggtggttgcatacttctactgtctgcttctccatttctcattctttaaaaagaaagcattggtctaaatgatctatacattcctttcttagtttaaaagataaatctgatgtcaggtgatcaggatgatagtttccaggtgtgtgcactggggcacgcctttaccttgcctaagtctgcagtcacttgtagaatgggaatcatgaaagcccttgcctcataggtagttgtgagaatgacttagtgtaagtgaagcatttgttaggatagcacctggaccgtactatcgtcagtagcaccagtagctataatattctcaatctaagattctataatctaggatcaggtggatcatttccaccttcaacctgagtttcagtcatggtgttttctttccctgggggcagttgctttatagagacattgttagctgttaaaaggatttcagtcaaaaggaagtatttcagaggttttccaagctccctggaaatcatgcctcttgggcatctgtccacctcaacaatctgtaaaacctgtt

SEQ ID NO: 31604 - DNA, 1030 bp, Homo sapiens
atgtccttgttctttcctgcttcccaataaagcaaaagacctggccttcgagcaaacagtgttgagagatctctttccaattatttaatatctcaagtcttcttagttttctgggcttgcctaagatcttgaatataagtgtccctaacaaaaacgagcccttggtgagaagggtatagtgagggtccatatctcctggccatctaactcaagacattttctggatttcaccacctcttgataggaggtatgacattggcaaaccatttcataagaccttccttcgatcacccttcctagccaccttccatcctgccctcttttgttgcaaaactcatctgcagagaccaaatccctccttaacattttattgcacattgttttgttttttatcatgtttccccaaatagaacctctgtccctggagaagaagactttatttcactcactgttgtatcctcagtacctagaatagtgtcgtccatagtaaacccttgctaaatatttgtgggatgagggaatgaaaacataaggcttagttagacggttccattttcttgtgctcataggcatttgaaatttagccaagagcctctctctttcacatagcgtatatgatgagctgtggatacatttttatgtactctcgggtttttgttttataaaataatttaatgcatcattagtatagtaatgtttcatattcaggacatatctatctgtaagccctgtccttttgaaaactcaagccaatttgtaattaaatacgcttcagaaatattgctgtgatttatcaagcaacatcacagagcttgaaaaacatgttttcctcacctaccctctcaaaatgcaaaaaaaaaaaaaaaaaaaccccataaaagatccattctgttgcattgcttgagctttctgtgaaacctttgaaacattcattacatttaggcagaatgtgtacatgttatctcatgtcaataggtccagatttcccaagtccaaaaggtagaggagaagaaactcatgcttctaccag

SEQ ID NO: 31605 - DNA, 1063 bp, Homo sapiens
ttcacctgcttccatcccacttgatcctatgccttctactcaattcagtccacctgtaaatcttacctcccctgtcatcacatacttgaatctctcaccactccctccaccagcagggctcttagtcagcctagggatggtgttgatgatggggatgggagctcatatgtactgagtgcttactaatggtcagtcattgagctaagggttttacctaatttatcccacttaatatatatagcaatctcaagagacaaataagattattatcctcattttcccttaagtcattgaatttgctgtgaacacactcttttctaggtttctgctcaggtatttctcccgttgtgaggcactcctggctactctgtggtcttggtgatgtgccttacctttgtgctgctgcaacgtctgtgctaactggggttcttccatatattattgggatgataatacatttaacagctgagagtgtggagttactctgccacttcctggcaatgtggctctgggcaagataaacttgctctgcacatttttttttcgtctgtaaaatgaagattaaaatagcacctcctcttaggtctgatgtgaggaccaaggcacagatgcatgttaaacacttagaatagagctgggaagagaataaatgtcccacaaatgttacctataatcttattataccaaattttaaccgtccatttacttgtctttcccctttcataggctataagcttcttgaaggcagagattatatctcattcaatcttctatctcaagtatctactgcaaaaccaagcaaacggtaagagctcaataattggtggttcttcatgtcatccttatctataaaagggctcaaaataaaatatcataaagacatccagcccacacacttacttatttctctgaacatttacaacatttctaaatgataccactctactgtcaattaataagaataatttattttattgtgatttaattacatggtcctatacatttactcactgctttgcctaccagacaaacctagatttgaaccttgcttgcttgcttctct

SEQ ID NO: 31606 - DNA, 1033 bp, Homo sapiens
attcaacgacagatgtaagctctaggcattattaggcaggtattgaagactaaaacaagacatcaattcagacaggtgggataatgattccgcatgtgacagaatatctcaaaggcactagctgctccagtggaggaaatggactctgtctctccactgttcgattcatttcttttcaaattagcatatcatttatttaaactaatttccctcttccccaaggcaagagtgagaaaggcagcttttcccatttctacttgaccactgcatgcatttggttccagacagagagaagagcattatcattaggaagaaatgtgtgtcagggatgggggaaggaatttgggtgagaggatggggcttgctgtggacagaagaggaaaaatgagcatgacaattatgaaagagtctgaaatgtggtgtaattattagaaatttgctgaattgcctgaattggtaattggtccaaattttagaaattacccttttttaactctgcaaaggggtttcgggactgtcttgttaactgacacttaaaagctccttgtcattgggatggatgaagaggaaacacgcatttttgcatcattggacgaagaggaatcaatgaaccagcataaccaaatctcttacttgcttcttgcttaaagagctcaaatccatctgaattactcctaatgagctcacccagtcctgggatcctgaatttattagttagtaaaaaagcacttaatagttatttattaaggtgtggtagaagaccttggaatttttgaaggagaacggaattggagacaagagcccaagagttcccaggagagcaaggtcttattgttgatgtaaagagttcttgcccctcgattggctgtgttgagacactacaaacccctctggattcccctaccagccccttgaggttctttagctttggtttgaaggaacattatcattggtgttagcctaattgtactgatctatgtggtaaatgaggaaaaaaaagaaagatgaaacttcagaagacagtcgtatttga

SEQ ID NO: 31607 - DNA, 1053 bp, Homo sapiens
gattaccctgagtgagagtcttgtcttctgtacagaaagagctgaaactgtggaaaaacagacacaaactcttatcatgcgagtgggtgacctgcaatgaaaggtgcatgcacagcctcaccaagtgtctactgttaaagtgagggcactgattggaaaagaatgcaaccctgcaacttggaatggggatgtgtgggagcaccctgatgaagctgaggacactacgtttgtaaactctgatgcaccttttttgccagaagaaacagcttccccatccccagtagtggcaacatcccctccccaacacatgctgccataggcctttccgcctttgtctgaggagacaaaccctgcgctgcctgaggcaacagtgatggcctctctcctgaggcagttgccaggcaaaataatgttgattctcctccggagccacccctaatacccctgtttgcttctagacctataactaaaatcccgatgggcccctggaggtgaggttgagagtgtgacccacgaggagctgcactacactagaaaagaactgtttgaattctctaattatataaagagcaatctggagaacaggtttgggaatggatattaagggtatgggataatggtggaaggaatacagagctggatcaggctgaacttattgatttgggccgactaagtaggaactctgcatttaatgttgcagctcaggaagttgaaaagattctaatagtttatttgcttggttagctgaagtatggattaaaagatggcccacagtgagcaagctggaaatgcctgatctcccttggtttaatgtagaggaagggatccaaaggcctagggagattgagatggtggagtggattagtcactttagacccactcatcccagttgggagggcccagaagatatagccttgaccaatgccctgcaaaatagatttgtgagggcagcacctgcatctctgaagagccctgtaattgctcttctctgtatgtcagatctaacggtgggaacagcagtcactcaactacaaaatttaaatacagtgggaa

SEQ ID NO: 31608 - DNA, 1044 bp, Homo sapiens
taatttttctagttgccttttgtgattgttattgaggaaggggaggcagaagagggagagagatgagaaattccctaaagtagaagtggggcagagaatgacattataggtcccaagtgtatcggagaccagcaccataaagcttggcagcatgccaagtagcaggatctggaaagagaatggtgttgtgtccagactgggatccctaggtaagctggtcaaaggtgacccttttttctaggctcacttctctggggtcagtcccctggcttggcctggtttttatactggagtctaaagacatctccagagcatgatgagggaggggtggaaatgtccctaagggttgaaattccacctcctaccaacttggcagaacaggggcttgtattagatttccagggctgccaaaacaaagtaccacaaactgggtggtttaaacaacagaaatttgttcttccatagttctggaggccagaagataaaggtatcagtagggttggttacttctgaaggctgtggggaagaacttgttccatgcgtcttccttagtttttggtggtttgttgttaacctttgataatttttggcttgtagccccatcaccctgatttcagtccttggcttaatcaactacgtacatagtgatgccatttgctgagatggggaagattgtgggagggacagatctacacaggaaaaatcaacaatcatattttggccaagttaagactgaaatgcctatagacacatagatgaggatgtcaagcagttagctaaacagataactttggggctaaattaagaggtcagggctagagagtccttgttatacatattatatttaaaacacaggtctagatgaggattaatgtagagtttgaagaatgtagggacagaaaagaagactaaaggaaagcttggtgtattcacacttcaatgattgaaacaggagagagaactagcaaaagtgactaagaagtaatggccagtgatatggaaggcaaatcgtgagaaatcaagagaagggaatattttaagaag

SEQ ID NO: 31609 - DNA, 1049 bp, Homo sapiens
tgtacagtgatgataattgcccaaacaatattaatcccactagtaaagggttttcacattacaggtattttttttaaaactttcatcttaggttcggggtacatgtgaaggtttgttacataggtaaagtcatgttatgggggtttattatacagattatttcatcacccaggaattaaacccagtacccaataattatcttttctgctcctctccctcctcccacctttcccactcaactagaccccagtgtctgatgtttccttctttgtgttcataagttcttatcatttagctcccacttataagtgagaatatgcagtatttggttttttgttcctgcattcatttgctgaggataatagcctccagctccatccatgttcctgcaaaagacaagatttcattttttatggctgtatagtattccatggtgtatatgtaccacaatttctttatccaatctgtcactgatgggcatttagattgatttcatgtctttgctattgtgaacagtgccacagtgaacatttgtgtgcatgtgtctatatggtagagtgctttatatccctctgggtatatacccagtaataggattgacccaggctaatttccagcagcaatgagatctttttttttttttttttttctttttgggatggagtctcgctctgtcgcccaggccggactgcggactgcagtggcgcaatctcggctcactgcaagctccgcttcccgggttcacgccattctcctgcctcagcctccccagtagctgggactacaggcgcccgccaccgcgcccggctaattttttgtatttttagtagagacggggtttcaccttgttagccaggatggtctcgatctcctgacctcatgatccacccgcctcggcctcccaaagtgctgggattacaggcgtgagccaccgcgcctggccagcaatgagatctttaacaagcaatttcgtctcagtgggccttgatttccttatctgtaaagtgatcagacgagcctagggatggcagtctaatttagcccatgga

SEQ ID NO: 31610 - DNA, 1035 bp, Homo sapiens
agggctacaaaatatctttttcagggaggatggaggaaacacaagtcaacccataacagcccctaacagatgaaaaaaaaaaacaaaaacaaaaacaaaaaaaactagatctcttcatgggaaagaccatggggttcagaatcagagagaggtcaatttgaatcccagctctgcctgttctgcttgtactcacagcagaaaggaacatgtgggcctgcattccaagccaccttagatagcgtcttgggctagactgaaattaagaacggagctatagacaagaaaggatgatatggttttaatcaggacactgagccacaatttttcattatagactaggctgggcattactccaaactctcctgataatggaactgtgacagcaaggctgattttcagcacaatatattgcaggaagtgtgtgtgtgtgtgtgtgtgtgtgtgtgtgtgtgtgtgtgtgtgtgtgtgtgttaaggggacctggtattgcccagatcagtaaaaaaacggggtaggatggaacatctaaatgaagttctttcccatctttgaagggttggggaagatagggaactgcacatttatgaactcttttgcaacaatcctccgagacacaaagacaccccctgtagatgctgcctctgctacaaaaatttatgctgccctgcttcgtctcccaggcatcctgctcccagtagtgtctacataggtggagccttgcagctttgaggatatcccatgctgacttttatgcagacatgaccaaggcctttaccacaggacctcaaaatgcctataaatataaatataaacataaatataagtaatacacacagacacagaaacacacacacacagacatatacgtatatatttacatgcttactccagagtccagaggttcatataatctgagaaaaaagaagaaatatcagaagttgtaaatatgcataaatgtgtacataaaaatatagacatttggaccttctttttctattttgtcaacttccaaaaagttatcaagaagtattattc

SEQ ID NO: 31611 - DNA, 1024 bp, Homo sapiens
cagagtagctggaactctaggtgcatgccaccttgcccagctaattaatttttttttgtagagatagggtcttgctatgttgcccaggctggtctcaaactctttgtctcaagcagttctcctaccttggctacccaaagtgctgggattagagacatgagccactgtgcctggctctgaagtttcttttagtgttgttaataatttttaatgtatctatttggaaattctgattttcagacttcttattttcttggagcagatcatacttgatgatatggcccataataattggaatttattaaatgtttactgtgtgtcaggcattatgctaaatgccaaacattatgtatgaattatttcatgtagtcctcacagcaacctcctaagcaaggtaatttcatagatgagagaactaaggcctggagaggtgcaatagtttttctcaaattacctggttagtaaggaatggtgctgaaagtcttaggagaaatgacatggctaagacatgctcttgtggtttctcttcttggcttttggggctgtggacatttataagaaaggtggattatcaaaggctcaccagaggatttcacaggaatggaacatacacacctagttgctagcatatgaaggaggatgattgtccgggtgggcagtggattcttgtgacaaccagggaaggatgcttctcttgagtcctaagtttagaccagccagtgagagattggccacacagagtgtgtttatttgttcaacattttacttatctgtatgtatgtccttgttttatttcacttggagtttatattcctggaggctagttgccgttttcatctaaattgcttcgtacatcactcagcacagtttcttgataatgaaggtcacataacactgtggttattggcacacactttggcatttgggtttgactctcatttcttacctttaccttctagccacccttagttacaataattcacctttttgagcttcaatttctgtattcgcaatttggaaaaaa

SEQ ID NO: 31612 - DNA, 1025 bp, Homo sapiens
agcttagtaattgctcactgaaagcatctaagttgactactttctcatggaataggaagaagagcttgtgagaaatttatattaaaaatgaaaacggctcataaaaaaagaaaatggcccactgtaggtcaaaactccctacaagaaatgttattgctataacatatacctcattgttcagtgaagtaggaaggtttggaatagatagatttttaaacacatcaactaacattgacctgctaggccataatgacatctctcataatgccatctgcggatctcagaataaatgctgaccaagctcccacagaaggtgtagcagtgatctgtaaagcgtctgctgctgccaaacatcccatttgtttttgggatctgaggatgaggcttcctaagtccagatcatttgttttgcattcactattgaaaacctggcttaggagtgggtacagatgtttgctttacttaacaccagaggcttttgttaactgcagctgcacatatttaaatttgaaagttagggactcctggtgagacccgtggattcacctgcattttttatccttcttcagatgagggaggaaaaggaggactgtaacccaatgactctgtggggatttgtctggcaacctggtgcttggacatttttgctttgagtacaggcataacacctgcattggaatcccattctttcttaacgcacaacagctacggacatctaaggtgctgagaatgtattagatattgaatttttatttttgatagtgagatcttctataccccggactgccttttaaaaaaaaataccatatggccttgaataatttattaaatgataaccaaacaaatacagatacaactctgttggttatagctttctttcatttttttttgttttcttttggcggcaagcaagcataaattcttccttttgaataattccctgatttcctttgagggaccattctccactgtttcatgtagtattgctgggagggtaaattttcaggtgcttgtctctctatgga

SEQ ID NO: 31613 - DNA, 1087 bp, Homo sapiens
cagtctattaggctactgaaatttctgctttgtgacattcgaatgttattactataattttactaattgtgagttacctgagtgagggaactgaataatagaaatctgttgcatataagattatgtctctcttggtagtaataaaaatgccgaggaaataaccaatttataaatggtcatagaagtgatttctaattctattctctttatcttttcgggcttttaaaaataagtgaatggaggcaacaaactgctctatgcctgtgccactcaggagaggcaaaataggtggctctttgaactccaaaaccttttagcttcagaatagaaagtcaaggaagttgtgttttgggaaattgagctttctttgcaacagtggaatggattttttcagtgtcattctaatctaatcattaggattagaacatattacatataatatgtaactcttccacttccagttacatattataactgcactatgtggttgatgaatgattggtcataacaggcagctctgaattcctttatcctgaaccctgactctagctttaatccctcagtttgaaagtctttcatttagttgttcatttagctgttctcttatcattttaatttgcagtttttaaaaaagtcaagtattttcaaacatctttgctttgttagtttgagctctggaagattaaatttcacgttctggaactcacccatgagcttagcttagaagaacattgaatataatttgttttttacagagcctggaaattacagggttaatgacacaggaaaccacttctcactgcagatgaaatatgtgtgtcttttttcatctcttagcaaattaggtaaagttttcccccaaagagcatttttgtttttagttggtaaattaaacaagcagttcagattgcactttccagaccctagattttgtaggtatttgttgctggggcttttgtcttaatgaagtctggcagtacctgttcagatgaaatagccaattttacctttgctctggcacttaatccagccatctgctctagctttggctttcaagcacaaagggaaagtacaaagtatagctaac

SEQ ID NO: 31614 - DNA, 1050 bp, Homo sapiens
taacaaaagtggtctttaattggggtgtttttatgcttttttgttcagggtttttatgaagttctgcatggctttgtattcagaagccattcttttatcaaagtttcactagcattatctgagcttaatattctgggatgtactttgtagccagtgatgaaaggaggaaagtcagcagaaattacttacatatttgttagcatttgaaacatcttagccttctaataagaactatcacggccaggcacagtggcttatgtctgtaatcccagtgccttgggaagctgaggtaggaggatggaggatggctcaaggccaggagttccaggcaagcttgggcaacgtagccagactccatctcaaaaaaaaaaaaaaaaaaaaattcaggtgtagtggcttgtggctgtaattctagggaggctgaggtgggaggattgcttgagcccagcaatccaaggcttcagttagctatgattgtgccaccgtactgcagcctggattgggcgacggagagagaccttctctctaaaacaaacccaaaacacctgacaccagtagataccaagtaggcatagtacaggcactggatcctctcatgaaaaaagattgttgcatgaagtcattttaaaaagaagcatggtaattgatccttttggggatttctgtccaatttggtgaccatttcccttgtgagaacatgccatccctcacccagcccgtctaacggggtgggctcacagacagttatgtttatattacacagtgatctcctaaaaagcctcggcccaagtttttagcttacaggtgcacacctttttcaatctaggacaattaggttctcttggtcaggagctgagaccaaatcacagctaaaactattatttataattcaggagctgagaggtaggtttatttggtatatagatggagaagcaggggaaagtccgtcttccaagagaaaaataaagcagatgagtgataaggagagaggacagctgtctatttctggtttcagtctctttttcgattcacattacataactatattat

SEQ ID NO: 31615 - DNA, 1049 bp, Homo sapiens
cccgtctccttctgtggtgtggacagggttatttttctgttatttatacatgaagtgaggctgtttgaagttttgaagcataacttcacaagatttggagtacagccaagtatataatgaaaatgaaaaatttacaatgtgtctctttttctgacttttggttacaacatgtaagtcattttcatagttatatttttcactactggtagtacttattagggttttagcaggtgatagttaataatgcctttttccttgatccatgcttagaaacaattaagtaggacgcaggagtcagacagaaatcaaaaagtcagctttattactgttaaaattggttggcaagcagggtttaggtatgcagccacaagggtttcttggatcattattaggttcgatgttagtgctagaaaacttacaataacagtgacttaagcaagggagagactatttctcacctgaaagtacaaaggtgtcagatcacgactgacaggatgttctacagtaccagacacctagactccttttaaccttgttgatttttctatgcaatggcttcctttcccagggtcatcctggggtctaggatgactgctccagttccagtcatcatgtatacattccagccagcaggaagaaagaggaggtgaagggcaggatatctccatttaaggacttgtcatttttgcttatatcctattaactagaacagtcactaagacaaatctaactaggaaagtgagtattctgggtagtcatgtacttttgttaaatggagaattctattacagaaaggggaaaggatactgatggacaacttgcagtctctgccacattcctgagttaaacttatgtaactaggcagaggtaaagctagccaaccactgtcttccactatagggaggggcaagctgcttatcactgaacagactcacctcaagggtcaatcgcttgcaggaggggaacacagaaggggctgagccacacatgctgggttccttctcatttccacaactgatgttcgacttttctacggggcagtacagaga

SEQ ID NO: 31616 - DNA, 1029 bp, Homo sapiens
gggtggtctcaaactcccaagctcaagtgttctgcctgcctcagcctcccaaagtgctgggattacaggtgtgagccactgcacccagccccatcttttaaaatttgaatcttataatttataaaaatgttattttatcatgggataatagtcaagtggaagtatatttttaaatgttttctctcaaaagaagtgtcaacattctcaaaaatatggcaatgaagcaaacaaatgcagttaacttgctgcttagaaaagacttggaataaagactctttgactcttaccttaggaatctggtttctaggattaagtgctatataataaactagtgcctgaggacaaaaaatttccaggggtccatattcagtcagttgtctctggcagaggcactgagttggagggggctgtttgtgtccttgtctctgaatggaagattgtcctctgggaatatctctgctgttcaatatagaaaggcaaaaggacatagaaaagggtatctgcagaatcaaatggtgagccaatcattttccttctaaccacttccatattgcgtctgaagcagctcagttattaggtgagcttgtgagcaagaaaaagcacattttggagtgagggatacaagctgccttattaaaagcaggactgcttcagaggcattgaagtaatagaggacagttggcatggagaaatgattaatttggaggaaaatttttgatactatgtatttgtaatttggggcattttatgtgtactctagtaccatttgttcacagggaaccattccatgtaatgttatatgaacattataaaccctaagatacttaaaaacgacctagctttattgagatataattcacacgctgtatatttcactcatttaaagtgtacaatgtacttatattacagaggaatagtgttatatataacatggattcctataatgttgaaagtgcagggcctcctagtggtagggtttaaatgtactagagaagaaattaaattacttaataatatcataggggctct

SEQ ID NO: 31617 - DNA, 1057 bp, Homo sapiens
tctgtatcaccatgaagccagtaatctaattaagaaaacaagctaagccaaaattccaaaatacaactttcaggcatttagctggctatctttaaactcctttgtaaaagaaacatctttaagaaaattcccattttgtaagggtgtctgccggtatacactagaaacatttaccattgttttaatgtgacaagtcatactttgcttaaggtggttttcctggtctcttaattgaacttttacttacaccctttaaaacccctttggtttgagcaaatgatgttacaatatttaggcctaatgccttagctctgtgctttgagatataaattttctaccttgtttcacataagagctgtccctttagaaatgtaaatttagggttgcctagctgacaattgtttagggcaggaaacaggtaatcaagagactgatagtctaaagtggaggtgagattttgagaactggcaaatgaagaatcttataaatatataagatctgctactgtctatgggtctgtgtgtttatacgtgttgtgtgtatgtgatgtttcactaccaaaatatgtaaaagggctctaattaattggcttaaagaaaaaaggaagtgcttaaatcaaatgtgttatcacaaaaatagaaactttaattcaaatgccttgtagttcacatgactttattaatctttagtaaattaagacaatttaaaaattattggtaaaataaaaaaagtcttcagaatttaatttagacattttgtctgagtctattgattagatactatctctaccagatgttttaaggcataaaacttgcttctatgatttgttttgatacctaacttgtctataaacttatgtctttagatttatttatttatttaattttttggagatggagtcttgctctgttacctaggctagagtgcagtggcgcgatcttggctcactgcaacctccgcctcttgagttcacgcaattctcctgcctcagactcctgagtggctgggattacaggtgtgtgccaccacgccaagctaatattttgtatttttagta

SEQ ID NO: 31618 - DNA, 1081 bp, Homo sapiens
ccttaagctgataagcaacttcagcaacgtctcaggatacgaaatcaatgtacaaaaatcacaagcaatcttatacaccaataacagacaaacagagagccaaatcatgagtgaactcccattcacaattacttcaaagagaataaaatacctaggaatccaccttacaagggacgtgaaggacctcttcaaggagaactacaaaccactgctcaatgaaataaaagaggatacaaagaaatggaagagcaatgtatttttaaaaagcaatgttgtcccacagcctttcctatgtttgatgttcctagacttgttgtttaattttttgccgatctactggcattaaatgatatcataaatatgatttagataataaataatatcataaatattatttaggtattaaatggtgtcttagtgttgttcttagtattttttcagtggccatctatcacttattacttggtttaatttcaaaaattaatatatattcttattgtattggaatactgaataggtttcatataggaaacatgaaactcagattgcttgagggataactactgtgcacattgtggtgcattcggaatcttccagtcttttcttcttggcacatgtagttatctacactgtggtcataccacatatacacctttatattctgcctttttcattttaactgtttttttttctttttttggacacaagatcttgctctgtcacccaggctttagtacagtggctcagtgatggtgtactgcagcctcaaacacccaggctcaagagatcttcccacttcaacctctagagtagctgtgactacaagtgcacaccaccatgctcagctaattttttgtagagatgggatcttgctgtgttgcccaggctggcctcgagctcctggcctcaaacagttctcccatttcagcctcccaaaatgttgggattacaggtgtgagccagtgcgcctggcctcatttaacattttatcatgaaaacttcctgtgtcattaaatactatgtaaagacatgactttcaatggctgcttacttttctattatatggatgtgcctaaactta

SEQ ID NO: 31619 - DNA, 1055 bp, Homo sapiens
tgtaccttctgttgatatgtcttcaggttccctattttctctgagagctcttatctttccattcgagaccattcacctttgcttcatagccgatgattgtaatagctcctttaaagtctttgtctgggcccggtggctcaagcctgtagtcccagcactttgggcggccgaggtgggcggatcacctgaggttaggagttcaagaccagcctggctaacgtggtgaaaccccatctctactaaaaatacaaaaatcagccgggtgtggtggtgcagcctgtaatcccagctacttgggaggctgagacataagaatcacttgaacctgggtggcggaggttgcagtgagctgagatcacgccactgcactccaacctgggcaacagagtgaaagtgtgtctcaagaaaatttaaaaaataaagtctttgataattccaacttctgggtcatcttggggttggcatctgttcatattcttttccctccagtatcgggtctctggggcttgttacaattctctagggaatttttttttccagcaaaatcaacctggttaggaacagactgtaagttttgtctcacctaaagctcgtgatcattctgcaactctgttcattcatttttttcatgccagcacaacattgtagttttttattcactagtattttacttgttttaatcaatctcttataataatgctaccccatagagctgttacaaagaccaaatcaagtaatgtatacagtaccacctggtacagtacctagcacatagaaggccttttagtaaatgacattgttctagtttcttccagtggactatctctttgcttgatataattgaaaattaagttaaatttcctttactgttgcgcatttataagatttggtaatgcctcatatagcattctgccaagctacaatgatgttttgaaaagatttactattgtggaataccaaattgtgaaatttactatgaaataaatcctcttagattatcttagaagccttggctggaggaatatactaataacatactttgtatgtgtgtgtat

SEQ ID NO: 31620 - DNA, 1055 bp, Homo sapiens
ccatctgggggtgatgggagacagtgagagatcatcaggcattagattcttacaaggagccagcaacccagatccctcacatgagctcttcacaacaggattcacactcctatgaggatctaatgccgctactgatctgacaggaggcagagctcaggtggtaacgcaaacaacgaggagcgggctgtaaatacagatgaagctttgcttgctcgcctgccactcacctcctgctgtttggcccggttcccaataggccacagaccagtactggtttgtggtccaggggttggggacccttgctatagataaccctcctttcttgaaaaaaaggatagtatttaagatatacttccagtatttaagataaagactgttttgatttcataattgtgttattaatatgactcgtaaaactttgacacaagggatagccataggctgggtagaaaacagttgctgttggtgggagcttgaggaacaaggattctctcttcatttgtagcttggcactttctggatcaacagtttaaggaaacaaattcctgactaagtatccttgacaaatgagaggagtaggctattttaagttctttcaactgaaagtcactttcattgaaggatgagaattaccaagcatcttttttccccctgcagtaaaaactaatttctaggcagtcatatcctgcccaagtggtgctgggtgctttgttatttggatgacactggactgggacagaaggcaaagaataatgcagtctgacccgctgttatttaatcacaactgcacgacaactctaaactagaaagagaactgttaataaggatgcgatccagttacctgaatgtgtgtgggttgtaatgagaaatgccttgaggtccagcggaattctaaggtcacactccccaaaataatttttagaaaagctttactaagttaacttcaatgtaaactaagccagaaagtattcagaagggcaagtttcagtacataggaaaagtaaattaaaataactcaaaacacatgtaagtcagataaatagctcagtatcttt

SEQ ID NO: 31621 - DNA, 1029 bp, Homo sapiens
gtatcacttcaggcattgaatttccttgaaagatgtgaagaaaattttgtgctcttttgaaattgtctatttaaagatgcctatgatccataccacatgctaggatactcttcctctttttaagtcagattcaacattaaaattcagctcagttgcctcctcttccatgaagctttccctggctatccccaaggaccctcagactccgaaccatgtctgcttcctctgtgctcccttgccctctgcatttcactacctttgcacttctttaaatgtttggtagaattcagcagtgaagccattgggtcccgggcttttctttactgagagacctttttattatggcttcaatctcattacctgttattggtctggtcaggttttagatttattcatagctcaaccttggtaggctgtatgtgtctaggaatttgtccacttcttgttggcacttatcatggtgtccatcacttatcatgaaatcattagcttgttcatctctctgttaatgtgcccaaccagattatagttagggactgtcctttgcttttgtttgtatctcacatgcataatatcatgctttgtactctgtagatgccctgacattgtttgttgagtggatgggtggatggatgatgaagaagtaaatgaactaatgaatgaattagaaaatcaatcaggcttcaataagaatatgatctataatcatggctgtattgaggactctaatatgtgtaaatgtaatggaataactccaatacgtaccgctgtgagggattttatgataagcctgtctcaagtcatgttcggaaaagtttatttgaattaagttgccttttccctattttctgttctctgccctacaggctgcctgagcaattgtgtctggttcgtgaagtgacttcccattttcatccaattggccctgatctcacatcccaaggtaggcatgcctgcctgcttctccctgcttattgggctttgcctgtggcttattgctctgtttattataactcaactgctgcctct

SEQ ID NO: 31622 - DNA, 1029 bp, Homo sapiens
aaggaggttttaatcttagtaatttatttgactgctaaatagggaaaccaaagctaaaatccagttgagtacattaggctaacatggttggtgtgcaaacacatgctaggggctcatccagctgtgggtttatttgtccaccagcctaacttcaggcagcacccaaagttcagactcaagttgtgggcagtctactgctttggtggggacggtggctgtggtgccagatggggccacttggctgagggagggcatcagggctttcagttcaggagagctgatggatgttgctcttctctgttgtgtcaccagaattctgtgccttgggttgggcttacttgcatctctgtgtatcactctgctgcttcaaaactcatcccttctgttgatgctgacctgaggaagcttgggaaatgtttgctgcattgggtgggattgatgagctggctttaaaaagaagcacgaatgctttaccaggactccaaaatcaacaacaacagaatgtctttctaggatcactcaaatggacccatttattctttgcatactcctccaatttttggatacacttttcagtttgggaaaaaagcacagaatcctgcatgtaaactttaagacaacgggatgtatcacagtgtttgttttcagacagtagtatgcctttaggatagtctgaagaactggttaaaatatagattcctgagtcccaccaccagagaatcttgctcagccagcttggaatggaacccaggaaacttcaggtgatataaggcaaggggtgtatgcatcacacctagaataatggtccctgctcctgatgaacacaccaagtacccaagaagggcaccagagtgtgaaacaagcatggttaggtgatgagatggcctgggtacagtcacctgttaaagtgcagattctcattcagcaggtctggggaaggaggctgatattctgcatttctaatgagctgtgagaaggcagttgttgctggcccctgcctcacaccttgagtagcaaagatgtaaaaga

SEQ ID NO: 31623 - DNA, 1071 bp, Homo sapiens
cagttaggataacaattaccaaaaacacaagaaataacaaatgctggcaagaatgtagagaaaagagaaatcttatacactattggtgggaatggaaactagtacaaccattatggagaacagtatagagtttcctcaaaaaactacaaatagaactaccatatgatctagcaataccaccactactttccttaccaaaagaaaaggaaatcagtatgtcaaagagacatcttcaccctaatgtttactgcagcactattcacaatagccaagatgtggaatcaacctagctatccaacaatagatgatgaataaaaaaatgtggtacatatacacagtgaaatactcttcatccataaaaaaagaatgaaactctgtcatttgtggcaacatggatggaactggaggacattatgttaagtgaaataagccaggaacagaaagttaaacactgcatgttcttaatcatatgtggaagctaaaacaaagtagatttcatagaagtaaaaagtagaatagcggatactgcaggctgtgaagagtggtaggagtgggagacaaagatttgttaaaggatacaaaattatgactagataggaggaataagttctagggttctataacaccatagtatgattatagttaaaaataatatagtatagaatttcaaatagctaaaggatgttgaattcttccaacacaaagaaataataagtgtttgagataatagatgtgctgattatcctgatctgatcactatatgttctatatatcccaacatcactatgtagcccataaatgtgtacaatgattgtatgtcaataaaaaatttaaatttaaaaattatgagttaactcctgatgaaagcagagtgttgcccatttttcttccagaacaccagcttctctcttttattattttggaaacactgatttctacctaaaataagtttgtatagattttgacctctttggggattaactggcaataaattaagtgttatcttattcaataatgaggaagagagaagaacttctgtcctgtaagaaatatcatggggaaataaacatc

SEQ ID NO: 31624 - DNA, 1019 bp, Homo sapiens
acaatttgctgaatgaagaatgatccctaatggcgagtctgtgacctcatgcccatcaccgacttccctttccaacgtccaccaccatctttaaatgatgtgcatatctcattgccctctttttaaatgtatgcattaaaattatttaaacagttgtggttgactttttaatggatattttaaggggcatgttaaggggctccagtgagatccaaaagattaatgaggacatacagatctttccaataaaaacatgtttttaaacattcataatattgggaaaaaaataaagcatagtcagaacttggaatgagatgctggagccaccgtaggtttctgataaaatgattagtgccctagagagtggtgaagttttgggttggaacaggaatttgtagagtcttgggactcggagctgagggctcctgttgaatgcaccagaaaccagggaggcaaataatattttgttatcatgattggctcccctgtggccctgtggtcatgaccttaaagttgacacagtccctgaggctgaagaagggaagggttgtccgttttaggcagcaaaaagctagggcattaagtcttgtgttttctgaacaacatgtggggaaaacaaacctcagcatgagaagggaacgtgaagacgcacccattccagagagagacacagataccaaccaaatgttagtttcctgccagttttgagcgattgctcctagtaacctcttgattcctcatattaataaacattggttagaagggcaaagtgcacagactagaactcgactgaaaacaattcggtttggtgtgggaacgtggggtgtgattattttctcatggatgatatttcttcttaaatttttgcttgtgacacaagccacgtgggtttgctttttctggatagctgcaagtcaaggaaaaggggtagagaagccacttgaattcctgggaaatgttgtaatgatatccaatttaatttgacacatttttattgagtacctactatgctccacaga

SEQ ID NO: 31625 - DNA, 1027 bp, Homo sapiens
agatggtgaaaccccatctctactaaaaaatacaaaagaattggctgggtgtggtggcgggcacctgaaatctcaggtactcgggaggctgaggcagaaggagagaattgcttgaacccgggaggcagaggttgcagtgagccgagatcgtaccactgcaccccagcctgggtgacagagtgagattttgtctcaaaaaaaagagagagagagagagattggagaggtaggctcagttccggagggtcttgtcagcgcatgagaacaatgagaaagcacaaaatgtttctaaacaccataataacattatcaatgttgttgttataatagagtttctgtggaggatagtatgggcagcaaaaaaagtgggtgaagtatggggctcgggagttcaggtatgtcatttcaacagtcaaggggagagatgatggtgacttggcctaggatggaggtattgaagagagaagtggagacattcaattccagggagatttaggaggcttcattgacagggcttggatatatgtatttttttcctttagagaagggagaagaggcaccagagatgaattccagattcatcacttgtgtgaataaatggatgttaatccgttcattgacactggggacactgaaaaaagaccagatttgtggagttcataagtcagcttaggctagattatgctgagataacaaatgacgcccagagctcagtggcttacagaaacaaaggtttatttctttcttgtgctctatggccacatggatcagttgtacctcttttccatatcatttttactctggcatccatgatgatggagtagaggcatctaagagggtaaaggagaaagaagtagggcaaccacatgctggttcttaaatctttggggatgacacacatccctttttagatttcctagtacaaatctaatcacatagccatgcctgggtatacaatcctcttataggtagggacaccccaggatgggtgaaaagtattttgaactacaataaaatttaccaaagg

SEQ ID NO: 31626 - DNA, 1037 bp, Homo sapiens
agggcttgttaacaaagattgctgggccccacctccagaatttctgatgcagtagatctggagtatggcgtaagaatttgtgcttttaacaaatttcttagtaatgctcatgctgttcatataggaactacactttgagagccacatctcaagggaaatgattactactgaagacaagcttacattagttgtggtcttacctaagctttgtctaactctcacctttaactttatgccaatcctggtccaagccttttgcctctcttggtcacttatctctcttttaactctgagcccctcacttacttccctcagagagctcctccttctcctgttctctagcaccttgacctgtgttcccctttttgctcctggacagtgctagaatccaaggtgtggcatgggtatgcccaacagacagactgcttataacccaggcaactgagtcataacctccaggaggaaaacactccatctttagaacaaagatgacgagtagacatgaaaataatatcctaggatgtatatgggtcccctggctctattctctgatgggtattttttttttttttgcatctgtattacatctttgtactttcacttcaaaaatatgtttggtgcttagggcagccatcataagacactgattttaatgacttgtgaagaatgaaaatggttactatgtggccataacaagtatgtctttaagcttacccaggagtttgggaaatggttgaacctaaaacctaacccactctcagaattcaccccagtactagcattgttcagaatcattgtatgacatccattgagccccactcaatcactggactgaagtgcctgagagaccaaggttatgggtgcccaaggatgcccttaagttcacgtctgagtcaagttagtggtctgaagatgtttttagctgattctcagagacagacacaaagagagagataaggtagctactacactgggatctaccagtggctcctttattgctaggcaccccctttacatttagtgcccatgttgtgcac

SEQ ID NO: 31627 - DNA, 1091 bp, Homo sapiens
ttttggttataattgacaaaatccccactaatgaaaagctatatgttgaagaaatatctcaaaatgaggaaatgtaccaccctacatagaaaataagaaaatcaattgtctcatgtagcaagcagtccagaggttagttcactgtctccatgacataacttagtacctgggctctgtttaactctaagcagcatcatggaaagcttattggcttggttcgcttgtctccttaaggttctaagatggtaccaggagttccaacacaacaacagccagattaagaaggaaccccttgagaatggctgatttcaaagatggggcaggaaaaatacaagatgggtatgtagcacgttattgtgccagatgtaaaatgtgtttaaagaatgatgggccatgtcaaaaggacatagcaaccagtttgaaggagctttctttggccataatttgggacaatttgagcattaaaataaataaggatggtaatcaattataaactatttaataaaatagaaatcaataactccaagctgatgtaaatatgtgaattaataaatggggagaagatagtgcttttccttatagtagaatgctaataaacactaaagaaatgattgaattagaaaaaccaacatttggcaactatcataataataattagttcgatcagtaaacgtcaatgaatactaagaatgagtgagtggaattttgatgaagaacaggacattgacatagtctcaaagtccctaaacatacttattaaatacaaaggacaaaggaatgactttacaatggaaaaatctggctgatactggcattatcaaatgttcaaaattcatgtcaacagtaatggaacaaatcaaaatcctgtatcatctgattggatgcaacagaaagaaaacaacatcacttctgtggtattccttccaaaaaatgcataagctgaatctaatttcgaggaaatatctgacaaacctaatttaatggatatttaactcaacaactttaaataacctttaatcttctaagatgtcaaggtcatgaacattcaggaaagaacaaagaacacttccaaattgaagaatagacaagat

SEQ ID NO: 31628 - DNA, 1044 bp, Homo sapiens
tataacatgttatattttgaagtcctaatctcggcatctcagaatgtaattttttttggagatgggatctttacattgataattaagtgaaaatgaagtcattatggtgggccttaatccaataggactggtaaccttactagaagaagatattaggacaccagtcatattagattaaggccaaggagagaggcctaaaacagatcctgccctcatggccctgagcaggaaccagccctgctaacaccttgatttcagacttctagcctccagaactgtgagagaatcaatttctgttgttgaagtcactcagtctgtggtactttgttatgacagccctaggaaacagcatgcatcagaattttattccttttttaaaaagaccaaataatatttcatcgtatatgtatatcatattttgtttatccattcatgtgactgtttccatctattggctattattaataatactgctatgaacattggtttacgagtatctactggagtctctgctttcagttctcttgggtatttacccagaagtaaatccatgtgctggatcgtatgataaatctatgtttaactttttgaagagtcaccacactgttttccacagtggctgcaccatttcacattcccaccagcaaagcacaagagccccaatttctccacatcttctccaacacttgttattttccttttttttggaaaaactcatatcaaggagttctacttctcaaatggcagaatacgctctgtgatggttaatactgagtgtcaacttgattgaactgaagggtgcaaagtattgatcctgggtgtgtttgtgagggtgttgccaaaggagattaacatttgagtcagggggtagggaaaggcagacccacccttaatctggatgggtacaatctaattaactgccaagcaggcagaagaacgtgaaaaggcaagactggtttagccttccagcctaatctttctactgtgctggatgcttcctgccctccaacatcggacttcaagttcttcagctttgagacttga

SEQ ID NO: 31629 - DNA, 1032 bp, Homo sapiens
catgtccatgactccctgggaagaggacaatgacagccctgcctttggcacttctcctacactctgttctatcagcttattctcttggctgattttaatctgtattctttcactgtaatataaactgaactgcaagtataatcgcttttagtgagtttttttaagaaaattattgaagctgagggttttgggaatccctctgagtatacaattggcgtgagaaatgaagatggtcttggggacagtgctctctaactttatggttgcctaaactaattgcagtgtgtggttttacctatgtatacatgtgcgtatttaaattacctaatagtgaattccattcatggtcctgggatttgaatttcatctttcatacggttggagaccttctttatgcctgttgtgcctcagtttcctcacaaaatggggttagtaacaggagcttcaactataggattgttatgaggagtaaaggaacaaatgtttgtaaagctgttaggttggtgcctgttagcacttagggttacaaaacagatgataatgattttcataccagaccatggaaatctaccttgttgcttttaataactgaatggatatcatttctattagttacctctgggtttcccacaaagaaagtagtaattagggaactaaaatgtgttgttggaaagtgactcttgttgcactacaaggttgagtaaattagtcagctagtctagaacaaagtatttatctagcaccaattatttatctagaaaacactaagttggcccacactatgtgcagaggcccagtgctgaaaactgtaaggctataaaaacaggtatattgagataagcaaaaagggaagggaatgaacatcctttgaggatctagtaagtggccagtgctattcatttgttattttatttaatcgtcacaccaacactggagaaaaatagtatgagctcattttcaagaagacaaaaaaagagtatcagtttaagaaacttgcttaagttgacaaggccacgatatgttgaaggtaga

SEQ ID NO: 31630 - DNA, 1021 bp, Homo sapiens
ccctggcacttcccaacccccagccctgtcttctcctggcctctgtggttttggccgctgtatcctgatggccacaaggtggcggtggtggctgctacatccccaggagcagccctgagtagccccttctgctgctgctgcagccagccaggggaccctaacgtgggaggttggcctgataatgtgctttgctggagctgcatgaagtgggacagcagccgggacaggaaccttgcagactgggctgagatcctgcgtttcctgcatcccaacatgatcctgggccagccacttccctccttcaaagccagtctctcacctgcgaaaaaagacactaaagcacctcagagggttttgcagcaaaaccctcgaaatgtgtttggcacccggtgctcaaaatgtccctttctgtcctttgcaatgggcatttccccttctctgtctctgtctgcacatctccctgatttgtaggagagagaagatgcatttttatctacatgaatacggatcatcttggagctggaagggggctgagaaatcatgcagttcaggcactgcaaacttacatgcctaccagggccaggcagtaaggagggtgacagagcgtcattcaaaggggcctgtcgacactcagctttctgtaggcacaagacccagtgtttccagactgtctgaagtccagatttttagatgaaaacttgtagtttttcaatattttggcagctgggaaaactgaggcccaaggaggggaagttacctgtcctaagtcacacagtttgttggtggcaggtccaggactagaactcaggtctcctgaggccctgcctctgccaatacagccattccgggagccaggaagggtaaaccagggggcaaatacacatttttctttaaaaaggagtataatgggagtggaggtcacttctctgaatcttttttctaattttgcctttggtcctagagctgtaacaaagattcatgctaatattttactcaagatggagaagttagagccgaaatc

SEQ ID NO: 31631 - DNA, 1014 bp, Homo sapiens
tgagggtttgaatctatcatcctgctcagaaaaatgggcatgataccagtgcccctctcaaaggggtgcagtgaggacatgagtaactagaagcatccataagagcttggtcagtagaaggctcttgtggaagaggagctcccagaacccggtggattgggtgcagagcagctgctatgatgaacgatatagatgtttccctttgttgtattccaactgggtaacaatgggcctgctgttctgggaggggcctgagggtggtccatcagagcacatcggtccaagcacactcgaagggcagacatctctttggcaggacgtctggaacatggacagggatctgaatgaagatgacagtaagtagagcctcaaagatggcacggaagactgtgtggagatattttagcctgcatttgaagaggacctaatctgacctctaatatgttggaagttatgtatccatagtcttttctaataagctctgtagctagcactgtgtgaactcttccatctgccctaaatgcagtcctgggtctgcatctggattgccgagagcaccccttccttccttccttcctctcgtgtgtaaagcctacctgtagcttgcgatctcttcttccgttatgagcctttggacaatggagaaggaaggtgaaagatgaaattgagaacttttctctctatcacagtgacaccatgcaaaccttatattcttttccctttttcttcttttctctagttgacagtgtctcctgctcccagccaaatctaagtgagattttcaggattcttatttcaatcacaattggattcagttcttagatgatgttaactctacagaaaggtcgggaaaaggcttcactcgtgatctttctctagcaaacggccagttcgttcattatcgcttatgaaacatagcccaggtgaccccatcctgtcactaccgggacagaaatacaatggattctcagagctatttaaaaacatgaaggaaatggtatttcaggaagaaat

SEQ ID NO: 31632 - DNA, 1037 bp, Homo sapiens
ccccaaatcccacattacattgagtcccatgtcccccgttctcctccgatctgtgacagttcctcaacctgtacttgtccttttatgaccctgagagtcttgaagagtacaggtcaggcatttgatagaatgtcccttagtttgggtttgtcatgttttctcatgctttgatagattgagattatggatcttggggaagaatgccatggtggtgatgtgctcttctctgctcaaaatactgcgggtatgtgctattggcacatctgttgctggtgatgttagccttgatcatgtgattggatggcatctgctttccccactcaaagttgctattttcccttttgtaaataatacatattttggggaaagttctttcttcttatcccttttcttcttagtatcctatatcttgtcaaacttttgtccactaattatagtattgtttggtgaatcttgcagcaattattgctgtactgctctgataaagtttgtctactttccttattctgtctctatttgttaactggaattcttctgttctcccttacttgttatttattcaatcacttttttatgttagcattgacttatggttattttattctttgggttataaaaaatgtttttgttacttattttgttgctcagttttgttccaactttggccactgggagctcttttaggttggctcctgtgtccttttacatgatgtattccttttatagtttaaaaaatacaacagagtacaaataattaaaattgttgtccaccgctttttattttgttgtttcatttgaatgagagagtatgctgagactagccaaggagcaagtgagattcatttggggtacgtaaacaaatctttaaaagagttcctccctcccttccttcctttttccctttcttctttcctctcttcctccttccttcccttcctccctttccttccctccctccctcccactctctttctctctctgtatgcacaattctttttggcatatgaggctgaatggttgtaaaacgtagaatcagg

SEQ ID NO: 31633 - DNA, 1021 bp, Homo sapiens
cgcgtggccctggcgcgtgtcagcagcgtcaagctcatctccaaggccaagatccgcacggtcaagatgactttcatcatcgtgctggccttcatcgtgtgctggacgcctttcttcttcgtgcagatgtggagcgtctgggatgccaacgcgcccaaggaaggtagccagggctgggagacccaggaggagggagcctggtggctgggggaggcccttatcttgctgcctcagaatgtccaggggtctgtggacttcctgggggataagcgggtttgaaatcccacagagtcactgctctgtcatcccttgaccaagtgacttagggcaattaacctccctgagcctccactttctcttctgtaaggtggcaataaggataaaagtaccaactgtcaccaggcataggggaatgccacgagaaaatgcagttaaagtccttagcacagtccttgggctgcatatgggctgtatggtttactgtggtggtggaaacaggttcaagggactccatctgctttcccacgtggttaggaggaggtggtggaggtaagtttggaacccctggccaagctcaagctccttcaactttaagttcacgttaagatgaacttccactttaagttcaagaaatccagctgaagccaagaagtctggtttggacaaggacagccttgcaggagtggcaatttgtccaaccaagcacctagtagttgaagggggtgttggggggcagaggagtccaagggagaggtgaagacaaatccctgaactcctcatcgagtggaggtgatgagtctccatgcagagaggtgagtactgcaaggagtggtgggcaggcttagggaggagagcgcccaggactgagacttcacttccacttggaggaaagagaagaaagccttgagggggacattcaagtttgagggggaggctgggtgatttctgtaggtggggaatgtgccttccaggtaggaggactgctgaggacaaggctgaaggtggggcaattgtccattct

SEQ ID NO: 31634 - DNA, 1033 bp, Homo sapiens
ttggcaataaaaagaaatggaatcctgacacatggtacaacatggatgaactttgaaagccttatgcttatgaaaaaggcagacacaaaaggccacatattgtctgatcccatttatatgaaatgcccagaataggcaaatccataagagacagaaagtagattagtagttgcctagagctgagaggtttggagagaaatggggagtggttgctaatggatatgaggtttcaccgtgaagtgataaaaatgttctaaagttgatcaacacaatgttgattgtgttgatggttagtgtattagtttcactcatgtgatggcttgaaataacataaatttattgtcttatagttctgaaattggaaatgcgtctcactgggctaaaatcaaggttttgacagaactgcttccttttagaggctctgggggaaaatttgtttcctttcagcttctaggactgtgcatttcttggcttgtgacttggcttcctccatcttcaaagcctgcagtgtagtaccttcagatctctctgactccttcactgactgcactcccacccccctttcaattataaggatccttgtgattacatgggtcccacctatataatccaggaaaatctctacctgaggtcaggagttcgagatcagcctggacaacatggtgaaactgtatctctacaaaaaaaaaatacaaaaaattagccaccacgcccggctaattttttgtatttttttttttagtagagatggggtttcaccttgttggccaggctgatcttgaactcctgacctcaggtaatccacccacctcagcctcccaaagtgctgggattataggtgtaagtcaccatgcccagctgactctggtattttctagctgtgtaaactgaaacaaattatttaactttccccagcctctgacttcttatctatagaatgaggataataataaaatttatttcccagaatttaactgagatagttcgtgcaaaggtctctgcacacagtgagcactcagtaatgattgccatg

SEQ ID NO: 31635 - DNA, 1080 bp, Homo sapiens
tatttttggcatgaggactattccttactagaggtaaagcagaaaagaaatgggagaaaatttttgcaacctactcatctgacaaagggctaatatccagaatctacaatgaactcagacaaatttacaagaaaaaaacaaccccatcaaaaagttgagttttctttttaaaccagaatggtgttgagttgcgtcaaatgttattttgcatctattaagatgatattgatattttgggctatataactctctgatgaaagggggttgtcctgtgcattatagaatgcttagtttcatgcttgacctctatcactagatgccagtagtaatccaattgtgacaaccaaaaatattctgacattgctaaattcccctgcagggcaaaatcacccgtggttgagaatcattgctttaatacatcactatgaagtttaaaaagtatgtttcaatctattttatactcctccttcattagttggagcttaattgctctgtcttgagtgtggactggcttagtaactacctctagttggtagagtgtggtggaagtaactgtgtgacacttccaagactaaattataaagggcattatggttttctcctagctatcactccgggggaagccaggtgccatcttgtaagtacactcaagttgtcctaaggacagatccacatggtgaggaatgaaggcctgctgccagtaactagcactgacctgccaggtgtgtgagtgagccatcctgtaagcagatcttccaagcacagtcaagcattaagataactacagcctctaacattatcttgactgcaatgtcgtgagagatgctgagccagaatcatccagttaagctactcctaaatcctgacccatagaaactgtgtgagatgataaatattcattgttgtaagccacgaaaggtttggagtaatatgttgtgcagcagtagataactaatacacttacactgactgattgtcaaatattaaaccaactttgcattactgggacaaaccccactcagtcatggtgggagttttaatccttttgtacaaaaaggattaaatatatgtgtatgtata

SEQ ID NO: 31636 - DNA, 1056 bp, Homo sapiens
tgcctatgaagtgtgctaagagaggaaccaggaagattccacctcagactcaaaaatcttttttatttctcccattccttaagttccttcaatgtagatggattgcttttggtcaattgcatcaattgcattaatctgtcacagagggtctatcatgcatggccattgtcatggataaagtaccttaattactttgctcagtgccttgcccttagaaagtgctcaggatatcttagttccctcctcccagttcattcctacttttcctgaggcttccgtcttgcaatttacgttacaccacaggagggaatagagtaagggtctatcacctccatgtaagtgagtttgttggttggttccttgaacaaatatttatggagtgactaccctgtgccaggcactgggactatgttcctgaatgaagtccctgcctttatggagcttacaacaacgtaggggacagagagacagaaaataagtcaacaacccataaaataatcacagactgtgataacactaggatggaaacaaggtggggggctgagactgggcagctggggaaccctgtatgactgatgatagctgcgaatgaggaggagggaagggaaggctggagaggaatgagaaaaggaggctgaggacaaacaggcttcctgtgcctcctccacgattttgccccatgactgtggaaaggacactttagttcaagtaaacacataaatctggagaaatatgatctgtcatagcaaatgcaacacatttagtcaggattccctcaaggattggagcaatagacttgggtgtcaggagccctcagttttaatgctagcatagccccctattccctgtgtgtctttgagagagtcccctcccttctctggactcctggatcctggagtctatactgagtgggtgggactcagtgctgtctgaccacctacggcttgatgaaatgaccagcaccttccatgggagttttagcatagctccagaaggcttatggctctgtcattgctgcccatagctgttagaattcctccttctctgcccggttgt

SEQ ID NO: 31637 - DNA, 1064 bp, Homo sapiens
agagccaacactcttatttcacgttcagtctcagaggggaaactttcatcatgtttgttccaggttaccctctatcagtacattttaacttattgcttttctagcattaaccaaacttgcattgctgtagcacccaacttgattgtgtagcatttttcctgattcttactattctcactggattaattttgctaatactttgactgtgattttgcatctatattaataaacaagattggcctgtaattttcctttctcatatctttgttgattttggactcaaagtgatgcaggtcccataaaactagctaggaagaatttcttcttttcctgttttctggtagagttcttgtaatatctggcattatttctttctttagtatttggcataatttactcataattttaggattcttcagaatttctacttcatcttgagtcagcttttataagttatatttttctgtactgtgtccattttatctaagttttgaaatttattgtgataaagttattaatactatctttatgattctcaagtgtctgatgaatctgtagtgatgatcactttcatgttctctaaattatctacttatgtattctctcttttccttaattagtttctctgggtttttcttcaaagaaccaactttggcctgttgattttctatattgtgcatttgttttctaatttattaagttcttctcttatcttattttcttccttctactttgcatttaattttttacgtatttattgaagtgtagtataccataaagataaaaaggcacaaatagtaagtatacaattaatgcattttcagaaaatgaacatatctacttaagaaatagaacttaacaatacaagcccctcattattctctgcagccattgacccctttctgtctggaagataaccactatcctgccttctaatactatagattagttttacctatttttgaaacttatacaaacgcaatcatgtaggtattcatttgtgtcttgcttctttccctgaacattatttttatgagattagcccattatgttgtacatagcta

SEQ ID NO: 31638 - DNA, 1049 bp, Homo sapiens
ccctgcttgaatttttattggaattacattgaacttatagatcaaattgaagaaattaaatgccatagaaaaatgccatagatattggatatatctatagcagttaattttctaatccatgtacttgatataacaaatctcctttaattaattaattaattagttaattgctttttgagacagggtcttgctctgttgtggtgcagagtcatgatcacggctcgcttgcagccttgacctgggcccaagcgatcctcccacctcagcctccagagtagttgggactacaggcatgtgccaccatgctctgtcaatttttatttttattttttttttgtagagataatgtctcactatgttgcccaggctggtctcaaactcctgggctcaaagattctcctgcctttgcctcctaaactgctgggattatgggtgtaagccactgcatctggtcagtcttctttaatttctgtcaataacattttatagtttttagtgcagacatcttctgtatctttctgtagatttattcttaggtattaaatactttttgatgctattgtaagtgatagctttaaaaatattttctaattgtttgtggctgctatataaatacacacttgattttgactgttgacccatgtccaaaccttgctcaattgactattaatggtaatcgtaatagtttatgcataaaaatatataatttttatatgttttttcttttctttcttttttttttggaaacagggtctcattatgttgtctaggctggagtgcagttgtctaggctggaacctctgcctcccaggttccagcgattcttgtgcctcagcctcctgagtagctgggactacaggcatgtgccaccatgcctggctaatttttttttttttttgtatttttagtagagatggggtctcgccgtgttgcccaggctggtctcaatctcctgagctcaggcaatccacctgccttggcctcccaaagtgctaggattatagtcatgagctactgcacctggcccattgatatttcttttatcctgt

SEQ ID NO: 31639 - DNA, 1099 bp, Homo sapiens
gcctctctctcctacatcaatgagccgaggcctctgagttctttatctgctctccaggggattcaggtacacatgaaagttggagaaccactgggtaagagaatgtctgacagcagggagtataaggatcactggccagaggcagctcactaatctgtgaccttttgggcctagagccaggaaggaaaacaggtattcatatataggtttcactgttgtgaaactctacatcctacattactgcattggaacataacgccttgtaaggtattattgtccccattttacagatgagaaaactgaggcacaaagatagaaagcaacttgcctaaggccacatgggattcaaactctgatgtgtctgacttcagatcctggggagactgagttctgatttctcttctgtgacctggaatctgttacaaggagcactagagaattctgttatctcttagctcaggtgatgctctcattgttctttagaagtgccgccagaagttcatgctcggagactattttgtgttcacaggaaactgctctttcattcatgccccttttgttctcccgagtcagggatctcagctccctcttttctcctggaaccctctaattagcctaactgtaaatcgaataagcagatttttcagtgacataatgcagtttggaactatatacctcttatgggctgcatctattttccctttccagtacctctgcaactacaaaaatcttatgttgacaatagagatcatgtcatgtttcctttggtttgagattctgtgtgacctgagtactttaggcaattatctatgaacatctaaactaagaaaagagcaaaaagggcaaaagagtgcaagattgttcccattcccattaaagaagacattctcttctgtgtttaacatgggcaaaataaaagtctgtttattagacttcaaacacgtattttcacaacacatttattgtgtgcagcaaagttcaactctattttgtgcctgtacatataagtatcaaaggaagcgccttcattcctagttgctgacaaatatgaagttgctttcaagaaaacacatgcaaaagcaattacgattatgaatgg

SEQ ID NO: 31640 - DNA, 1381 bp, Homo sapiens
tagcttggtgacctctctggtgcagaggctgtcttctctcatcctgctctttcccccagaggggcccagtgggacagtcctgaaaatgcaatgtagaaatcccagctgaggtgccctccagaatccagggctccagctgtgaatacttcagcaagaaggagccttgtgccagggaaggtggcggagggcggggtggaagaattgacagggctggtgtgaggaattagggcgcttggataaccaggtgcaaagggagttctgcacccatgcctttgcttatgtccttcccccagagcccagtccttgcccacctccttcatggtgctttcctccaacacccctgaatgaaagcagctggctcttgttgttcatgggcagtgggtttcagtgaaggtctctggagcagagttcaggaccccctaggtcctactttgtctagtaacatgctatgcagatggggcatgtcagttacttcctctaggaatcaaatttttgtaccctttaaatgaaggatctggagcccaggacctctagggtgtctgtcagtttcacatttggaaacgcttcaattccaaagacctatcttatcttattctggtatcttgcttttgtcccttctcctgctggccttgagctagggctgtgcatggcctcgagctagggctgtgcatggcctcagtgcttccatgtgggctgaatttcataccacagatgtttgctgaatgaacatcatgcctgggactactggttctatttttaggagcgtgctggaatttctaaccagactgtgagcttcctgaggttagggtttggagtgtgccgcacctcagaacccagaggagactgagaaaggacccagggaacactggggatgaaaactttctatactctctccatctacataacaaacagaactcattcctgtattttggaaaacacagacatctgcactttgtccccagagatcctgatttaattggcctatggttggacctgggaggtgatgttatccggaagctaccctagatgattgagctggggtgagaagccctgggctcagttaatacctgagagcagttccacctctgccattctgtgactcctgcactccccatacgtgctgttggtacagggcagaggagccctatgtgtgaaaactacttagggctttacattttttactggtaataggagttgtgaatcttcttgatgaagctcatattttatgcttggttctttgtagacattctcttttaattgagtcttcatagcaactctgtgagatcaatttcatgattgccattttagagatgaggactcgggagctcagagaggggacttgatctgcacaaggtcacacaacgagctaatcagtggctga

SEQ ID NO: 31641 - DNA, 1042 bp, Homo sapiens
gtatggttgcacattgtttgaaccagtttcctactgagatatttttagatttccaatctttttctattataaatatagctaaaatatacatatgtatatatatgtatgcacattgtgtgtgtgtgtgtgtgtgtgtgtgtgtgtgtctttctgtgtgtgtgaatctgtaagacaaattcttaaaagtgaacttagtgggccaaagattttgatagcgtggccactttaatgccttggatttagatactgctttcaactttccctttttgaatgattattccataggctctgtccttttgaatcagaggcttaggatctgagataacaaaaacaggtctgaatatgtatctgcagaataaaaacaagggacagagagttccaagatccacaacttggaaggctcttcagaagagaataggttttaaggtgcttggaagcctttgggcagctcatgctgtcactgaaggcagtcgttgcttctggaacgcccacttcctgagcctctagaggactggcaactgcagaggatgccctgcagacccaagctggactgtaaaacccttgatctgggttgtctataaatgccaagggagggtataataaaattagtacaaaagcagtaaatatttgttgcatgaacgagtctattcttaggtaccttcctcttagaatcttggaacatcagggctagaagagtccgtggagaccctctagtctaccatttgagagggtgggagtggtgcagctcttacatctagtattggaactattgaactttgcccctaccactctatttatgtggaattgtgtatttggttgtgagtgccacattttaggggggaatgtagttgaaaaggatcctgtccagcatgtggggaataaatgaaagacccatatgtgttaggcttgggaggggagagggaactttagaaaggatatatacgtggcacttgtcttcatagcctcacagtgaagaaaatattctaagcacttcaagaactataactagagccagtggatggaagctataggggtacggatt

SEQ ID NO: 31642 - DNA, 1035 bp, Homo sapiens
gatcagggaccttgcttgggtggtgttcacctctgcattccagtgctctgaacaacatctgagcgtattaggtgagcagcaaatcagtgtggaatgaatcatctctgagcaaagagatctgatcaagtgagtcagggacccattgaagcaatctcttcctttcttcagtttctgctcttctcagctgtccctgaaatgcttggctcaaccggatgaaactaacaccaactgttttatttatgtgaactactcacttttttctccaattcctatgactcaatgtatgcatgtgtcttcactgaagtgtacaataatctttattttaggcttattggacacaacactaaatgctttgtctggatgaaatttgttacttttctagtgtggacatgctctcccaactaacaaattgttacagggaccatcaataaggacctaaactatgggaataattttctgttttcatttaatacttatcttttgtcttatttcttagggcctaaacttaattttgctttggacctttgctttgaacctctgtgtcagatgcacaacatctttaaatcttcatttgaagatgactaagagactcagtaattaaaagctatcactccatcttcctgtgtaccttcaagggttttattaatagctttcctttctgttgaacagattatcctgcatctctgtgtcttattgaaatgctcagcactcacatcccttttctcgggagtttttacaacaagaagagcagaggtttttgttacggatacaaagctctgcttttgtgagcatgttgattcattctcatcagggaacagatgaggggttgtgtgaaggattggggcaaattgttatcacgaaaaaaaaaagaagcctgaaatattgttttacctttcttgacctaaagttcaagatgtcataaaatcaaccttaaagcttacctagtccaatgttattattatatagatgaggacacttagttcagggaggaaaaggggttctcccaaggccacacaattgaaacacaaaagtcag

SEQ ID NO: 31643 - DNA, 1007 bp, Homo sapiens
ccatattatccagttcagattccatggtccctcacaaccattcccttgcctctcccctccaccacttttgcctggtgctcttggttttcctgccacctgtctagttacccttgctcagtctcctctgctcaaacctcattctctgtttgacttctagccatgaatgagaagtgccccagagactagtctctggctgtcttctctagctatgtcttctccctagttggtatcatctggtcacgtggctttaaattctatctctaggctaatgattctcaaaagcattcctctctgtctttgacctctcactttcctgtaaagcctgcttcccacttcctagtcattcattctccctaatgctttactgctctgcaaaataattgtctacattcctcatcttcccctccactcttctatgaaaatgagtatttttttaaaaaagtattcctctcccctgagtttcagactgatttacctgacatgtccacttggcttagaggcaccccaacctaacatgtccaaaggagaactcctgagctccttccctaccccaagcctgcttttcccaaatcttcctatttcagtccatcacaccctcattcacatagttgctcaggccaaaaactaagtaatgagttgttgaacaaacatttggggtttaattaggaagtaactatttttatctcctcatagcccttcaaaatgtattcagagggttgtctaccccaggatggaaattcctgtggtcccatgacttttgtgatcactcttaggtaataataaacaacaacaacaacaacaaaaacctatagtccaaagttaaaatacctggtctcatgtagtgataaaagtctgaccttgatttatagttacgtcttctccctaccctagccggagcttgctgtaatctggcttcttgcagtggatgtggctggccagtggtcaggggcttgtgcacttctctccctaccctaccctacgtcatgctttcacctaccctccagcat

SEQ ID NO: 31644 - DNA, 2361 bp, Homo sapiens
atgaaaaaaaagtaaaaatgataagagtgatagcaaaaatggtggaaattctctgctccataaaagcaataacaaaactgcaaaaattgtcagaatcaacttttaggaaaactctgaaaattaaccaaaagcagcagcaatttaggtaggggtcatttattcaagaaaaatgtctgaatctcagtgagaacagtgagctttgtggtgattcgactggctttgttctcatccttctctctccagttcctctatggccttgggagccaacagtctgcagtcatggtgaggaccagcaggctgacagtccccagagaaggcagagcggggttggagcccctttaaagccacattcccagagaatttttacttagcctgtctaatggttccctggaagactctacttgcaagactatctttactttatttttacttagcctgtctaatggttccctggaagactctacttgcaagactatctttactttacctgacttggagcttgctgaattcaaaaagccttttatctaagggtgtttgttgaaagcaattagaggcatttgactagctttgcagctgtctgaggtggtagataacagttggggtaaatgatatgctaaccaaaaagcctaatggtaaaagctgaagaataagatttccatgggggttttgaacagctataaaatattcctgggaatctagagggtcactctcattcatagagcttccgtgcatgcttaggaaagacctaaggaagcgctaaactttcacctctggttaaccatgaggctgtgtgcaagcaggaagtaaaggctaaggcagagttgtccactgagtgttgagtgaatgttgattgcatgccccagcacagacacagaacccaccagcaaagactggttttgctgagtttctgtatgatattggttccagatgtctaaggaactgttcaatcattagtggactacaaagctaatcaagcagacacttttagttgccatatacaacaaagaatacatatttataggattggtttagaaaagtcactaaacaataatagcaaacagcaacaacaacaaatcctggagagatcttgtttgttggttgtttatttttggtatttctcatgactggggttctttgaccaactttgatcttgatttgaagtgtttcaacgtttttagaaaatccacagccatatatatttacatatttattatccatagttctttctctcctttcttccaggtattacagttatacacatgttatgccatttttattgtcccacagctcttggctgctctattctatgtgcaccccctcacatactcctttttctctttgtatcttaatctggtttttattgacataccttcaagttcactaagtctttttatcaactttgtgtattgcacttaaagcctattgaaggaatttccatctcgaaatgggtttttcccttgcttcattgtgtatcatactttttgaatgcgggccatgcagtgaaggaccatagggactgaggtcgatagtgtttgtgcctagaaatgcacatccttctactgggtcattagtgtggggagttgagctgggtaattcagagttgacctggattggagtttcctagtgactaatgtgaccttcagtgcatccacttcaagttactctagcaggtggctgctttgacttctgcttagtgttggggctggattgccagagggtttttctcattgattttgctcccattttcctttcagccatgcttgctttcctgcaccaaataggggcatatcttcaccatgtctgtgtctctccctcagccatttcctgctcctgcttattgcttgttgctaggctgatggtgggaaacagccggggttcactgttatctcagtctagcctgagtcttaggtaggccctgtgtgcctgagtctcaggggtgggcctttctcagcacttccacctcctcccatggtatctggctacttgaccaaacctctgcgtggtgtcagtgtaaggtcatcagctggagatgatttactgcccctcctgtaaggtagaggttttagtttctaccattccccctgcagcagtgaatctttgcctgcgttcctgcaaatgaggtcatatgcctccccttgaggcagactgatttcacctctgttccttccccagaggccataggtctttgctagagccccagggggagtttcctgtgtttccctcagcaactgaaaagcttatgcttcatgggagagaagcattcaggagagcaggcaggacttgacttcttcctgtcccccgtagccactgaagtggcccctctccattcacctgtcctgctcccagtctttcttgtgagca

SEQ ID NO: 31645 - DNA, 1077 bp, Homo sapiens
aattatacttctatgcagctgattttcaaacaaaattatatttttgctttctggtttaaagaagtagtaatcctcatgcaaggtaaagattttcagtttactacttgtttctatatatttctgctaagaaatggaatcctatgtaataactgtagttatgtatcagatgttatttctgtatggataaattgttcttatgggcaattaatacagtcatgcatcacttaacaatggggatacgtcctgagaaatgtgatttcattgttgtgggaacatcagagtatacttacctagatggtatagcccaccacacagctgggctctagggtatagcatattgctgctaggctacaaacctgtacagcattttacagttaggcatttgtaacacaatggtacctgttagtgtatctaaacctggaaaaggtacagtaaaaacatggtattataatcttacgtaattgccataatgcagctagagcgatcttttcaaaatgcaaatctgatcactgttactcatccctctgctctaaaaatcttgaatggcttcttgttccttttaggttcaagaagggactctttaatatgcgtaaaaggtcctaaatgattggatctctttctccagactcatctcttattatttacttcatattctctctgcttcatcatatagatgtcttaggtcctcctgcatgaaaagctctctcccaccacagagcctttgaacttgtccctctacccagaatgttctttattttttcatctagtttacacccctactcagcagctcaagttcttcctggatccagtcctcctacagtaggcgcttacagcactgtgtccatctctttccagcacatttatatgattatttgtttgtccatcactcccactggcttataagttaggcattttaaccccactgtcaacatgagcctaactcatagtaaatacatgtgtgatctcatttaaatataacattatgatgttctattatccctgttttacagtgaggaaactgaggctcaaaggggtaagtctccagcccaaggtcatatagcaataagtaataagtga

SEQ ID NO: 31646 - DNA, 1060 bp, Homo sapiens
ataagcctattaatatcttcctggaccaaggttgggaattccatcgaattcaagattcgattttgaatctttgccagtgagtctttctcacgtgtaatctatatattaatatccactgtagcctggaccagtagggacatcagagagggccatttgaatgcccttccataggggagctgtaacgttcatgtaccaaaccttacattcatccagcttcttgaagcgtggtcttccagaatgtttcaagaccaaatagtagacaagctgaaaaagttcctcgttctagactttaaagctgcagttgtgtaggcttgtatatgctctgaccccagaaatatcagaatgagtaattaattttctcctttggaagattttttaaatgtcttgaaagaatgttaaaggaatttttgatcctcaaggcatattaaaatgactaagacttcaaaaatattaattgcttttatccccagggaagcgatctgagtgataattttagtaacactgactgctatacctaagtgtctttttgtaaaatcctatttgtgaaactatgtttaattttaggaatgtggtttttgagcagatatggtaataagcacattacttgaaaaaggaatgagcagttctgtctggtattttaattgtattagcatcaactgtgtttttcagtggtgactagaattggaacagcagatatagcagataatcctgaaacttcattttagataaaattctgaacctcccaaattttgtatcagtccatttagtgatttggttatcattcaggtgagtgcctgaggtggggcagaaggaaagataatgggaattgaagacaccagggagctgtgcagcctggctgggcagtgacattgaagtcacagaggaagaggagattgcaggcaacttctgagatgtgttttttgttaaccacctctaacatctgttttcactgaggtagcatagcaaaaacctcttagatttatgtcattagtgtactgcaaatgttttcctttaacaaatcagtgatttgtgctggtgatttgaaagcccctaggtaaat

SEQ ID NO: 31647 - DNA, 1028 bp, Homo sapiens
ttttggagaatagtagagcaaactttactagagaaaggtgcaagagttttatagcagtattgaatgcccatttgagaattatgatcatgaaattaaagtgtcactagtcagttcagggctagatgaataagcctgtagtgaacattagccataactgttaaactctgttcttcatccacatttagctggttggctatcataggtgatatgatggtgaaagaaatatatgggattttactttggaaaacactgactccaaactcatttcttgatttaaagtagaagaagtatctcagtggcatcactgtagaagggtgtgagtcttttctactcttgagagagcctgtttttagtcttttgtaccactgggttctgggttcttgggcagacccagagacactctgactgtaagggctggtctaaagaagagtagttaaagtgatcagggagtaaagggcttgatttcgttctaaaaaagattacatttaaacttagagaggcacaaaggatggtatgattcaggtattcaaaatctggaagaaaatgagttgattgaacgtgtacttagtcatggacactcccacgactagctgagccacttaaaacttttaagaggaaaatccaggacacatgcccaccagaactgagattttaaactctgcagtattccttgccaaatggcagatcttctaaaatgaagtaaagaagtaagtgggaacaatgttactagtcttgatctgttgacatttttcattttctgagtaggggttattggaattctctggctaaagccagagtagtggctgccatttacttttggtttccagcctagctgtggggtaattagatttaaatctgggattttattacttcagaagataataagtcattaagtctccttaactgttaatgtgattactttagcaaatttcttgactaattcttaaatctccagtctttatgtgtacagtggaatggccttagtaggaaaatagcttagacctggtctaactaaattatgtagatcc

SEQ ID NO: 31648 - DNA, 1031 bp, Homo sapiens
tttggatcacatattgcatttcgtggtaatatcttttcaatctctttcaatctagaataattcctcagcctttctttgtcttttatgacactggccttttaaaagaatacagtctttgttgtgtgtgtgtgtttttcaagtaaaatcttctcattctggcagaaaattcagattatgccttcctggccagaatactatataagtgatgttttgtcttcggaatattacatctagagccatttgacatctgtgtacccctcatttgtgatatcaggcctgatcacctggccagtttctctctggtttatactttacatccgctgccttgctactaataagaagtctgcagagacacttcaacactatgtagctattctatacctcattaagatttcacccctatatttagcatcctttggtaatttttctctaaactattcttttctgtgatagttgcaaaatgatgatttttcaactttagcattggtttcacagttgctaattgatacttggcatgattctgaaaacaagagcccttccctctgccttattattattttctttttcttttttttttttttttttttgagacggagtctcgctctgtcgtccaggctggagtgcagtggcacgatctcggctcactgcaagctccgcctcccaggttcacgccattctcctgcctcagcctcccgagtagctgggactacaggcgcatgccatgcctggctaatgttttgtatttttagtaaagatggcatttcaccgtgttagccaggaaggtctcaatctcctgacctcgtgatctgtctgccttggcctcccaaagtgctgggattacaggcgtgagccactgcgcccggcctgccttgttattttcttatttgtctcttatgaatatggattcacagatttttaactcattacttctcttaattattttcgtgtttgtatttttccacatttggccagcaggagtgtcttcattctaattcctgtcctcatgacatacacccccattattttcatta

SEQ ID NO: 31649 - DNA, 1069 bp, Homo sapiens
atggactcccctttttctagatccatccatcagttcgaatacatttctgatacatcatttctgatgctgtcagtttgtttgaagacatactcgtccatgtgtaattaagttctaatagtggtttaaattcctgcttcaaagaacactatagtcctgccagtgctctgtagtgaacttataagcactacctcctggatccccctcttagtgtgttaaaggctttgagaagtcctacattaagggttactgttaggttttgtttaatttagtaatcctaaatttatttgaccgccaagcctttctgttctcatcacttccatcttacaaaactggtgtttgtggagattctgaagacaacactgggccatgttcttctttagttgtatcttggccacggagtcaggtcatagagaaaaggccctgtgagttttcctgtctcctccacaatattctgacaggccatctgctgaatgtgagtggcagcccttaacccttctatataaaaccatgtcagaactgcctcagattctgaggccccttaaatgtattactcagttccactaaatcatggaagaaaaatcaatgtcattttcgtgtttggggaaacatttatcaggtttcatgttttaaaattcctgatagaaattgttgatctctggtggtgctttttattgtaaatgccagtgaacagtacagttcttcactggaatttcacagtcacagtttaatcatctgtccttgataaaacaaatattttagatacagacgtaatgaatcatctctccctgtgtgcttctgtaaacacaaaatgattcagctgttgctacctactgagatttcattttgccataattttatcaaccttgtagagtcagatgggttgtcattgtaagaagagcaattttcagaaaaatataatctattgagagtttgcaggtcttttcacagttaattagttatttctggcttttagactttgttaatacagcataaaagacataatttatttggggaatggctctgttggttaatagagaaatttttgattgttttcagtctatacctgact

SEQ ID NO: 31650 - DNA, 1641 bp, Homo sapiens
tttcttcccctcattcaacatatcagttcccatttaatcttgaaaagctctttttatcttattttaccaccacttgaatgcctcctcactgttctgcctgccatataaagcctgtgacaatttgaggcctaacctagtcatcccgccttattgctcacctctctgtctcagaagtcctgctctagcctccccactgttcctccagtacactgaggaattggcaaactacaactggcagatctaatctggcttgccacctgtttttgtaaataaaagttcacatacccaccctattctctgtgactgctttcattctacagtggcagagttgcatggttgtgacagaggccataggatccgtaaagtctaaattctacctggcccttcactaagaatgtttgccggcccctgttctatacctttccagactctatccagatcctcactattcatttgttatgttagaaaacactgtctcacatcacaaaagtgctatagcacttgttttctggactgttttgtatcccatttgcttaactgtttgatgaatatgtcagcttgtttaactttttgtttctgtatcttctttccagtgaagtttagagcaccttttaggcagaaactcttagacatctttggtatacccataccacacgtagtgcagagatgtgagtgtgtattaaacttagattgaaattagtttattagtacttaacgtgtttacatcttttaaagatatataaatttcacttatattttctactatgtctatccttagtctttttaccaattgacagttcttattgtagtattttttagcttgatggttaactgtttttcccctagcggaaccttttttcccaaatgaaattttacgataaaccataacgtataaaatagataaaacagattgttctgttccacctgacctccttctgcctattatccatggtggtctgtaggccccgagatacccccacagatccctgcaactttatgaaatagtttgagaatgactgtgttccttaattttaacattatatatggaatcatcagtgagagctaaattaacaaatttgtaaccattgacaaaattgaactcaataaattattaaactacctttccttcactcggcccttgggccaggtgtgtcttacttaagtcgttactattgcttctgggctaaacatggatagctcctaagggttgggaaaatttaagatgagttctatagtttggtcataccttggtagaaaagatgtaaccgaaacatttttaataaatgaactttcaagcttatttgcagtctctttctctgggaccaggacttcaattttgtgacttcccacaatttagccattacccagtaaccagtctgtcccactcctgttgtcccgatgggccattctttttcttttctgcttttctaagtgcatgttaagttgggattcttttttactttacttgctgaaaagatgccagtttacatacttttgccccttctacaattaataaagtctctctttttctttttaaaaaatacagtggattgtcctgtttgcggggttaacattccagaaagtcacattaataagcatttagacagctgtttatcacgcgaagagaagaaggaaagcctc

SEQ ID NO: 31651 - DNA, 1027 bp, Homo sapiens
ctttctttctgttccttctgggcttttaattatgcccaatatctcatacttttttgtgtttgtctttttcattcatttttctctctgtgcttggtttggatattttctattgacctgccttcaagtttgtattgtgtgttgttatactcatccaatttagatatggtattttgcagttgtagaatgttcattttattcttttttatggattttatttctcataatacactatctttttatcccttttctttttttttctttaacatgtttatcatagtttgaagtccttacctagagatgctattctttggattacctctgggtctgcttctattgaatattttatctcttgattagtggctactttttcttgcttctttgcatgttcaataattttaaaatatgtgctgaacattgtggttgaaacgttgtagaagctgtgaattgtcttcttttgaaagatgtcacattttgttctaagaggcagttaaattatcagctcttcatctttgttctgtcaaggcctggtataatgttttcttaggttaggtctgtttgagctttgtttatatttcttcagtgtggtccatttttctaaggtgtggtctttgtggggtgtcacttgaatgtccatgatcttaccaagatttctcagctttggctgggctccaatgcgaacaactaactttccagcactgacgtttgggattttaatttaccagtatcagcttcctagtgggtctcctgtgtttttgtctaatcatgtgcagccctggaaatgagcaggaatggatgtgaatttctaagcagactggtggggttccctttcagtagctaccacgtgtcaaagcactctgacccctcaatcctggccagttttgttcagaactctgatctcttattttctctaacaagtaagatcaatgtttcctgtttagacttcactttagtacccattcctagaaaatgctcccagggtaaagtaagtcttgggggaaatgttggactacttcatgttttcttcttt

SEQ ID NO: 31652 - DNA, 1026 bp, Homo sapiens
gcagatttgaggacttccttacttttgggtgctctgaagatactccttttcctgcccaagccctagaatcagccatttctccaaggagctcctcttcttggagaatagtatttagagaccaggatctggtgctgggtatgcttgttgctactggggtgtcattgcttctaggccctctcaatggacagagctaagtaatatatgtatgttatatatatgtatgtactaactcatgtatatacacatatctataattgattctgtctgctatatattaatctgttaattcttaatcggatttattcagcatgtattaaatggtatggcatttgaaatatgtaattgcttgtactttataaagctcagatatgcaactttacttcctgtcaaatgcatgaatgtgtgaaagtgagtttggtcacccaaagggatatgaaaaggcatgtttcaatatcttggattacttttagttttaatcatgcaagtcaaacaagaatttttatgaaggacgtactggtttagatagtggtcaggtgcccctgtagttaagtgtaatcatgtgttgcttaacagggatgtgttctgagaaatgtgtcattaggcaatttggttgctgtgtgaacatcatacggtgtacttacacaaaccaacatggtatagcctactacactcctattctatatggcagggcctattgctccttggtaacaaaacctgtacagcatgttactatagctaatacggtaggcagttgcaacacaatggtacctattagtgtatctaaacatagaaaaagtacagggaaaatatggtataaaagataaaaaatggtacatctttatagggcatttactatgaatggagctttcaggactgaaagttactcttgatgagtcaatgagtgagtgataagtgaatgtgaaggcctaaggcccttaccatacactactgtagactttataaacactgtacacttagactacacactaaatttataaaaaagtttcttcaataattaaccttact

SEQ ID NO: 31653 - DNA, 1040 bp, Homo sapiens
ttaaatattcacattttagagtaacattatgtataataccactctcttaaaactgtatcaaaatgttgtggggagggatgggtggggtggcttacctctttagtcccagctacttagaaggccaaggcaggaggattgcttgagcccaagagttgaagaccagcctgggtaacataaagaggcctgtctctacaaaaaatttttaaaaatgtgtcaaatagaaactaacatagcaattttaaattttgtctttttattgaagcctcactttgatgtagtagaatgcacagatcttaagtgagcagctcagttaatttttatcagtgtcccttccaccctcaccaaggtgtggaacatctccagtattcagaagccatgcttgttccctctctccatcaatacccgtcaaacgtgaccacttttccgacctctatcaccataaactagttttgcacaacctcattcgttctggcttctttcaataaacacaagatctgtggatttcaaacatgttgctgttgggagcagtagcattcctttttcattattgtatatcattccactcaatgaatatctcacattcaaaaaatccattctattcttactagacattttgggttatttctaatatttggctataaagatactaaaagtattcttgtatatattttttggtgatcataagcactgatttcttttgtgtatgtatccatcagtgaaattgcccggtcataggataaataccataatacattggtttctacaatcatccatcaaagttacctgaacaagtcaaatgttttacactgctcctttctttaccttcttgaactcctaattccctttcacttgcttcataaaatttaatcttaacatattttatgcttgaaagttttttaagattatcatcttttttaaaactctacttatgtaagctgaaatggacattttaattttttcctttgaactctaaggatcttccttttatattgatttatgtatcattgcagtgatcagtaatacacaatttatcaaaataa

SEQ ID NO: 31654 - DNA, 1064 bp, Homo sapiens
tcattctgcccgcagtctcctgctctccttccctactccctccaccttgctttctccctccgtttcctttcttccttcctcccatcttcacttcctcatttactcatttgttaaacacttccaccctttaaaaattattttaattgtgataaaaaacacatagcagaaaatgtaccatcttaaccattttacaacgtacagttcagtggcattagatatatcacattgctgtgcagccatcaccaccatctgtctccagaactcttttcaacctgaaaaactgaaactgtacaaactaaacaataactcctcattccctccttcctctagtccctgtctgtgaatctgactcctctaggtacctcatataagtggattcttacacgatttgtccttttgtgactggcttatttcacttagcatactgtccccaaggtccatccattctcttccttttgaaggctgagttgtgccccactgtgtgcctagaccgcatctggttgacccatccatccgtcgatggacacattatgaatggtgctcctgtgaacactgtgtaccaataagtgctttttgagcatgatcacgtgcctggcattgtgctgggctgcagtgggaaatgaacttggttcccatgctctgggggtaatgttaagaagcaaacaccaatagatgtttactaagagactgcaatatgtcccgtgatgggaaagagcagtgttcggggagagaattatggcaggggtggaggtgggtggctgggacaatggtcaggtctcaggaagtggcctgaagaatggggaggagaggtgggcaggggtggggagggtccaggcagaagtaacaacatgtgtgaagccactggattgcgacagagttgcccgttggagggattgatgcttagatttctgcttcagtgtcttctccagcaagcatcctatcagcctccaggcccacctctccccatcatcttctcctctctgctcttattctagttcattcaaactgcctctttgctcagctatttctcccactgtccagtgagcggcttgagtgcaggaact

SEQ ID NO: 31655 - DNA, 1054 bp, Homo sapiens
cgtcttgttctgaaggatgaacaaaagcttgaggtgtacgtatcagaacgtaaactgcagcacgaagaccaccaacgttcacccagactgtatccacctttcgccatacgtgtcgcattccagataacgcctgtgtacacacaaaaaaaataacaattaggttgacaatctacttttacatcaactaggattcttaactgccaagataggaaacctcaggggaagagaaaacaaatcttatccaaacaaacatccccaaatctcaaaaagatcccaaagttgccacaggctgcgattttgagctaatgtgtatagcaccttggtaaagcattttgtgtcttgagtaagtagtacagctcggcctgtggtaggtgtgcagacacggctcatctcccgtaggcaagctggataaaggttccagtttctcttcttggatcccatcctataatagaaggtctcatgagtcaaacacttgcaaaagatacaaaatagaaggactatatgaaacaaaaacagtttcatgcatcctgaggcatgaaaaatagctgtagttttagaaaccagacctttgccattacatgtctatgaaataagttgagttagtaaactgcttagaattctgaatcaaaaaaattttttttagacaactgtgttagttatatgacttgtcctcttagtataataagcagtcaaactgtataaaccaaacaagtgattagaaatcatttaggccaggtgttttggtggctcatgcctgtaatcccagcagtttgggaggctgaggcgggcagatcacctgaagtcaggagtttgagaccagcctggccaatatggtgaaaccctgtcttttaaaaatacaaaaataagctgggcatgatggcatgtgcctgaaatccgagctactcaggagggtgaggcaggagaatcgcttgaacccgggaggcagaggttacagtgagccgagatcataccactgcactccagcctgggcaacagagcagggctctgtctccaaaaaaaaaaaaagaatcatttatgctgagaaacagaatga

SEQ ID NO: 31656 - DNA, 1882 bp, Homo sapiens
aaaaaaaggaaaaggaaaaaaaagttctactgtgggtaaaatgctatcatgctatcaaacagcatcacatgctacagagaagtcttgtgaaaggatgtcagtgtggcaaacttcattgtcttttaagaaattgccacagctatcgtaatcttcaaccaccaccaccctgatgagtcagtagccatcgttaacgttggcgtaagaccctccaccagcaaaaagattgttagcatttttttagcagtgatgtatttatcaattatacataatgctattgtacacttcttaatagactatggtatagtgtaaccataatttatgcactgggaaaccaacaaattcatgagattcgctttattgtagtgctctggaattgagcctgccgtgtttctgaggtatacctgtgtatttagtatgttccttgtatataaaaccccattttatagggtaggaaactaaggcttagagtttgagcaattttcccatagataacaccaataaattgagggctgcagagaccacttaagtggttctcttaacagtagtctagacatgacgtaatgagatttggcttaggagtgacaatggtaaggaagttaaaggattcaggaaccaaataccagttattgagaagaaagaatggcctcaaaacatcacttctcaaggaagccttgataccctcacccttactacactgtatcctccatttgaatgttgtcaagagctcttctcacaattgtaaataataattgtgtaattttgttttttttttcctactttaggttgctccttgagggcaggacagttcttatggctttatccgttgcgtaagcacagagaggtctgcgaggtcaaaactattgtcatgatagcaagatgcctgtctttttcatttattctcacggtgtgcagaggctacatgatgtgtgatgacatcctcattgatgttaatgaatggtgctatacttgaattttctaaggtgtcattaggtaggtttaggtatgcatacttgtttttagaaattatttttttcctttttcccatttttagaaatcaactcattttttaggttatgccttcagtaatctttgcaacctcaatattgtgtaatggttactttaaaatactgtagttttctttgtgcctaagtataaacataagtacattttgttgttttgtttgcaatagtggtttaaatattttcccaaaatatccaaatttaaaaattctacaactttagaatttaataaatttattctaaaatatttatatattttttcatttaagaatggatcggcttaaaaagactgcttctcatttacttactggctataccatctgtatactaataaaaaacaagatttgatttggaaggactgactcaaactaacgaaaatatgaaacctgtctttctgctttggagatatttacctaatcatgttctgcagtagaataatttagttcttttgtctttttttggagatgaggtcttgctgtgttgcccaggctattcacagctgccatcatagtgaactacagcctgaaactcctgggttcaagagatccttctgcctcagcctcctgagtagctggaactataggcatgcgccaccaagcctgggcttttaaaaaaattttaaaaagaattttgagacaggatcttgccatgttgctcaggctagtcttcaactcctagccctgagtgatcttgctttgggcctctcaaaatgttgagttaataggcgtgagccaccatacccagccaaaaatttttttagagatgggaatggaatgatcttgaatagtgttggtgccacctatgttgtggcatcattttgaaaccaatcattcagagtgctttttttggtaaggcattatttt

SEQ ID NO: 31657 - DNA, 1031 bp, Homo sapiens
gaatgttgaaatatattctttcgaacaagagaagttcaccttatttgtgtttctcctgcttaattgcaatccttaaggaaagtgatttttcagtgcctaagcacagagctggaagctcaataaatgttagttttgttggtttatacgtgaaattgattctcaagtaatagttaagctcagaaaacatataaacaaggctttttgggagagacttcagggtcccatttaacctacatctcctaatattctattcatagaggaaactgatgcctcatggtctctgagtacatctatcccaccattcagttcttctttgggtttcctgtactaatcattgcagttatccttttcctgcaccttacttccttgggctttttgtttaaattaaccagctacctatctccttttcaagtagttacatactatttcttacccttataagacaaatttattaagtatattacacgcttgtacttggatgagaaagctggtgaaacttttgtcagggctagtgtgtgtgtgagatttgcaaaatgtaaacttaggttacttccatatattttttgtgagtggaggtttggcataattacataattctcttttacaacactctggtttgactgttaggttaattgtagagcaccttgttaggtcacaaatccagaagtctggtactggactttgcaggttgctttcttagtggcatattagtttatattagagcacatacttctcaagaagccttttttttcttatctgtgactctctcttcttgagatgggataatgtattggattattagagaagtgtgagtattgaatcagatagttttattttatctagagcagggttaaacctgatgaattgtttctgctctctcatggagtatatcttcttggtgacaaagacttttctgtctctgatttttatcttagtcgtggttacatttaataatcctgctttccagcttttcctagagatcagtcatcagtgaccttttgtcttgatactttgtcaccttttgttttctg

SEQ ID NO: 31658 - DNA, 1093 bp, Homo sapiens
cctggatagactttcctcaatttaacagctttttcatttttcactattttccacatactacacacacaaatatgacctctctcctgaagtcacatggaatgaattgcagttacccaaatcatagagacgtcatatatctttgtggggtggttctttttggaatgctacccttgctgcttttaatcctgcagattcaaatgtcatctcccctttggtcatgccttccatggtctgttgttctatgacccaaactgcccttttaaaaaagcagttttcttctgactcctgagcagtttgtactgcgtgggtcatagtaattctggggttgttgtcattgctgatttaaattaccttaactattctgagctttttgaaggaatagtgtcttgtactcctgagctcctagtatactctgatgtctagccaactttaagtaaatggagtgagcgacatgtaaatgtctttatggtttgacattttattaatcttgagcattggaaaagtggctggtatgactaaagaactgaatttttattttttatctaatttgaattgcaactgtggacagtatagctgtagccccggacttgttctgtggattacagaatacgtggacattgatggttttctctttttactgagcagtaaggaaataaaagctgaagctctctggcccattacatttcatttaactgcttgttttgttttatttattatatatttagctgaaagctaagtccaacaaaccatttttaaagatgtgcctgccttggacaacagtgaaagcaagcgttaatgagtttggatttcaaaaaaaaatgcataatgaattttagggaggtgagattccattaaactgttacaggagctacatagttaaatatatcagaacttgaatgaagaataggtctgtgtgatacaaatgaacccagcctaaatttctgtcctacaagttttcacttcctggaaacacttgattggaggagctctaagcatcatatcttgagttatagaaaacaatcacaaagtaagttttatcctgaggaattataataccaacattttaacaccaaatgctttttatattgctaat

SEQ ID NO: 31659 - DNA, 1032 bp, Homo sapiens
gtgacaagtggagaaaatattagttgtagcccagtatggatggtataatactatttttacttaaaatatatttctttttttctttttctttttttttttttgagatggagtctcgctcttgtcgtttaggttggagcgcaatggcgcaatcttggctcactgcaacctccgcctcccaggttcaagcgattctcctgcctcagccaccaagtagctgtgattacaggcgcctgccaccatgtatggctcatttttgtatttttagtagagacggggtttcaccatcttggccgggctggtcttgaactcctgacctcaggtgatcctcccacctcggccttccaaagtgctgggattacaggtgtgagccaccatgcctggcttacttacaatatatttaaatatgtgcacataagggaaaaaacctggactaatatgtagcaaaagattaggaataatatataacaaaatctggaatatatataataatatataacaaaataatagtaattctctctgggttgttggcattatgggtttttccatattttttgaatagtagatacatacgttgcttgttttaaaaaccagaccagatgtgtctgtccctccctttgtatctggatagatacagagggggtgcccaaagggaaaggcaggttttcactgaccttgggaagccctgggaacctccaaggtgggcccttctccaagctggctcttgagtctgacgggcctgcctcccgctgcagtgtgccgcatactaagtccctggagagccgcatcaaggaggagctaattgcccagggccttttggagtctgaggaccgccccgcagaggactccgaggatgaggtccttgctgagcttcgcaaacggcaggctgagctgaaggcacttagtgcccacaaccgcaccaagaagcacgacctgctgaggtgagcgttagcaggatgcacagtcccgggggtggccttggaggctgtggccacggctagtcacctttcaggggttttacaacaggctttccaa

SEQ ID NO: 31660 - DNA, 1067 bp, Homo sapiens
ctgtcacgatcccatatcaaggcaggtaacctgacgcatgccacagcccccattgtcctaaggcctgtcacttacctgaggcccagcacgaacctagatagatcccctactgccctgggatgtgtcacttagctgaggctttgctctaaattcactgcaactctagcacttgcccttggctcccactgtcccaggacctgtcactcgaggctctgccctaaatgtccccaaggcctctgacagcacctatagcctctctgcccctgggacctctaacacacctgaggctctgcctaaaatgcacctgggagtcttggcctatgtgaacccagttatacatgaacgcccctcccccaagtctgacacagcttcttaagtccacacaccagaaatccagacccactcccagaatcctgatacagagctacaacccttagcccacagaaacactaacttctgtgtgcactgttactgcacaaggccctgacacacctgaaagtgattacagaaactgacccttcagaagaccccgtgcacatctacagacctgactcacccctgaacatcgcagtgctctgaagattctgatatacaactgaggccctcaaacccctgcagcctgacctataccataaaagcttaagcatggggtctctggccacacccgaggcccttgtgccccttatcctggcacacaaccaagccttccttgtgcatgacacacacaagagacagcaatgggggagtctctctggaagaggcagggattttcctccttcctggagagctgcctctgcttccctgaatccctcgctgatgggtccctggattacaggactaggagcctggagacacgagctaaatccagaagggaaagggcaggcagtggttgggttggcatgcatgatagtgagggttcctctgtgtcccctccactccaagctgttccttatgttcaggcctaagctgttctcaggccatgtgtaaagcccagtttcactgcttcctcctcctcagagacctgaactcctcacaggcagggacggaccatgtcttcttagtctgcc

SEQ ID NO: 31661 - DNA, 1026 bp, Homo sapiens
aaggcaaggaggaacaagtcacagcttacgtggatggcagcaggcaaaagagagagcttgtgcagaaaaactcccatttttaaaatcgtcagatctagcgagacttattcactatcatgagaacagcatgggaaagacttgcccctgtgatacaattacctcctaccaggtccctcccacaacacgtgggaattcaagatgagatttgagtagggacacagccaaaccatatcagacctctatccctgggtaactgaatagttaatgagaagaagtgtccctatctggagcattccatggaataaatgacaaagaaaggatggaattagagtatcaccattttacaagccccagtgaattaagagaggcctgagttattgacagctgttaatataagagacaatctaacgtgcctcctgatgagagaacgcaccagctctagtcttgccaaagggatcacacctgagtctgtccagtcttggctccagctgacagttttcaggaattcagaggaacatattgaactgcatatgaagcagcaaaacccagaccgagagactaggctctcttcagcagaaaaattgtaaggaaaaaaatcagaggaggaatctgcaaagtaggagatgtaaaaaacatccaaaaaaatgtttaatggacaagactaaactatagtatctaggggtgcacatttgggtgataaaatggggggaaaatgggttagaagttagggcagtggttacttatagtggaagagggagctgtgattaggaagggcataatgacagggcttttcaggcaggtggcagaattcttgtttcttgatctattactttataataaaagatttttcttaaaaaaaagctccaatgtaccattctttcatgtgtttagaaaatgtcctgtttcttaaacttgtgggagttcttaatttctacttttagcgcacactgcagaaaaatgcacacactgttgggatccttgagggagaattctgagcagtggaccccatgatgagtgcttcatgtc

SEQ ID NO: 31662 - DNA, 1069 bp, Homo sapiens
atgttgtagcctgtgttcaagtttctttctctttaaggctgaataatattccattgagtgtatagaccatatttctcccctctcttcagcttatcctccctctgaagcccttgcttgctgttggacaagttgctctctgagcctgcatggtggagaggctgcctgcaagcagcaacaaggctctctcatgaaacaatagctgacactgaagccccaaagataaaacaaataaaagtagagccatcctgaccaaaggcctccttcacccaccatagctacacttccagcccctggaaagaatgtcagggtcctttggaacccagtttgagaaatctaaagttctaggaaagtggttcttaacctttcttgcagcatagacccctggagtagtctggtatcatcatgtgccacacctattccaaataaagccttgaaatgcataaaatgaaatgcatgaggtcccacaagatcccactgaggtcacaaaggaaaccaattatattggcataaagtagaaaaaaaatatgtggtatagtaatgagtgtactttattagaacactgaataacaagatctagcaagcagttgcataaccactttatttataaaatagagatgagcaccaacaatgctgcaatagctgtaaagtgatatgaaaaaatctgtgatttttgtaatgtgtgtagtggcatcatggacactgataacactcctggagtttgatgtctacatctgtaagggtggtagaggagtggggagaaggagacagaaggaggaagtgaccctccagggcaggtagtaggtggtgggcctggagatgtttggggtacctgagaactgataggtagcagtgtttccaccccagcactgtcctgaggtgaaagcatcttgaaagagcccaccacacacacagtgtgaatcttaaccataggtgatgccccatgacctctgcaggcaaagagccaggagctgactgagaccacattttttcactcctttggggagacggcttcaaccatgcaatggtaacttggcttttgtcccctttcccaggaacccacgtgatggag

SEQ ID NO: 31663 - DNA, 1025 bp, Homo sapiens
ccctaaataagacaccgtgcttttcttatgtgtaccaggagctcagatgtttgtcaaatgattgaactataatagcagacagcctaggcagtctactttgactgagcaatgtggccctgactgaagtccctggagttggaggcagtgtgaaaaggacaactggagcccaccaaaccagccacacaaggaaacaacaaagagaggtgaaggaatgtttttgaggaagcttgatccaatacttgaagagtactgtcacacagaaatggaattaggtatgctctgtcaaagccccagaaatcaacttttggctgaatttaaggaagaacttattcctagcaaaatgtttcccagactgcatttagtggaatgctagcattcagggggtggagtacactggggcaggggcagagagagggaagggattctaatttattccataggaaaataagtttggaaatttgggttcagcaaaggtaaatggatattctcactgaaggacatagctttcatccattctcaaacttatgtggctcaaaagcttttcataggatgatatgaacatctcacacaatctctatattctaatctcagctcaggggcaaagaggaattagaggtgtctgacaaaagtataactgtatgaaggggtgcgtgtcccactagtatttgagtacttttaggatacaggattcaacaccacatggatgatacagacagagatgcaatctgaatagaaaactagaaccatgggttcatttgcccatgaactttcatcttgagtaaccaagtagctggcaggatggtctataccgatgaggatgcacacaaactgcccttgcctgcccttggtgttcaaatgaatggataatatggatattgcaaagggatcctggaattaatcaatgctgttgggtgagaggcttaatgacagcaggtgttcttgccagagcccactttgactcttctcatataatattttctaggacatattgcctgcctgtctgccttcttcatccatccatctag

SEQ ID NO: 31664 - DNA, 1050 bp, Homo sapiens
tgggaggtgatggggcaagatggagaatgaaaagggtgagcattgtgggccgtgtcctccgggacctcctgcccagcctccttggagggctgccagcctgggcagggcagggtcagtaccaaacagcagtgccctctgcaaatgggtggttggggttgttctgttcataagaggactcgggcctgggccggggctgggctttataggaaagtagaaactttcagggaggtgttacccattttatcatccattttactgggtttttagctatggggaagaggcataggtgctcagccacactgggactgggtggcctgggactggccctggaaggtgcctggctgaccccttgctcctggacagattgagccactcgaggggatgcggctgctggcagtgcctgagctgtgcaggggatcctgcgagacacccagaagacttattgtgcggggattattattttgtaaaatgcattttacaaaaccactcagggattttccagagcgaatctctggggcagggacgggctctccactggcttcgtcccattggctgggctcagagggcagcagccatcttcatttgaaacctcaagaaataaccagaacagggactcctggggatagggacagggactggagtgggactgggggctgggatctgcaggctctactgtgtcctcaccgcagctgtgtccttggcagtgcaactggtgtggagaaggggcacagtgaatgtcctcttagtgaagatcatagtaaactggcacattttaaaaaatatcaatactcagtgccgacaagggtatggcaaaacactgccacaagagaagtataaattggtaccatattttttaaaagatttggcaatatgtaatacaaacctttaaaaacattcaaccctaaggaaaaatgatctctttgtaggtaatatcaaagcacacctggaaaccccaataaaataagtgctaagatatccttagaatacaaatgaaaaagtatttagtaagagcaagatataaaattgacaacaaccaattataacccacca

SEQ ID NO: 31665 - DNA, 1070 bp, Homo sapiens
acacgacctgagcttcagggtaaaaaattaaataagcaacacggagtgcctggcgcacagtcactgtcccctttgcctttgagaaaacgccccctgaatgcccattcctctttttcaggaacaagactgccaatggagactgccgcagagacccccgggagcggagccgcagccccatcgagcgcgctgtggcccccaccatgagcctgcacggcagccacctgtacacctccctccccagccttggcctggagcagcccctcgcactgaccaagaacagcctggacgccagcaggccagccggcctctcgcccacactgaccccgggggagcggcagcaggtgggcctctgtctgggagggtggcgtggggagtccaggggctgggggactgggctggatggagagccccgagcagaggactccgagggcggtggtgagggagggaggtggtgagggagggaggtggtgagggatgccacccttcgcctctgttgtgcacttgggacaagggacagcagaacaggagtcctcttctgcttttacttcctgcccagacctgcccgggccttgcctcttagcactcacggccttgggcaaggtgaatgtcactggggcttcatctctttcctctcccagtacaggggtggtgtactgaggtgtttcctccagcagtcttctgtggcaggcctgattctcttaggatgaatgtagtcatcctcgggtgggggggtcctacgtttctcctttagacggtcacgcggatgaagggaaatgtcaggttgctttgccttgggctggggtcctgcacagttgatggtcacagggttgtgagcccatgctggtcagaagcctatgattggtacatagggatttttttctatgaaaggaaaataggaaattaaatgattgcttaataaacacagcttgcttggtagaaacaaatctttttaaaaatggggttcctggggaaatatatgggagaaggcagcagcattgaggaggctcaaaattactgcttgagctctccgaatctccagggactgcgacctaataggtccttagtcagta

SEQ ID NO: 31666 - DNA, 1047 bp, Homo sapiens
cgagagtgggattgcagcccactccttcccgggttgtcttctttttttgtcctctttttctcacctggtcccctccaggatatttttcactgtcacattgagcttttagagtatttgatagtctcttgttgagtaccattagtaagctctgaaatcagaaaagtttaaattctgcttttatttaaccattttaccagatgtttcctgtggcttgacagatgtaccatttactagaaagttacactcctgagatttggaatgttatggacactgttgctatagacagtgattctgtcagggcaggatttggaagacaattttcacatcattttggggttgaagatgtgtttttcaccagaacagaaatgctattttcataatctgcttttatcttgtcttttataattagaacctctggtttataaaatactatatctggttgatcagagtttactctgataaataccgtggtgcttcaattggtgttactttctgaaagcagctgggcttgggtatatcagggtcttgtttgcaaaactgacctgggtgtaaaagaactcaggtagtgggcaggtggaaatttaaattgggctgaaaatcttctgcttcacttctccgggctacttgatgctggcgtatggctaagacatctgcagacttagcaacttcttgcacccacctgtaagttcaccaagacaaacctaggatggctgtggcacctttgcttctccagtgcctggagtcaccatctgtggcagcctgagtcctaagagaaaagcctctcacctagggttctgctggtggaagggaggcagaaggaagttgcttcctacagtgcaggagtgagactgtagttgcggctgcagcagagaataggggatttctggcattccttctctgaggggccggctgcagccctgctgtggagttgcatgcatcgtgccttcggagcgtctccacttctgcagcaaccttcctctcctgtgttttctttagccttattttgaagttttataaaagccttatgttatggaagatggagaaaca

SEQ ID NO: 31667 - DNA, 1065 bp, Homo sapiens
gcagcccaactgggggcctgcacactcacttcatcctccagtgtggttctgaaagccacctcctctggcaagtggcacttcctcctgcttcaaggtgaatactactttgtgtaaaacgatgacactctgctacagttgggtgtccagctgtctgtccccttccctggtctacaagttccaccagaccaggggctgaatttgctcaggtctgtagcactataccctcccagtgcctgacaccaaccaggtgctgagtaaatgtgtgaatgaaaaaggagccacgaggagagctctgtggaaacactcttccctttgggacagatgttaagaatcacttttaagcccacataaaccctgagtggcaccacttagtatacttccattttctcccttagagccttgatgtttacttccacatgtgccagaacagagcgccaccgctctcctttccctgctaagctcttgaaaacagaaaacgaaaacgcacacatgcgcgaggttcagtcggtagcaccagccctgcccgtgatgcttctttcacggcacgtgatctcatcccggtgttgactctcagtaagaagccccccaggtttcttgtgtggatgaaatgatttttttcactcctctgtatttcttgcttatgcatctggctccagtccaagtgtgaacataaagtgaggtatatgaaagtgaggaattcagtgcatttgggttgagtctcacagggcagagagatgaccagacatttcttttgggtggaaattgacccaaagtgcagatttgctcatactctgctagaaaagcaaacacatctcggcccaagtatgtaccagttctggtatttttcaaatttttccaaaaagtcctcaaagccaaagtgtttttcggctgttttctagtagattgttgttgcgtttattttatttttgtgtgacagatttgtgcttgtatcactaatagctgtcatcctctgtgtgttggttttgaatgacaccacatcattttgtcttaggccgttggcttttgagcaagttacgtccagtgatagaaacacagacactccat

SEQ ID NO: 31668 - DNA, 1046 bp, Homo sapiens
accacaaggcctcggatgaagttgactttatcctcgtattactctcaaattgtgaccaaatggaaagaaaattggtcaggtccgagagaccaaaatgtacagcacaacaaaagggttattatttgtgaaaaatttaggtgctccccccatgtgacttagaaagtttgaagttttctcttaaagtaatcattcgtctttataaagtttagaaggtacacaagctttattactatgaaaggctatgcttattttaattcacagcgaggcacaaagtgattgcctagtacaaaaccttttaaaataataatgaaaaacgccaagatgtcaaatcaaatggaaatgtggaccctaatttgattgcctaacttcgaaacatgtttcagaactgcacctacccacgtattatgcttgcgataagttatatgccgaagctttgtgctgataatattttaatgtgcaatatttagcgtactgtaagaattaaacatttatttcccattaaacgatgtatttatatttcttttaactttcggtacaaatgtgtgaactgttagcccacacactttcctcattcttttaaaagaaattaaataccaagactatattagaaaaaaaaaacagaacaagcaggaaaagtgagttgggcatagtggtttcatgaatgcagtgaggtcattctcctatctgtatcgagtggaatacccacacgtgaaaagacctttggtgttttaaattaacttttgaaattgtttacagaaaatgctttttgcctcccccctgctattttattgcaactttttattttaaactctaccctaaagagtgactgtgctagaaaaccacgttgatgtaaaatgtctcatggttggcagctaaccacactcaaaccatgttcagaggatggcaggcggccccgtcccattgccaaaaactttccactgggagtagttttgtaaggggctggctgggcgggcggggagcctgggggactgagatgggggcctttctcctgcttagtgactacatcatctctctctgcgtaggcg

SEQ ID NO: 31669 - DNA, 1044 bp, Homo sapiens
ttggaccactgttctaataggcagatgccagtccttagcctgcacgagcacagccacagcggagctcgcactctaagcggggactgcactttcctagtttactcagaggcctctgaggctacctgagagccagagtctagggaatggaggaccaagaatagaaggtaggtgtcgttactaaatctgcatcgggaaaccagggaagtggatgagtgttcattcttttttgtttgttttgtgtttgatctttttgaatcttatgatttacaaagctaaaacccaacctcaaacctagatctgatgatcttcaggctgtttgtgttgtgttacatacctgagttttcttcaagccaaaatgatatgtatagtaagacattagtttgaccccacttactcaattccacggaggttgcagtgttacatagtctatcaagatacagttcagttgtaaactaaatccaacagggtaaatgagacagcagggacttctattagccctgaagataataaaatgattttaagcagtatagaacttcctaattaaatgaataacaatgtgtggatgtgataacaagttttaatttaaagtatttttagtgctttttggtattcagagtaactgcagttcattaaaaaactagtgtatattcacaatagatgttgagaattatagacataatttctttggcattcttttatctttttcccttcagcccctgtaaaattatagctattaatacttaaaaccagaggcgccagcagacaccatccctcctgcaccagtatcatcagtacgacatgtctgggagcaggtcccacctcagacccactgcctccccatccaaaggaggccccagcctggtttgtgaacacaaacctagtcctcctctcttacaggcaagcagaagaattcctgggaggtcgaggttcctctggctagtgcagggcagatgatcaccaagtcagaggggcaggccgcagctgtccacttgcccagtgcccagccaggaaacccattctcctcccttgccagtccatgtgttt

SEQ ID NO: 31670 - DNA, 1030 bp, Homo sapiens
gattcggagcacccactcacccaggctcttgggtactgtgtctcctgaccccttccatcggctagtggctgactgtattcgaggcgggggcctgtcatgagtagcgagaaggacagttagaggttccctttgttcagccatcttatccttcaaatgggaattgcaccaacagatggaatccaacaaacagtgtaataaataaattgcctgttctgggctgggacctttatatgaattctcattgattcgcatagaaatccctcacggtagttggatagaggctcaagagagatgaagagactgctaagatcatacatttttctgactccacagcccactttctactatgtttctctgtcactggtagagtggccagggatacagaaatgaatgagctgctccgtgcctcccagaacagtacccgggaccacgtgcgaggtattacagagaagagcagcacgtggtgaattcttccattaggcagcctgtgggcagggccattctagaggctcggagtgttacgggagatcagaagagggaaagtttagttttctgttctctctctgcacttgcaagactgtgtctcttttttccccctctagtgatcagtgcctgattccaggactcaaccatctcagggcctgtggcagtcgtaccctctggaactccctccaattaaagaatgtcttgaaaatgcagatggtagcatatgaccttcggtgcttaacctgtcacatggtacagggcttgcagacagaagttttttgagtatttttaccaaaacacttacattttgaagagatcataccattaccagcttaatccctctgtttcgtggcaaccagggtccctccggaggcttggctcaactgctgaagaggtttgaacaagcctctttttttttttgcttaccctcatccagctactccttctaaacatttataagctctaccagggaggaaattgagcccccagcaaagtgcctgattccaataccatctgctaacaatttactttcataactctcctc

SEQ ID NO: 31671 - DNA, 1052 bp, Homo sapiens
gtttttttattggataatacagacatcttgtaataatagcttacataaactataattattgagtaaaatttatctgtaaaagcactccagaatataccatatactgtgaaaaacccaacatatctgtatattagcctgacaccaatctaatgaaggatgatgattttttagaattggtttattttaatataggtagatttcattggagtcagtttttaaacatcggtattcagatttttccctctataagtatgcattattatttgatttgtttgatgttcttcacaactcagattttaggaaatgtctgttgaataaatgttgattaatcatggataaatggaagctcttagcacaacccctgccatcaaacagtggacatctaaattgtttaaagaaaatgagtatactgacagttttcttcaagaataaaaatggaatcttattagtacataaaaacgtcacctgacagtgattgaaatgtaaatatgagaggttaattagactttgttagatcaacctgtggaacttaaaatatggagttctagcactaactcactcttccttgttacatattgataagctagggaacaagtgtagcttcctggcttgttcatctcatagtttctcaatttatacgaaggaagggtcaacattgagagagttattaggaagaagctgagggtggcctgtttcggaaagatcaggtcaatgtataatactagctggaataccagctctctgatctttccttaaaatgtgtcttcaacctgcctcttctccatcctcactgataggaacattgttgaagcttcctcacgtaacgcttgcgtccctgccctgttccctgactcaggtgtgtgcacccatctggcatggtgtgttggagcacccctcacggaagcctccctgtagctgtgtcagtgcttacagtggctccctgtcagtgacccgcctcgtcaggtctcagccgttcacctgtgttcagagccctttattatctgacccacctctctgtatccagccttaagtctaaggaaacaaacccgttg

SEQ ID NO: 31672 - DNA, 1027 bp, Homo sapiens
caggtttaatttactatctaattttcagaaatacatttgtcacctgcagacagttagacctagacagttgtagaaattttcagcattcccaacttacagaaaaccctgacagaaagaatacacagctgacccttgaacaataccatctgaacttcgagggtccacttcgactcaggattttttttcaaccaattgcagacagaaaatattgcaggatgtgaaacccatgtgtgtagaggcccagcttctcctataagcgggctctgcagagtggactttgagacttgggtatgtgtggattttgccattggtgggattcctggaaccaatcccctgagtatatataccaaaggatgactaatttctctttagtatacaacacctaattttcactctgctgaaaataaaatcctttgctgcttctgttccatgggctcttccttctgttccttccagccagtcgacagagccttgatgtgatcccagtggatgacctgttaacttagtgaggggctttgattctgtgtgggttcctgtggatgctaggatttggatatgtatgaggtgacatcactttctcctctgtcaccagcattggaatccataactaaaaggtggatggtgagtagccatccacctttggcaagaaaggttgctacctcagctatttaagatatttgctcaaataccaagtatgtaagtaaatgggtaattccaagctggaacagcccaaggaagcgtaagaaaggaaatacaagagcctttccaggtttcagttctcagtccaacagatggaagcctctcagttacatgagctcacatctgtctctctgatttgacagagctcgtgccatcaaaactggaattgctaattctataatccctcgaaagcataattgaagtgagactgacaaagagctacaccctaaaggttaatggcgcagagagaataaggggcctagagaactaatcgtgaaatataaatgtcagtggctgcaaaccactcatccatttaatttgctagaag

SEQ ID NO: 31673 - DNA, 1076 bp, Homo sapiens
ttttaaatgttctttgaataccaagaacatttatccttcactgtaatatatgacacaaatatattcttcagttttgtattttgcctttacttggttttggtgtttttagatgtataaaagcataaaatctgtattctcaatcaaattctacatcttccttggtggcttctgtctttgattaaaaattttatttctggcttagcaaatgttttcctattccacatcagatagtctgaacatatccttatagttttgtaagtttttgcagcaaaaaccttactttaaaagcatctaaataatctttaaaacatttgggatttattttgatgtacagtataaggcaaagtgctatctggattcttttctcagtaatgtttgttttgtaatccacttcttccccattggcctggatttctgattcctatatccacagtatctgtctggtcctacctagtctctacccagtaacactccaaaatatattctttgctttatgttttaaatatttgatagatcaaacttattcattcgtagaaaaagaactagcttttcccatctcatttgtgtgtgtggataaaatttagacccatctttccaattccctacaaaactatcctgttgctactttaattatgaatatattatcctatgaatgaatctgagaaggattgatattttctagtatttttttttttttatggatgagctgattgtaccctgaagtacaatcagaatctacatggtgtttcttaaaggcaaggacctgtggtctccaagagatgttgacagccacctaatgacatcgagtaagataatccagagtgtgctggaagtagggatggggaaatgaagaatctgccgtttagatgtttactgattttattcagctggtatttattgatggcctaccatgcgccaggcttctgccagacttctgccagactgacctcgaaaaggtgaggaaggcatagtccttgctccgaagatctaggctaggaaagaagcacatataaggtatgggttgagcgtcctaatccaaaaatctgaaatgaaaaatgctccaaaatctgaacagt

SEQ ID NO: 31674 - DNA, 1028 bp, Homo sapiens
agtgttcagttttgtaaagaattttggctatcataatcctacaattcagccccacagccaccctgatgacactgaaatgcatcatgggctgcttttgttgctgtttggtattcaatctttttctcaatctattggaaacaaggccgaaatgaaagttcagttaacataaagtttaagagtctttcctttggatcccaacgttatttaattttttaatttttaaagctaaatttaaatgatttttccactcagattccacatgcttccagtacttggaagcatgagaagtatatatgttgagtttatgcccaagttcccaaatagataatctttgaaacctataacatttacaatattaaaaacaaaacaaaacaaaaacaacaacaacaagaaaccccaccatactgggatagagatatgctgaaacttacaaagtaaaactaaaattttgaaactgggttacttcatgatttgaagaacagtgtactttgtagaacaaaggaaaggattttcatagcaagtgggaatccaacagaaagggtagaagctggcattgacaatgtgtctgctagcacagctagcactgggctgcgtttcagagtaaataagcaaaggcctttgccctcaggagctcttggtttggtctacaggggagataaagccatgtgtaattatagtaggccatattaaatgccatgagaaaagtggtatgatcaaaggagaatggtcaggctgtatcattatccaaatttttcaaagatgcagaagtagatcagagagattctgtaacacgcctaaactcacgcagccagtctgtggccgaaccaagatcagaacctgcttctagctaactgctggctggcaggatgggaaattttttttttttttttgagatggagtctcgctctgtcgcccaggctggagtgcagtggcgcgatctccactcactgcaagctccgcctcccgggttcacaccattctcctgcctcagcctcctgagtagctgggactacaggtgcccaccacca

SEQ ID NO: 31675 - DNA, 1030 bp, Homo sapiens
actccatctcctttctctctgttctccacgctggtgctggagtgggcctttaaaatgggaactcagattctggccatgctctgttcggaagccctccaggagcttcccatctcatgcagagataagaactgtggctcttccatgacctgtaagtcacgctggcctcctcctgcctcggggcctttgcatgtgctttcccgcagcacagaatgaactttctttttttttttttttttgaggcgcagtctcgctctcacccaggctggagtgcagcggcacatctcggctcactgcaagctccgcctcccgggttcacgccactctcctgcctcagcctcccaagtagctgggactacaggcgcccactaccatgcctggctaattttttttgtatttttagtagagacggggtttcactgtgttagccaggatggtctcgatctcctgacctcgtgatccgcccgcctcggcctcccaaagtgttgggattacaggcgtgagccaccgcgcccggcccagaatgaactttctaatcctcggggattgtgtcctcccttcctgtcgtcactcagaggcaccttctcagagcagccttccttgtctcttgcccctacctgtgccttgcttgcactttcctgctttattttgatttctctcatttgtctttcacatacactagaatgtgcagctcacgaaaagagggagttttgtctcattttgttgactgtggaatctccagtgcctagcacagtgcctggcacctgggaggtgatcagtaaatatatgctgaatgaatgagtgctgtcacagcctctcctggccgtggtgttctgtggagactttgtcaggcgccttcaggcatggtcaggacttggcttcctttgcagggagcaatgctggatgccctcttcccccacagctgctcagcaggctctttctgccactccggagtcactcagcctcaggctgtggctggcagcacagtgtgaagttgctttggtgaagctgcaggtgtatgaaggcatgttgg

SEQ ID NO: 31676 - DNA, 1025 bp, Homo sapiens
ctcttttttttttgagatggagtctcactcagtccccaggctagagtgtagtgtcacgatactggctcactgcaacctccctccagctcccgggttcaagcgattctcttgtcatagcctcccgagtagctgggattacaggcacccaccatcatgcccggctaatttttgtatttttgtagagacggggtttcaccatgttgaccagggtggtcttgaactcctgacctcaggtgatccacccgcctcggcctcccaaagtgctgggattacaggcatgagccaccacgcccagtctacttttatctttataaatgaagataagccaataaacctaaaaaatacaaccaaaaactgacaaccaaaaactgttttctaaaatagatcaataaattaaacaaacctttggtgaattcattaagaaaaagaacaaaatgtataattatagaacatatatgaaacaagaaaagggatattactatgtatatagatgagaatactatacaaatatatgcacatgtaaccaaaaaatggaaaatgtagatgaaatagatgattctgtttgaatcagaaagaggttaaaaacctaaattggtcaataatcatggtaaaaatttaacaagtagtcagagatgtgaggcccatatggttttataggtgaattttaccaaatcctaaagaaacagatttccctatgttataagactattttatagtatagagcactttgtaattctttctgtgaggctaatataacatgatactaaagccaaataaaacacaaagttgtatgtatataaaatcaagtacatagatatgagagtacaaagttaaataaaattcaggctagcaattatattgaaagagtaacatatcccatgtcgaagtaagccatttgcatcacaagaatgcaaggatgtttcaataatagtaacttttgtaatgtaataaattatattactttaacagattaaaggaaaaattaatatatttatgacagaagtctaaaaaagtatttcatgaaa

SEQ ID NO: 31677 - DNA, 1064 bp, Homo sapiens
gatgggaaaaaaaatcatcgaacgtcatttatgtcgttggaaatgtacagtatgtgtcataatggaaaacagtcatgaaaattatgtttgcattgctgagaaagagcaaatactgggagaaaaaaaatgttcattagtgtagtttgagggatgggtgaaaggaacaatattggaagattattctacaacattttaaagtgattttcctgctcacccaacaatatatttatttttaaacgttcttgttcaaagttaagattacttgctaaacaatattgtaagaattactgtttcatgtaggaacagttctttttctaagcactaaaatattaataacaacaaaaaaatttaggttgacgttttatacattataagttctcgaagatgagctctttccagtttagtccttcctggattggcagacagcaagtgtatgttcttaaaatctgaggtctacctctctactggctgttagacttttatttttctaagcctcagttttctcattagtaacatggagcaacaatacctacctacaaagtgttgatgaggattaacgggctgtcgtgtgtactgagcttactgattagcttttgactcctggttgggactgccttgccctctctcctggcacattgttggcttctgatagggcttctcccagtcttctgtattaacatgtgtcttagtccatttacattgttgtaaaggaatacctgagactgggtgatttattaagaaaagaagtttaattggctcacggtgctgtaggctgtacaagcatggcatgagtgtctgcttggcttctggagaggcctcagagagcttttactcctggcagaaggtgacggagagcaggcatgtcacatgtgagaggaagggcaagaaagaggaagaggtgccaggctctgttaaacaaccagctcttgagtgaactagtagagtgagaactcactcatcaccgtgccattcatgagggatccacccccatgacccaaacacctcatactaggccttgcttccaacgttggggatcacattcttacatgagatctggaggagac

SEQ ID NO: 31678 - DNA, 1078 bp, Homo sapiens
gccagtaactgtgtgtgtgtttaaataacccagaaaagggaaactgggtaaaaagcattctggttttccagggctttcctcgagctttaaatcttttgctgttttagcttttatagtatgctgtaatttaaggaaacaacaataaaaatccagtcttattaaaaaacatgatgctagataaattgatgataggtggtgattatataatataccattatacaaaacatgacgttttaacataaagattcttattggacttaaaatatcaattaacctaccagtgggtttctcacacagctttccatgagtacgtggcgtgtgttaagctgcaccacctcactggtagtgatgctgtgttcatagagcagccgttgttctgaaaacctttcttttattgggcatgtttatacaggcatgttatgcatgcacataaacataagcaccaaataacatgggcatgaatattcacaatatcccttcttttagttcctacatcagctgcttcctgtagttggcaaagtttagcttagtagactaaatggagtttaacccttttctctctccctgaaccaagcccattctgtttcctcatgtgggaagaatttcatccttagaagaatgatttgcatttggttgaggactcattctgttaatgactaggattctaagagtcttttgaattctgtttaaattattttttccccttttattttttcctcttaggctccaaccaggaatggagacgccattggatgttttgtccagggcagcatctctggtgcatgctgatgacgaaaaacgtaagtgaggagtctattataaaatagcttaagtgctttaatgatcccttgtcttctgctccataacaaaattacatgcttctctacatggttttctggctatttgctgttaattttggtggttttccttagagataacagcttcacatcctcatttgtattttcaagaacatgtaagtcttttaactggcacttaactatggatactggtttgtttttttttttgtttttttttttttgagatgggatcatgctgtgttgcccaggctggtttcaaa

SEQ ID NO: 31679 - DNA, 1053 bp, Homo sapiens
gaggaatcggcacattgtcttccacagtggttgaactaatttacacccctgccagcagtgtataaatgttcctttttctccacaacctcaccagcttctgttgtttcttgacttaatgacaaccattctgactgctgtgagatggaatctcattgtgattttgatttgcattcctctaattatcagtcagtcatgttgagctttttttcctttgattgttggctgcatgtatgtcttcctttgaaaagtgtctgttcatgtcctttgcccactttgtaatggggctgtttgttttttttcttgtaaatttgtttaggttctttatagatgctggacataaagcctttgtcagatgcctagtttgcaaaattttctcccatttcctaggttgtctgttcactctgttcttcactgtcttgttcttttgctgcgcagaagctctttagtttaattagatcccatttaaaatttttgcttttgttgtaattgcttttggcatctttgtcaggaaatgtttgcccattcttatgtccagaatggtattgcctaagttgtcttccagggtttttatagctttgcaattaagtctttaatccatcttgacttaatttttgtatatggtatgaggaagggtccagtttcgatcttcagcatatggctaaccagttttcccagcaccatttattgaatagggagttctttccccattgcttgtttctgcctactttgtcaaagatcagatagttgtaggtgtgcagccttatttccgggttctctgttctgttccattggtctatgtgtctgtttttgtaccagcaccatgctgttttggttactgtagccctgtatttatagtttgaagtcgggtagcatgaggcctccagctttgttctttttgcttagtgttgccttggctattcgggctcttttggttccatatgaattttaaaatagtttttttctagttctgtgaagaatgtcattggtagtttaataggaatagccttgaatatataaattgctttaggcactatgaccattttaacagtattg

SEQ ID NO: 31680 - DNA, 1050 bp, Homo sapiens
gggaggagggggtgttattgaatcaagtggcttacctaccatatatgatgtttgtatgttacaaatactcccttagaaaaaagtagggaaaaaaggtaaaagaattcagattctgaagcctgatttataaaataatagttatatgttttataatactgttttttacaattagaagagaagaagctatgccttggaatactgcagcattctcctctttccttgctttctaatatttattttggagtttctcatagtgtgtcttttatgtgctatcttaattttgtcagaaattatctgtatttgacaaataaaaggcaacttatgccctgttttctagaataggtagaaaatgtgtcgatagtaccaaaagatttagagatggtagatatattttagacatatgagagtccttattaagggacttctagaccctttactttgtatagaaagtcaatcagaaacagtatgatgtttttaaaagatcatggtacgagtgtaaattggcataaccactctgaagagcaatttgacagtgctaagtatgcaccttagagcagtaattctcaaaatgtggtccctgggcattgcttaagaacttgttagaaatgtacatttttcagccctcaccgaggcctcctgaaacagaactctgggagttgcatccgataatacacattttaacgagttctccaggtgaagctaatgctagctaaagatgagaaccgctggcccagagaagctcttgccttgtgcactgagaagcacacacaaggaagctcatttcactgaagggtttgtgtgcagtaactcacttgatctttctagcagccttatgagcttgattctgttatttactccattttactgataaggaattatgcccatagtcacagagctagtaagagatggagttggcatttgaacacatctcttaactgcagtgcaatctttaaaagtaagaatctcagaacagactgaagctcttagtatttttttttttttttgagacagggtctcaactgtgtctttcaggctggagtgtagtgtcat

SEQ ID NO: 31681 - DNA, 1063 bp, Homo sapiens
taggcagaaggaaaaactgctgcaggggcaaatggaagaaaggaaaagaaatcgttatcaggttctttcagtgttttagtcggctggacatcggaattttctggggagcttttaagaaaatcctaatgctcggcttccgccgatggagattctgatttaattggtttgggatgaggcctgggcttcaggaatttaagaaacgtcccaggtgattctaatgcgcagccaagtttgttgagagtcacctctataaatgtaggagaaaatgcaaaatgatcttctgacttcaggaagttggcggactggttgtagggccagggcaggtgcagtgaaagtaactaacatcaaaagttagtgcgtgaccagtgtatttaccctcgctcagcacttttaacaacggtctgtttgagactaggcattgttacttttcagagttggctcagcacagcctcagtaagggtacagttttccttgtaatttgcagaattcagtgtgcaggttttaatggggccccctgcgtctggatacctgactgtagtctgtcttctgattaacatcctgcctgttcacttcctggtgaggccatctatgctgttgcttggatttcctctgtttcccacttacactactatttaatatttttctttaaattggcagcatatgagaaattataggttattataggctagttatttttcccgaatttaccttaacataattacacatttttaaaaaacatgtttattccatacctgcctcgccaccaaatctcaagtgtccccagtggtctgtagagtcacactctacagagcaggcgttagcctcctgatggccacctcttcattcttccatggaggttttcctttgaatagacctggaattccctgcaagaaaaggtccttccttcccattccctcacttttgattccttacattcaagtgaacaagttgtagattccaacacctacatctttctcacatcagtccccatccttagcgccttagctaatataatttcatttctcccctggaatcttgccatggcttcagatctaattccccc

SEQ ID NO: 31682 - DNA, 1042 bp, Homo sapiens
cctataatcccagcactttgggaggctgaggcaggtggatcacttgaggctaggagtttgagacttgcctggccaatgtggtgaaaccccatctctaaatttaaaaattagctgagtgtggtggcacgtacctataatcccagctactcaggaggctgaggcacgagaattgcttgaacctgggaggcagaggttgcagtgagctgagatcacgccactgcactccagccttggggacagagcaaggctgtgtctcaaaaaaataaataaataaaatggtctttctcaaaggtacataagtgggttcttcagaagtcactattagaagaggagaggggttgtttttatagaagagtaaatgaagaaaggtatttttaatgctgtgaggcgtgaaatttaacaattttgaatctgccaccctccacgagcctttccttgtgaaagaaagatggcattacaacccacgttttgcctcttgagcagtgagaggcatgatagttgtgttggattatgggacatggcctattttaggtacatgtctgaggtgtggaacacctttcagtggtggggtttttagcagccaaacattataccatgaaagcagacaccacagatttaaggaggtgtgaattcctgggcaccaacatcacaagttactttgtgtgtgttttgttttttaattttttgttcttttttaatttttttttcctcacaagtttgacttaaactgtatgacttctttacccagaagcgagccgacttcagttctcattttgaagtcactgagtggtaccgattctagtgaggaatttcttactacaacattgaacactcagtaagggatttgctattttgttaaccactcaagtttcagatggtgatttgagggcagaatacaggcagaaacgactgtaagctgtcaggccatccttggccctctggggagcactggagtgtggcctctgctcatcctgttagggtttcaagtacctgtattatgtggaaaggtcacaaggccagagacccagcacctagatgtgca

SEQ ID NO: 31683 - DNA, 1050 bp, Homo sapiens
tcactcgttactgcagggaggccaccgagccgtttgtgaggaatccatccccatgacccaaacacctgccacttaggtcccacctccaacactggggatcacatttcaacttgagatttggagtggacagatatccaaacaatatacccattagaggttacccaatacctcccacccacttgcagtctactttctgtttctatggattttgcctactttatagttcaatataaatggaatcatgtaagatataatatagtcaggtaacatataatgatgtttcggtcaatgaccacatataggaaggtggtcccacaagattataatactgtatttttactgtgccttttctatgtttggctatgtttagagacacaaatactcaccatgttacaaccagctacagtattcagtacactgagggccatacagttttgtagcctaagtgcaacacgttataccatttagccagggtgtgtagaaggctgtaccttcttggtttgtgtgaatacactttatgatgtgtgcatgatgacaagttggctaacaacacatttctcagaaggtatccctgccgttaagtgatgcttggctgtatataatacataagatatggtattgtgtgcctgggctcttagacctagcatagtattttcaaggttaatgtgtagcatgagtcactacttcattcctttctgtgtctgagtaacattccattgtatggatatgccacattattcattcatcatttatggacattgggttatcagaattactttagagtaaaactgatgcttgaagaagtgtcagcaatggtcaggcgccaggggcccatgcctgtaatccaagcattttggaggccaacatgggaggatcacttgagcccaggagtcaagaccagcttgggcaacagtgcaagaccctgtatctacccaaaaaaaaaaaaaaaaaaaaaaaggcggcatggtggcacatgcctgtggtcccggctactgggaggtgggaggatcacttgagcccaggaggttaaggctgcagtaagctattgac

SEQ ID NO: 31684 - DNA, 1740 bp, Homo sapiens
agtggcttttggccaggcacggtggctcatacctgtaatcccagcactttgggaggccgaggtgggaggcctcacaaggtcaggagatcgagaccatcctggctaacatggtgaaaccccgtctctactaaaaacacacacaaaaaattagccagacgtggtggcgggtgcctgtagtcccagctactcgggaggctgaggcaggagaatggcgtgaacctgggaggtggagcttgcagtgagcccagatcacaccactgcactccagcctgggtgactgagcgagactctgtctcaaaaaaaaaaaaaaaaaaaaaagtggcttttaaatttatagcactctaaagtggaatggatccctggatgtgtctaaagttatatcaagaggctggttttacagtgcttgacaatcagttgtcagtgttataggtagaatagcaattggagtcagactggggttttgatcctggctgcagcgttctttgttttttggctgtatgaccttgggcaagtgactaaacttctcagcttgttgtctgtgaagataaattatttacgtcagagggcagctgtgaggattaacagagataaaagtatacacagtgccaggattcagtattattagaattactttttaatggtattgaaggcagagaagcttaatttcaatatatatctctgaatttttactagggaccatcttaggtctcactgaaatgtggattcagagttcagcctcaatagttgctaaatggcctgcttccttacaccagcaaccagccccagtcattctgtatttgccaggccattcatatgtatgcactgatttcatccccacaggacaaggttttgacctgtcacacatgacctcacctctgtggcttgccagggttggtgtgaatagtttaaccaaggctatcgaaggcctaactgtagcgatagcagttaacctatgtaacttttttgagtcatttgaattatgtagagattggacctataatcccagcactttgggaggccaaggtgggaggattgcttaagccctggaggtcaaggctgcaatgtgccactgcactctagcctagacaacagagtgagaccctgtctcaaaaaaaaaaaaaaaattggaaatttgccgtatctgtgtaggtatgtgattctttggataaatgattcactgtatcttcctcaaaactaggttatttgaaagactgagatcattcaactgattgcactgactgccaactaattttgcaggagatgttgcagtaaagatcctaaaggttgtcgacccaaccccagagcaattccaggccttcaggaatgaggtggctgttctgcggtgagtagaaagctggcggtccagtccctctggagtgctggagtggggagtacaaggactgtagagttagtggactgtgccgcaggttgggacgggcaggcagttaggactcactgtggagtttctgtggttggatgctcctcccttgagagcaaagggatgtttcctttagtttatgtggttgtcaagcctttcgaagagcccctttttaggagaataccctcctctgggcacagtaaactcaatagcccaatttctgtctctgggttttggtttgaggtgggcagaaataggccctatttttacctttatttcccagaacccttttttttatagctgagttgccttattttagacttcagaacagtcagctttccaatctttcagtcactatttag

SEQ ID NO: 31685 - DNA, 1033 bp, Homo sapiens
tttctttataaagagataattcagaaaaataggtattaagaaattgaaattattgcttggacattctcttgaaaagttaaatacacgttaagctgggcctgatgaccaatacctgtaatttttttttctttttgaggtggagtcttgctctgtcgcccaggctggagtgcagtggcgcgatctcggctcaccgcaagctccgcctcccgggttcacgccattttcctgcctcagcctccggagtagctgggactacaggcgcccaccaccgcgcccggctaattttttgtatttttagtagagacggggtttcaccgtgttagccaggatggtaatacccgtaattttaacactgggaaactgaggcaagagggttgcttgaggccaagagttcaagaccagcctgggcacatagcgaaggcccatctctacaaaagatttttaaaaattagccaggcatggtggtgcggccctgtagtcctagctgttcgaaaggctgacgtgagaatattgcatgaccccaggggcttgaggctgcagtgagtcatgattgtgctactggactccagcctgggctggagcaagatcctgtctattaaaaaaagccaaaaaacaaaaaaacaaaaacaaacacatgttaggtattgataatgtttccatggatggaaacagtgatgttagatgctgtgtttttttgagacaaagatttttctttgtgtttactctaatgcattatatagactgggcactcagaaagtgcattattttatataaagaatgctatcctcgggagattgacttttctcattcactaatttttttttttattcagttaaatgtgtactaatccctgctgtttgatagattgtttaaagatgcagaagcatttctgcttcagggaagattcatggtttatcctattcctaatggtggtggcaagatagaggcatcccctcaaaggctaggagtaatacctcaaagcagcagagctgtccataattatccattatccattattccctccaccccgaaa

SEQ ID NO: 31686 - DNA, 1044 bp, Homo sapiens
tgggattacaggcgtgagccaccgtgccccgcagttgcttgctaaatcttttaactgctggtcccattttcctcatctatgaaatatttaatggaagtgtactattaaagaaacttttctttgctgatgaatgcaggaggtatcattaaaaacccacatagtgctattttcataattactctttatgtattgtgttcttgggttgaatacttttgttctagagttacaattatttgtgtttcttaccaggtttaagaattgtttaagctgcatcaatggagcacatacagggagcttggaagacgatcagcaatggttttggattcaaagatgccgtgtttgatggctccagctgcatctctcctacaatagttcagcagtttggctatcagcgccgggcatcagatgatggcaaactcacagatccttctaagacaagcaacactatccgtgttttcttgccgaacaagcaaagaacagtggtatgtgaacattctacttaggaaatttagctatttatctgcctgtggagcacattaaggatcatgttcaacttaaagacaggcaaaatattcattgtcatttagggtctttatttttttttttctaactgcagatttatttttttatattgctgttccttccacaccccctattttttcctacctcttggccttccttctgttactcttgcctggaatgtcttcctttgtgccacttcatccaaacaaatagtacattcttatgggtatatttcaaagacttttctttgagaagtctctaggcctttccaactacttattttagaagacattttatttcttctattaaaatattcacctaaagctttttgactattacaatcaagtataaagaagaaagtaaagttacatagaaaagattatttttgtatatttcataggcccaggaccagtctggaggcagcttagaaatcatagaatcttctttttcagggcactgacaccagccacttagttctgcgtagtttattttttcagtgccagtgacaggttcatattggca

SEQ ID NO: 31687 - DNA, 1030 bp, Homo sapiens
ggatttttttcttttttcttttcctttcttttttttttttttaatttccagacagggtctccctctgttgcccaagctggagtgtggtggcacaacacaatcacagctcttggcagcctcgacctcctgagctcaagtgatcctcccacctcagcctatacctgggagtacaggcgttcgccactgtgttggaataatttttataattttttgtagagatgagggtcttactgtgttgtccaggctggtcttgaactcctgggttcaagtgatcctcctgcctcaccctcccaaagtgctggattacaggccattgtgggtttttttctctgtgtgttttggtctttatcatccatattcgagggtttcctaaaaagcctgatattcctttgcaacctctttatttttttaaaagataagattaaaaacaaattggaatctttgggtgcatggatgagatttgttgtctttgagctttattgtaaggtaagggaaactaaagattttagtttctttgagtttggttgccccactggggaaaaggggtttctgcagtcaaggattcagtaagtgtagtttgcagaacagtattcatactctcaactgggtctggaatcctccagtcaagagatcctctaatttaccttctccaggaatataagcctgggactacttttttttgttttttcctcttcacgtcagatgggtaatgtgtccatgtcattacaaggtttgaagaaggcacatctcacacatgagtgtgaaaactcaatcatgcttataaactacaaaaggatcagcctgggactgagttttagagagtttcaagaatttcagaagagtttcagagagctcttcgggaactaggttgttgaattctactttttgtcaaaggggtataaaaaatagaaaatagtctctttcttttaagttgctgatggaaagctgactaatgtggaattcttagaaagattatacccactgttgttggttgcctttatcaatctgtatctttaccttctctaaactt

SEQ ID NO: 31688 - DNA, 1049 bp, Homo sapiens
agcttgatccagcagcacatcaaaagcttatccaccgtgatcaagttggcttcatccctgggatgcaaggctggttcaacatatgcaaatcaataaacgtaatccatcatgttcctgtacattcttttgcattctacatgaccttatgtatgtttaaaaacacatttttacatttctttttttgtatttttaggccgtgttggccaggttggtctcgaactcctgacttcaggtgatccgcccatctcagcctcccaaagtgttgggattacaggcatgagccaccatgcccatttttacatttcttgagcaggagccctgtagtttaaaagtcccctttattttcagcagtgtacatttaagacaaatcggatgtgtgagtaggtagaaaatatttaccgtttactgtgacagaacagatgaacaagaatgtatttggttttatttgtaatataaaacaactgtgaagggaatgccaaacaatagtagtgaatcaaactttggaaatacctctgacgtagaattctatagtagctttaattgggtattattatcagctggtctgtttgggacttgtttgatgaactgttagatgactgactgccagccaatcattatcctggctgctccttagctgactgccagtcaacaattactccatgctgattctacagtttttccacagttgtcagtgttctagttctgagtatagtctcttggcataatgtggttcataaacgactgcactgataacttttgttagaactcaccacttgccagatagcccagatgccatatgttactcattcagtaaataactcttaagagcctgccaaatgctagatacttaaaggcagtgggttataagggtgaactgaacttagcttcttagagcatactacctagtggtataggcagtcaataatcattgagtaggcaaatacctaatattatttcaaatggtgataaattattatgaaaaccaaaaagctgagtaaagagaagaatgatggggaagggtaggatacacttgaaccagggtggtcagg

SEQ ID NO: 31689 - DNA, 1115 bp, Homo sapiens
tgcccaggctggagtgcagtggtgcgattttggctcactgcaacctctgccttccgggttcaagcgattctcctgcctcagcatccctagtagctgggattacaggcgcctgccaccacgcctaattttgtatttttagtagagatggggtttcactatgttggccaggctggttttgaactactgacctcaggtgatccacccaccccagcctctcaaagtgctgggattacaggtgtgagccactgcacccggcttctttttaatttttaaacaagtcactttttggcaaatatagtatggcccctatagttactcttttcttactttgatccttaacatgtttgcatacccaagagtgttgtgcctgctatataatctgtttcttagcctgatggtgctttgtgtagattgagatatgaggattatgggattagtgctcagaactctgcaagctctctggaaatacagtacacctttttgccttagccagcagaatgtttgtgagttctgtgctgaagcctgggggttgagtggtagatattgtgcttttatctgacatttgatttgttgcctgaggacagagatgcagtgttatgggtgggagttgtgtcttgccttaccagtgtttagactttttaaaagataatggatcttacttcttgaaagaataggagatgaaaaccaatgtcctcctgcttctgttcttctctttcttcatagctttccacttggcatatagcagaaaactctttggctatatttggtgcattttgttggtggaattcctcaagaatgcattcttgacttttttcttttttttttttctgagacagagtcttgctgtatcacccaggctggagtacagtgacgtgatcatggctctctgcagcctcaacctccctgttaaggcatcctctcccctcagcctcccaccccctggccctgccccaatagctgggactacaggcccatgccaccatacgcagctattttgtgtgtgtgtgtgtgtgtgtgtgtgtgtgtgtgtgtgtgtgtgtgtgtagagatggtgtctccctgtgttgtctggactgtctataaaacttgacattcaacagtctcttgtttttatt

SEQ ID NO: 31690 - DNA, 1521 bp, Homo sapiens
gaacagctggtacaaaggcttagagccatgtgggagttgggatgagtttggggagcagcaaattgcctggggtgcaggaaggaaatggtgagagatgagagtaaaataaaagttgctagaattgtgagggggctgtctttgttgtagatagtgaactagttgaatttggattattgtacatgggttgccgagtcttcattcttgctgataattttctccctttgttgatgttgaagctgatagtgattgaacatatttagtttaacttagttaatgacttttaaatttttttttattttttcagaacaatgcaaacttttttttttttttttttttttttttttttttttaaaggaacaggatctcactctgtcgcccaggctagagtgcagtggcatgatcatagctcggttgcagcctctaactcctgggcttaagcagttctcctgcctttgcctcctgagtagctgggactacagacaggtgccaccacacatggctaattaaaaaaaaaatagtagagatggagtctggcagtgttgcctaggctggtctcaaactcctgggctcaggcgatcctcctgcttccacctctccctcccaacgtgcttgctgggattacaggggtgagccactggccaggcagaactttttttttttttaaataatagagagggggtcacactatgttggccaggctggtcttgaactcttgggctcaagtgatcctccagcttcagcctcttaaagtgctgaaattacaggtgtgatccactgtgcctggctagcagaacatttttgataagtgttttatatcaaatgttttgacttacacagtggtgaatgaattgaactcatatattcctggggattcttgcaaaaaattctcttaaagttatacttgctcacaaaaatgttaactttataaatgtagaacactctcctactaatttttattttattattctattgttttttatttttttgcgacggagtctcactctgttgcccaggctggcgtgcaatgatgcgatctcggctcactgcaacctctgcctccttggttcaagcagttctcctgcctcaccctcctgagtagctgggtaggcacactccaccacgcccggctgatttttgtatttttagtagagatggggttttgtcgtgttggccaggctggtctcgaactcctgaccgcaagagatctgcccacctcggcctcccacggcctcgctgggattacaggcatgagccactgtgcctggcctaaattttaaatataagtaatgtactccccagtcttacagaaattggacgactatagaaaacaaacatcaaaaaaagtgtagaatgtgagtatttttagtttaataagtgtattttataaactatttatttgtattgacttctcggataacaacctgttataaaatctttatccccataaacataattttcctaaaatagctataatattgtgattaatgtttatgctaaagtgactattatggaattaacaga

SEQ ID NO: 31691 - DNA, 1023 bp, Homo sapiens
ggcctgccacttgtatttctttgtcctcaatactgaacactagacacatttgaaaccttcctcagaaggaaacaaaccaactggttatgcctgggtggtggcatggaagatgcccattgttgcccaatttgctaataagtattttgaaattagaaatgaaacatgaggtccaagcctgtccagttccctacccaacccattcctcctccctggaaaaaagaaacccgtatcatcttccaaatttctgattcatcactgccacttaaaaatgaaccgttttgaattttaaaatgtgaataactcaagtatcttttcttttgagatgcccggcctgagcactaacttcaggcattgctgaatgcagtgaagaaaccagagtggtgtctgctgcctcctgatcttttacagctgacagcacagcctatttctaaatactactagtttgtgaggcagagacaccctctgaaggaaccagacagactatggaggggtacagtgtgaagtcactggaaaacttcctcaccctatttctttggatgactgtcctgagttaaggaaggggcccaactgttggcagcctcacagcttgggctgggggcctttgagttgggtccctggagaaggcactgtaagccctgaccaggagcgacagggcccccagtgagatggtggaagggcaaaagtagagacctgcgatggtgggatggggaggcctcggacttgggtgggctcctttctcttaagcgagggcccaccttggtgctgaggggactagctgagctccattgagtctgtgctgggggctgaagcggaatccttctggatgctttcaaagagggcagcaagttcagggttggatctgatttgggaagagaagtcggccatgatggggcttttccccacctcggggatggtcagcagggcagccactgccctcattgcagagcgcttcagttcatcttgcttttcaaactcctgcttcacagaaccagctttgacctaaagtaggaaacagcagaagca

SEQ ID NO: 31692 - DNA, 2070 bp, Homo sapiens
tgatggctgcgaagagagcagaaggggtgctgctgtaggaaatcaatggctcggaagaccacactgaggaaggtgtgagttgatactggaagatctccaggtttgaggcatcttcagaggtatatggtggttttgtgtgtgttgagggtgtggtagcgcagcagctccctagggaattagaaggttttattgaacatttaccctgtgacaggcactgcaggcattcagcgcgcagtgtcatcttcattttacaggtgaggaaaagactcaggttcaagtagatggtcaaggccagtactaccggaaggaccatctgggggttcggacactggtggggtgggatttgctgccccttgcaaattgagagtgtcttggggtcagttttgatttgctcagctgttggcattctttgggctctgagtgggtgaggtgacccttgacctcctgggatcgcatctggagagtgcctagtattctgccagcttcggaaagggagggaaagcaagcctggcagaggcacccattccattcccagcttgctccgtagctggcgattggaagacactctgcgacagtgttcagtccctgggcaggaaagcctccttccaggattcttcctcacctggggccgcttcttccccaaaaggcatcatggccgccctcagaccccttgtgaagcccaagatcgtcaaaaagagaaccaagaagttcatccggcaccagtcagaccgatatgtcaaaattaaggtatgtggtcctgggatggaaatgggtgtggggtgaagaaaagagtttccaacagtttctgacatcacctagtcaggattatctttgaccgatgaactggcttgtggaagagctttctgtagaaatacaggtctcccccagtgtgccctagtgctggtacttatgtctcttgatgtgtgaagcgaaactttaatgaaaagggacatttggccgttttgatgtgttcagagggctttgcatttgtgtcctgtattttgggttgccttgtgacagcaggatccctattttatagacaagaaaactcaggtgctgagagcagtgtctgcagctgtgcttgccatctcagtatctacacagtcccctcgcatcccattggtgcctcctccattgcttgggagtggcaatggtgggggtgccttcatccctagtggctaaagccacgagctcctggtttttcccaccaaaaaagtaaggaaatagtgaagtcctgttaccaaaggcaactactgtgtggcatacttccttttcatttggtcctttttttccctccccaaaaggaagagttcgcactctgcacagacgctaacccacctgtgtattatttccttcagcgtaactggcggaaacccagaggcattgacaacagggttcgtagaagattcaagggccagatcttgatgcccaacattggttatggaagcaacaaaaaaacaaagcacatgctgcccagtggcttccggaagttcctggtccacaacgtcaaggagctggaagtgctgctgatgtgcaacaagtgagttgggtcccacctctagttttcagtgatcagaagtttgcatctgtgtgagcacttctggcaggaactctacaaactcttgggatgcattttggcggggggtgttgtacattctctgagggaatcagaagttgttccttgcaggattttagagaatgcttgttggggaattcaaggtgtttcctttgctgaaggaggtgacttggtcttctaagtgtagagacccaagaccaggaaaagactgctttgtgaacactgcaataatagccactttccactactacaatatcctttggctgttgtttccaaaatgttgctttctttatgaaggtgtcaagcaaaagagttgaactctgaaatattcgaagagatttattctgagccaaatatgagttgaccatggcccgtgacacagcccttgggagaccctaagaatatgtgtccaaggtgggcggggagcagcttggttttacatattttagggagacatgagacatcaatcaaatacacataaggcatacattggt

SEQ ID NO: 31693 - DNA, 1048 bp, Homo sapiens
aaaccccaaaacttgctgcattattgctcttttattgacaatgggcaaaaaaataagtagacctgatatggttgatgaaaatacgtaagtaaactttatataaatatataaatatataaatatatatatatatatactgtataggtagtacttgtgtgtgaaaggcaggcgtttcagtccacattagcaatacccaccttacaaggagctccacttacctaataggaagacagtaccttagctgggtgtgtgagacaatagaccaaaccctaaatgctaggaacaaattcagatacttcatattttcatacaaagaagtccctctaggactggctaaaatctttacacaatcattactaactgtgccaagtaacatagcatctaactgtttaaaaagtccagtattgctttgtataaatccttattttattaacagaatactatcataaatagtattataatgctgttatttcaggtaagcaaatagctaaactgcagtacactctacagtagcaactcaggacagctggttacaagctggttgtcttaggacattggttacacggattcttagacactttaatggctgcgataactgtgactctccatgatccatgtttcttttatgcgcatatgatttgacgcacactcattcagagtcctccgagaggggcacccatacacggcagaagtgttcatctccaacatgaaagtgaccagctctcatcctcgtctccccaacaccataacgtcctcatcccgcctccaacccacaccaggccgaagccctcagagagtgttttcatcaggaaccactctcgaacctgaaggttgactttagcgtttagcaacccagggcggtgtgtgtgtttcccgttttgttttctgagtggtagcagtgatcaccgtaattccatgtagccatgtgctagcagaacccctgtgtcctcaccgtggcccgtgtgaccccagccgacgagtgcccggcggagcccccgctgccttcccatggtccagtgagctgccagggcatcacatgactctcagc

SEQ ID NO: 31694 - DNA, 1044 bp, Homo sapiens
tggaagtccctggatgtggcacatccacatcagagggtggatgggggcaaaaaaagagcagcggcagaaggcgggacccggctgggcctggacctggtcactgcagcggtggcctggagggaccagacagcctgggtggagttagagcatgcacctatgtggggaagggaccagacagcctgggtggagttagagcatgcacctgtgtggggaagggaccaggcagcaggggtcggggagcctagcccggctcccccactcactgccgtggaggccagggagcataggcccagggacgccagaaggtctgatttttcagaagccagaaatccagattttttgtgcactcttccagtttttaaatactggcaacgaactagaattctttttgttaacagtgtgtgggccaaagaaaacccaactgtaggtgagccatggcgacccctcacctggaagctgagggagggagagaagggtgtgggctggtgctggcatggagcaggatggtgaggacccagaatctgctctggccttggctgtagaggcctggggcattggagcagttcttgtttggagacccccgaatcatagcgaggcatgtgatcttgtgaatagtgaaaccctggtccttccatcctgggtccctgggacaggtagggaccggggccactccattaccacttctgtgccaggaccaagctggctggtgtctgctccctgccacactcctggggacaagcttacgggtgtggccatcctgggataaaaatagcagggtcaccttgcagccaggaggcttcctttcacttgcacatggaaatgcggtgtctgcagggcactgctgtcagccaggaactgtgcaggttatggggcaggtggacaccggtttcatctccatcccccccaccccggggacagaagaatgctgacttctacctgctggggcaaggggtcaggcccggccccctaattagtggatgacctggccgattacaccctagcacaggttctaggtgtgccatgaggcaagggggcccaagccac

SEQ ID NO: 31695 - DNA, 1071 bp, Homo sapiens
caagttgctcccctttttgtcctttaaggagtagagttctgggcctggtgtgccccaacttcctaagggagtggtgcagatactgcctggggttgggggtcgtccactctcttgacagggaagcccccatcagccccttcctcacctggctgtcggtgctgccttgcaacttaggccggaccgacacagggcagagcaacctctgttcctttatccgtgatgcccagatccaaagtggaccacggtttatagtaagagatgtctgcaacagagccatttaaacagaaaggagaaaggttgggacttaatagaggcctttgaagagaattatatgcttactgtgggcctaataggactgcagctattcattttcattccatgcatattatctgaacgcccactatgcaccagacactgtgttgggtgcccatgaccaaggcgaggcccctgctcttgagctccactgtggcacaggagctggacaggagcaagttagcaatgcagaggcagttgacttccagaaagtaatgcaaactctagggattctaaacattggggaaagaaatagggcagctacgggaggcaatagcattgggtaaggctggttgggaagacctctctaaggaggcattagagctggctgtcccaggaagaggcaacagctgatgtaaaggctgccgagtgtgtgaaatggaaaggaaggcctggaagaggttccaaagaggtaagagggaggaggcgacatcaagggccactgagcatttgatggtccactgagcttcctggaaagctcagcaaaagtgggaatgggacagattgcatgggaatcaccagatgaaaaagtagggtgcccgattccacgaggagttttaagtctggataacacagagtccattttagtgaaaggagcccaagggctagtctcctgtgctcttctggcccctgacccactgtgccctccagtggctttctgtccctgaagcaggaaacttgagtgggtttcaggtactgtccctgtgtcatcaagaagtgacagttctgctttgctgaagggcattcttccgggttcct

SEQ ID NO: 31696 - DNA, 1050 bp, Homo sapiens
ctgaggggaacccctctcccccatgtttgccacgcagcccccatcagacgccctgtgctgccatccacatgccccagggcctctcccagccctgggctccacactgccattgatccacagccaccaaggccctcgggctctttcccatgcgagcccctgaagctgtgaggggggagggagatctgattccaggttctaggggctgccctctcatccccagcctgtctcctggaacctgcattctcatctccaaaacccactcaggttcctgggctctttgagtgagagagggtctcacagcagccgtggagggtgtggcctggcccctgcaggctgacggtactctttatgtttgggagcgaggcctgggctggggaggctggagccatcacctccctggggccggaaagactgcctttgacaggacaagggctgccttggctgtgtggccctgggttcacaggacacggagacctttctttctgtcccccacccgactacgcgctgatgagaaccagccatgtctgaggaccagaggtctctcctgaaataattaccctctaattaggcatggcattagctgttggtggggcttcctggaacactctcactgactccactgtgatgctgtgaaggggcggccttgcccccactgtgcaggtaggaaaccaaggctcagagaagttggggttccaactcaagtgttggactctagcccataatgttactgtcactcctgtcatgacaacattagggtggtagatgcctgacggagctgtacagagcattcgggaccagagggcaggggcagtgcgaaaaactgcatcttccttcatgtggttgggtggcctgagaagccccctgtacgctgactgctgcccgactcctcgtgccgtctgcccatctctccagcagctgctgacacatagggagatgctcaatgttggatcagtcagcaaagctctaaaaatagcctcccgctttgaaaagttcattgttcgagtcctatatttttctatatatataaaagccacttctggaggtctgggt

SEQ ID NO: 31697 - DNA, 1032 bp, Homo sapiens
agagcaaagaaaacatgggaagctgagaagaggaatgtggagatgggcagtgaaggggcactgggttcctgctcagcctcttgcctcggaacccaggtgctctaaactggcataaggggcactgggctcctgctcagcttcttgcctgggaacccaggtgctctaaactggctttaggggctgccctcctctgctgcaagctgggccacctcagcccccttccttcactgtccccctccaaatgaaagattcagaagggcacaagacaatgcccctgccttgatggcttcttgcagcttcctgactcccgtaggcctgccagctgcctggccctccaggagatggacttgtaggtgggtggcccaggacaggtggggttttgattgttccatatctgcttgctgtctcccaaccacgtctaggcattccacaggtgtgggcgctgggcactgtatctgccttcatggagcccaaggacagataataaacaagtaaacatacaaatggaggactgcaagccatgagcgctcatagtaggaagagcctgggagaggaggaaagagtgagggaagccgtctcttagttggcccagttaagctgagcctcagtttactcattggtaaaatgaggccaggggtaactccacctacttcacaatgttgccttgaaggccaactatcactaaagaactctaaagtgctaattagtattactttaagcttgtcataggtgcttgaagggtgtctctgggtggagaaagggtagggggctgggtgggcttagggagaaagaagcaactttccattagatcttcccccaaaaagccgccaaaagggtggtaccaacctcaggatagggcccattcccttctctggggcgcatcagagccccagaaccacacggttcggtccaggcaggcaaaggccaggttttataaactgaaggcaaaatcgggataggcagatgttgagtaggcatcagcggagtaggctctggttgggggtttggcgctgtgcatttgttgtggttaca

SEQ ID NO: 31698 - DNA, 1047 bp, Homo sapiens
ggagtgcattggcgcaatctcagctcacagcaacctgcacttcccgggttcaagcaattctcctgccgcagcctccccagtagctgggattacaggctcctaccaccacgcctggctaattttttgtatttttagtagagatggggttttgccatgttagccaagctagtctcaaactcctgacctcaagtgatccacctgcctcggcctcccaaagtgctgggattacaggcgtgagccaccgcgcccagctgtccttttaaataaatagtatttcattgtatcgacaggccacagcttatgtatgcagtctactgtgatggaccacatgggttgttttcagtttggggctgttgctcttgaacctgtgtcccagcacacatggcatgagctgtctctggggcacatactggctgtaaagcaagcatacagccttgccccaaccccacactgggcattgtcggtctttgtcgttttcactcacctggtgggtgggtaatggtttcttgctgtggtttgaatttgcatctccccgatgaggttggggatcttttgtttgtccattggctgtttggatttcatcattggtggagtgcctgttcatgcctttcacccatcttgggctgtctttttatttctttacgatttggaggcttctttgggtgctacagattctaatccttcgtcagttatccacattgtagacctcttctccctccctcctgcctgcctttttcactctttacagggtgttgggataaacttctcaatttcagaattcttaattcaagtagtcaactttctcactttattaacatttttcgtgttttgagaaactcattcctaccctgtaatcatgaagattctcgttattcacctttcacattaggtctttaatccacctggaatagattttcatctacggtctctctctctctctctgacacatgcacatgtgtgcacatgcacggccccaggtgcacacatatacccattcccaggtggcccggcaccatttggtgagaaccgtgttcttttccctacctg

SEQ ID NO: 31699 - DNA, 1066 bp, Homo sapiens
tagtagagacggtgttttgccatgttgcctaggctgatcttgaactcctagcctcaagtgatccacctgccttggcctcccaaagtgctggaattacaggtatgagccactgtgcctggccgtagagctgccacattctttttgatggctgcataggcttccatcatatggatgtgtcttaattataatctgtttaacaaatccctcactggtggactttaaggaacaagaatacttcaataatttttattcactttaaaaacatttatagtaatgtgcattatgacatttcggtcaatgacacaccacatatatgatggtggtcccataagatgataataccatatttttaccgtaccttttctatgttatgtttagatacacaaatatctactacctggtcaaattaattggacatttttattttgagttgttcatgtttttttcttattgatttggaataactgtatatggaggaaaccaagggaataattgtgattaagtgcctgcagtgttcagtacagtcatatgctgaacaggtttgtagcctaggaggactaggccataccatatagcctaggtgtgtagtaggctgtgccatctaggttgtgtaagaacactctatgaggtttcacaatgatgaaatcacctaaggacacatttctcagaatgtatccccatcattaagcactgcaaacctgattgtttaaatataaagacatgtcaagaagagacttcaattggcccatcagcttgtgcccagataacccctgttgaccttttaaaaatcaattattacaaaaaagtataaaatgaaaagtaaaagcgcctcacatatccattccatgcacccctcagtcctcccaaaaggtatccatcaataagagtttttttgtttcggcatatttgtgtcctttgggaaaattaggaaattcccacacacatctacatagagccttttaacttgtacacaaaaggatcatgatatacagtcttctgttccttgaatttttcagtagaaatatgacctggagatctgtccatcctaggacaaagtcccagtaat

SEQ ID NO: 31700 - DNA, 1030 bp, Homo sapiens
tctgcaggagggccagtgggcgttcctcttgggacagagtgctcaccacctcccagcctgggccatgcctaggcagctctgacgcgaggacatttgttcccacttggaactggcaccatccttcctgcggtgctcgctgccacccacccacacactgaagtggcctggccctgtcctctgagcctcacaacccatctgctccccagctctggacagcctgcagagaccaggactccctgaggctgaggaaggggtcaccagcctcctccccacccacgccttctggacacaccctggctcgtgctgtctatctccgggaagagcccagagctgagtttgggatgggcaggaggtcctgggcagagcagagcagagccgccacttctctggctctgggcactgcctggagcacacataaattcccttatggctgctttcccctttcacccgtgggcctcaccattgcctcagccctgccagcctcacctccctctcctcggttcccatctctgctagtgactgccgccccctctccctgcatcgagtcttcgttcaggggatgaagacctactctgtgcctgacactgtgccaggtgctaactatccattcccacatccagccagctagcgcccaccctgtgaggagcactgtcccacagcacagaggaggacctgagtccaaggctttgcgttactggtttcctcaccggagttgtgggtgaggctcttcttggcaagcaccacagggcagcacttgtcgccgagagctcagagcccagcagcaaggcggcatgggcatgagccactctgacacatgggaagaggctttcttccgctgatcagcaagtagtttgctgagcacctattgtttgctgccccgggctagaccctggggatacagcagtgagtgaggtggacactcaggcctcctggagcagatagatgttcaggtgagagagaaatgataaagagaaaataaacaaatgaagatgccttcaggcaaagatcggtgccaagaaaataaaacagg

SEQ ID NO: 31701 - DNA, 1067 bp, Homo sapiens
cctccctctctctgagctcgcctctcccatcccaggccagcctctggacgcagggccagcccctgggctccggcagctgagcttttcctcaccggcggacgcccctcacccatcccgccctgagtgactcactgctcccctggcctgcagccactgctgtctcctggcaggaggcaggcgcaaggttgtgcagaagccacagggtctagtgtgtgagggccgcttggccaggagggtctggagcagctagacaggaccagggcacagaggctggccggtggatagtggggcctgtggctcagccctgcagtggcctgtggcagccagtgcctcctcttttccctaactttgggggcttttctttcttcttcctaccatgaagaaggaagggacctgaaaatccgtgaagagagccgttccctggccaggaggagactctgggtggtggggcagtggtggtgggccccttggccactcgctcctccaccgagccaggcatgaaggggtatggcagtgccgtgtggagccttatgtggaagtactgcatctctgtgaggacactcaggtaccgggacgcgtgcatggctgctctgcctggctgtcgactgttgggccggatggtttgcatggctgtacagggtccaggaaggagctgggatggagggagctggagcaactttcagtctctggtggagcgggaggaggagagtggaacaatgaccagggggtgtgctgcgattggctgggatccagagcacacgttcggctgggatccagagcacacgttcaggaaaggaacgccaggggcaggtgcagcatgtgttacataacatgctggcacagggcacagctgtgtgaccctggccctgccccacagcatctctgagcctgttacccaccagcgaaatggggctcacacgcgtcccttcagcgcttggtgtagtgattccttcgtgtgaccgtaaacgtcagtcactgagtggctgagggctcagcccggactcagacaccaggctgcccaggtttaatgctggctttggcattgttagtggtgtgaagcggcttca

SEQ ID NO: 31702 - DNA, 1052 bp, Homo sapiens
atctctcctctcccacccacacttctcccaaaacacctgttctctgcatccccactctcatgcctcagtgcaggcctccacctcttccctccagactcaccatcccaacctctcctctggtatcccagcctctaatctctccccactaatccttcccccatgaggggatctatttaatcacaaacctcaccatgtccctcctctactcagaaacctcctggaatgccattacccgcataatgaagcccaaacccctggcaggttgtctcatgactttctgctgcttttcacctccaagcctctgcacatgttgttccatctgcaagcaatacctttccatgcactgtctgcctaacaagcttctggccacccttcaagactctgtttcaacatcttgtcctccaggaaacttctgtttttccttgctatatctctttttctcaaaaaccttgcccctccttccctcatcttacatagtattatttgatctacatttccatcgaaacagtcagttctaccatattataactgtgatcatgttcgctcagtattgtgactattacaaggtacttgcattagaacgtttggttctgtgtgacagtgagcccgcttcaaactggctcatgtaaaatggacatatgggcggcataacctccaggtttcaggtgtggctggcccagggctccggtgatgagaacctgcagcctctcatgcaggctcctccccatgggggccccagtaaagaaggggcctctatctctcaggggtaagctcaggtccaaggtgggatgttctctgtctccacgacactggcaaacctctgggcctgcctctcacagccctgcttgagtcatgccctggtcctggctcccccagagtcccagagattaaagaagcggcaaccagaaggaggcaagtggctgggcaggaaatttgctgggtgtccaccaccgcccaaggcatgctgctcccttcctccaggcaggaaatggggccttggctcaccttgtttcccatgcctggcctgggtctgacccaaagcaagcattggt

SEQ ID NO: 31703 - DNA, 2033 bp, Homo sapiens
ctcccaaagtgctgggattataggcgtgagccaccacgcccagctggaaccaagaacaaatttggatttttgacttgaagaactgggaggacagcagtgctttttactgagatagagcagatgaggaagagagacttgagaggaaaaaacaagtgccctttgagactcatgaagtttcatgtctcagagagctccatggtttctacagctattatttgaaaatagtgtattaatatttctaaacattcatttaaagcaatatgatatttattctttactgttttcccattgatagatcattaaagttgctttcaatttcagtaatgctgcagtgaacatttggcatgtaaatccttgtcagcctccctgattattttcttcattatgttcccagaagtagaattactaggtcaaaggctaaaaagatttcacagtttcttaatccatattgccgcatacgttttccaagagaagcatctaagatgcagcctccctgcatcctctccactctgactattgcaattgttctgatccttgctaattagatatttgggaaatattattttactttcaaatctgatgcagtatctgtggggagtctgacttatgaggaatagaactctctctttttttgtttttgtttttgttgttgttgttttgtttttttgagatggagtttcgcttctgtcacccagcctggagtacagtgactcgatcttgggtcgctgcaacctccgctttctgggttcaagtgattctcctgcctcagcctcccaagcagctgggattacaggcacctgccaccatacccagctaatttttctatttttagtagagacagggtttcaccatgttggtcaggctggtcttgaactcctgacctcaggtgatcctcccgcctcggcctcccaaagtgctgggattacaggcatgagccactgtgtccggctgaagagaactctttctagtgatgtagacatgatggtacttcctccctccaacatgaccttgtgggtagaattcagatgttcaggccaccgagcctgcccctgtttcgacccttgtcctttggtgtggggcctccccgaccccatcgtgctcccattctgaactttgctactgttcccctacttccctgacctgtcacctttgcatgccagagagactcagggctaggaatggacatccaccaaccattttccagcaaatctaataaacagcccctgttgggccatgattttcagctggtccctgaatgatgaatcactcagggaccagcacacacaatgcaatctgtctgactgacactctgctacaacatgcactagggttgggagtgactgggggcagaaggggctgtgacaggggctcccgatagcatcgtccacctctctcttagagaagcccaatacctgacgttaggtgggcatgtggctgctgagacatagaatttcccagcctcctttgcaacgaggttgctggtacaaccaagctgtccttccagcgtgggaagggaagtgatttgtgtcgacttctgagatatttcctcacagagacccttctttctgaccctgtgcctgtcctgctgctggggacttcatctctgaggctgcagctccatcctggcccaggaggatgagggcagcccccctgggatgacagggccatgagggagaagagctccctggccctgccccaccaggccagccctggaccatctgctttcacactgaaatgccagagacacaaatttctatttaccactctcaggtggggctctttgtctcagcagctgagccctgtcttacgcagtacagcagtcttggagggcactttcccacgtacttgcctggggtcaggctgtgccagggaccacaactgtgtgattttcagccctcccgccgtgggtgagagccacactcagctcccacccactgtcctctccaggtgcttgtgaggagatcgaatgcatgaaggtggagactcccactaaaaacatcaggagccaatatcttccagggcaccccttgttc

SEQ ID NO: 31704 - DNA, 1012 bp, Homo sapiens
ctactaatggggaattagactaaatcccaaaatacatttggtaagccttgtctaaacatctgcttctattgcaaccaaatcttaaaggtacttagaaggtggtgacacaatgtgtatgtgtgcatctgacccaggtccagtgtttgggacagtgaggactttgaaaccagggtctaagctgaatgaccttggtcaaatgactcaaattccctgagcctcagtgtccttatctcaaatggaaatgaaaacatcaagagttttcttgatcttgtccacatctgactctccattctctcctccatcactgtggtcatcacactctggccttctggtacctccattcttccaagctcattagtgtcccagggcctttgcctgtgctgttccctcagcctagaacatgctcccccaggtctcacccaagatgagttctcctcagtccaatcccccttcagatgtcagctcctcttcccttatcatctcacctgaagtaacctagccaatctctgcacatcagccagtttacttctgtcccttatctgcctgtccccactggaatgtcagcaggaactttgtcttatgcagtgctgtgcctcagtgctctgccatgtgccctggcacagcatgctattttggtctctgtacttgccacttcccacatccaaggggagcacctctggaaggaggccagagctaaatgtgctaagcttgtctgtccacatgcctgaatgctcccacttctgtccctccatcatgcacttctttctctttcctaattgcctatctaggacttccaatactatgttgagcccaaatgacaaaaatgacatccttgtcttgttcctgatcttagctaaaaagctttcagtctttcactgctgagtatgatgttagctgtggattttttgtatatggtcttcattatgttgaggtagtttctttccattcctattttgtttagtgtttttattttatttattttatttttaatttttatttttttgggacggag

SEQ ID NO: 31705 - DNA, 1050 bp, Homo sapiens
gaataaacaagtagacaaaggaacaagacagcttcggagagcattaggtacagaaggggcaataggacaggtgtgaccagggagggcaggggaggttgcaaagacttctcagaggaggcagcctctgagtggagacctgacggaatagtgggtgctggccttctaaacagcctggggaagaacgaggtgacaactcccattgacagatgaggtgtcttaggtcaagccacttgcgtaaggtcaggccgcaggtcacagcaggaccaggatttgttcctagtttccctgcccaaaagccactcacagaacctttacaactgccccagtctgcgtgggtgggagtgggaaaccctcagatcccccgaatctgaaacccctggcatctgtggtctccgactcttgctctctggttttccctgcttgtctgtttgtctgtgtggaggtaggaactgctttagacccatggccctactcgggaactggagctttaccaaggaaggtccatctatctgcctcactccttttccccatcctgtcccctgacgccccacacccagacactcccgaactagcgtctgtgtttatcgctcccttgctttttcacttcaattcccaactggccatggctggcagatagaaaacgatggaattgtgttcactcagcttgcatcctgtgacctcgctaagcacacttaacagttccagcagcttttctggagatccttagggatgtttactgagagaatcctgtcgcttgtgcatggagacagttctggttcttcttttccaatctgtatggcttttattccttggccttgctctagtacacttgttaggacctgtggggtgacgttagataggggtgggaaaatgcaggtcctggcccggttctcgatcttaggggaaaacacccattctttctccataaaggtagctggaagtctgtgcagatccctttatcaggctgaggacatttccttctattcctgatgggcagagaattctcatcatgaatcagtgttgaatactgtcaaggctttttctgcatct

SEQ ID NO: 31706 - DNA, 1032 bp, Homo sapiens
tcagcacaaaggcaggagggaaggctggtcagtgtatggggaccacacaaggctggccggaccacgtggccgggtggcagggatggttggtttagatgcgatggtgagagagagcctcccgggagagctggcgatggcgtggccggctgatggcagggataagcccctgcaggaatctgaggggcgaaggagccctgggtgcagaggctctggggtggggacaagtgaggagcctcagggaggccagggcagaggctggggcaggagacagacccagatgatgccaaatcctcttgactgggctgcgaatgggaactggcgtggagtacgaagggaacccactggcacgttggcagtgggtggtgacattgccagagtgctctggcgggttgtgtcatggggagagttagaatggcagcagggggtctgggggtggccagagggaagccgtcccagggacctggcagagaagacggggcttgggtcagggaggtggccgtggagggggagaagtaggcagattggcgatgggtgttggagcggaagctgttaggacctgccgacatggctggatgttgtgggagggaaacaagccaggaggaatctggtgggaaggtttgagcggaggtggggaaggtcagggtcaagagcttggtctgggtgtgttcagccagagacgcttgttagacatcaggtgacaaggataggtgggtggtgagggcacaagttgggtggtcccacgatgcagtagtagaaattgtcagggccagcaactcccaacagccctgcccaggtctacgaagctcagatgctgtcctggctaatatgctagagatgggaaatgaccagtccaggtgtggctaaccaggaggcgggaggtgccgggagctggggatcaggttgtgactggccctgacctgaggctgcttcggggcccaccttctccctcctactcacccacccaggacctcaggtacacggaatgcagccatcataactcttggttcatgcctccctcccatcattggtcca

SEQ ID NO: 31707 - DNA, 1112 bp, Homo sapiens
ggactctgctgggtgtgcggagaagcttttccagtccttgggggtggaggctgtgcctggaggtgaggaagcagagacctgggggtctccctgagatctggagggtctccatcctcgtgggagggtttgggcctttgggatcccttctaaacctgagtttgtatatttccatgatttcctcccagagctcaggcctctaactgggaaaaagccaattatgcaggaagcgttgacttttccatgaagatctgacatgctggggcattattgaaggagtgtggagaatcaggcacagcagctgccacgtgcccacttactgggttgatgaggcaaatttttaaccatttttttttttttttggtagagatggggtctcactatgctgcctaggctggtcttgaactcctgacctcaagcaatcctcctgccttggcctcccaaaatcactgggattacaccttgcccagcctggggggtcaagaatttttattttgttcccggatgtgtcctcagtgcttagaacaattcctggcatacagtatgtgctcagtaattatttgttgagtgaatgaacaatgatctgaggtggatattattattatcatttaaaaatgagtaaactgaggtacagagagattaggtaactaacacagggccaggcaagtactaaatggcaaacttgggattcaaatccaggcagacactggtttcagaatctgtgttcttagtccctaagctatattgtcactttaattaaaatttgatgaattggctgggcgcggttgctcacgcctgtaatcccagcactttgggaggccgaggcgggtggatcacctgaggtcgggagttcgagaccagcttggccaacatggtgaaaccctgtctctactaaaaacaaaaattagccaggcgtggtggtgggtgcctgtaatccgagctactcgggaggctaaggcaggagaattgacttgaacccaggaggcggaggttgcagtgagcagagatggcacaattgcactccagcctgggagacagagtgggactccttctcaaaaaaagaaaaaaaaaaattgatgaattaacaaatcaaatagcctttctagctgcttctt

SEQ ID NO: 31708 - DNA, 1023 bp, Homo sapiens
gctcagtgaccccgttctgggggactcttgctcaggcgtcatcccatccacacagaaagggctcttccatggccacggttttcagaccctttacatttgtaaattgttggcagcagaatcctatttctgaaagaaacctctatggaagcagctatggaaatcagaggaaagtggagaggttctgggaggcggagggagaccttccagtgcagccctgccttgggatccgtgtccagcagagcacagtcacatcccctccacaccaggaagcccctcctcgggcaggtgttgtgagccaggtgtggggccacccagtgcgcccgggccgggccctcggcctcagacaagcagagcagccttcaaaacctggctggaggggggcattttgttgtttccccaaaaacaccccttcccaaagtaccctgggtgggggtggggcatcatcagctgcatggggtgaccagaggcctcaagtgcagacagccagctggaggctgatggcagcgtagatgatgcgtagactgatggcagcgagcccacccttccctctgtgtcccagccctagcacaggggcccgggtggagctggcgccttctcacgtctgtggacccagctggctgctatctccacctctgcagggggtgtcacaggcagagaaggtggaggggatggttggctcagtgagagggggtctgtgactccgaagcacctgaggatggggtgaaggcccttgacaggtagtgagcctctcgtcactgcaccatgtgttagcaggacaagtttggagcacccttaggaccatctggaaccaccgtgtccccactaacgaaagcagggcagaggacctggcccatggaaacatcacatgcgcagaaaagatggccagtttcatgtcgaaaactggaagatctggggttgtcagaacagtttccagtccagcacagcctggctgtgtgcttcaccccagttggccttaagtatgtgaaggatgcagccttgggggacctgtgagggggctgacat

SEQ ID NO: 31709 - DNA, 1097 bp, Homo sapiens
agatcgagaccatcctggctaacacggtgaaaccccatctctactaaaaatacaaaaaaattagccgggcgtgctggcgggtgcctgtagtcccagctactcaggaggctaaggcaggagaatggcaagaacctaggaggcagagcttgcagtgagccgagatcgcgccactgcactccagcctgggtgacagagcaagactccgtctcaaaaaaaaaaaaaaaaaaaaaagaaattccttcccccaaaggaagtttccttcttttctataattgcgcatcaaagtcccaccctttgagaggtagagctgagacccaacaaggaattccagtgatgagagacagactctgcccacagtctgagtcaggaggtagagcctctcataagaggggaattgaagtcaggagcacggactggggcgagagtgtctgggtccaatccagctctgcactgattaattctgtgacattaggcaagtgacttaacctgtctgtgcagctacgtgacctcgggcaagttactcaatctctctgtgcagctgtgtgacctctggcaggtgacttagcctctctgtgcagctctgtgacctcaggcaagttactcaacctctctgcactccagtttcctcatctataacatggatataataaaaatagcctggtctgtacgacgtgattagtaactgtcagccacaccaggtgctatcccaagatttatacttacagcactttatttaaccttcacatgacctgtaagggggctacttttattctgagagtcacaaagggtactgagggagcaggactgcatgagtggtttggagctgccaggaatggcctcctggagaaggggatggtgtggacaggccttggagtggggagaggaccagagccaaggaaggggttggcattccacgttctctcaggggagactgggagtaggttttgagggtgagcccgattggaaaccagagggactctagttttcccaggacctgggcacaggtgggagtcaggtgggaggtggggatgaggccaggaagtccagagctcggggatcctcaagcaccagctgagagattccttctttgttgagag

SEQ ID NO: 31710 - DNA, 1096 bp, Homo sapiens
caggggaaagatgataggtcttgggccagggaaggggatggaggtggcagagcccagacttgggggccgttgtgaggcaacacctgccagaatcccagatggagtgggtgatgctgtggaatcctggggttccctaggttcctggaggttactggtgccagcccctgtggggtggggaggggggcgagggtgcgattcgcagcgtgagaggctgctttttcccagctggttgtgctcctcactggctgcattccattatcttctctgggttctagatttatttttatttttacttatttatttatttaatctttattttcaggatctcatgctgttgcccaggctggattgcagtggcacaatcatagctcactgcagcctcgatttcctgcgctcaagtgatcctcccacctcagcctcctgagtggctgggactacaggcacataccaccatgtccggctaatttttttaaaataattttctagagatgggatctcactatgttgcccaggctggtctggaactcctaggctccagtgatcctcccatctcggccttccaaagtgggaggattacaagtgtgagccatcacacctggccctgagttctagattttttaaaaggttttttgttgttgttgttgctgtttgttaatagtctttacttttagagcactttaggtttacagaaaaattgagcagtaagtacagtgagttcccatgctcctgccgtccctgttccctccattattatcttgcattagtgtggcacatctgccgcaatggatgaacccactttgacacatcattattacccatagttcatggttcaccacgggcttgttctgccattgtggcatcacacagagcagtgtttctgcccccgccccccgcaaaatcctctgtgctctgcctgttcatccctctctccctccaggtcaccttctttcacttagtcatatgcattgaagcttcctccatggctttttatggttgatagcacatttctttttagcactgaataatattccattgtctggatgtagcacagtttatccattcacctgctgagggacatcttggttgtgtctaagtt

SEQ ID NO: 31711 - DNA, 1034 bp, Homo sapiens
tagaaaaaatgtctcataattttttttataagaaaaaagttttgggcccagtgcggtggctcacgcctgtaatcccagcactctgggaggccgaggtgggtggatcacgaggtcaggagagcaagaccatcctggctagcacagtgaaaccctgtctttactaaaaatacaaaaacttagccaggcatggtggtgggtgcctgtagtaccagctacgcgggaggctgaggcatgagaatggcatgaatccaggaggctgagcttgcagtgagccgagatcgcgccaccacgctccagcctgggcgacagagcgagactcaatctcaaaaaaaaaaaaaaaaaaaaaaaaaaaaagttttggccgggcgcagtggctcacaccgtaatcccagcacttttggaggctgaggtgggcaggtcatctgtggtcaggagttcgagaccagcttggccaacttggtgagaccctgtctctactaaacacaaaaattagctgggcgtgctggcatgcgcctgtaatcccagctacttgggaggctgagacaggagaatcgattgaacccgggaggtggaggttgcagtgagtccagtgagactccatctaaaaaaaaaagaaagaaaaaaaaggaaaagaaaaaacttttaacagaaaagtacaacaaataatttaacaaacccccatgcctactactcaatgtaggctcttgttagcatgatctcataggcttccaaggtgtgttttgttttgttttgtttttcaaaaaatagacagaaaaaaactactattataacttgtctcatttaacctctacgttctagcccttcgtcttttttttttttttcttgagatggagttttgctcttgttgcccaggctggagtgcaatggcacgatctcaactcgctgcaacctccgcctcccagattcaagcaattctcctgcctcagcctctcgagtaattgggattacaggtgcccgcgaccacgcctggctaattttgtatttttttagtagagacggtgttctccatgttg

SEQ ID NO: 31712 - DNA, 1058 bp, Homo sapiens
gacccagtgtcatttgctcctcctgttcctgtgccactccagaacctcagcagatctgagccaccgcctgccagtgtgagaggcggccactttcatggcagctcatcaggcgcagggccccagacagcttcccagcaggccctagagcccggcctgggccaatgatggagggcggccgccagcccagggcctgcccatccagaagggactccccagggcctgggggaggagacccttggaaaagtcctctcttcccagctcctgattctggatctgagattctcagatcacaggcccctgtgctccaggccgaggctgggctaccctcagggagatccagagactcatgcccatggccatccatgcgtggacgctgtgtggagagtccaggatgacgggatcccgcacaagctcccttcagtccttcagggctgggccatgtggttgatttttctaaagctggagaaaggaagaattgtgccttgcatattacttgagcttaaactgacaacctggatgtaaataggagcctttctactggtttatttaataaagttctatgtgattttttaagagggtgtgatcgttgctgagatttctgtctgatggtgatgatttcttccctttacccatctatgatactctggggcctggcagagctggaggtctgagctttattctccccaaagggtgagcatcattttcaagcacattcaggttggcaaatgcaagtgcatctggacgcagccagatcttgccagcaagtgagtgtgcccaagaaggcacattgacaaaaccaggtgatgccacacagttcagctttctgctcccaagctaaccaagcaactctctgtctctaatggttgccagaaaaggcttttagcaccatttagcactaaaaatatagtacatcatatagattgttttttctctagaattcttaagtctggccaaaagtgaactctcgttctctgtttctctgtgtgtctttgtgcatgcttacatgtgcattcctgcatcctggaaatgtttttttgttttgttttgttttgtttttg

SEQ ID NO: 31713 - DNA, 1026 bp, Homo sapiens
ggtgctaggggccacagccctgtagagggcgggtgcagcagggtaggagagctgatggctccaggtggctggagtcaggagcatgaccggcactggggcaggcagcgtggctgtctcctgaggctgctgagtgagcccccatgggggtagcggcagccagcgaggaagctggcctgtcatccaggtgagctgggctttgactggagtgtccagctatggaaagggggctgacacctgtgcttcctctccaggcctctcaggaacctggagctcctcggccaacagcatcctccacatcgaccccaagacgggtgtggctgtggcccgggccgtgggatccgtgacggtttactatgaggtcgctgggcacctgaggacctacaaggaggtgggctctaagcagccggaggcacatgtggctcagtggcctgtgaggcgggcctgaccttctgggaggattatgaagacttttccttttagggaaaagccgtctgaggggttgggtctgggagtcatgagtctgggactggccacttgctgactctgacatggggacaagctcccttttttttccaggcttcagtctccccatgttcaagagggtgtgatgaggacaggcagccttgtagggtggattccagctcccatgggcttgggtctggcaaccccggagtgggcacttcctgggagccggtgcttccctgtcacctgcaaggctaagactccctgtgcaagtcaccctttgagtctggaggcgacaaaacctgctgtctcttccattcatctccagttgagaatgaatcagtggggcaagtctggctgagatccaaatgcatctcatttttagaggcagcatgtgctttatggaacctagcagtttaacctaattgtttgcatatttagtgctgcggctctgcagtttgggcgagccagttgcagacagaggcatcctgtgacaatacagctgtgctctcctggaaagagcctctggtcaggggatggggtggcatggacaaaggtgtgtag

SEQ ID NO: 31714 - DNA, 1038 bp, Homo sapiens
gggcgagactccatctcaaaaaaaaaaaaaaaaaaagaatttctattttttttcctgtaacttttcccctttattgatattcgctgtttgatatgagattgttatcaaatcttcctttactcccttcatcgttgtttggttggaaggctttgcctggtgaatctgatctctggtggccctcacagacagtttctgtcatctgccttttttctggagtacgggtcatgttttcctgttttgttttgttttttgttttgttttgttttgttttgttttgttttgttttgttttttcatgtcctataattgttggaaactggacattttaggtaatgtattgtagaaactctgggtactgattccccatccccatgctggagcttgttattattatttgcttgtttacttctttagtgactggccttgttattttgctgaagacacaaaaacacacgcgcacacacacacaaacacacaggctgtgttattttgctgaacacacacacacacaggctgtgttattttgctgaacacacacgcacccacacacacacacttttccccagtaagaagtctctgatactgctcttaggggataacaccttggtatgtcctttgtcactctgggatgactgtggcctttgcagggctttttttggctgtctttcactgaccactcaactgttgagctgcactaattgaggctgattgctccactgtcttcagtaattccctggggcacacattcctacacaactcagtccaatcctattcaggatcctttgaagggaccctttccctagaagatgtttaaggtttgttctgaccccaggagagctcttcctacctctctctttttccgtttgtctctggcaaacttgccggcctccagtgtagcccacacctcccaggctctccgtcacctcccagttgcctttcagcacaacttgcagtgttttggagagtgtgcttaggcttggacttctccgagctctgttgcgcatgaagtcagttccttcaggagcaactcacacctgtt

SEQ ID NO: 31715 - DNA, 1121 bp, Homo sapiens
aagcacttcacaaagccatccccgtggagaaagagagggcagcagggtgtctggcaccttcctctccactcttcccccaaatccacctttgtgacccgatccccagggaggggtgggggtccggtgactgggaaagactgatgatgacatggttgtcatggttacgtgtggcaccctcaccccttgtaggatggaggggtccacatactacaggtgcctgtgtggaaccagcaggaggtggaaattcacatcccgatcaccctgtatcccagcatcttgacatttccgtggcaaccaaagacgggcgcctatcagtacacaataagggtacgtgagacccctcacctctgcgtgcattcctttggtgttttcatgggattgtggctttttgtccattctattacttttagtattactctctagtggttgtggagaattttaaatcacagtctttatgtttcctgaggtttccatcatagcaatgcattctggtaattaggaaaaaaaacaacaaaaaccaacaatgaaaaaattgagaataaggcagggtgcggtggctaacacctgcagtcccagcactttcggaggctgaagtgagaggattgcttaaacccaggagtttgataccaggctgagcaacatagggagacctccatctctactcaaaaaaaggaaaaaaaaaaaaaaagagaaaaaatagaataaagaaaacctggaatacagttttgaatttcattaatgtttatttttctaaaaatcttttttgaaagcattatatatatacacacacccttagagaaaacattaaaatttaagggataagtatctccaacctcatcacatgggatggatcactgctctgaccttaatacttccacctggcattagccagcaggactcgccttagacagggctcgagtcctcgtggtcagtgcagggcacatcagtcctgctgtcccatggagtggtgacaggtgtcctgtctgtgcactggcaccggctctctgctcaggtgcgtcaccatcctggccccttgggttttggggttgtttcctctggtctgggagcagaggtgcagtcgctgacctcccagcagacaatgaggaatgggcaggggtgtg

SEQ ID NO: 31716 - DNA, 1036 bp, Homo sapiens
agctccaagctcaaggctcgcatccaggaggctgtctacaaggtgggcctggggcgctggggtgtcagtgggcttcctggggtggaatcaggctgacggtacctgcttataggtaccatcacacctataggcacgttgaatagtggaagtgagatgctgtcccgtgatttcaggatgtgggttcatatttttatgtgtttggtttggtttgtttgagcctcagcttacaaagaaaggtggttgaggccccagaaagcatctctaggggtgcatagcatttgctcattcttagtttctagggaggtccaagagcaggaggtttccagtaactcacctgtttccaactggtgcccccaccgtgctggtatagggacactcccaagcacttggggctttgacaaaacctggggctcctgggtgtcttctatgctgtctctccttgggcccccattggagccctgagactggtggcccagggatcctatgtgtagatcacctcaaccccctgccccagccgatcccatgtcttcctggcctcaccagcatcccattcttagggtagtgggggtatgccagaggaaaggagagtgaggagtgggtctatccaacgtcctggttccttctctgtccctgtggactaatgtccacccaaccagtgcctcgttttgagctgcaaccctgagatatttttgtttgcctagtgtctggagcacaggcaggaacactgtggtacttggcctgccatttaattttgtaaagtggcagacggagaaatcctcttctgattcactctctgtagtgggtttgctgcatctgggagtcctggaaagttatggaaacatggggacatgccctgttataggggctaatcccgtaggactctgcaggtagtacttagagacagtttgctcctgtgtagggcccaggctgggatggggtacagccacactgctaagctggaaaggcagacttgctgtcctgcccatagacattcagtggccctccctgcctgcgtgctggaaagcagccgccacag

SEQ ID NO: 31717 - DNA, 1043 bp, Homo sapiens
ctcctgtcttgcagccgatgtgcttcgctggtgtggattttcatatccaccatcctcacctaatgccctggatgttaggaagacagattaattttcaggaaaccatagagttttcatttgctcaaaatcctgctctggacctctaagaaaaaatcttcccgcatatatgtacatcatagatgggggttgtcttcctctgatcagttgctcacattgacggaaagacacccagggaactgtaagaagatgcctctcttcattaaagatgccctgagaagtaaggcgaaggagcagagttttctggagcttctgctaggcactatttcatgcagtctttgagaccttgcagggccagggatcggggtgaagagaagcaggaccccaggcccgtcagactctaaataccttgccctttgcactgtagaaaacagcttttcttggcccccagatcccttgtactgggagctggtcagaaggggagtgtggatgagggatgtggaacaggcgtggaacatcaggggctggtgaggagtgtggcatggccccttctagagagggcgagcagcttctggctctcagagggaatgaggcccaggtgggtggatcttcatcctttcaagaggaggtgagaactagacttgcatgtggcatctgtttcttgattggaaaggacagatcagaaggctcccaggcagcaagccaggacataagagccaaggctggctgggcctggctctccttgccccctacctaccccacgacctcaggagtctcacagtcaaggtgaagagacaagagtcatgtgacactagacagtttgggtaatgcccctccaccctgggtcccctcccctgcacagggagggagaggagtttactcccaggaagtggtgagcaggaatgaatggcccaggtttccgagcagactcctaaattgtaaaccgctcacagacgtgcggggcagcagtgttatgcactgcactgagctggtcctgcagtcaagggcagggagtcacagcaggaagagcacaagctttcatcgga

SEQ ID NO: 31718 - DNA, 1050 bp, Homo sapiens
cccaagtagagcctgggcaggggtcagaggtgtccacagagaccccaggacatgagagccctgcgcctgcacggccctccaccaggaggccaggcctcagagccaggccagcattggaaccactcaccacgtgaacgaatgtctgtgtcccctcagactcatgtgttgacacctcatccccaaggcgatggcatttgaggatccccaaggcgatggcatttgaggtagcacctttgggaggtgatggggtcatgagggtggggccctcatggttgggattagtgcccttatacaaaaggccccagagagctccctcgccccttctgccatgtgacaacagtgggaagacagcaggcatgacccagaaagtgggccctcactagacacctagtatgccagctgatcttggactgccagcctccagaactgtgagcaatacatttctgttgttggaaaaaccctgtttgtgatgttttgtcatggcagccccaaaagactaagacgtgtgactgtgagctctgaaaatgcagccagtactacatgtcagaagcatgatatttaggatatgttggggtaaatcacgtattttcttaaaaatatgactttttaatagggatttaaaaatggaggaataggcagagtgcaggggacttttagggcagtggtgctgttccgaaggatactgccatggcaggtgtgggctgttatccatctgtccaaacttacaggacatgggatgccgactgtgcaccctcatgtcagctgcgagtgttctgagtgattgtgaggtcaccacagcctcctccattgtaaccaattcaccactctggtggggatgttgagggaagtgttgtgtatgcatggggcagggcatgtatgggaaatctatactttctattcagttttgctgtgcacctcaaactgctttaaaaaacaaggtttattaaaaattaatctcacctgttacttttttttttgacggaaaatgaaaacgtggcctgtgttacacgtctgttgtgcagggctatctcaggcttgtatgagtcctta

SEQ ID NO: 31719 - DNA, 1031 bp, Homo sapiens
tacagtggcaagatcttggctcacagcaacctctgctgcccaggttcaagcgattctcctgcctcagcctcctgagtagctgagattacaggcatccaccaccatgcccggctaatttttgtgtttttagtagaaacgggatttcgccatgttggccaggctggtctcgaactcccgacctcaggtgatcagccctcctctgcctcccaaagtgctgggattacaggtgtgagccaccacacctggccaaggtttccttttaaagtaattttttagtaaagaagaatccatttaatacaataataagaaaagggccgagcatggtggctcatgcctataatcccagcactttgggaggttgaggcaggaggatcgcttaagctcaggagtttaagaccagcctgggcaacatagcgaaaccctgtctctactaaaaaaaaaaaaaaaagaaaaggaaaataaagctgggtgtggcacaggcacctgtggtcccagctactcctgaggctgaggcaggaggattgcttaaacccagaaggtcaaggctgcagtgatccatgattgtaccactctactccagcctgggcaacagagtgagagcctgtctattaaaaaaactaggccgggtgcagtggctggccagatgcagtggctcatgcctgtaatcccagcactttgggaggccgaggagggcggatcacctgaggtcaggagttcgagcccagcctggccaatatggtgaaaccccatctctactaaaaatacaaaaaaaatagctgggcgtggtgctgggcgcttataatgccagctacctgggaggctgaggcaggagaattgcttgaacccgggaggcggaggtggcagtgagctgagattgcatcactgcactccagcctgggtgataagagtgaaactgtctcaaataaataaataagtaaataaacgaatacaagtcatacctgtatgtgactgggctagggcaggtgtccaaccaagaggagcctgatggtggggaggggccgtcggcaggt

SEQ ID NO: 31720 - DNA, 1091 bp, Homo sapiens
tgtgactcttactatgagccaggcactacttgaggtcctgggatgtgacagtgaagcagcaggagatgccctgctctcagggactcacagttgattgccggagttaaacggttaattaagatgagatctgtggatgcatgtgaggcaggagtaagtcctgaaggaaacagaactgcaaggcatggaatgtgttttggggagggcgctcagcataagcctcctgggagtcgaactaggagtggagtggggttgagttggaggggacagcaagtgcaaagggccggaggagagatagagcttgtcagaagtgcgcaaaggcagcacgtttggccagggcagcagggctgggagggagggtggagaggttggcagggcggggccatgtgggaccttgtgggctgtggttaggagacaggaaggagaatgccaggtcagatgtgggcagggttagactgggcctggtttttgggcctcgttctccctggcccctgagggctgtctgtagctgtggcccctgcagggctggaccgggccttgctcaactcccttcaccaggcccgcagcagggaagtgccaggaagtgtctgtggacctgggttgacttgggccttgggtgattttcttcctgcttcctttgtgggtcccccactctgcctgagctctgtcagccccacgaggtggcttccgctctgtagacactgcctttgggcaccgttaggggctggaccccgcgggtggatgggaggtggcgtgtgtcatccaccaccctcacccatccttgttctttgtgcaactctcacttctcttttcttttcactgttgctttctggcctgacccaggtccctgagttcccctatggcctgcctgcctcctgttcctgtgttgtgaagagtggggagcaccccctcaaaagcagtgcctgccagacgccagcacattctgtgtgccagtggggcctcatgcgacagtgggaatgagaaaaattcactctttcaaaactcactgtcagtcctttaattttcctcaaaataaaagttttcttctggtgtctgtatgtggtttacatatttttttattttaaattgtggta

SEQ ID NO: 31721 - DNA, 1030 bp, Homo sapiens
tgagaattgaaagcactcacttataggccttccttagtatttatcttgtgcataccactgtccccgtaagaagtccctaacttccccccctccgccccccactgatcctttatgcttcccataggatttttaaaaaatgatcccaaactgcttactgtatcagagcttatgtgatctggccctgtctgcctttccagcctggtctcttcccacccttttgctgcccagcctctagcctcttggctattcccttggtttggtatatcctgccttcagctcttccgtggctgactcctcatcctttaacatttagctccaatatcacctcctgaccctttgtgtctttcacatcctgaactgtctgaaatgaccttttttattttttgccatcttacttcctgcctgtcttctcgcactaagctgagagcatcagatgggctgtggaatccccagcatctagcacagggcttggtgtacaatgggtgcccacatctttattgaatcatgcatttacctgccctctgttctgagtgaatcacttgcctgtacaagtttatttcaggggtccacctgctacccagccttcaggttaaactcgttggtttggcattcaagggctctcagcctcgcacctgggccttgggctagccacacttctcctgtgtcagcaccatagtgtttctttcttagtttcctctttctaatgcagagcctgccaactcctgttcagtcaacaattatagagcacacgtgatgtgccagccattgggcatatagtggtgagcaaggtgacacattctctgccctcctggcatggtggaacagattgccattaaaacatcaccagacaaatgcatgattacagactgtcataggtgacatgaaggaaaagcccagcatgctatgatcgtttagtgaaaggctctatggggtctgagaaggcttcctgaggcttcagacatccttttaaatgccactttcttaagaaaaccttttgcaatcctaaacacgtgtgagcgaacactactta

SEQ ID NO: 31722 - DNA, 1066 bp, Homo sapiens
gtgtgagcagacataggttatatgttgagacacaggctctactgatggacagttacctgaattgtaaatcctggttcttgtcacttaccagccatcagctcttaagtgactttgtctctcagtctcagtcactgctatcagtgatgacagcacagaatataggctagtggatgaaagtgtgggctctggcccttacgagctgtgtgactttaggcaaatcatttaccccgtctgtggtgttcatctgtaaaatggaaacaataataagacctaccttgtgggtttgttgaaaaaattaaataataacatataaagcactgaagataggctgggcgcagtggctcatgcctgtaattccagcactttcggaggccaaggcaggtggatcatttgaggtcagaagtttgagaccagccaggccaatatggtgacaccccatctctaccaaaaatataaaaattagctgggcatggtggcgggtacctgtagtcccagctactcaggagacaggcacgagaatcacttgaatccgggaggtggaggttgtagtgagctgagatcacaccagggcactccagcctgggcaacagagtgagactccgtctcagggggataaaaaaacaaaaaacaccgagaatagtgtctgggacagagaatgttccataaatgttagctagtgcttgtagtaagaaaaggggagcagccgggcacggtggctcacgcctgtaatcccagccctttgggaggttgaggcgagtgcatcacctgaggtcaggagttcgagaccagcctggccaacatggtgaaacccccgtctctactaaaaatacaaaaattagccgggcgtggtggcaggcacctgtaatcccagctactcaggaggctgaggcaggagaattgcttaaacccaggaggcagaggttgcagcgagccaagattgcaccactgtactccagcctgggcgacagagcgagactctgtctcaaaaaaaaaaaagggagaaaaagcaccccagctggtaggtgtgttctgagggttcaccaggtaccaggcatgcggcactgag

SEQ ID NO: 31723 - DNA, 1063 bp, Homo sapiens
gaaggcagaccgggaggcagagacttctagaacatgacagctatgtcacttgatcctagaaccagcactgacaccaggaatagtgcccgagccgcctgtgtgtatggcagtggtggtggtgggtggagcttgccatttctacacaggaacatgcccagatttgtcgcaggtttatttccaatccctcaggataggtaaattgcagatttattaatcatttcctataggagtgcaatgcatcccatattgagtgtttgctccaggggtgcattttacttagtaatgctaagtaaaatgggtgcattactaagttcattttacttagtaatgacaggttaagtggaaagtatgcagatggtatcgtaactaacctacctaaagcgcagtggaagctgaacgtgcagcgtcctctcccactctcagcaactccacattgccagtcctttctagtctgttggggtttttgaagagatgccaagggcaagccttagagagcctagtgaacagggtgacttacagcagtgaattgcctactgagaaatgagcaatctcagagaagggcagagagaacactgtcatagtggacgaagagaaaagtcgcagggtgagaaccgctgctctcagtttcctgtgagagcagacaggtaagctcacgctctagaagaggattgtccctttgaaataagaccttcttactgaagagcactgtgtgtttttcttccttgcagacctttaacacatctgctggggctgggttaggtgtctaagcattcaaataggttagacaactttttgaagttgccacaagccacagatttatttgattctttaaagcttttgattgatctgtaactgacttactggccggaggtacagatgcgatgttacaaaaccattagtgttcatgaaaccttggctccaccatctgttgtcagaacaagttagtctaaggatcatctccctcaaacttcatttcctcttctaaataacatgctcaaccttgtctgtctggcctttgcagtttcaggctaaacacatggaccagcctttgcccactgccatt

SEQ ID NO: 31724 - DNA, 1046 bp, Homo sapiens
ggtccacgaggtcatgccaaatgctggaaggggagccatgaatgttcattgccccaggtcctgtgtgtgtttgtgtgtgcgtgtgtttgtgtttgtgtttgtgtgtggtttccagtgcgtgggtgcatacacacttcctgaacaaagcggcatctggagctaatgcacttcctgctgtgaaacatctgctcattgccttaaatcaggtagtgggggcccagataaatttacagaggaccagttagactttggaaggaatcttttgtttgggtttaataattgcagtgtcaacaccggagctgattttaaatgtctccttgtacctccaaaaaatgcaaataaagctttgaatggtggaagtcatttcccatgccatggatcatgatgtcagcatgcagaattgccccccgcaacccccaccccagccacaaatggtgatatagattgtagacttgtttttcttaccctctcctttaaaatcatctcttttgcttttgctttgtgggtaaaaggacaaggaatctacactctaatttggcttagaaaggtggtggagaaacacaaaacccatcaaagtgatttctttgcagttggctttctaaggcagcagcctgggtaggcttggaaaataatttttttttaaaaaaaccaaaacacataaaaaaagcctcagggctgcagaagatttagcattctcggtctctcttccacctgccctgcctccactttgcaggggttggcagatgatgcagttggtgaggaaggaaacgagaattccccctcgcattcttggcttctctgtccttggctcaggttttagcatgccatgcatgagccttctctgcctcttccctgccatcctaatggggattttttttccccactggaaaaaattatcatatgccttccacccagttccctatttctcatgtctcttccaccactgatcagagatgttttatctgaaacacatattggaaggtggttttcacctgtttacacattgcttattatgctccattacttacagtaaggtctcaggcttt

SEQ ID NO: 31725 - DNA, 1107 bp, Homo sapiens
gtattcccagctactcaggaggctgaggcagaagaatcgcttgaacctgggaggtggaggttgcagtgagtcgagatcaaaaaaaaaaaaaacaaagaacacgtgaactcgaaagctgactttctgggttggaatcgctcttcacggcttactgcttgtgtgaccttgggcaagttacttaacttccgtgtgcctcagtttccaaagggggatataattttatttacctaatgggtcttagtgaggattagatgagttaaatgagctagtcttgataaaaatgttaatgattatggtagacagaccaatcaccctcaccccgactcccagatgtctaccttctaatccccagaatctgggtatatggtgacctttatatagcaaaagagaattggcagagatgatgaaattaaagcgattgagatggggagctagcctggattgtgcaggtgggtcccctatcatcaaaaccatccttataaggggtagacaggatggccagagtcagacagagatcagagatgctttgaagagggagagtgggaccacatgcctaggtatgcaggaggccgctagaaaaagcaaagaaatgagccctcctccagagtctccagaaggaatgcagcattgctgacacggtgattttagtcttgtaacactcatctcaaacttctgacttccagaactctaccagaatacgtttgtgttgttttaagccaccaaacttgtggcaatttgttacagcagcaagacgaaagtgatcataatgattgtaacagtggcatttagtatatgtggggcatgtgtatgactctttgcatagattatattatataatccttgcaagaatcctagaagcggacctattatccaccatattagagagaagaaaaatgagactcatcacatcctcatctcatctgtctttatggagaaaatgggaaaagggaaaaggagaggggaattgaggcagttgactgtgttcagtcttatttatttattttcatttgtttatttctccaagtccgccagtctctgaaattagaacagtaagcaatatgagataatcgggcctaataatgttgtgattctcttttcttaatggag

SEQ ID NO: 31726 - DNA, 1027 bp, Homo sapiens
ggcagatgccaccaggcctggctaatttcttgtactttttgtaaagacaaggtctcgttatgttgcccagactggtctcaaactcctgggctcaagtgatcctcctgcctggcctaacaaagtgttaggattacaggcgtgagccaccatgcccagcccaaaggctccataccttaacagtcaaacttctctcagcctatggatgctgtgggaaactgaggctatccaatttgctatgttgccagcctgggtcaacaaaggtgtctttgacatgagcctccaaccagggggctgggctctgctccatggccaccaggctgaaccaagacacaccccagccccaagtccctgtgccctaccttcctggatgctgttctgcaggtggttgacaatggcagccaggatggtggagagactcatgacctgggcacactgggccaggccgagggtgaagagctcattccagcaggcccgcacaaggctggtgttgcagtcctgcctaggaatatagaaaggagtctgagtgtggtgtgtgttggcatttctccaaggttgtggggcatccaggcactaagtcccagcatttcccaaacaggtgaattcagcaagtgtttattgaagtgctatccaggatcattcttcaagaaaaggatgaagtctatgaataagtctatgaatgttttaactaaaatccttctaatgatcaactattctcttaaaaaacattctttaaataataaaaaaatgttaataggtatggccaaaccatcattacctacagccttcaaaagcctcagcatcctggactgactgtcccaagagatggtatcagttacttaggtcctgcagccaaggtcatgagaggctacggggaccaaaagacggagatgagtacagattctgaagggcagaaacatgccctgcaaccctgcagggcaggaggcaggctttgtgctggatccgagactgaagcagggaggatgagggtccagctaaggccgcttccagccttgccctggctaacttc

SEQ ID NO: 31727 - DNA, 1390 bp, Homo sapiens
tatgtattgaggctgaagttattctagattcatgatgaagtcttcaatgattccagtagaaaatggatcttgcttttgtaaaagccacatctgggcaacagaagtgcgccaaaaggagaagcaggctcttgtctaccagcaggaccagccagccataagacacccccagtcacaccagagaaatgactgggactgtcctggttttagtgctgaaagactaagagctggttaccctgctggggggcaaaatcatttgagaagcactgggccagaaggggtagcccccaggggcatctgtgttccatggggctcctggagactgaggtctgtgcagaggacacatgtcgggaaggtgggcctgtgtgtcttcccaggctgtcaattttgttccaatgtttattttagggggacatggtggggagggaaacaggaaatactttacttgaaagggtctcagaaattcatgtagcttctggtaggtcagaagttgtcataggaaagcagcactcttccatccttggctggaaagcctgccaatgcattctgacctttggcagatctgaacaattttcctgcctaaagctgcacgagaaagggtttttttttgttgtttttttttttgttttttgagaaggagtctcactctgtcacccaggctggagtgcagtggcgtgatctcagctcactgcaacctctgcccaccctaccaggttcaagagattctcctgcctcagcctccccagtagctgggattacaggcgcctaccaccgtgcctggctaatttttttttaaatatttttagtagagacggggtttcaccatcttggccaggctggtcttgaactcgtgacctcctgatccacccgcctcagcctcccaaagtgctgggattacaggcgtgagccaccgtgcccggtcctaatttttatacacatatttttactgcacattaattacaaataataccactaatttgcacccaaacaaacttttttccattagtttatctgagggtaaaatgactttatataactcatccactcctttataggggtcagatttgatttctgtcaataagaattttctgtcaataagcacttttctgtcaagtactctagcactgcctcttcaatggatgctgaccagaggagcagacctttcaaactattctggacaaaggaatctccatgagaactcaagcctcatgtacagtgttagccccagaacaggccacacagcatctgttccaactcctccaattaaagagtagcaatctgaggcctcgctcacagtcacacagcaaaactggaatcagccacagtcctggccctcctgctggcactgtctacactctacaccacctctagcattcaagaattatctctagct

SEQ ID NO: 31728 - DNA, 1634 bp, Homo sapiens
cttatgagagtattccttccctctagggcccaaagaggctgctaaccagcaggaatgtcctgaaccaaaaggagtggtgaccattctctagacagaataaatgtctggtccctaatgggacagataactagggtttgagttcaggcttgacacaggagcaatgggcagtgaggtggacagcccagaccctgaaaggacgtgtggagacagcagcagtcctgtggtgcagttactgcctgtgtggccagcttcacaggcagcagataatttgtggaaataaacattattttctttttttgttccctgtaggctacttgatcctggatagtttctctttaaacctttgtctttccctattttgtttagtagtgatgaaagatgggtttaaaatatacagaaatgggagaaaattaattagagaaaatgtgaggattttataattgataacatgttcttaattttacttgcacaagcagtgttcacagccttattctgaagtgaccacttttcttctctttgaggcactacctggcagcaccatctaaacctgtatcatctgctgtggtcccagttactcaggaggctgaggcaggaggatcacttgagcccaggaggttgaggctggagtgagccatgactgtaccactgcattccagcctgggtgacggagtgaggccctatctgcctgccagtgagttctgtcatgcatcagactttggacctcagaattttcacctggaacatgagaggtcagatgacataatgaatatgttctaacttctgaaacttttggagcttgtttttgcccttgatagcacgtatccttagagaataagcttgccaatttaaggcctgtctgtaatggcatctgaatgttccagcagcctaactgtgctctgctccagaaacatgtgtgtggcttccctacctccacaccaaggagctgccttgctgggtggatgtaaagactgtcctgccagggtttcccactaaaggtattaataagtccagtggaccacagagggcccaatccctcttggccgctaaggctaaggtaggagccagagagctgtagagacaggaccaccaggatgcttcatgtccataacacaagagagcgctgcattgtttgggggccaggcattactactatcatgaagaaaaatgaagagcaggatgcatgttagtctttaattcacttttaatagtataaacctcatttaggtagtagtattaagccacaacaataatgccacattgaaacagcatttaataaaatgcataaagctaattcatgcactgcaatactctatatacaaacacaacaatgcaaattcttcttcaagactgaagacattgattagatataaaattcagtttaaaaagaacatgctattttttaaatgccatcacataaacaaagtgatttcacagggagaagaaagctgtataaagctgcagctttcaacaggttttaaacctggcattaaaatgtaatggcaaaaccaatattttctatattgtgaagggcaaaggttacagaaacggtcccaagaaaatctaacacccaaattttcctttgatagatagatgcctttaaaagggctggtaatgcagttacattctaacagaga

SEQ ID NO: 31729 - DNA, 1033 bp, Homo sapiens
tcagttataattcccaatattgaggtagggtgtgatgggcctgctccatgggagtacgagtcctagtcaccgtgggggcggtttctcatgaatggtttagcaccatccgctttggtactgtggtctgtggtagtgagttctcttgcgatctggctgtttaaaagtgtgtggcacctcccccttctctttcttgctcctgcttccaccatgtgagactccttgctccccctttgccttctgccatgattggaagcttcctgaggcctccccagaagcagaagctgctgtgcttcctgtacatcctgcagaactatgagccaattaagcctcttttctctataaattactcagtctcaggtatttctttatagcaatgtgagagaatgaactaatatattcagatattttgcccattttattagttggattgtcttattgagttgtgagttttttatatattctggatataagtcctttatcagatatatgcattataaatattttctcccagactgtgggttatggtgactcctgaactgtaaaagtttttaattttgatttttcaatttatagagttttttttcttttatggattatgttttttaatgtcatctccaaaatatacttgcctaggtaaggtcatgacaattttctcctgtgttctcctctagaagttttaagtttgagtgcttacatttaggtctcaaatccattttgagttttaattttttttttgaggttgagtctcgctctgttgcccaggctagagtgcagtagcacgatctcagctcactgcaacctctgcctccagggttcaagctgttctcctgcctcagcctcctggagttttaatttttaaaattttaatgttgtgggtaaaagtctaaattcacctatttagcatatagatagccagttatcccagcgccatttgttgaaacgattatctttcttcattgaattatcttggtatctttgctgaaaagcaattgaccttacaaataagggtttatttctggactcagttttgttc

SEQ ID NO: 31730 - DNA, 1032 bp, Homo sapiens
ggaatatttcaccagggtctattttctcagtttaagttcttttttgtctctttcaggaagttaagctcccagtgcagggtatcaatgtgaatctggtcctgagctttttagaaaataagagtggtggccgggcgcgctggctcacgcctgtaatcgcaacactttgggaggccgaggcaggcagatcacaaggtcaggagatcgagaccaccctggctaacacagtgaaatcccgtctctactaaaaatacaaaaaattagccaggcgtggtggtgggtgcctgtagtcccagctactttggaggctgaggcaggagaatgctgtgaacccgggaggcagagcttgcagtgagccgagatcgcaccactgcactccagcctgggcagtgagagtgagactccgtctcaaaaaaaaataagagtggttaactttttggttgatattagtattatttgtgagaagagtttccccacccttcttctgatagaacaattgtctgtcactggagaaatctccctccagagctttggcaaagttactctgatctgggtctgtttaaaaggccgggtctctaatttaggaatcggtgatttggaagcttttgcagaacatcaccagaagaagggaagcttcccagagtcagaagctaaattaaaataatttccaaggctatttgatcagccttcttcctttttggttcattgtgtcctgacttggggcactgatgagattttttattttttttgagacagagtttcactttgttgcccaggctggagtgtagtggcatgatctcagctcactgcaacctccacctccctggttcaagtgatatttgtgcctcagccccctgaatagctaggattacaggcgtgggccaccacgcctggttaatctctgtatttttagtagaggtagagtttcaccattttggccaggctggtttcgaactcctggcctcaagtgatctgccaccttggcctcccaaagtgctgggaatacaggcgtgagccactgtgcccgccctgatg

SEQ ID NO: 31731 - DNA, 1018 bp, Homo sapiens
gttctgttattatctgtgttttgcaggtgaggtaactgaggcacagagaagtaagaaagtactcagggtcacacagctaatgagtctagaagcctgagtcttgatctgtgttcccaacctctaaaccatgggtcaagaagcctgccctggaaccgtgagctccttgagagcagaaattgcatcttatcctttccgcatcttcatgttgcgtggtgcaaagtaaagatgaaaaatgagtacttgctttaaagaggaatgcttgcagcccggcatggtggctcatgcctgtgatctcagcactttgggaagctgaggcgggtggatcgcttgagcctaggagttcaagaccagcctgggcaacgtggcaaaaccccatctatacaaaaaattaactgggcatgttggtgtgctcctgtagtcccagctacctaggaggctaaggtggtgggatctctggagcccaggaggttgaggctgcactgagccgtgattgtgccactgccactgcactgtagcctgggcgacagagtgagaccttgtctcaaaaacaaaagaaataaaaaaggagtgtttggaattgacagaattacaaaggcttaaggtgtagtcatttcaaccctgagacatttggatttctctgtgtggatatcttatcctttttcattctcagttccattggctgaagtttgttcccagccatttagagctgggagaaggcccctgagttcctcagacctgctttgcttggcaataccaggtggaaatgagatctgccaggaacccgggctcacatggagagcccctgccacaccagtttgtgccgattctgcctccccaggcaggggcggagctgctaccctggccctgtcactaggccattcccatccttccacaggcccacaggtggcctgaagtggtatggcctccggcagccagaggggccactagctgtgtatgcccttgtgctctgatgctgtttctgatagcctgctctggccagggcccgccggctgcagcc

SEQ ID NO: 31732 - DNA, 1049 bp, Homo sapiens
agcagcccttcatgctaaaaactctcaataaattaggtactgatgggacgtatctcaaaataataagagctatttatgacaaacccacagccaatatcatactgaatgagcaaaaactggaagcattccctttgaaaagtggcacaagacagggatgccctctctcaccactcctattcaacatagtgttggaagttctggccagggaaatcaggcaggagaaagaaataaagggtattcaatcatgaaaagaggaagtcaaattgtcgctgtctgcagatgacatgattgtatatctagaaaaccccatcatctcagctcaaaatctccttaagctcataagcaacttcagcaaagtctcaggatacaaaatcgatgtgcaaaaatcacaagcattcttatacaccaataacagacaaacagagagccaaatcatgagtgaactcccattcacaattgcttcaaagagaatgaaatacctaggaatccaacttacaagggacgtgaaggacctcttcaaggagaactacaaccactgctcaatgtaatagaagaggatacaaacaaatggaagaacattccatgttcatgggtaggaagaatcaatatcgtgaaaatggccatactgcccaaggtaatttatagattcaatgccatccctctcaagctaccaatgactttcttcacagaattggaaaaaaatactttaaagttcatatggaactaaaaaagagcccgcattgccaagtcaatcctaagccaaaagaacaaagctggaggcatcacgctacctgacttcaaactatactacaaggctacagtaagcaaaacagcatggtactggtaccaaaacagagatatagaccaatggaacagaacagagccctcagaaataatgccacatatctacaactatctgatctttgacaaacctgacaaaaacaagaaatgggataaggattccctatttaataaatggtgctgggaaaactggctagccatatgtagaaagctgaaactggatcccttccttattccttatactaaaa

SEQ ID NO: 31733 - DNA, 1032 bp, Homo sapiens
atattttggggtggtgttctgagccccaacattccagtcccctggtccctgaatgtcatggtgaggtaccttggatggggatattttcaccttttgggctgcactctccatggctgctatgattttggaaatgtttattctttagtttggggaaatttacttacttgaactatttatttaatgattccctaacatctaacacttctaggactaccccccaaccgccccccgccccagcctccaacacacacacacacacacacacacacacacacacacaatttctcctggaactctctctctctctttttctttctgtgagacaccatctcactcccgtcacccaggctggagtgcagtggcacaattgttaccggaaagggatcccaatccagaccccaagaggattcttggaccttgagtaagaaagaattcaggtaaagaaagaatttgagtaaagggaaagcaagctaagaaagtaaaggaataaaagaatggctactctgtaggcatagtggccctgagggctgctagttggctatttttatagttatttcttgagtatatgctaaacaaggggtggattattcatgagttttttgggggcgaggggttgggggggcaggggaaggaaaggataggcaattcctggaactgagggttcctcccccttttagaccatatagggtaacttcctaacattgccatggcatttgtaaactgtcatggcactggtgggcatgtctttttgcatgctaatatatttaattatcatgtaatgcgcagtaggaccaccagaggtcactttcctcaccttcttggttttggtgggttttggccagcttctttaccacatccttttatcagcaaggtctttgtgacctgtacattgtgctgacctatctcatcctgtgacttagaatacctaacctcctgggaatgcagcccagtaggtcttggccttattttacccagcgcctattcaagatggagtcgctgtggttcaaacacctctgacatgatcatggctcc

SEQ ID NO: 31734 - DNA, 1029 bp, Homo sapiens
ttttggttatatagttattttataattttggttatgttttttaatctggaaaaattagggtcattatttctttgaattctttctttagctcttgttctctcttctccctctgggattccagttatgtgtgtaacattttctattgccccacagcccttagatgctgttgttatagggtttattcccccacttttttcctttttgcattttcagtttgtgtaatttctattatcctatcatcaagttcactgactgtttcctaggcagtacctgttttgttgagaaacctattgaaagtgttcatttcttttaccatatttttggtttttagcatttctcttagagtctttttatagtttccatccctgaaattatgtatctgattttgcatgttgtctgtcttttccattagagtctttagcattttaatcataattattttaaatgcccaagcttttggatccagcatctgtcatatttgagtctggctctggtgatggcttattctcttcacactatgttttttgccttctgggatgttttctactttttggttaaagctagacatattataagggccagtagatactgagggatagggatttgtaacaatctagtcaggaattgggctgttgtttgaagtctgttgttgctgtctgtgaggtttgttgttgctgtgggcaccagagacttcaaacccctctagcaacttgtttttgtctcctctcttggatttgggtcttccctttgtaccgtttcccaaagagtctatctgttgtggctctcccagctgcaatttcctgttattcttggagattcgatggtggggtgtgggagagggggtcgttctctaatgttctgcttctccaaatttgaactggtaccgtgggcctgtgtctcaagggtagtcatttgtctcaagggtagccagttcttctaaacacagtaaattgaatgagaaattttttcctcactcataattgtcatctttattatctacctttttgtctaattgtcacctttgtctat

SEQ ID NO: 31735 - DNA, 1050 bp, Homo sapiens
ggtggcacacacccgtaatcccagctacacaggaggctgaggcaggagactcacttgaacctgggaggcaaaggttgtagtgagccaagatcgtgccactgcactccagcctgggcaacagagcaagactccatctcaaaaaaaaaaaaaaattctatatataagaaaaacaaaagttttttaaaacaataaaagttaacagtcaataatgtgtttgtcggcaagaagccctctgttaataatggtctaaacaaataagacattgtttttctccaataaagaaatccagaggcaggcagtagctggctttgattcagcctctgactgtcactgtcagggccccaggccccatgagcctttcgtctttcctgcatgttggcttatcttctcatgcttgtgacttcctggttgcaacacggctgctgcaacaccagacatcttgcctgtcttcaaggcaggaaggagggggaaactatcgcctaccagctatttttcttaccttagctcctccatgtcttggatcaaaagcatctctttgaacctctccctcaggcataccctgaaatgctgtggactttaaccttttttctgttgcaaaggtcgctcacatctccctggttgtttggtcttctcttccttggctctagtaacacagcagtctgttgcttcctaggacaacttataatgggacccaaaggggaaagaggatttcccgggcctccaggaagatgtctttgtggacccactatgaatgtgaataacccttcctacggggaatctgtgtatgggcccagttccccgcgagttcctgtggtaaggctttctgggagaagtctggggtggttatccgtgaggacctctcacctgatccttatggggctttgtaaaatcctttcagtaaaactaactttttttcacgactctgagtacaccctcattataggaaattggaaaatatgagaaaatcaagaggaaaaccaaattgtccatttgattgtgagtccattttggggtattttctttgtcttattaaaatctaacttttatatg

SEQ ID NO: 31736 - DNA, 1050 bp, Homo sapiens
ggatttatgagaggaaaaaaagtgcaggctactcagtgcacaccacgcagccccacctgcctgccccactccacctgagctgcctccggaatcttttctgagagcctcaaccctccactgtcacccagaagttgagccccggaatggacattttgcagttcctggggtgtgtccattctccaaatatcttaaataaatgatggagggagattcttcttagcaggaattggatttggcaaagtttctcatcttctcaaaaaccatgaggtgaatttataatataacttcctgggttcccatcagctgctcaaacatggaatttccccttctgtttttcttctccccaagtgtttatgaaattcccttctgcagcccgtgtctaacacagaccgtttccatgaggtgactcaggaaatagttctcccgtagccacactgaggtgtgagagggagcagaatttggaaagaaaggaccaggtgaggaaaagagcaagattagggaaactggcctagaagacaacagccagggcattctggggacttgggattctcagctctttcccaacgctctgtctcctgagctgtccaattcaggagccactagccatatgtagctatctggcacttgcaatgtggctagttcaagttgaggtgtgctgtaagtgtaaaatacatactggatttcgaaagaagtagtatgagaaaagaatgtaaactatctcattagttaactttccaatactgaatatatgttaaaatgataatatttgagttttgttgggttaaagaaagtatattattaaaattaatttgacttttttctttttaccttcttgaaaggtaaaaaagtgactactagacaatttaaaattacagtgttgctcttattggtgcctcacgttagttatgtttccattggacagtgctaacctacacattggatagaggcccctgaaatgagcttccaaactctatccaaagtggctacgaggtgtctgtaatccatacaagccaggttcgtctcaagagcagatgagagaacagaaactgg

SEQ ID NO: 31737 - DNA, 1064 bp, Homo sapiens
ccaggacaactgtggccccttggtactcctccatgtggtctctctccagaagggtacctggtttttctcatgagggcaaaagtaaaagctgccaggcctggaactggcacagtatcacttctgctgcattctaatggttacagcaaatgacaggaccaagtgaggttcagtgtgggaggggactacacaggaatgtgacccctgggaggtgtggttgactgggggccatctttggagaccagctactataattgtcccctctcctcatggagttcccatcctgaggctccacttctaatttgctaatggatctactctttgcaaacaggacttttccagtttgccatctgctcagccccttcccatggggacatgggaagtttctggcatcattcctcatgctatgctgggatgtacagatctctgcaggtctctcaggcccatctgcctggacttctccctcagacgctggaatgctgccactggatgccatgttgggcatgggcttctccttggggtccacactctggaaagtcaggcaatggtctcttctgttcagggattccccagacttggctgacccatccactccctgagatgacccaaggaatggaggacttcaggaaaataataagaaaacatggaagagaaaatggctaatgttctgttttaggtaactgtcaatgttgcttactggtattgttttgatctagatttgagggaataatgataatcaagtttacataactcttaggagggttcatacacataattttatttcattcttcacagaaaccttttggagggagtggtattattccccaggtaaggaaagaggctcagggaaattaagtggctttttcagggtcgcatatggtgtggttttatcttgaagagtgcaattttaaaagagaaaagattcaaaagagaataaatggggctgtgtttttaagttgagaacttttgaattttttccattttgatcttcttgcaaaattctgggcttaatatttaggtgacaaaactgaggattacctaaagaacaagcaatgtcaaagtacaag

SEQ ID NO: 31738 - DNA, 1066 bp, Homo sapiens
ttcaccctcaagtgggccctagtgtctgttcccctctttgtgtccatgtgttttcattgaaaaaaatagtaatttaatcttatatttctttctctttacccttctttaagaaaaattaaattttcatcttttttttaaatcccttcatggaagccaacataaattttcatctttaaagcccaaatggtcaaaaagcttttgctaaatgatgtcagtgaaaatggcaagaggaatgacctccgaaaactagctgcttcataagagccgtgataaaactggcaaaatttctcagaatcgactgtttagaagtctgaaaattaaaggctgtcagcaatctcaggagcatttagttcaagaaaaactactgaatctacctaagaccaacagccttggtcatgttttaacttggattagttgcctttttcactgttcagctgtagaagccctgaaaactaacagcccacattcctgttgcagcctagcagccaccagaaggaacaaaacaaagctagagctctttcaaaacctcattctccattatttgaccaatgcacttaacaacagagtatcaaagtatgtgaggcaaaaaccggtagaactgcaatgagaaatagatgaatccactatcatagttggagacttcaacacccctctatcactaatggacagaaccagcaggcagaaaatcagtaaggacatagttgtgcttaacaccatcaaccagctggatctagtgaacatcgagaccagcctggccaacatggcaaaaccccgtttctactaaaaatacaaaaattagccaggcatggtggcaggcacctgtaattccagctacttgggaggctgaagcaggagaattgcttgaacctgggaggtggaggttgccgtgagctgagatcgcgccattgcactccagcctgggcaacaagagtgaaactctgtctcaaaagaaatgttctaaaatcagtcatgtatgtgttcaccttaggaaactagagaaagaaaagcaaaataaatccaaagtaagcagaagacaagaattaagagtagaaatcaatgaaattga

SEQ ID NO: 31739 - DNA, 1457 bp, Homo sapiens
ttttgtaatccatctgtgagagtctgccccccagcttaaccacttcctttggtctgcacccaatgaagggaaaccccaaagtactgtctcaaatggtatttgaactacgccagtattgttggaataagtacattaattacttgaatgaatgaacacagcaccgtagaaatttcctttatggttacaccttgtatgtctaaagcattcaggccctgttctgtagtgtttcttatcctcacacagagtagaaaagcctgtttgctttatttaacttatacataaaagatgacatctgaaatatctgatgtgtattataataccagcttctgctctagaactactttgggtgaaatggtggtaatagcaaatgacctcctttaacaagacactcatctcaaacaatgccatttagttcaggagatctctaagtgtagctgtaaattttggggttaatttggcttatattggaccttttaaaagaaataaagttttttaatgcaataaatcaagtgtctgtctcttttacatgcaaacttcttttcccttaaactgtctagcattgaattgacaagttttttttccttttctaataaaaaaatgactttttagcaaagttgttttagacttaaatgaacctatctatatgggattttcaaatatatttattcaacaaatactgcttgcctgctgtatacttgggagtgggaatgggcagaaaaccaagaaattgtgatcttgtcctttaggagcttacaattaatttcattgtggaaaggtataagtagaaagtaataaaagtgtaattgaggtagagattaattgataaaaggtacagaataagatcacattgggagggaagatcagaacaggcgtcatggaagactaggtgcggacattgagaatcagatttgaacagatggagaagggtgcaaaccctatgtgaaaagaacaaaatcagcagctctttaaatggttggtggagttggtggaggggcgctctgggatagagtagatatattggcacttagcaatcctgagcatggaaagatgatgaaaatatacaagagagctaattggaaacacgtacaagattagataatagaagtgagaacaagtagatataaataggcgatgggaggaacaggtgaagagggctttaataacctttctcaaagtggtctttatgcaggtaataataatagaaaatgcctatgcagcatttatcatgtaccaggcaaggttgtaagtacttgaaataaattatctcttaacccacacaactgttctacgtggtaggtactatttatagcaccatttaacagatgaggaaagggggagatgaagtagtgtttgcccaaggtcacctggctggtaatttgtgaagcctagattcaaatccaggcagtcatgtccattgtcggtgctcttaaccccctaatgactgctgacgtgcaatc

SEQ ID NO: 31740 - DNA, 1009 bp, Homo sapiens
tgttacagcaaagttagtatttactgtttatacttgccactttctgttgttttagtagccaaagattttgttctttcagcaaatatgtatcaagatcctagttaagtactaatattcttatttaaagccagtgtttctactcatgcactagatcctgtccccttttgcctacttcataatgtcagtttgacagttctcttttgtgtcctggagtaacatttttcgctctcttcctgtattattcctctcagtatataaacattagttccctcatccttaaaaaataatttataaatctcactgctcctgccagctactgccatatttctctgtccccttttgcagcaaaactactctcttgctgtccgcagttattcctctcattcttccattcttttgttgttgttgttgttgtttgtttttgagacggagtctagctctgttgcccaggctggagtgcagtgccatgatctcggcttactgcaacctccgcctcctgggttcaagcgattctcatgcctcagcctgcccaggtagctgggattactgacacctgccacgacgcctggctaaattttgtatttttagtagagacggagtttcaccatattggccaggctggtctcaaacccctgacctcaggtgatctgcctgccttggcctcccaaattgctgggattacaggtgtgagccacagcgtccagcctcattcttccattctctcttaatttccgtatagtcaggccttctccccctcacccctacacatagcaaaactgttcccatcaaaaccaccaatgacttctactgtgttaactactacttagctctcattttacttgatagatcagcttttggcacaactgatcgtttcctttgataaatttttttactctgctttttgaaccccactcttccttggttttccttctacattactagttattccttcttaatttcttttacaaaatttctccctcttcttctaggactcaattcttcgttcttt

SEQ ID NO: 31741 - DNA, 1004 bp, Homo sapiens
ttattgattcaatgatttgttccatgggagcctagtggaaaatataagccacagtaattattctgggataccagaggcatccttttaataagtgattgttttggaggcttaaacagtggcattaaaggatttatttttcttaaattgtaaaaaatatttttcttaaattgggtacaattgtacccaattgtaattgtattcccaggaatagcttgagtaataagagaatcaggcataactcattctgccaaagcaacaatgaaatattttctaaaagaagagacaaattcctcagagcttccaattgctattattcagtaatgtacatttgcttatttgttttttaaatggttttttaaaaatcccctgtcagcatcacagtttctacctttaaagctccccaggaaaagttgttgtttatactttggaatttttaacaatctgacattggttttcttttgtttaggaccaacatacagtaattataattctgctctgccttttatcccttcatcctcactttgagtaaataattggaaaaatacatgaaatcttccgtgactcattctagtcattctgcttgttacccccattgtcctgatgcctgcgttcttggtagacagtcattcagcaagtcctctgaagtgtctttattttacatcatgtaagaatccagcaaacaaatatatggctgctatcgcaatgaacatattaaatatgtgaaatattaataaataaaattatatttgcctgttgcagatacgtatagggctgtctttgagcaggatgtcatgtgggtcttctccacacctgtgtgtagtatgtatataagagaaggaaaggttgagggctgtttttcctgattataaggaagaaattcccctcataccagctctcctgagataaccatcatcaacagttatattgctctgtgtgtatgtagattattttatgtccctcacagccttaatcaaagttgaagtcctggtatatgttataaagcc

SEQ ID NO: 31742 - DNA, 1025 bp, Homo sapiens
attaactaaagatacatatatgtaaacagtcatagtataggagaagataagggaaagctgacaggactcatgcagtggctcacagctgtaagcttaactactcaggaggctgagacttggaggatcgcttatatccaggagttggaggctgccgttagctatggttgcatcactggactctagcctaaactatagagtgaggctctgtttcaagaaaaaaaaaaaaacctataagcaagttgtttcctaaagcctcctcagaatctcttttgcaaatgtgatcttccttttaaacaatgacaacatgaatcgtgtgttatttcctcagtgtgccaatatgtaagtatataactttctaaattctagataagatgaatttcaatgttttattcttcatagaatgtaaatcatcatttttgtcacatttatcttcatataaaaacatgctttcatgcttctttaaacctaccaatttcattataaaatcactgtcaattaagttttctaactgtattttctctcaataggaatttggagtgcctaaaccttctgctgaatactggtgcagactttaataaaaaggacaaatttgggaggtagggtatgatacagtttctttatggagcctatttttacttaataacttgattgaccttctaactggcttctgaaaattaactgaacaatttagcatcttgtacactgatcatgattcattgagagtcccagctgaagtcagtaacttccaaatattcgttctcacccacagttttcttcttgagtccctaccacagccctagcctaccaaccacagccttggccttataaatgcctctatacttgctatcacttccccccctccaaaaattatgactatggaaatgtaaagccccatagaacctatgttttttcaagaaactcacaatacctagaaaataatgatacagttctcctttctccaagtcatttcttggtgagggattctactgcccatatcttgttccagagcagtagtaagagggagg

SEQ ID NO: 31743 - DNA, 1028 bp, Homo sapiens
ggctgacagaccaagacccccatctctttaagggaaaaaaaaaaaaaaaaaaagtccaggtgcggtggctcatgcctgtaatcctagcactttgggaggccgaggcgggtggattacttgaggtcttgagttcaagacaagcctggccaacatggtgaaaccccatctctactaaaatacaaaaattagctgggcatggtggtgcatgcctgtaatcccagctactcaggaggctgaggcaggagaatcacttgaacccgggaggcggaggttgctgagagctgagatcacaccactgtactccagcctgggcaacaaagcaagtctcaaaaaaaaaaaagagagaaaaaaaaggccatagctaaaatattaacattaaaaattaggatatatcctatctggaacattttggaaagacagaatccttttgccaagatgcttttttgccctttttttttctggttgaacaaataacaactggtacatgaaaaataatggtaaaacaaatatatcctgagaagcactgatgtgttatctgagtgttttacaaaggattattgtatttactctgtacaacagaccagtaagatgtagatggtattatcctcattttcagttgaggaactgaaggcacaaagaagttaggcaacttgtccaaaaatcttgcttgtggtaagtaggagatctgagattcatgcttaggttattctgactccagagcctgtgcatgcatgcatcctctctcctcctccccttcctttctcgtactgcctccaaaagattagaacttctgtaaaattacttgtcaattggatggcttgtttacttgaaaaattcatattatggaatcaaacacttaagtagatacttatgatgttctaattattattataaagacatgaggatttttaaagaatatctgcgttgtacagtgttagcataaacttagaatacttgtgacatttccattttagtacctatgcagaaggcatgctgaatgttgctgtgagattaggaagctgctaagt

SEQ ID NO: 31744 - DNA, 1111 bp, Homo sapiens
agtgtggtggcatgcatctgtagtcctagctactcagaaggctgaggtgggaggatcacctgaatctaggagtttgaggttacagtgagattgatcacaccactgcatttcagccagggtgacagagcaagaccccgtttctaaaaataattaattaattacaaaatatgtttatgctatactatagtctattaagtgtgcaatagcaatacatctaaaacaatatacatgtctttgttttttcttttttattaattttcagtgttcttaattaaaaaatatgttattgctaaaaaaaaatgctaactatcgtatgagcctttagcaagtcacaatctctgataatggagagttttgcctcaatgtgaatggttgctgaaggtttggatggctgtggcaattccttgaaatgagacaaagatgtgctgcatcgatggactcttcccttcacaaaagatttctctgtagcatgtgaagctgtttgatagcattttacccacagtagaatttccttcaaaattggagtcatttctctaaaagctttgttgtcatttcaacaacattcacagcatctttgggagtagattccatctcacaaaaccactgtctttactcatccataagaagcaacccctcatctgttcacattttatcatgagattatagcaattcaggcacatcttcagactccacttcttattctagttctcttgctatttctaccacatctgtagttatttccttcgctgaagtcttgaatccctcagtcatccatgagggttggaatcaacttcttccaaactcctgttaataataatactttgacctcctcccatgaatcagaaatgttctttctttctttcttttttttttttttttttttttttttgacagagtttcgctttgttgcccaggctggagtgcagtggtgtgatcttggctcactgcagcctctgcctcctgtgttcaagtgattctcctgcctcagcctcccaagtagctgggattacaggcacccgccaccacacctggctaatttttgtacttttagtagagacagggtttcaccatgttggccaggctggtctcgaactgctgacctcaggtgatt

SEQ ID NO: 31745 - DNA, 1053 bp, Homo sapiens
ctaggctagagttatagaagtaataagttgatagttaataatggtttggtggggggaggggttgttgttgtggttattaaaactattattaaaattaatcttattttaaaacttatttcccacctttccttattatcacaggacaatgaaaagcgaaccccattgcacgccgcagcttaccttggagatgcagaaatcattgaacttcttattttatctggtatggtaacctctgagtaataagaacacattatgtatatttttgttattcttaatgtttctcaatcataattgactatttactgcatggcctgttgttcatatttgttttatcagctgaaacttatttttatattcattccataaatactgatcacatatctttttctgggtgcttagagtacattaaagaacaaaacaaagattgctgccctcttgtagcttatactctgataaggaaaaacaagcaataaatacaagtgaattttatagtatattaaatgatgatgagtgctttgaaaaaattgaaaggtagatcaggataatcggggtgggataagcattatatgtagcgggtttttttggttggtttttttttttttttttggtttttggtttttgagatggagtctcgctctgttgccagggtatagtggcacgatctcagctcactgcaacctccagctccctggttcaagtgattatcctgcctcagcctcccgagtagctgggattacaggcacatgcctccatacccagctaatttttgtatttttagtagagacggggtttcaccatgttggccaggatgatctcgatctcctgaccttgtgatctgcctgtcttggcctcccaaagtgctgggattacaggagtgagccaccatgcccgcctacatagggtattatatggaacagttatagtaggcctcattgagcacagaattataggagatggttgcagttctcctaggtggaggtaacggtggtttatagcaaatacaacagtggagacagtaagaaatagtctgatagtagatatattttgaaggca

SEQ ID NO: 31746 - DNA, 1046 bp, Homo sapiens
aggagtcagtccatattagtctatagagactttcctcattctttataatttatttcatagcataatttatttaactagcagaactagttccctcttagagggcatttgggttattattaaccctcttcattggtaataaatgagatcttttcatcaagttaacaaaaattctacttaaatggacaagcaaaaaattttaaatgtatttattatctgttattaaatatattattaacttcatagactacctttcctctaggttcagtatttaaagcaattttagtgcatatgtttatatgaattggtggacggtaaatactggcattttctataaagctcaagtatcaatacttgcatactcagaagtaatgctgatggttacttatacagatgttgatagttatatggtatagcaaaaatatgataaattatgtcctaaatttcatactgaaatgaagtaactttggtctgaaagttctcagctagtgcctcagactatttttttaaacttttattgagatacaatcgatgtataataaactgcatatatataaagtgtaaaatttcataagttttgatacatgcatacacctatgaaaccatcaccacagtcaagatagttaacatttctatggctcccaaaggactccatttgccccttggaaatcccttcctccctcctctccctggtaattactaacctggtttgtacattttgttttttcctagagtgttatataaatggaattacacaatatgtcatttttttggtctggctttttttttgtaatagattttatgttgtagagcagttttaaattcacaacagtgttgagaggaagatacagacatttctcatacactttactgccaccacaaatgaatagccttcccattatcaacatttcccattagagtggtacatttgttaaaattgatgtacctacattaatacatatcattatggctcaaaaaccagagtttacattagggttcactcctggtattatacattgaatgagtttggacaagtatataatgacatg

SEQ ID NO: 31747 - DNA, 1084 bp, Homo sapiens
ccaggagacagaggttgcagtgacctgagattgtgccactgcactccagcctgggcaacagagcaagactctatctcaaaataaagaaaaattgtccctggtaattattttgtcttttctcctatccagtagctgttcagactcctttcactgaagcccttttatttcacaaatactattttcaaattctgcttttttagctaccaaatgactttttgttagctaccctacttaaatgagttgagtacttaagtctatagagtctatttgtgattgtaacagattatggagatcttaattcagggaaataatttcttctaataaagcattctcttattcttttaaagatcaaaataaaacagactctagaataacagtgtcccttaacaacttactctgaggccttgtttctccagtctggtgtgctgttatttccttttctgttctttgtagggttatttagataaaaaataaagtcataaaaacaagcatcttaaactaccctgttctgtagtctgctcttcatttgctattttatagcttttgagttatgaatttataggggattgtaggtcagcaagtttaaagtcactcacagtaggcttggtttgcctttgagtctcaggcttacaggagttatgggttaaatgactggctttgcaggtttgcttcttggcagtgagtcttcacataggcagtgttcaagttgtggtcttaactcttagaatgtgaactttgtcatgtaaccactctaggccttatttttcttacctataaagttgtgattttgtttagcaaataaggatcatggctaaggacaatgttacttaggggaaaaaaaaaaaaaaggagagaacaaattactcataatcctgccactgacctaactcatgtagtgttgatgctaaaaatgaaaaagaaaaaaagtcttctatttaacgtaattaagattattttgtttatactgcagtgttgtattccatataatattttttagtatatcccatgttttagaaattctttaaagattttatttttaaatattagatatagtttcactgtgtgatatatactgtattttaaa

SEQ ID NO: 31748 - DNA, 1031 bp, Homo sapiens
gattgttcattgctggtatatagaaaagcaacagattttgtgactttatcttatattctgcaactttgctgaatttgttcattagctctgatagtttgttttttttaattcttggccaagcatagtagctcacacctataatcccagcactatgggaggccgaggcaggcagatcacttaagctcaggagttcaagaccagcctgggcaacgtggtgaaatgccgtcactatcaaaaatacaaaaaactagccggctgtggtggcacatgcctatggtcccagctactcaggaggctgaagtgggaggatcgcttgagcccaggaggcggaggttgcagtgagctgagatggcgcctgcatgacagaatgagacccaatctcaaagaaaacaaaacaaaacattctttaggattttctatgtataacatcatatctgcaaatagagatgattttttggtttgttttatgactttccaatttgaatggcttttatttcttacctagttgatctagttaaaacttgtagaacagtgttgaataaaagtggtgaaaagtggcatctttatctctctcctgatctttgaaagaaagcattgagtttttcacccttaactgtgatattagctgtgggtttttaaataaacgatctttatcatggtaaagaagttcccttctatgatgttgagtgttttttatcatgaaaacgtagtggattttataaatgctttttctttgcatcagttgagattataatgtttttattcctttcattttattaatgtgatatattaaatattttaaagtgtacaaccacccttacattcctggtataagtcccacttggacatggtctacaattctttcaatatgctgctgaatttggtttgctagtattttattgaaaatttttacataatcataagggatgttagtttattgtttcctcatgatgtctttttctagttttggtatgaagtgtctagttttggcctcaagaaatgtggatatccagttgtcctagcgctatttg

SEQ ID NO: 31749 - DNA, 1172 bp, Homo sapiens
ttttttatagctgaacagtatgtgtgtatggaccatatattctttgttaatggacatttaagttgcttccaaatcttggttgttgtgaataataaccaaggtttttatatataatgtgcatattatatatcaattattataaaataatataaaaattataaaataaaattatatataaattatgttatatataaaaattatacacaatatataacattatacatataaattatgcctatataataacatgggagtgcagatatctcttcaatatactgatttcctttctttgggttataccaagcagatggattactggatcatatggtagtgctagtgccatttttagttttttgaggaacctccaaactgttctccctagtggttgtactagtttgcattcctaccaacagtgtacaagggttcccttttctccacatcctctccagcacttgttattgtctgacttttggataaaagccattttaactgcggtgagatgattgtagttttgatttgcatttctctgatgctcagtgatgccgagacccttttcatgtacctgtttgccatttacatgttttcttttgagaaatgcctattcagatcttttgcccatttttttttattgggttattaggttttttttctgtacatttgtttgagctccttatattctctggttatgaatcccttgtcagagaattagtttgcagatattttctcccattctatgggttgtctcttcactttgttgattatttcctttgctgtgcagaagctttttaacttgatgtgaaaatattttctcccattctgtgggttgtctcttcactttgttgattatttcctttgctgtgcagaagctttttaacttgatgtgaccccatttgtccatatttgctttgattgcctgtgcttgtggagtattagccaagaaatctttgcccagtcagtgtcctgaagagtgtcccagatgttttctttcagtagtttcatagtttgaggtcttggatttaagtctttaatccatcttgatttgatttttgcatatggcaagaggtaggggtcttcattctttttttctttttttgagacacagtcttgctctgttgcctaggctggagtgcagtggcgcggatctcggcttactgcaacctctgcctcccagg

SEQ ID NO: 31750 - DNA, 1035 bp, Homo sapiens
ctgacttatatcttggaatgacagatccttcactccttcagtagtaagtttgaaattgggaagtgcaagtcttccaatttttgtttttgttttttaagattttggcttttatgggtcacttgcattcccatattttagcatccatgggtcaatttcttccagaaagacagttgtaatttcgataggtattgtattgaatcaatagatcaatttgggaaatactgccatcttaatgataatagtctttccatgaacatgggatgctttccatttattaaggttctttaatctcatcgtatcttgtagtttcaagagtacaagttttggactttcttaaatttctaaggttttaaaatgctattgtgtatggaattttcttatttttagattgtttattggtaatatatagaaatacaagtgattttatatattgcttttgaatcctacaactttgttgaactttcttattagcactaatacttttttagtggctagagataattttccgtgactagagataattttgcttttttctttccagtctggatgctttttatttcttgcttacttgcccagactagaacctccagtacggtgttcagtagaagtggtgagagtagacatccttgtcttgttcatgatctttcatcattaagtatgatgtagctgttggtttttcatagatggtttttattaggttgaggaagttccttcctatttctaatttattgattgttagctgctgctatatttttttttttttaagttaaggtctcactttgtcacccaggctgtagtgcagtggtgtgatcatggcttacttgcagcctagacctcctgggctcaagcgattctcccacctcagcctcctgagtaggtgggaccacaggcatgcaccactatgcctggctaattttttaatttttttgtagagatgggtctccctctgttgcccaggctggtcttcagcttttgggctcaagtgatcctcctaccttggcttcccaaagcactgggattacaggtgtgagccac

SEQ ID NO: 31751 - DNA, 1051 bp, Homo sapiens
tttgcctattctggatatctcagataaatggaatcatacaatatatggccttttgtgtctcattcacttagcatatttttaaggttcttccatgttgtgcacgaatctgttggtcataaatttttgtatcatgtttaggaattcctaaaagaagttcctgtactcaggtcatctcactgccttccgtggtatgcatatgtgtaatctgggatagtatttatttctgtttttggaatttgttttatgaactttgtttgcagcagtactaaagggtaatagcttttacatttggatcatttttgtgtaggagccatctttgtgtgctcccttatgggttaatggtgaggactgatatgtttaaggtgttgggtttttttttgttttgttttgtttttttaaacagggttggcatatatcagtgagaaaggtgttggatggatgtgagtaacttaaccactattttggatagttaataagttcttatttgatcaagtacacactaagagtggaacattgtttgaggggaaaaaacacacacaaaaaatgacggttcttgggaaatcttacaataggggatacagaatgcatgaaatacttgaagaagaacactgatgcccagatattcaggtactctatgtaggaggtgtcttcctgttttgtttttgtttttgtttttgttttttgagacggagtcttgctctgtcaccaggctggagtgcagcggcacgatcttggcgcattgcaacctctgcctccctagttcaagcaattctcctgcctcagcctccctagtagctgggactacaggcgcccaccaccacacccagctaatttttgtaattttagtagagacggggtttcaccatgttggccaggatagtctcaatctcgtgaccttgtgatccacccaccttggcctcccaaagtgctgggattacaggcgtgagccaccatgcctggcgtgtcttcctgttttgtgctggagatgacaggggacacaagggtgaagtagctaccatctctacccttacagatcttagaagaggggaaa

SEQ ID NO: 31752 - DNA, 1011 bp, Homo sapiens
cggggtccgcgggcgacccgcctgtcagagctgccggggcctgggtgaagcccacgtgccgacgggggtctagccgctgcagcaagaggggcgggttccacgctcaccgccctcgcgtcgggcgagctgccgggcaatcgcttcctctttcctgccaggtgaggctcgggcctaacaggtggcttccccgctgccgggcgggagcggtactggcggccgtgacccagggtcacgaccttgttctgtttgcttggctgggtagtgcgagggactctctctccgggttaaaggcaattgattcctcttagcgactagttactcaatgcaagtttccagacttgttttcttttgacattttgtgcaccatcttgttacttttcttgacttatgaagagctggtcaaagaatacaagtcaaaatgacttgtaattctctggaactgaaaaactactttgtatctaggaacgaaatcgcaactgtatctgaatgttttgtacacctaaacatttggaaagatgggtaataaggcttttgaaggatccggacgctgccaaacattttccccctcttttaaggaaaaggaaaattaatgtgtgacatttacacattaatttgtcgcaggacacttactagtgttgacaacttatttttgccattgttttcctgaacagaagatgttgaacagatttgaagggaaaataacttggatgttttggaaaactattttgaaagtgagcaccccgtttgcgaaaacaatggggaagaacctgagactattttttatattacttaataaagattgcaccttaaattctgaatctaatatcaagaattctcatttcataagtgaattttatgtttaggctgatcgcagaccttgtgtatcattaggtatcagaatggtcttgcctggtgttaacatcaggtcatgatactttgaaaaactacggtttagtcaatacagtttataccttgtatttcaaattatacaactgttctgtcctataagag

SEQ ID NO: 31753 - DNA, 1049 bp, Homo sapiens
ggaggctacaggtgggtccaggacacactgccgctggggtcctcggaaaagaacaggagggagctggtcgcggagtccaggtttccggggtgcgcgcggcctgggtggggcagggtggaggcggtgcctgactgcccctctgcgtgtgccctgggaggtgggtttgctctggggacagaggtgctggacgtgtaggagcagacatgccgcgcgctccgaggaagcgccggaaccaccagaagcacagggacgcgggtgccgagagtccccagcactgaaaacggggatctcctcttctgtaagggattttcttcccttgtcttaacccacttctctagactcaagggacgccaggatggatatgggtctgggcgaggaggaggtggttgtgtatttcgggaagccccgttgtcaggcacgcgcaccccagtcctaggccagggctggtgcccttcacctccggtgtcgctgcctttggcagcaagaaccgcgtggaggccaaggttgtagaaccaggcacgctccctgctgtctgtctgtgactctgtgcttgccctcagctgccctgtgtggttatgggtgatccctagggacgctgggtggtgtcagtgagtttcttcgggggcttaaaacaaacaaacaagaagtacttttttaaaaaaaaagtctggctcaatctctgtcagtggtcaccccagtttccagcaactcatgtgctggaacccttgtagtcggtacagctgtttcaggagctgggcgctcaactagactaggcatcttccaacccctgccatcgtgtgtcatctcaggataagttaaggccttgccaggaaggaagccgggtgtaatgtgagcgacctctgggcctgtgggtagggcctctctgctgccgggattcctaatttgtatctctgaacagctgaatcccaacgaagttcaagtgaccccagatgtcaccaaaccccagagaggggttacgaagcaagctgtttgggactctttggtgcgtgtgtgctaacctcagtgaaatcactctaacctcagactga

SEQ ID NO: 31754 - DNA, 1035 bp, Homo sapiens
acttccaccatccagcagtttccatacatcctctgaaatctaggtggaggttcccaagcctcaactcttgtcctctcaacacccacaggcttaacactatgtgaaagctgccaaggtttatgggttgcaccctctggagcaacagcctgcgatatcttaggcccttttagccatggatggaacagaagcaactgggatacaaggagcagtgtcccaggtttgtgcagggtagcagggccctgggcccagcccacaaaaccattcttccctcctaggcctctaggcctgtgatggaagcagctgccacaaaggtctctgagatgcctttgagacatttttcacattgtctcggctattaacattcacccctctttactttgcaaatttctgcagccagcttgaatccctcccaggaacatggatttttcttttctaccacagggacaggctgcaaattttccaaacttttatgctctgcttccctgttgtataagttccagtttcagatcatctctttgctcatgcctatgaccatatgctgttagaagcagccaggctgcatttgaacactttgcttcttagaaatttcttccaccagataccctaaattgtcattctcaatttcaaagtttcacagatccctagagcaggggcacaatgccaccagtctctttactaatgcataacaaaagtgacctttactctaattcccaataagtttctcatctttatctgagactatctcagcctggacttcattgcctatatcactatcagcattttggtcacaacagtttaacaagtttccaggaagttccaaactttccctcatcttcctgtcttcttctgagctctccaaactgttccaacctctgcctgttaccaagttccaaagtcacttctacattttcaagtatctttgtagcaatgctgccacactcctagtaccaattttctgtattagtccattctcatattactataaataactacctgagactgggtaaagtataaagaaaagatttaattggctca

SEQ ID NO: 31755 - DNA, 1024 bp, Homo sapiens
tttcagtgccacattgccttggggacagttatttgtaccctaaagtgcagatgtgcatgacagggaaggaaaagagggctttgacttgtctgggcaattggaggtcagccaaggccagagaccagattgcggagtctgcatggttgtcctcttctttccccctcagtggcatcaccaccctctcctacacagtgtctccctgctcttaaacctcttgtccctggcatctcatcatttatcctttgaacacctgtgtaaacttttccaggaagttatatttttaatccactgggctttcattgcagaaagaatggctttagttctgtcatagaaattctaggcctgttgataaaggggggatctgtatcaggcaggtggccttcactttgcccctgaaaacttagggctaaggaactcccttttggttgttcctcatagctagagcttctatacccagacagtcagttgaaggctagggcactgtattagtccattctcttattgctatcaggaactacctgagactgggtaatttataaagaaaagaggcttaattgactcacagttcttcaggctgtacaggaagcatggctggggaggcctcaggaaatttacaatcttggcggaaggcaaagaagaggctggagaaggagaaagagagattgaagggggaggtggtacacacttttaaacaaccaaatcttgtgagaactcactataacgagaatagcaagggggaaatccacctcatgatccagtcacctcccaccaggccctcctccaactcagaggattacaattcaagatgagatttgggtggagacagaaatccaaaccatattatcctgtacctggctcctcccaaatctcatgtccttctcatattgcaaaagataatcctcccttctcaacagtcctgtcttaactcatttcatcattaactcgaaagtccacagtccagagtctcatctgaaacaaggcaagtcccttccacctatgagcctgtaaaattaaaaactagtta

SEQ ID NO: 31756 - DNA, 1052 bp, Homo sapiens
caaaggaacacatcccccaaaaatagataagattcactgcatctagtccaaaattctgattttgtaggtacagataataaggcccattatgggctgaattgtatcccccccctcaacaaaagatatattgaagtcctaacttctagtacctgagaacgtgacctaatttgggaatagattgttgcaaatgtaattagttaagatgaggtcatactaatccaatatgactggtgtcctcataagaagaaggaaatttggcaagagacatgcacagagggaagacaatgtgaaggtatatacagggagaagaaagccgtgtgaagacagccagaagcagaggttggagtgatattatctacaaggcaaggaatgacaaggattttcagccattaccagaagctaggagagaaataggaaacaaatttttcctcttcagaagaaacatgctgctaacaccagaagcaggagaggcaaggaggattctcccctacaagtttcagagggaacatggtcctaccaaaactttgattttggacttctagctttcagaattgtgaaacagtaaatttctgttattttaagccacccagtgtttgttactttgctgaattatatggattaaaattatatacagaaagaaacattgagcaataaagaaataatgtgagagtaatcgtaaaccattactcctgtaatagtttatgaatggtgatacccccaccacactattttttaactgacttatttcatattgtaagtcactcttgtgattccttgcttcccctggctccacctacctaaatcttactcctattttcaggcctagggcaaggtagcctttttcccaaatcttttcctattattctagctctcattgatttcacactttgcaatcctataagatcatcatcaataccactaactaagtgctacattagtcatactctattttacatttttccgtagttattgtgggtgttggtcctatctcctcaactagattgtgagcttccttggtaccagaaccacattacaattctttcatatctcta

SEQ ID NO: 31757 - DNA, 1048 bp, Homo sapiens
cagtgcaaaattcctggctattaataagactcataataagaagcagcaatgagaagaataacaaaagaaagtaacaagattatttacaaaggaagcataatagatgatgacaaagctatcaaacgttagttatggtactatacataaatgctttaaacttacctagtaaaaggcaaaaattattgactggctttatagacaatatccaactatatgcttcttagaagaggcagctaaaataaatgatgtagcttggtaaaaggattacagggacagcaactgtaatatcaagataatatacttcaaagaaaagcattgaaagaaacagagaatagccttgtatagtcataaaacattcagtttttcatagacatacaatagccttgaattttggcatgtaaaatctgtgacagcaaggagtttgtctgtcttattcattaatatatctcaaatgcctccctaaactgaacctggcatgtggtaaacactcagcaaataatttttgagtacatgagaagatggatgaatgggaaggaaagaaaaacaaaagaaggaaagatcacaaaccagtaatacaaggatctgattattcaaaatatgatatggtgaaaattttgttgctattttaaggaacatcaagtaataagaatgaaacaattacaactctaaataattagtagaaaacatacatgaatagcctatcttccaatgacgatagattttgtaagaatatcagtgaagacattctagatggtaagctggaaatttgactacttcaaaatttcagtccggggagggggtggtggtgctgcctgattcttgtgttgttctttgctcgattaaactctgttaaattaaaaaaaaaaattagtccaataaaattcaatgtaaatttttccttatgatttttaaattggtttaaaaaatttaacatacataaagaaataatatgaagaataaaatactaatttttattttttatatatagagtcctaaatttggtaagaaatcactaatccattaagtagaacagtaaaatgaaacaaca

SEQ ID NO: 31758 - DNA, 1035 bp, Homo sapiens
atattgagtttattaggggatttgcacatctgggatatgcaggccttgggaaccataggcatatccaaagaggttgagggaaggggaagcttttaaagacaagagaggaaagtacacacaatttattttgtaacagagaactttggttacaggggcttattgcaggagctaacaccagttcattaatggagacagtttgtctggcaagtgttcttgtacatcagctagctatccttgtacttatgtagcaaactgcagtttagaaagttattggcaaaagtttttgttacagacgtatgtgtataagagcccttcagagagtctttgtaatatttcttcagcgtatgtgcatgagggctcttctttctaaacctgtctttatttatggttatctgtcagtattcttggggatggatttcaggacccccatggataccaaagtccagcagtcagctctagggaattggaaaggataggaaaaatcagcccctctgtatccatgagtttgacatccttagaatactgtagtctcagtccgtggttggtataaaccatgaatgcggaatctcatgtatggagggccaactgtacttttgttagggtttgacacaagtgacttcattttgattttgacaactttcccatttgaacttagtcatcagtgacaaaattatgcccttacctatgaagacagctaatgtgacccatacaacatcagtatttacatatgtatctatttcattgtggtgacagtgttactttacatgaactgctattttatagtacttgctatttgatagtactaaagtttaaaaattcagtatatcatagtttttttttttttattagatggggtcttactctgttgcttaggctagagggccatctcagcccactgcaaccttcacttcctgggttcaagtgattctcatgcctcatcttcctgtgtagctgggattacaggtgtgcaccactgtgctcatctaatttttgtatttttagtagagtgggggtttcaccatgttggccaggctg

SEQ ID NO: 31759 - DNA, 1027 bp, Homo sapiens
aacagtctacgttcctgagtaagtactctgttgataccctagaatttcatgccacgcaagatggcagggatccctgtaacaggaaaatgtggaaagtgccaccagttgtccatatcaattctaaggtgactgaattcttcacaatagttgagttgaaataatatcatgtcctattgggcctagcagaaggaattgggtaaaaatatgttcctccaggaattgccctgctgaactgactttgtttggtatttaccttgtgtaaactagaaaatagctgccaaaaaattttgaatttggatatatttgatgatgagcttttccttctcttactagttagacaacaggatccattgcttcttgaaatatttctcaggttgtgataataaaaccatttgaactatttggagaacagcacatataccctgtttgcaacagcaggaagtatcactttattcacatttataaagtgtataaataagttgaaaagaagtgtgtatgtgtttgtggaagttgaaggagtcagttttctttctgaggatgaggtgtgatttcttatttttttatgtttatttttggtgattttataactttatttgatgtatttgatgatcagcagttagttctcatccacaatgactgtctgtagatttttgaaagtggtaacaggtgcataggtaaccaaagtgtagaactcatttggtagatcttcatccttattatgttttctcgacagccacacatggatatggtatggcacattccttattcctttggcccagacagctttgttgagcctgctatcagtgcacagttctggagttcccctctccctcatgacagatttccagatctctttgagtgcctgatgggcatgcttcttgaagcccactccatggatgcacttgtgaatgttgattgtatgctcaggtcaccacctcattgatgggagaatgacccttcttctttgtgggagccattctagtgggcccacgttgggggtgtgatttttaaaagtgaacaatcaggt

SEQ ID NO: 31760 - DNA, 1053 bp, Homo sapiens
tgtgaaggagtaaggtggatcaaaatgagatgattaactaaattctttatgtaaaacatttattcttttattttagtgtgtactgcttttcctgtacagtaagttatatatcctaataaaaattaaagagcaaattgtgtttggaagatcgggtcatcgtaattcattgacattaggccacataactgaataatgtcttccttcagcaaaatacatcaaatgagatcaacaattatgactcataaacatgccttgcaggcataaaacagcagggaattagcatgtgaggctgataaatatgcatgtaaataagctcccaaaggaataacatgggtttgattgataggtttagaattggaacatatgtaaacccctttattcctcattctggtgtagctaagtaaagatgcgttttacttgttaaaaagtttcaataactttgtaaatcttaatgccacatctgtttttttttttttcttgtgcatgtcacttgtaagattaattgaattgtctacaggctggacggccctcataaagtaaatggtggaacatgtgaatgagtggctatacattcgttgctagaaacagagtaagaatctttgggaaatctctgtttttacattgtaaaatgatgtatggtcataagaaatttcttttggaaataaagatgtgactcgatagattattctggctccctcagtaatacttcataccatctttttctacattttagctcctaacaatgcagtttctatttatttgctgatttcttactattgatttgatagtctataattaacatgtatctttttaataatttttttttcagttcttggtacttaattctagtccttctaaatcagtattcaggaactattgtgggagtgtattagaaagtgcatgttcaaatgctaatcacatatccagggagactccagttctgtgttcatgcctctcagccatcaaatgacttcgggaaatattaattcccttctccaggttcaaagtcacttcaggtaaatgaaagaagaaatgtggtttttgatatcctgg

SEQ ID NO: 31761 - DNA, 1821 bp, Homo sapiens
taaatggaaaaacattttatgctcatggataggaagaaacaatattgtgaaaatggccatactgctgaaagtaatttatagatctaatgttattaccattaaattaccattgacattcttcacaatattagaaaaaacttttaaaattcatttggaaccaaaaagcccaaatatccaagacaatcctaagcaaaaagaacaatgctagaggcatcatgctacccgacttcaaactatactacaaagctacagtaaccaacacagcatggtactggtacaaaaccagatacatagaccaatggaacagaatagagaactcagatataagactgcacaactacaaacattattgttgaaaaaaacaaggggaaaggattccctatttaataaatggtgctgggagaactggctaggcatttgcagaaaattgaaactagaccccttccttacaccttatacaaaaattaactcaagatggattaaagacttaaactatgaaactgtgaaaactctggaagaaaatctagctaatagcattcagaacataggcatgggcaaagattttatgatgaaatccccaaaagcaattgcaacaaaagcaaaaattgacaaatgggatctaattaaaataaagagcttctgcacagcagaagaaactatcatcagcgcagcctacagtatgggagaaaatttttgcaatatctccatctgacaaaggtctaaaatctagagtctataaggaacttatacaaatttacaagaaaaaaacaaccccactaaacagtggggaaaggacatgaacagacccttctcaatagaagacatacatgtggccaaaaagatatactaaaaaaactcaacatcattgatcattagagaaatgcagatcaaaaccacagtgagataccatctcatgccagtaagaatggtgattattaagaagccaagaaacaacagatgctgatgaggctgtggagaagtaggaatggttttccactgttggtgggaatgtaaattccaccattgtggaagacagtgtcctcaaagacctaaaggcagaaataccatttgattcagctatcccgttactgtatatgtacctgaaggaatataaatcaatctattacaacgatacatgcacacatatgttcattgcagcactattcacaatagcaaagaagtggaatctacccagatgcccattagtgatagacttgataaagaaaatgtggtacatattcaccatggaatactgtgtagccataaaaagggaacaccatcatgtcctttgcagtatcatagatggaacatacttgaaccctggacatggcggttgtggtgagccattatcctcagcaaattaatgcaggaacagaaaaccaaacagtagatgttcttatcagtgggagttgaacaatgagaacacatggacacagggaggggaatgacaaacacttgtggaggcttgggggtagtgacagcaaaacaaaaatacaagaaaattgaagaatatacagatttcaaggaaagaggttcataggagtgtatttagtttttcaacccttctaagtgtttatggaacaatccctcactgcattgcattgtttattttaaattctgaggtcaggctaccagattattcatagatgagatgagtcaaggatagagtgatttactgaggaacaatctacttagcagtagtagaaaattaggtattttaaaaatagcattgtgacttttacataggcaaactactacttgcttagttgctacatatactacagcaaacattcttgtttgacccttatttgatactcattg

SEQ ID NO: 31762 - DNA, 1051 bp, Homo sapiens
aaatccacatggaccggtgcagttcaaacccatgttgttcaagggtcagctgtagtctcagaactgtttaagaatagtcttatactctgtttctactcagcagctcttgtattcttgtcagaatatttgatttttctgccatatggtagctgatggtttccactaagaagtttgttcatttgtctattatatttctttgtagctccttttttcagggtaattgaaaaacaagattctgtggagctgggtcagtacatttgaatcacacattttagttttttccagtaacaatcagatggcagctctggcaaaaacatgtctttcctgcctttggatgagttcttttggggtcttgtcctttgagatctcttttaatcctggagctcctacagtgtctccttgtctgtctactggtagggttgtcagataaaatacagaactccttgttaaatttgattttcaataaataatgaatactttttagtataagtgtcttaaatattatgtttgttgtttttctgaaatttaaatttaattgggcatctgtattttatttcattatttacttatatttatttatttggcaacccatttcctggactttttcttaactaaattttgggccccttgagagaaggagattgattgtaccctaattctataacttgttttcctgttcccatggtagatggataattttttactgactgaaaaaataagctaataaactgaaatgtttctttatctgagtatttataaagaaactttcttctactgagtttgcccttttctgtgaataaattcattgaaaaaaatcatgtttcaatgaataattgcagatcttaaccttaatttaaaaatttcatctccctttctcttcctttctcttcgtcatttctcttcctcttatctttccagctcttactataattagctagcattaacagcaaatgtttgctttagttaaattattcagaacatttattttacttgtcaaaggttagatcaggttgttgtttgaactggtaattaaatgcaggctaataggctt

SEQ ID NO: 31763 - DNA, 1112 bp, Homo sapiens
gaggaagggtaggcattaaatgagatactccatataaatatcaatatcatagtaagcactcaatagatgttctttttactaaagtccattttcaaggaacttttactatctttggccttttattccctagcacggtcatgatgtaagtcatagggtaaaagcaaacaaataaacttgagtgggtatctttgtttttagaagaatacaaggaaatactacgcaataatttaaaaactacagctgcctacatataacttcacagataagccttgaaagaatcatatcatcttaaaatttcaaaattaaaaaataagttctgttaaccttgggtgaaagtttagagttttataatttattagaatctgtaagtcaccagaacattattgccagacctgacttagtgtgccaatagatcaggttaatgggagctgtcgggtcatcagtgttccatagtgacagttgtagttcatgcagaagggaaagtggacatccttttaatattttgagtgattggcagtgttggggagtatggtagacattttctgtcctgaatactgctttggtaccagtgtatgttagtgcccattggtgtcaccaagcagggctatatgtaagcttttattctttttttttttttttttttttgagatggagtctctcattgttgcctggtctggagggcaaatctgctcactgcaacctccgcctcctgggttcaagccattatccacctggtgtggtggctcatgcttgtaatcccaacactttgggaggccaaggtgggcggatcacgaggtcaggagttcaagaccagcctagccaacatggtgaaaccctgtctctactaaaaatacaaaaaattacctgggtgtggtggtgggcatctgtaatcccagctacttgggagactgaggcaggagaattgcttgaacccgggaggcagaggttgcagtgagcccaaattgcgcgactgcactccagcctgggcgactgcgagactgtgtctccggaaaaaaaaaaaaaaaaaaaaggaaagctggaaaaatattatcttccactaacgcatcagaatatttgggagaatctgattgtgaatctccattttaataagc

SEQ ID NO: 31764 - DNA, 1042 bp, Homo sapiens
acagagcaagaccctgtctcaaaaaaaaaaaaaaaaaaccaaaaaacttaaagaatctttttggaactcttcctgtttacacctattttctttggagagaggatggagatagtccacagatctgaattttctagggaagtttgctattatttaatgttagtatgctaatttggtacttgaagacttacttaggcatttgtctgtgttcattccacatttatactagtgaggctcaggatgtattttggttccgtctggccaacctgcacactggctttaaggatttaagtgaggaatgccattaaaaaatctgattgtcggccgggcacggtggctcatgcctgtaatcccagcactttgggaggccaaggtgggtggatcacgaggtcaggagatcgagaccatcctgtggctaacaaggtgaaaccctgtccctactaaaaatacaaaaaaattagctgggtgtggtggcgggcgcctgtagtctcggctacttgggaggctgagacaggagaatggcacgaacccaggaggtggagcttgcagtgagccgagattgcgccactgcactccagcctgggcaacagaaagagactccgtctcaaaaaaaaaaaaaaaaaaaaaaaaaaaaatctgattctctcgtattatggcataatcaagagtaacattttgaaaaaagtctaggagttgtcatttagaatgtttaatcttaatgctcatcacattgactgaagcacagagcttagctatctacattttcagagagagctttcttttagtactgagcaccagggatcgtgtatttcggagtgaagataagtcagaggaaatcaatgtctgagctccatgaatcacacatttcaatgttatgagcgcatgggtatagaagacacgaacttcaggtttccaaggtattccattgagacagataagggagtcactttaattcaccacatgggttttgatacacattactgataggtatacttaaaggcattgtcgtgttgtataaaggttatgggttgtggaatatcacaaa

SEQ ID NO: 31765 - DNA, 1029 bp, Homo sapiens
taattgtggggtgctcatagtggagttggttatccgtagttcaagaattgggagaggaagtggaaactcacaccagaattttattgggggcccaggagtagacagacagttaatttagagctcataggcttttggtctttaagcaattgcaatttgaatcagtagctactttgtgtattatgtagaaagcttcatgtcaccctggtagtattaatcaggtgttttcttttggccatggcagtatcttcttatgttcacaggtacttaagatgttttctgccagtcatagtgtagtaaacatttccaaagtgtgttctatggtatattttttccaggagatgcttggagtgtaaagatcccatggtcacataaatccggaaagcactgaatactttgtttcccataagagaatcccattatatgttgatgtattaaaagacctgagaacctggtgtaagtaacttagttcaattcagtatttcccaaatttactagactatagcatcctttttttttttaagaaaaaaaaaatcttaatttttttcctttaacatgtgcacaaactgacttctttccacatttatttatcttactcaaaataagagatatggacaacttctgaaattgtgatgttataccacataaaacatactttccaatattgctacgcataaatggtactgataagactcttgtgtactgaaggggctacacatgcagacatttttgaggattggagtaactgagaagtcatttagaacaggggtccccaatcccctggtcatggactgggaccggtccacagcctgttaggaatggggccacacagcaagaggtgaatggtgagtagatcagcagcagcattagattctcatgggtgtgcaaaccctgttacgaattgtgtatgcgagggatccacattgctcattccttatgagaatctgatgcctgatgatctgaggtgtaacagtttgatttcgaaaccatctctccccagctcccttcccattcatggaaaaactgtctttc

SEQ ID NO: 31766 - DNA, 1038 bp, Homo sapiens
tagaaccagccacaaataaaatattccagcaaactgtgtaagaaaaaaaatgctctgggaagcaaatgccgagaaatgttacataggtggccttattacattggaaagaaaagaatgtagaagattagtagcagtagtagtaggaggaggaataggaggaggaaggtgcgtagcaaatgatagtgaataagctctaagtgttagttacttttctaagcactttatgcaaatcatattaatcatattatttaatcctcccaataccttatgagttaggtccccactttatatatgacatagctgaggctcagagaggttaagtaattttttttcccaaaatcttgcagccaagattcaaaggcaggatgtttggctctagaactcatgctggtaaccactatgcacactccctccatgaaaccaatagccaccatctattgatgtacagaatgtagtttgtgtattttttgtgtgtgaataattttgttaatggtaccatgggattttcctggatcaagggcatgatttaagtaagcaatggactaattcataggacccctggtgtcctaataaatcaaaacccactcaagaatacctcagcagtaagcacattaactgtcttcctagatggattgttttaaaaattttccatatctgcataaagtatattacgtacgataatttcacttaattgttctaacttttaataactgtcaagtagtagatgaaaggaaagcagaaaaatggtaaagtgtgggtgtggaattacttcactttttttttttttaaggctgagattgatttagaatttttgtatttcctggaagaatatcctgtggctagtaggaatatttgatttctttaatagattctcacatagtagggcctaatatctagctgattgaattagtattattctaggtatagaaataatgaaactccatagtttgttctttatgaaaatattttatttcaagttatttcttttctgcttgacaaaagggcattgcatttttgctttaaagagaggcttgtgat

SEQ ID NO: 31767 - DNA, 1079 bp, Homo sapiens
agaaagaccatgggcatgaggctaagacctgccactgagatgcttcctcctggccttaaccgtttttttttcctttcttcttccttttttttttttttttttttaaatagcggggctttccggtaaaaaccagaaagcctggtagacaaattctaaaagagcctgtaacctttgattcagtaacataagttccagtcttcattcaaggctgtggaggcaaacattcttctgtgatttgccttccttgattcctgtccaagctggattttccaaccttgtcttagtgttgtgaactatctagtacctagccaataaattcctttttgacttagattcactagaatatatgtctgttgtttatattcaggagccttaactggtacagtggtagtgttctgttcttctagccttgtttcttgaattgttttcttttgtcctataatgtgtttgctttgttttgagtggtgtcttatactaaatcatttttgggatgagaagaaagctgaaatgcaaattgtcctcttcgtctcgctctgcctctctttttgtctgtccctctctccctccccatcagaatgcaaaagaagtgaaaagaatttgtatccataccatcagcatctgtaattcttttgtaaaatttaactttatccatgcaattgaatattcagtgttactgttgaaaaatggcctttggtatcgagatctgttttaagaatgtttgcattttttaatacattatattaggtatctctaaaaatcattttctggccaggcacggtggctcacacctgtaatcccagcactttgggaggctgaggtgggtggattacgaggtcatgagattgagaccatcctggccaatatgatgaaaccccgtctctattaaaaatacaaaaagattagctgggcctggtggtgtgtgcctgtaatcccagctactgaggaggctgaggcaggagaattgcttgaacccgggaggtggtggttgcagcaagctgagatcatgccacggcactccagcctgggccacagagtgagactccatctcaggaaaacaaacaaacaaacaaacagaaaac

SEQ ID NO: 31768 - DNA, 1033 bp, Homo sapiens
ttatacatttatcttttattacattttgttatgaattcccctccctcccttttttctctttttcttttcttttttttttttttttttgagacagggtctcactctgtcgcccaggcagggcccactgcagccttgaccttcccaactcaagcgatcctccagcttcagcctcctggctagctggggccataggcacacagcaccatgcctagctaattttttgtatttttagaatagacggggtttcgccatgttgtccactgatctcaaattcctggactgaagcaatctgcccactttggcctcccaaagtgctgggattacagtcgtgagccattgtgcccggactttgttgtgagtgtctaacgcattttctagaggactgggtccatctatttcacttttttgtttgtttgctattttggccaactccatgcacttgttagtagctttgaatgtcttttcctttgtttttccatttcttttatggtgataatggggattttggaaagtaaatcactctagaaaatatggaaaattttgaagcattctaaattatgagactctattaatggtaattatggagtttcagccaatggaattaatgccaatataacaattctctgtgtacccagtagtaactctggaaaattcgggacaattcaagatagttttaaaaatataagaaagatataatttatgttagatgtgttcattatacaagtaaccagaaaaatgtacagtagggtagaaattttaaaaataggctgagaaatatagaaagtggaaggatttgtagaagcatgaaggacaaatgattagttccacagaatgagatgagcaaagtaatcaatatgtcggggtacattgttaggaatgatggatgtagcatctggttaggagtgacttgtgcaaagctgacaaacgtgatatgtgaatgctagtaagttgaatacaagttgggcacagagaagttggcttcttagtactgcctaaagagaaacatctatgttttgccccggttggtaaagat

SEQ ID NO: 31769 - DNA, 1020 bp, Homo sapiens
ttttaggctgggtgtggtgactcatacctgtaatcccagcactttgggaggctgaggcgggtggatcacctgagattaggagtttgggagcatcctggccaacatggcgaaatcccgtctctactaaaaatacaaaaattagctgggcatggtggcagatgcttgtaaacccaccgtcttgggaggctgaggcaggaggccatttgaacctgagaggtggaggctgcagtgatccgagattgctccactgcacttcagcctgcgtgacagaacgaggcctcatctcaaaaaaaagaaaaaaagtacttatgttttttatttcttgaagttttatgttttatatagatattattgcttaaaacattcttactgtatgctctttccaacagtggaataatctgtatgttaattttgccatgtcttttttgtgatggctctcttttgttgtgtgtggaatccttgaattttttttttttgtttctacttcggtagtatatcttggaaaggtgttggattgattaaggcttgggttgaagtcattttctttttttctttcttttttttttttttgttgagacggagtctcactctgttgccaggctgcctggctggagtgcagtggctcgatctcggctcactgcaacctccgcctcacgggttcaagtgattctcctgcctcaggctcctgaatagctgggactacaggcatgcgccaccatgcccaactaatttttgtatttttagtagaggcgaggtttcaccatgttggccaggatggtctccatctcttgacctcatgatccacccgctttggcctcccaaagtgctgggattacaagtatgagccacggcgcccggcctgaagtcattttctttcgtggagcatttgcctgtgctttctccagttgcctgcctagcagattaagaatgctttaaatatggaatttattggatctcctatgaaatttattggatcatacaagtagtgtgaatttagtgtgagaacctttgtgaaggcca

SEQ ID NO: 31770 - DNA, 1001 bp, Homo sapiens
tcgcgccactgcactccagcctggatgacagagcgagactccatctcaaaaaaaaaaaaaaagaaaagaaaagaaaaacacaataatttaaaattttgatgatacccagtttatctattttttctgttgttatttatacttttggtgtcatatctaagaagtacctatatttaaaacttaaacagagaaaaatacgcgagtaaagaaaactgacaggtcagaaaagaaccaggagacgacctcgtcagataaatcaagtaaagagagaggtttaagtcaggggtagttaattgcatcatatgctgcagggagtttgatgaagaatgggagggataggagaaacataaaaagtaggctgtcagaaagggtcataaatggcttttgacactgggatggagagtggtatgtatagccagtgataagctggtatctgctctcagaattactgactatttaatttatttatttcaccttaaaatgctgattccagggctctgagttgtgtggaattacagttaggcgtctcagagtggctctcctttatgctttatactgtttttcactggttattgttctagatgctttcttggttgcctgctcagcttgagcccttcttgtctgagaagtgatacttctgctccaatggtgggcctttgcagctatgtaagtgggactctcgtattcccgatacatagctgttaggaccatgagtaggactgtatgttaaactgggctaagtagttttcaacaatttaaaaatgatggatggcagagatgcaagtttgattctgtaaggcttttcttctagaaatacatgtaaaactgaggctgagacagccatagctagcctgtggtcattataaaaacagaggggactggcatgtgggaaacaaaatgatgcccactgccagggaggtctgaagtccctgagagatgcaatagccttaattcctggcagctttgcggttctgatttccagactcttgtaaagatctatggta

SEQ ID NO: 31771 - DNA, 1034 bp, Homo sapiens
aaataatactggacaaaatgggcttttctagttatgattgcttatgggaaataaataatatgctaacaggttttactgggtgatttttgtggtgctctgctgagaaacctttcatttttcagatactaaataacgttctagatttgtagtggaaaaatacataacactgcagcttctccttagtggtttgtcagtgtgtatggtgaccagtgttattagttgatggtaagctttcatttgaaacattgtagttttttttgtcttaaatagccattatcctttataaaaaagtttatttaagaaactataaattattgcagtattgagaggatcaatgaaaactttggtggaagcaaatcttttttgtaatttagttgattttatttttaaaatttcaatacttgatgataccaaggaattattgatattgttgagataatgacattgggattatgtaagaagaatttgtactttttgtgtgttttcggtatgtagtggtgaaataggtctgggacagttgaataactatagcaaaatttgattatttttgagtctgggtcatctgtctatagggttttttaattctatttttacttattttgtatatatttattaaatggtattataaaaatcaattagagattaccatgggctggaggaggagcattggggaatgattgtttaattggtgcagagtttctgtttggaatgatgaaagttctgaaaatagacagtggtaatgatggtacagcattgtgaatatacttaacattgatttgtacagttaaaaatggttacaatggtaaattattttattttatttttttgagttggagtctccctctgtcacccaggctggagtgcagtggcgcgatctcggcttactgcaagctctgcctccagggttcatgccattttcctgcctcagcctcccgagtagctgggactacaggtgcccgccaccatgcctgctaatttttttgtatttttggtagagacggggtttcaccatgttagctaggatggtctcgatc

SEQ ID NO: 31772 - DNA, 1049 bp, Homo sapiens
aaattattgtgaatacaattgctgggtcaaaagatctgcccatctttacttttcatttttttttgaggcagggtcttgcactgttgcccaggctggaacccattttctttctttaatgctgtatatattttcttaacctgactattgctggtaaatagaagagtttttaacttcttttgtgtatttattgtgtaaccagtcgctttttgaatctgttatttattataatggcttttcagttaattctcttagattttccaggtacataatcataccatctggagccagccattttttttaagggttttttcatgattaattttgacttacggaagttgtgctagaatgatttttcttaatttcattgacttgaaatacaatgttttgatatggtacctgtgttttatctactcagctctcaaaagggttttaaaatatctggaaaatcactctaccaaatgatctctaaggacccttctagctcagaaattttgtgattctacttttatgtcaaaagattcctggtaatgtacgtagctctcttcctttataattattgctgtctagctccaccccccccaagtgattactctgcacttttatttccttagaacttgaagattttttctgtgtggtttagcgtaaattaaaagagaaaactgacagactacagagctcagactgtgcaaaatcacatttcatgattttcttccggtaagatccttatggtgagtttactcatcaagctatgttcctgccatggactacttaaagttccccaagccacattttgtaattgtcagaactgaggttaatagaagtcattgggaagtgataaatagacctggatgcagtgaagataggacagaacgggagaggtaggaatggggaagcacctagtatgaactcttctttctctggccccctttctgcttcatgattctctctctggactccattgattctgccctcttactgattttctggcttcctgtttattttctagatataccttgtctcctttctttcagaaaattgctccttacctc

SEQ ID NO: 31773 - DNA, 1034 bp, Homo sapiens
ccatattaatctctttgaaaaaggtaatcatctctgtggttaatatcaaaaacagtgacttttttttctgtgagaggagaatgaaaactttaccttgtatagcttgattgcagatacctccttattaataatagccaatttaggaaaaaaagtcattaccaaaaaaatatttagtgccctggattatgaagggtgttttaaagctttatattgataattgatactcttcagtcaaagtagatatagggccatatttgaagatgtttgacttaagaggaaatttgtatatatatttcaatattaattccttgagaactaacttttgcacatgcaggcatgaatttattttcattggtcattcttaaaaaccacacacacatacatacacagctgcatttattttttaatgattatgcattggtatgactggatgtagtgtgttgatttcaaagtgtatgcatttcaataaaagcaggtgcagagggtatggtgtgagtgtggagtatgaaaatacacatgctaatgcgtatgtatagacaaggagctctgcagagttaaatcacacatcacacatttgtgtgcacctagtacaatgtgcagttccaactccaacttttaaaacattaaaaaaccaaacaccgcatattctcactcataggtgggaattgaacaatgagatcacatggacacaggaaggggaatatcacactctggggactgttgtggggtggggggaggggggagggatagcattgggagatatacctaatgctagatgacgacttagtgggtgcagcgcaccagcacggcacatgtatacatatgtaactaacctgcacaatgtgcacatgtaccctaaaacttaaagtataataaaaaaaaaattaatgtaaaatatgtacatacaaatacaaagttacatgatagggtcagatgaagatactgtttcttataaacggcattaagaccttaatatgatagaaaacacttgtatgaattgagggttattttagtcattgaagctctgtataact

SEQ ID NO: 31774 - DNA, 1073 bp, Homo sapiens
gcaatacaccatacacattttactgtacagtaagggttttattttgttgaatatgataaagtactccagtagcaagtatggctacaggggccctaaatattatagttagtagaaagttcaccctgtgggcaggtaaattccttttatagagcaggggccaggaggagtggaactggggagccaccaggattttgcctggggtgttgaataagccctgcctccaatgctcttaggacgattgtctaatacttgctaagcaaatgtccatttggacttggattcttagaaccagaagggattatccttcctaggctcctccttttgataattgaaggagccagtgtccctggagattaaagtcacggtgcaatgactaacaagaaagtcctgacttgctaagcctatgtccttgcctgacaataaattttaaagtgctgatttagctacttgggaggctgaggcaggagaattgcttgaacccaggaggcggaggttgcagttagccgagatagcaccactgcactctagtttggtgacagaacgagactccgtttcaaaaaaaaaaaggaatacttacatttgggtacaataatgttttctttgatgatattcataaggttttcttcagctgcagaaattccataagtgggcttagtttgatttacaactcatacctttatttctgttatcactttcctatcataaatctgcccaaatcgattgacactaatttattaaattctttgtaccatgtgtttttttatttttgtaaaatgttctaagacataagaaacacttagctcattataggtctgaggttagatgttttgttgttacttttgtttttttcggtggatgtggttagataagttggatggtgcattctgaactgcagctaaggagagaataaacactgatttggggacaagagagcctgtagtcatgaaacttttgaggatatggatttgggaggaaaattgggaatttaaaaagtaaacatttttatttataataaaacattaacattttgatgcttattttccctggagttttagaaattgcatttaaaaact

SEQ ID NO: 31775 - DNA, 1069 bp, Homo sapiens
ggatgtattctaaaaatgcagtttaattgtaggagggtctcagatactccaaataacaaaattactaaagtctttttgtgggtttttattaacattttcatcttatttttcatgtgcatggtttctgtctgataggtgctaaatgaaaattatggctgagatgagaaaacactactaagaaaaagggattgaatggttttatttgtttaggcgattttgccagaataccttcaagccaaggaaggaatcgccagtttgcatattgctatttttgctgtggtctccccaagttgtcttctgatccccgacgggttctttctctggtataaaacagctgaatgaatgacaaaaatattggcaagctctgcggcttgtttttcatgcctagcctattggtacctccgaatgagtttgtgagtttttctaagtaaacctaaagggttttgtcagacctagaatctcttgtgaacagttcactaaagctttggtgaagactcacatgtagaaagatgtagctgttttattgccggcttttgttcagcagaaacaagcaaatagagaatctttgaagggcctctctggtgtcagtaggaaatcctgatttttagctacggttggtgtgcactaagtcatcttcagaagttggtaggattctgtgagtccagaggacagagcttatagaggcattagtattgtaggactaattgtggatcctgggtgccctgttaaagtaacccttgtcatcatttatgctaaagatgatacccttctggcagtttgccacagtacaattcagatgcatctgcttttaacccttttccgttatcattggaagtctgacagtgcgctgcataaacaccttgagtaccacagcattccgtaatatcaatttctagaagaagcctctttctaatagtagtgtggccggtgcttattaatcatctagctactgagttactgtattggattaaaatatataaagagagagcacaccaaatctatgcagattcctttatcctagtatgtcagtttccttttctatctctcatttttaccttatttactgtaa

SEQ ID NO: 31776 - DNA, 1021 bp, Homo sapiens
aaaggtgggaaatgtagcctggatcgggattgttaggtgagttcacatacacctgcatgatcacactcgagtgattttgatctttagcatcttgcaaattggtatccagcatcataatggaaagtttcatcctctccctcatcctgttcaatatttttttcaataacatgaatatgagaaaacatataattgacaaattcgtaatttataaatgtaaatcttagaaggaataggtaacagtaaatattggaactggaataaaaaatgcctcacaggttaatacaagggtagggggaacgtcctataaaattaagcccacatctacttcttgacctaacaatttcactatttggtattcacataagagaaatgaaagcatatgtttacaaaaagacctacaaaaaaaatgtttatagcaggcttattgtaagacccaaacgtagaaactacccaaatgtccactaaacttgagaagataaacaaatcgtggaatattacaatagtatactcttcagcaataaaaaggaatgaacttctgatacatattacaatgtggatgagccagaccccaggaagtacaaactgtgaccccatttatatgaaatcaagtaacacaaaacgaatctatggtgacaaaaatcagaagtggttttctggagacagggaaggagaattgacctgaaaggggcacgagggaacttttcttaggtgataagaatgtcctgtctttagggtcgtgattatactggtgtagacaattgccaaaagtcatcaaacttagcacctaagacctatgctttttaatagagacagggtctcacaatgtttggccaggctggtctcaaactcctgggctcaagcgatcctcctgccttggcctcccaaagtactgggattataggcatgacccaccacacctggcctgactggtgcattttcttgtatgttaactatacctcaatttttaaaaatgtttttcgttttgagatggtgtttcgctcttgttgcccaggctggagtg

SEQ ID NO: 31777 - DNA, 1044 bp, Homo sapiens
aatcccagcactttgggaggccaaggcgggcagatcacgagaggtcaaggagatcgagaccatcctggctaatacggtgaaaccccgtctctactaaaaatagaaaaaattagccaggcgcctgtagtcccagctacttgggaggctgaggcaggagaacggcgtgaacccgggaggcggagcttgcagtgagccgagatggtgccactgcactccagcctgggtgacagagcgagactccatctcaaaaaaaaaaaaaaaacagtttctcagtccatgtaaccacctttcaaatgatcagtagccatatgtggctagtggttaccatattagacaattgaggaaatattgaacatttccatcatcacagaaagtacagttggactatgggccaaatctagcacaccacctgcttctggatggtcttcaacctaagaatagtttttacgtttttaaatagttgaaaaaaaaaaaaaaaagcaaacatttgaaatcaattttaatgatagaagcactaactttgaactccagtaaagtacctacattatattcttgagtttgcctcttggcctacaatcctaaaatatttactttctggtctttaccaaaaaagtttgccaactcctgctctagaccattgagtactttacttttgccttaaagatcattctggtctgacactctgatctagctttgatccttaccttcccttcatccccaaagtcaatcattatcctaaaatcagtgttgaattgtttgtatttttagtgttcctatagtcttgctgtcatatttgttcataggcttttaagtattgttttatatcttaacattttataggaatattgtacacatcattttacaactgacttttaactcaatattgtttttgagatttatccgtgttggcagatgtagattattttcatcattgtacagtttattatataaatcagacttattcatttcttcttttgagacacaattcatttccactttattatttacaaattagtgctgcagtgaatattctgcatctttgta

SEQ ID NO: 31778 - DNA, 1020 bp, Homo sapiens
tttggatggactcctaacaagtgtcatatcaatagggtttctctagaaattttgtcttgggagaaattgaacagtttcaatattcagtgtggcatgaaagggtagagacataagcccaataactagctttattaggtgtgagtatgagaagggtttgttggtctccccattcagttagaaagaccttcactcattcctctcaatatggcaggctcccttaactcctgttgtgtttgatgtcctgaatttagagcatctctggtacaatatattctcagaataagcttctaatgtctagtgctgttccgggacaggtggcatccaagattcacaagaggaaaggagggatggaaacataccagcacattgtgcagacttttaaaacaccacctttattttcagcagcagtccccagtttaacttctgaggtacagtaagtattttgtttgttttatcagcagcttagatcagaatatttggcatcccttctgccagcacttgaaaagcactttgaaaagagataggagagctgatgacatttgtgttctagcttccaaaagtttgttgatattagtccacagttgtctgctttcccattttgtttattcctgtttcttgacaacattcagaaaacttcactatgtttaatttttttcttattaaaaaatattttttcttagaaaatttagacagttcatttgctttcatcttttactctagttgaaaatttaccaaactccactcacagcttcaagttatgtagggatagattattcatatatctattactgttaaaataatattcttatgtccattgacaactagactttcctagtcctcaaaggatacaatttcagagagacaactacatgcaaggtaaataatcacagatcaatagcatccttatatttcagcaataaatgcatagaaaatagtatttatttgtttttgtttttgttgttgttattgttttgttttgttttgttttgagacagagtctggctttgtcacctgtcgccc

SEQ ID NO: 31779 - DNA, 1052 bp, Homo sapiens
agtatgtgattcccctagaaaactggagctctggcccactttcatcctgccagcaaggcatggccttactggagcacagggagctcaagctcaatgtacagacaggaaggaagacagtagtggttccaagatctgatgagttcactgctgctcctcagagaggcctttgacagttcttgctgcccattgtctactgtcacatcgtcttgtgtaatctttacgggcactatctgaaaatctggtttggggtctcttctcctccccgagctttgactgctgtattctgtcacgcgcagtgtctggtgtatagtaagcattcgtgtaaaatgttcctattggcacatactttttttgtttttggcccatacatttaacagacacttagcagtcacctttttagtattgtgaataatgtgaacacaacaattcctgttctcatggatacagaactcccacagctccagctgtcttgttttgaagtactatgttgcaaatctctcatacatcaagtgtagccaaactgaaatgcagactcattgaaaccagtctgtatcctagatgccaatttcccaagtccatcttccattcatacctgagctaatttttttttttttacagttagcaaactacagagcatctgcattttttttttttttttttttttttgagatggagtcttgcacagtcacccaggctggagtgcagtggcgccatctcggcttactgcaccctctctgcctcccgggttccagcgattctcctgccgcagcctcccaagtacaggcgcacaccactacgcctggctaatttttttattttcagtagagatggggtttcaccgtgttggccagggtggtcttgaactcctgacctcaagagatccacgagcctcggcctcccaaagtgctgggaatataggcatgagccagcacgcccggccgagcatctccatttttaacaaaaatgcattaaggagtaaggtgaaatcctaatatccagtcacacttgagaatcagtttaatgaagcaggtttgttaagtggaacaattttc

SEQ ID NO: 31780 - DNA, 1028 bp, Homo sapiens
attcagctctttgtttgcctagttctggaaataacttcttataataagactaagatataaaactaaaggtcaaaactaaaggtcaaaactgtgtaagtaaaagaagctactgccctttaagggaaaaataatacatgttaatttttgcagcaatttcaattgaatgggtttccagggaaacaggtatctgcaatgggttcatcccacttaatatttaagacaaaacatagggaatttctttcttgttaccttttccttgttatcttacacacgacatgctcattcttaaatttcctttgaagcgatcattctatgcttgagtcttatttgttctcccaaaaaaagaaatgaatgcccgttctatgatttttttaagactttttgatatcaggaatataagcctggtgatcactactaaaaaataaaattatgcaaatcaatctgacccccttttttaatgaatcaaaagctatttgttattacttgttttattgaaaatctgcttactttctgagttggattctgtttctaagagttgaagtggaaaaataaaattggtggcaaaggaccactaagtcttcaaggttgagtaaattgtacgttttcttggaagagctcctcaggcagacctataaattcctttttatattttgttctaaattaatctcaggtttaccaaaaagttgtaatagtgcaaataattcccatacccctcacctggattcaccaattgttaacattttaccatatttcttttctcattctctgtatgtgtttgtttgcatatatacatattattattatgtcatttgcaaaccatatgagagtaagttataaacatcatgcccttttaactctaaatacctgctaaaactaaggaaattatcttaggacaccatagcacaattatcagaattgggaagtttaacgttgatgcctactattttctaatctacagactttatttacattttacaaattatccttcctgccacccccttggagggggagttgaggtgaggaccaga

SEQ ID NO: 31781 - DNA, 1048 bp, Homo sapiens
ctttttttagaaccagatatgatagactaattaattggctcctaataaatagtgtgcctacctaagtgattattaaactctatcagttaattgtaggaaagtaaagagacaactgtttacatccagatagattttagctctcttgagaagtttcatcaaactccaaccgtacgtggttacagggttgtgtatcacattctgcaaggtacagtaatgtgccaattcaaagactttgagcaatgggctggaggcagagggtgtaagcctaacactttgtttcttgacccagtagccaaagtatgctatgccttagaaaaaaaaaacctgagatcagctgttctgatcaccttgcaaattttgtgatgcagccaccaccattcctagagtcgattttagccagatacatgcaggaaaatacaaagaatatttatgctatttttctttgggataatttttcccttgttccccagcccatttataattcctgctttcagggaatctatatttatgacaacccaatcatcttggcctgtgcactgcatctcactgtgaggaaccagagccctctgtggaaggcagctttatagaggagaccacactgttgacagattcctgcctcctccctgtgggtggtctgaagcaaggaaatctgagctttccagcgcaggcctggcatgtgccaggaaatttagattcgggggagctgctatctattacagttatgaaccttctgaaaaccagaattgcaggtaaccagtattccttctgcatgccaaagcaaaccccgggcccttaatcttcaaatgactggactattaatattaaaatggtttctattatatagcctgggtaaagatttgttagtttctgaggtaaagcaacaacaacaacaacaaaaattgaaggacttttactttgaaacatgtctaaattagcaagaggaggaagtatgtttgttatctattggaagaaacacttttagaagcccattgggggaggagatagactcagatttcttgggagtcagcccagtcttggaaaaaaagtt

SEQ ID NO: 31782 - DNA, 1063 bp, Homo sapiens
acaccagacctgtaattatgccaaaaatctatccaagccagataatattttgttttttcttattactacttacagagcatgaagttgtggaaagtgttggacttgcaaagctaattttagtcccccagtgaaagttctgaggggcaactcaataaggtaaaattaaaggtatatgaatcacggatttcagagtttacagagacatttagtaagcatctgatctagccatttagctttaggatcaaccccattttgctggtgaattagccatggcttacaacaatgaaatatatatagacctacgattcaacctggagatctgtctggccctacagctagtagcactgtgcctcgtttgaaggagttggacgcctgtcttttgccttcctgcaaggtgtttttttcattgcatcatgctattgccagtctaccttgaactctttttgagtgtttttcataagcttttgctgtttcatttatgtttaatttgtgtggtatcattcaatgactgtgtccttgcaacagatattttgatgtactaaatttgtacacatacctgagttgggaaaggagatgcattttgttttgcataaaaaaaatctaggtctcatgtttacatttaaaatatcaggctttgtttccactaaagtggtaatctttctaaaaatgtccctcacattgaaggacatccaaaaggcagtaactcattagaaccttgggttcagattacaaatgtgtttggctagctcagtattgaagttcaaattatcttggaattattttaaatatttgtacaggaacactgattagtttactaacgtgttgcctatccactaataaccaccttggcctatggtcattaactcctagggctcaagcaaactctcagcaaagagaatttgcttcagtgtttgaagccgtcatttggtgtcttcaccccaggacttggaagtgttgactcagaaaaggaatttgaaaacagtttttataactgcattttattctttgagcagaagagttgagagaaaaaagttctggtgaggtaacgtcctcccctaccttc

SEQ ID NO: 31783 - DNA, 1073 bp, Homo sapiens
tactcgggaggctgaggcaggagaatcgcttgaatctgggagacagaggttgcagtgagctgagatcgcgccactgcactccagcctgggtgacacagcgagactctgtctcaaaaaaaaaaaaaaaaaaaaaagtacatgtagtggcttgtagctttcagctgtttcccaggaaaatcagaaaatcttcaactgaaatatttggtaatttagacgtcattagtaagtggataataaataattaaggttagacttgtcatagctcatatgtatcacaaggaaatatttatggagttttgagcctgtgggtcacttttcctataacaaaacctgggtgtgggaaaccaaatttttaaaagttatattatttacatatttttatttcaatttgaagaaaaatttgtctaatttttagaatgttttcctgcaaatataacagacttcataatgcacatttatgaaggattctgaaacaatagcaaggaaggagaaagagctgcatggattaatcctgagctgctgcagcacactgactgcatgtcagtggcactttaagattgcaacattttgtttggtgaccttcacaccagttgactgtatgcaccttaatctctctctcaaaaaaaagctgagcctactatagattggcatctttttctttttaaccccagtttttcatttacctacactggtttacctacacctggtttaatttgtacagcagaatgaagttctttattacaaagctcagaaactcgtctttgagtttttaggaacagtaagtacaaaggttgtcatgaattgagactgaaagacctcatagataaattgggtagtacatttttaaagtaaagaataaataacacttcagaaaaatgtagaatacgttcataaatgcacaaatggagataaaatgtcactttttgtaatgaggtttctttcagactttgacactcgtaagtaaatgttcagaggaaataaacgtcagggcatatcagcttttgtgagggttgccaatgtgtaaatgtgaggtctactgtaaatcgtgctgtccatttacctgcctctctgca

SEQ ID NO: 31784 - DNA, 1031 bp, Homo sapiens
gcataaaacatgtatacagttttgaattaaattttagagatacatagcctctagcctgcaaacccctacaattgaccagtgaggctcttatacttctggggggctttacaactttccaggcttttggaatcttctgctaaaatgcaaatcttctgctaaaatacaaataaccctgtaagagttagatgaagttacataaccttatgagagaacacatgaagtgcttatcaactaaaattgtgacgttttgtctggagcagaatcttagtaaatagaaactaagattcctggaagcacttcttacaaattttaccttttccccatcttttctatgaccaggcagttctggatgaatcctctaaaagttttagtacctgacactcagtcataactacagcataactctggagctacaatctcatagacaaataattctcaagatagccaatcattacttagtgaattataaagttaagctttatgttctcttccctttaattacagtagattaaaggaatgaaagaaaattgtttaaatattagtctgtacaaacatgttaaggaaatacaaagaaatctggttcaaaaataataatcatgaatattacaaacccaacacagtggtttgaatgtatcctgtcacttttcccattgctgataaagataattgagggtaaactttttcagtgcaatttgtctgatcatctctgaactctgtgatgttcctgatgatgtttgctttataatttaaacccatagattcatttacccagtatggtatgaaacaagaaaaaaaataataaccttctcgtatttttagaaagatacatctcggatagataagcctgtcactttaacctttccattttggtgtttaaagacagagttcaccagataatacattctcaaaagccatttagaaaatgtgctaaataaaatgtccttaatgagcatagaataataatcttttagaggaagtggaagcaaagaaaagaggacagcaggtaaaacattaggcactgcctaacccat

SEQ ID NO: 31785 - DNA, 1033 bp, Homo sapiens
taatttcagaaataaaggtgttacatttttcaggctagaacttggtaaatatgaaaccaccaaggtggtgaattactgtatgtaatctttttcctccaaaaaataagataactggtcttacacttaggttagcattatgattctaattttaaaagcaccattatttgtaatacttcctaaacataagcgaagtttaaggagtgatagttcttaatactagtctttacttcctttcataacttttaaatctattgaaaaaaaatctagaaaccgaagaagacatcttttgatcaggattcagatgtggacatcttcccctcagacttccctactgagccaccttctctgccacgaaccggtcgggctaggaaagaagtaaaatattttgcagagtctgatgaagaagaagatgatgttgattttgcaatgtttaattaagtgcccaaagagcacaaacatttttcaacaaatatcttgtgttgtccttttgtcttctctgtctcagacttttgtacatctggcttattttaatgtgatgatgtaattgacggttttttattattgtggtaggccttttaacattttgttcttacacatacagttttatgctcttttttactcattgaaatgtcacgtactgtctgattggcttgtagaattgttatagactgccgtgcattagcacagattttaattgtcatggttacaaactacagacctgctttttgaaatgaaatttaaacattaaaaatggaactgtgttctctgtctctttactgaagataaaggtgtagtaaaagctcccacacacctttaaaataaatatattttattctttgccaggagactccatggaaaaaggtaaacagtatatgaacatagaaagcattgttaaacaaacaatctcaatgtacaaacagagccagtgaaagtacatcacagacttgctaatatatcaaaaaaaaaaaattccactagtgcttaaatgagaactaagaaactgacacttgtatctgttaaccactctaccaca

SEQ ID NO: 31786 - DNA, 1135 bp, Homo sapiens
ttgcctttacattgccgccaagcagagagaaaccatttcattatttaaggcgactcaatttttttttttgaagatagagttttgctcttgttgctcaactggagtgcagtggcgcaatctcagctcactgcgacctcccgggttcaagcgattgtcctgcctcagcctcccaagtagctgggattacaggcatctgccaccacacctggctaatttttttatttttagtagagatggggttttaccgtattggccaggctggtcttgaactgctgacctcaggtgatccaccccgccttggcctcccagagtgctggcattacaggtgtgagccaccacgcccagccaggcaactcagtttctaatcagctataagaaattccatttatataggactctcttcagtttggtttgttggtaagtatattgacctgtgaaatggaaatttgcttactaggaaaaccgtcttcagatacagtccctaagcccaagagagccccaaaacagaagaaagtagtagaggctgtaaactctgactcggattcagaatttggcattccaaagaagactacaacaccaaaaggtgaggattatcttcttataaccctttaaacatatgctgtgtggaaaagattgaattttttctacctcattgaatttagagaggctaggtatctattttgttttaaattgctttactcctcagtaagcagtgtgtctaggaatcagtgctgaatatagtccaaaggaggcatagcaatttagttcagtcactttgttttacaaattaaaaaattgaggctcaaagaggttaaataagaatccctaagaatggtccaaattctcccctgcagccaactcactgaaagttgttattaaaaagtcagatcagtactccacactaactgtgacacttatagtaatgggctagatccaggactcttaggctagaactttttttctcacctaagaaataactgtattcagggccacacaaggaacagcaccagttctccatggcatcccctctttaactccagaatctggaaagcccttgaagatgttttgtaaaatatgtttgtaagacatgatatgagggtagctcatgctgtgagggtagctgctctacctttta

SEQ ID NO: 31787 - DNA, 1032 bp, Homo sapiens
ttgagacagagtttcgcttttgtttcccaggccagaggctcaccgcaatctccgcctctcagattcaagcaattctcctgcctcagcctcctgagtagctggggttacaggattttttaatggtatataaaggcctgcctgagctatagaaacttattttgcaggtaccttttagctagtggtctggaaatccctctgataatcaaaagctgccttcttattttttatggttgcttctaagtagctgtcatttcactgaatgtactggaaaattaagagttacatgcaatattatttactatagataagtgaagtaaaacatggtctgatcaaagtcagctgttaggacctcatcagaatcactgtttttaaatttacctgatttgaaggcgctatctgttgattgaaactatctctaaaatatgtgatgtttttatttttactcgtggcttgattttctttttattatgtagggtgatcttgatactgcagcagtaaaagtggaatttgatgaagaattcagtggagcaccagtagaaggtgcaggagaagaggcattgactccatcagttcctataaataaaggtcccaaacctaagagggagaagaaggagcctggtgagaaatgattatagttttgcatgtgtgtgagagaaaaaatatttgtatagagtattactagattcttttgattgtgctctttttctggtagttgaaataatgccttcaattttcataaacgtttattttgtaatgaacttttcattataacaattttatttttactaatgacatttctataaatatggatacataccttattgctattcttttgctttaggtaccagagtgagaaaaacacctacatcatctggtaaacctagtgcaaagaaagtgaagaaacggaatccttggtcagatgatgaatccaagtcagaaagtgatttggaagaaacagaacctgtggttattccaagagattctttgcttaggagagcagcaggtattgtaacacatttaatattactgtat

SEQ ID NO: 31788 - DNA, 1928 bp, Homo sapiens
gttatctaggtacttattaatcatctatcaactcaacaatagcattccgtatttggctaatgtggcttaatcaaatttatagtttttgtttatataatgaagcatcttgctttgcagttttaatttttatcttacttctgaagtacacgtaaactgtactttgtgtatatacattgttttgcttacaaattttaattataaagctttttttttttttttcctcttttggttaccaaaagtaaactttttgctttatggagtgtcatggttaactcagtcattttaaattaaacaacttagataaaattttatttaatggctattgttattttaaaaaatttaaaggtgatatcacctaaaataacttttattaaattcattgtattttgaaatttaatattagcacaaaataatttttttgttgcagctgtttctatagacaagggcctgatgaataaaatttcagcaaaaccctgacgaaattcttactctaactcaccaactcttaaattcttaagtggactttctctgagtcctgacatgaatattctggctttagagaagtttttattaagaattcaccctcagcgagtgaatgtaccttaacatatttattataactgtaaaataattttcataactggtatttattttgtatttcagattgttcattcactcaccagtataaaaatctgacaagatgcagtgataaaacattaattctactctcttaactttaaaatgtggtatcctctcattttgttactgagtacctgaggaaatcagttaatttttcatcagattcctggataaatagggatagtgtataccattccttctgaagatcttattgtgcgtctttagaaaattttaaactttttataaggaaatatatttttataggtaatccaaaataaccccaccatcctgaagatgtagcatttatagtgtagcacttgtagaattttaaactaattattcaataaaattcaacattaatttgatactatacaagactttaatatacagtttgttattttttacaggcagcagaagaggatgaaacacaaaaccagcatgatgatagttcctccgattcaggaactccttcaggcccagattttaattatattttaaatatgtctctgtggtctcttactaaagaaaaagttgaagaactgattaaacagagagatgcaaaagtatgaacttttgtgggttaaatagtttgaaactatttcagtgttatctgtatctttttctttttccaaaaataagtattttgatttatccttcatatgttttaaaactattgaatgtttaaactgtacttttttattataggggcgagaggtcaatgatcttaaaagaaaatctccttcagatctttggaaagaggatttagcggcatttgttgaagaactggatgtaggttaagtctctattaaaatttatttggaaaagtcatgtttatgaacaagaatgaaattcttttaagtgatcttaaagttttctttaactctgtgaaggttaatatgtttataagttgagttaggcttaagcttctagttatgtgaagttataaagaacttcttgtatggaggaatttaaatgctatgaaattgaaatttagaataaattaaatctgctttcaattagttaaaaatttttaactgagttttagattaaataattgattcagtttaatgttttcctggaaagaggtaaggctaatatgtgtgtataattgaatgtaagtactttgattttaggagtagaatgatagtctctacatttataacagacatttcaatatttgattgttataacatagttttttccaagtagaattctaatttaaaaaataaaaaaaatgtagagatataaaaagcacaccttttctaaaattgcccaattaaaatattgga

SEQ ID NO: 31789 - DNA, 1031 bp, Homo sapiens
tgtgattcaagttccattccaaattagcttttagatctaaaaaagtaaaaaaagttcagcagtagtacagtggctgagaaaaagtgccataatccgctgagaaaggctgatggaagaaagaaaaaggatagagaggagtttgggtgactggattatagcacaagtaaatgtgaaagcgagagaaaggggacaaatgcgtatacacagaatatatgggggaggaaaaacttgaacatttttaaacttagcaatagaatatgtatgttttcagtttggggaaaaatcatttttgtaggtggttttatggttactttaagagccctttttttaaggcctatttttgtctttcaatattattcctaaatacttttgttgtgagaattgaatttattggcttgcagtcaccaaagaaatatttacagaaatgtgcttaatagtcttagttctgtttaatggtttttaggggtagtctgtgttcacacacatgcattatggttatatattatggttattttaagtattgtagatgttatataagttaaaataccagtacagatctatatgatctgcaaagtatatgtgttttgcttaggtactttttgatcatatgggatgtctgaagaaatatgaaactgtgcaagacattctgaaagaattctttgatttacgattaagttattacggtttacgtaaggagtggcttgtgggaatgttgggagcagaatctacaaagcttaacaatcaagcccgtttcattttagagaagatacaagggaaaattactataggtaagatacaacctttaaaaatttgaacattagttaaaatggaaaaaaaactttattaatagaagacatttttatcagtagaatataagcaaatacaaattgaatctcttatcttgatcctaactttatttttccctcacatagagaataggtcaaagaaagatttgattcaaatgttagtccagagaggttatgaatctgacccagtgaaagcctggaaagaagcacaagaaaaggtaatca

SEQ ID NO: 31790 - DNA, 1048 bp, Homo sapiens
ttggttgataagtttattaatatagcatttctctttttatattttttccttgtaatttatttgttaaagaagttgggttgtttgttctgtgtaatattccacattctggattttgttaattatattcctctagttacatttaatatatagtattttcctttgcccttattttctgttaactgatggttaaatcagaggcgtgatcagatttgggttacatttgtttggcaaaaacatttcataggtagcgttgtgtgctttcatcaggaagcatctaatgtctactttgtctttagttgcttattaagattgatcacttagtataggtgttgccagcttgatccatctattacaacttttccaccagctttttacttgatggttttaaacagacattgatattcatgactcacttttatttttaaaattgtgcaggattgggtactagtacagctaaagaagcaaaggaatattttgctgatatggaaaggcatcgcatcttgtttagatatgctggtcctgaagatgatgctgccattaccttggtaattaagttaattttttaaaagcttttgttagccatccccctaccttctattcctttcctcccagtcctggttccctatgataagtctcttttgaatgctcaagctagttaattttaatttttcccccagatgatgctgtgcttgtataaacttctttaattgaaagaccttagtttaaatgtgtttttgattaaaatattgtaaaataacctaattttccagaaattaagaattagttattggccacttatacattttaattttgtaataaaatttattttatttttaatgtgcaaaatcgttacctggaatctttcaggcatttagtaagaagaagattgatgacagaaaagaatggttaacaaattttatggaagaccggagacagcgtaggctacatggcttaccagaggttagtcttaaagagtggtgacctggggaaagaaggagagagagactagaattcatgcagtaataatgataatattgctatataactt

SEQ ID NO: 31791 - DNA, 1072 bp, Homo sapiens
tgcatagaatgaagatgtataaaaaatagtagcattaaatcagaaacatagctgttaaatttatcctgtttttaccagcatgccttttgtaaaatattacattcatcctttgtaatttcattagtaatttagcatgattttaagatttttctctagtaaacataaaaatctaataattcaggtatagtcttactagtaataatctaatttcagttaagattagtagtataataaaactataatttgtatttggttataccatgaagttaactatattttatatgaaaatgttaccatataactgtgctgtcgagattatttatttttttctccatttttttttaaatttggattatttctataatgaatgcattcttgagaagttatataaggcatacaagacataagttacaacttatacagaagtttaagatggtttcaaggacattttggctgttaagattccttttccttatttaggcaattgtcagttaaaaaccatatctcccttcatttattatgttttaggagagtaaggagtaatagacactgaatgtttgatatctttgaatttttttcaaaattgaacaactctaattaaaactaagaaagaaaggaccttccttaaatacactcttgatgaacatagttgcaattgtttagttcttttatgtggttctggccatattagtccaaagattttagccacattaatgcaataagattgaatttaagaaatagtgtatagcatgccatcataacaaagtgataaagaagtgagctaagccaggtgcggcagctcacgcctgtattcctggcactttgggaggctgagtcaggcagatcccttgagcccaggagctcgagaccagtctgggcaacatggtgaaaacctgtctctacaaaaaacaaacaaacaaacaaacaaaaacaccaaaattatctgggcatggtggcggcatgtgcttgtagtcccagctactcaggaggctgaggcgggaggattgcttgagcctgggaggtcaggctgcagtgagccatgattgtgccactgtactctagcctgggcgac

SEQ ID NO: 31792 - DNA, 1117 bp, Homo sapiens
caagtggattcatgtttgattttcaacataaaatggaataaccaaaaacaagactcattgcaagtaccggtttaccagcaacaatttgagattccttgaaatacagctgctttgctgggtatctgtgggaatgacggacttcagggtgcttgctgtatggtgaactgaacttgagtgaatcttagcagcctcagtagaacaataattttaagagtgtattaaagaagagcttcaaacaatatagtccaaactgaacctctagggagccatagcagcctgacatgtagtaatcaaaaaatctttgagcaaaatcttctgtagaatattagttacataaagccaacatgcaaattgttctcagtcctgaaaatagtggttacagccacaacctaaagacaagttctatttttatatattgtgaatagtatggcttatgcctaaaccgtagacacacaggtcttgttctcacgcaaagggtgtatatgctcatatgtgcttacaacaaggagcaaggatgggtcactggtgggaggaggggttgggtggtatatatagaatacaggagaaaacctccatgatttctgactttactagcactcctgctaaagtaggatagcaacactcaccttttagagacctacacattacaaaaccgagcttacagaatgcacacaataaatttaaaaaaaattttttaaagccaacaggcaaaaatatgtctatcaaataactcacgatgttaggaacaatcaacagttgtaaaaaaaattttttttctctacactaaacaagtgaatgtttgcttttttttttccttttaaataaattatagttactgattgtgttcatattatacatagtgggatcagagttggaggttttttataaattctattgttgtggtacattttaatttactaaactgagtatacatattcttggtaactttctaccacctctaaaaatgagtctttgacagaatatattgtgcaaaaaaagatgataggaattttctgtataaatagggtgttttatctccatatactgttctttaacataagagaccttttttattttgctcatagtatgtttgaatgtttaaacatttaagtattaa

SEQ ID NO: 31793 - DNA, 1021 bp, Homo sapiens
gaaggcgtgcttcagacactgccgctcttctcgtcgtttaacggcctcagatatcgggacacaacggtaaccgcaccgcgcgtgtcattccccctgcgtgcatttttcgagcggagtggcttacatttccacatacttatcagaagttactcactgacaaagtgatgttttcttcccatgttgagactatccgagtactaaagcataatgcttctgaagtggtgggttttaaaatttttaattttttttctgcccacttttgttgattgaaacattatagtattttgaagttacagtttttatattaatacctggattctactatgtaacataaccctttaagaattcgtggaggtaatcgccttggatgagagtaatttccttcattctcctgtcagcaaaattgcacttctagaggtctaagggaccttgcagattttgggaattgggaggcaagtttgattattcattttgaataagtacccacctcaactcttcagatcaaatgatctgaagggacatggtgtgggggggtagggaaatggaactgaggttaaaggagagccacttgctttaggggtgttacctcatttatcaggtcaccgtgattaattaggttctctgttcccctcagcccctggtgcattaagtgtttggtatattgtcatgaagtctaaaaggaaattctcagtttcaaggttataggtttcacgtgacccaattttagacattagttacatgtgcagtttttaaaatccatgtcagtaatatttcatttaggcaatggtaatgatttttaaagtaaattgaagggaaaatatattgagcccttattttgtggcagatgctatgaaagatgcaacatgtggcctgttcacagctacataattgtgacctgtgtggggaccaccttcgtgctctgtgacaccttctcaactcaccttttttactctttgaggccttacagctcttcacagtacaaggatgccaagggactccataaatgaactgataggctggg

SEQ ID NO: 31794 - DNA, 1046 bp, Homo sapiens
tcatgatgctgtgattctcaccccaccctctgtacccctttcagactaacagcggagttgctgcgcctactttgtgcagagccccaggtgaaagagcaggtgaagctctatgaggggataccggtcctcctcagtctgctccactctgaccacttgaagctcctctggagcattgtctggattctggtacaggtttgtgaggaccctgagaccagcgtggaaattcgcatttggggaggcatcaaacagcttcttcatattttacaagggtgagtaaaagtgggctttggcctactttgccctgtttgttgaagtctggggactctgtgacaagatggcagattggtgtgtgtcacctcattccctcctgctttgggatttctttggtaattcatgctttccaaagtcatctagacttgtcacaagcatgttctaaatcaatgtcaggggcattcatcttttaaattccttggggacccagatatatttatctttgcatcaccaacctccagtacagtgctgggaatgtagaaggccatcaatctgcaaatataatgaaggctgaatggaaatccagtaacctaaaaaaaacctttgtcttgccaccttttccttgaattagtatatgcattttgtcattccaagtataatgattactaatattttcctaaaatgtttgtgtgtgcacatatgttattatctataaagagaaaacaaagcctatatgaaaggagcaggtgtacaatccttgtttttgaaagatgatatcattaatcaagtggttgccatgttactaactctagtccagttctctacttttctctctaatcttcattacggtcctctaaggtgggcattatctctcttttaaaagtagaattccagtgacattctaagtcaggagcacggagaatggatagttttgttcccaattgaaattctctagaagtacgttgcaaactaacttctgtattttctgaattaaatagattgaagtatttaataataatatcttgtggtaccatccatgggaagattctattacc

SEQ ID NO: 31795 - DNA, 1059 bp, Homo sapiens
tcacttgcaaaatactttgcactcaaaatgtttttacaatgcttctaaatgttactggtttctgctttcttttgactacttgactgacaaaatgatctgactactccatttaagagcaaaggtaactcatgtttaggtaattaactgcttgttttaagtgattatatttcttccactgtttttgaaaaataatcaaagatagcattcattgagagacagtgacagatataatttactacatatattgatttttaaataaagttgccttaaataagtgtatgtaagcagtagtagttgctatgtactgatttacctcaaggtgcaaaataattaaacctgtacatattccatttacaaaataaattcagccctgcactttctttagatgccttgatttccagaatggagcttagtgctactgaataccctggccacagagccacctcaggatattcttttctccaccctagtttatttatttatagatatctgtttacaaagtctgtagtaaatcctgatgctgaccatctgaaatgtactttttttctgaatgctgtttcaatctaaaatagcagcttttgagaaaacaatgatgtaaattccttatgataaaaggatgattctatatattctttaatgatattaaatatgccgaagccaagcacacagtctttctaaagtgtgtgtatgtttgtgtgaatgtgaatgatactgatcttatatctgttaaaagttgttttaaaaagctgtggcatcccattgttcatatttgccaagtcttctgtaaagatgtctaggacgaaatattttatgtgctaatgcatgtatttgtaaaccagatttgtttaccactcaaaattaacttgttttcttcatccaaaaaagtttatttcttccacgtacttaaattttctgtgtgggtataatatagctttctaatttttttctttcacaaaggcaggttcaaaattctgttgaaagaaaaatgctttctgaaactgaggtataacaccagagcttgctgtttaaaggattatatgatgtacatcagttctataa

SEQ ID NO: 31796 - DNA, 1046 bp, Homo sapiens
gcttatctaggcttactcgacagcgtaataatctcagggttcaaagcaggttagagaagaagctgcaaggttctttaaggttaagacttagaaatcacatagtgtcactttggccttattctgtgggttaaagtaagtcacagggtcatcctggtttcaggggggaaggaggcagactccacctctaggtggaaagattgactgagtcaaatgacaggaggtatagttatagggataggaagaattactgtggccatctttgaaaataattcaccatgtagttcaagatttaagttatttcccattcgttgggtatttcttggaacagatcaagtctatgttatggaaatttagtgcaatacagcaaggagactttttgaaaattatatttaattttttaacagcctactcatccagagagagggtggatcataagcccactgggagataatccttggtggaccttattaatagctgctattcctgctttgctttgtaccattctcatctttatggatcaacaaatcacagctgtaattataaacagaaaggaacacaaattgaaggtaattttagaattttgccttaagcattgtgattcttcaagggtttgagctgtttttgtaatgattagaacattaaaagatgtaagatgaaaattagcttcttccctctttataattcgtgtagaattttaaattgagggaaccatttagacttacagatatttatgttcatttcacttttcagaaaggagctggctatcaccttgatttgctcatggttggcgttatgttgggagtttgctctgtcatgggacttccatggtttgtggctgcaacagtgttgtcaataagtcatgtcaacagcttaaaagttgaatctgaatgttctgctccaggggaacaacccaagtttttgggaattcgtgaacagcgggttacagggctaatgatttttattctaatgggcctctctgtgttcatgacttcagtcctaaaggtaaaatttctttattgccgtgttttacaatcttattataacat

SEQ ID NO: 31797 - DNA, 1059 bp, Homo sapiens
aaattgtggacaagcaagaatgcagaagaaacatttcacaaataatactcactacaaggctttcagtatagggaatatggaattgaaagaaaggagtatttgaagtgacttggcaaaatactgtattttagtgatttgagatgcacgtatttttcaaattataatatcttgaactcaggatatgtattacaattagttgttagtgtgttatagttggctggacaatgttttttctttataaggaatacaaagtaatggtgcctcttacaatcagttgcatcttacgagtcaatgaagctcataataatttattgaatacgtaagaatcccccattctgctttttctttctccttttttccaggaatgtaaaaaacttcgtggtgtattcttggggtcagcttgtggtcatcatggaccttatattccagatgtgctcttttggtgtgtcatcttgtttttcacaacattttttctgtcttcattcctcaagcaatttaagaccaagcgttactttcctaccaaggtaactgtgatataattttggaattctggtaatattcatatttttggtttttatttccttggtttatttcaaaacagtaatatattttttgaggttaatactccatgccaactggttaataaagaaattattcgtagtgaaaaatgtatattacgtgcctgagctcacagtaggaagatgatggtaccataagagttgctaggttagttgcgaaatgtgtttcttatatttttggaaagaattaaatataaatgtgtttcactgttaacattgtcactagttaaaagctccatttgtacgttgtagtgacaattttatcaataaaagatgtgaattatttagaaagaacacatagtatttctgtgtttatattaacataatccctttaacataggtgcgatcgacaatcagtgattttgctgtatttctcacaatagtaataatggttacaattgactaccttgtaggagttccatctcctaaacttcatgttcctgaaaaatttgaggtaaggattaaaacaagtggctatttg

SEQ ID NO: 31798 - DNA, 1049 bp, Homo sapiens
tttctcactaaaggtgatagttcctaactatataatttgaaggatattatctgaaattttatcccactgataatttaagactgtattgtccaatacagtagccattagccacgtgtgtctatttaaacttaagattaattaaaagtttagtttttcagttaactagccacatttcaggtgttcagtcaattcatgtgactgctggctcctgtatttccattatttctgtgatggaaatgttacattatctgcatcatctaatatatctattgggcagtgctgatttaaagcagtaaaaattgccaagcatggtggttcacaccatagcactctgggaggacaaggcaggagtattgctagaggccaggagttagagaccagcctgggcaacatagcaaggcaccatctctacaaaaattaaaaaattaccctggtatggtgactcgcgcctgtagctaacttactgggaggctaaggagggagaatcacttgagcccaggagttggagattacagtgagctgtgatagcatcactgctcaccagcctgggcgacagaatgagaccctgtctctaaaaacaaataaaagaaaaaacatagattcatgctttactattttatatttaaaaagtcatttttgttaaggaagaggtgtagttaatagaggtgttcaaatgaaagtgatttgttacaaataattcatttcatgatgggtcagatgtcttgatatatagatataagtgttttcatgttatcccaaagggccatgcagggtgggtttttttgtttttctggtaatggtatagcttttattttcatgatccatggaatggattaggtttactaatctcagcacatggcatgtgaaaataatggaacatttaactatttttctttgggtacaactgacttgttttgttaaaatgagcttcattagattataagtaagaaaaaggagaactttagtggcatgtgcttctattaatctctgattgcctttcagttttttttttttttccctaaaggaaaatgaagtcagtagtttctata

SEQ ID NO: 31799 - DNA, 1032 bp, Homo sapiens
aatggtgggagaggagggtagtggtagtgatggtaatgatgttggagctggttactgtattgatacatatgatgtctggatctttagagggagtaagatgcaattgttttttcatatagacaccatacctgtcatttactcataactgatttataaagtgagctgtaatgattttgaaatatttatcgcctggtagattttcactgtaaatcttttatataagtgtaataaactattaataattaatactaattaatttattaataataaatctactaataagctagtcttcagccgaagcagaaaaagatatagagttatttctagatgttattttgtcattctgtaattcattctcttttaggaatcgtgttttcttgctgttcccattgcttgcaatgaaaaattttaggtacaaatactattccacatatgtttatcatattcatatttttctttctaaacagagattatcaactttcttatctgtctttaagaaccagtattggtctgtggacttcttttttgtgcattgttttggttgcaacagatgcaagcagccttgtgtgttatattactcgatttacagaagaggcttttgcagcccttatttgcatcatattcatctacgaggctttggagaagctctttgatttaggagaaacatatgcatttaatatgcacaacaacttagataaactgaccagctactcgtaagtatttctcttttctcctaatattaaaatgtgtttttacagagatgtcagagcctcagaaaatgaattttttttgcagtgtgatagtgtaactagctataactacttaactagccatgtgatagtgacatggttgtttcagatgagattttgtcacagcattcaatgaacaaaaatatagttgatcaaattcagtattttttgttcactgagatagcttattcacatgtgtatgttttggtcttctgtttgaattggattggccagtttaaatttgattggcaactgatccactatatatttgaatcaggcaatt

SEQ ID NO: 31800 - DNA, 1050 bp, Homo sapiens
caccatgttggcaaggctggtctcaaactcctgacatcaggcgatccgcctgcctcggcctcccaaagtgcgggaattacaggcatgagccaccgtgcctggtcagttacctcctttaagagaattttcctggctcctttgttctttcccatcagtttccctttctgtaccctactttctttttatcagagcgtctatcaatacctataattatttatttatttaataacgcgtttcactgtttttcctcctagaaaaaaaggttcttgagtatagggaccttgccttacctgtcaccattgcattatccacaatgcttagaattgtattttagcagttagtaggtagccagtaaatattggtcattaaataaattatttaagtaaagttgtttgcatatccatgattattttcttaggataaatgacatttaaatgtcatagaagtagaatgacacgctacagtgttttattttctaatcaattactatttcccaggcaaaattttatttttaaaaaattgttctgtcttaacatgtaactgttctctttcattgtttgttattgttaattcatctgataatactgagtggattaccttttatagttgttacccaggctgggctgaatacctgcctgagataagagtttaggggttatctttattgtgaagctatttatgatatccagagtggatttactatgtgtagaaatttttttcaactttaaaatcttttactcaatatttttttcacttagattttccatgatgtagcttataaagcaaaagacagaaatgacctcttatctggaattgatgaatttttagatcaagtaactgtcctacctccaggagagtgggatccttctatacgcatagaaccaccaaaaagtgtcccttctcaggtaagaatccagagctattcttctgtgacttactttattttaataaaattttttttgattaggtgtgattcaaaaaccaaaacagagaagttttatccccacctcgtcctgtttaccttcttacccccatacttacctcctgtgg

SEQ ID NO: 31801 - DNA, 1025 bp, Homo sapiens
ttctccaaagaatgtagtacattttaggctttttttttttgcttgggcgggtggggtggagagacaggttcttactctgttgcctagactggagcgcagtggcgccatcttggttcactgcagcctcgcctcctgggttcaagtgattctcctgcctcagcctcctgagtagctgggattacggcgcgtgccactaccacccagataatttttgtatttttagtagagacggggtttcaccatgttggccaggctagtcttgaactcctgacctcaaatgatccacccaccttggcctcccaaagtgctgggattacaggcatgagccaccatgcccagccacattttagtcttttaaataaagataggatcaagtgttctttttctcattttgcctttgagaagattgaagttctctaatgactgactgcctggaatcatatacagactcggatttatgttttggaatagattttagttgtccattgtttcatgctgttatttatctttaatccaaatttaccttgaaattttcaggaccagagttcctgtagttagggaaaaaaaaattgtatgtgcaaaattagcaaaaaattattattttttagtggagaaaaggtttataactcttttttttttgtggagatggagagtctcgctttgtcgccaggctggagtgcagtggtgtgatctcggcttactgcaacctccgcctcccgggttcaagtgattctcctgcctcagcctgccaagtagctgggactacaggcatgcaccaccacgcctggctaatttttgtatttttagtagcaacggggtttcaccatgttggccaggatggtctcgatctcttgacctcgtgatctgcctgcctgggcctcccaaagtgctgggattacaggtgtgagccaccatgcccagcctataactcatcttaagggctataaagtatgaaaatttggtttatccttatgttgactacatgtacatttgtacatatatctttttgcctaatataaaataaa

SEQ ID NO: 31802 - DNA, 1032 bp, Homo sapiens
ccttactattgacacacatttttgtttcatttttttaaatattggaaacaatgcctcagtgaaaatgaaagttcagagaagttgaactttctcttgcccaagacttcacagacagtatatagtgggagcagcctgtgtagaccatgagaggatgtgctctttttttttttttaacatgtcatgtttggtacatgtgggagcatttatctatgatagatatttagaggtcaaagggtatgtgtattttaaataagtatagtaaataatatatttataagtattgtgagattatataacttaagctgtttttgagtcctttttgttgttatttgaaggtgagggttaattgttttgcttcatatcctggcaattgtgcgacctaaatgaaagtttggaatgggagcagttaatcccttttagaataggcagtatgctacctctcaggatacaacttctgtgccttttacttaggagagcttatcttttgtacctgtgcatgttcagagactaaatgacatgaagtcattggaacacgtagctcaagattttagaatatgacttggttgatggatggaaattattattcattcttgcacttttggggtttggtttggtttcctactttggcttttccttgttactgaggaagtgaatgctgtaaggcggcttgattaatttgtctgtcttgttttttattaaaaaatttttttctttcttgagacggagtctcgctttgtctcccaggctggggtaaagtgacgtgatctcggctcactgcaacctctgcctcctgggttcaagcgattctgctgcctcagcctcctgagtagctgggattacaggcgcccgctaccacgcccagctaattttttcgtttttagtagagatggggttttgccacgttggccaggctggtgtcaaactcctgacctcaggtgatccaccaacctcggcctcccaaagtgttgggattacagatgtgagccaccgtgcctagccttaagtttctttttaattaaaaattttattaaa

SEQ ID NO: 31803 - DNA, 1043 bp, Homo sapiens
tttaattcctgtacagttttctttctttctttctttctttttttttttttgagacggactcttgctctgtcgcccaggctggagtgcagtggggcgatctcagctcactgcaacctccgcctcccgggttcatgccattctcctgcctcagcctcccgagtagctgggactacaggtgccagccaccacgcctggctaattttttgtatttttagtagagaaaaccccgtgttagccagggtggtttcgatctcctgatctcgtgattcgtccgcctcggcctctcaaagtgctgggattacaggcgtgagccacggtgccggcctaattcctgtacagttttctacctaatttaaaatttctcggtttccccctgctttggctgattgaaattcacaattagaattttaagctgtgtagtatttctttttcctgaatttaagatttcaaaaaatcagttaatttgattatataatgtaatgattgtaaagcagtaaaaatgttagtacttttttttttttttttttttactgtgcctaccagttcagttttagaacatgggaaaatggttaggaaaattttgaaccatcttctgtaggtagctgaccttgtgaaatgctttttcaaaaatgttacttgcttttttattaaagttgtatctacttaaaacaagaattgattgtaggtttgtgggttttttttttttttttttttgagacggagtcttgctctgttgcccaggcttggagtgcagtggtgccatctcggtttactgcaaactccgcctcctgggttcaagcgattctcgtggctcagcctcccgggtggctgggattacaggcacgcctggataattttcgtgtttttggtagaaaccagggtttcaccatgttgtcctggctggtctcaaaccccagagctcaggcaatccgcccaccttggcctcccaaagtgctggtgttgtagaaaaaaccgggttcttgtcacacggccgggaaagattaggcacgcagatactttgaaaggtgaggggttacgaattt

SEQ ID NO: 31804 - DNA, 1031 bp, Homo sapiens
ctcagtagagtcctttcagtaatattttgtctttatttttgttttgttcataattattcccaaatgaccttaattataaaatgtccaagaggaacttccttatccatttttgcatatgccattagcagtatcctcgggataagattttgttataagcctgtttgtatctggggaagttggtcatttgttaggaataagggattcattcagtctaaaattggccttcatttggcctttcattttatcttattgagctattttattcagtaataggaaattcagtaaataatcatacactctaatcctcattttcaaaacaaggtaaaatttggaggtggcttaacctagatgtaacaagtacatgtttgggtttcagatatacctgggttccctatttctaatatgccacttaggtggctttgggcaactgacagctttgaatctcatttttctcatgtgcaaattggaattactctattaaacttatctcgtagggctcgtcttaggatcaggtagaatactgtgtataaaatgctaaatgtgcctcttggaaacttgctattaataatcagcctgtgttcttatggagtatcctacataataaaattgtagaagagtttgtgtacagaatgaggacagagaaaaaaatcttgactgtccttaaacccctggtgtttagatattctagataactctgtgggcagggatttgatactggttttttttctttttgagacgcaatctcgctctgtcacccagagtgcagtggtgcaatctcggctcactgcaacctccacctcccaggttcaagcgattgtcctgccttggcctcccaagtagctaggatcacaggcgtgcgccatcatgcctggctaatttttttgtgtttgtagtagagatggggtttcaccatgttggccaggcaggtctcgaactcctgacctcaagtgatctggcaaagttctgggattatatgtgtgagccaccgcgcctggcctgatactggtttgttgcctaaagcttcacatttt

SEQ ID NO: 31805 - DNA, 1049 bp, Homo sapiens
cggcctcacagagtgctgggattacaggtgtaagccatggcaccctacccaactctatcctaatagaagtgatatttgagttgggagacagatgacaaaggaattattaaacactgctgttaatgacgtggtaggggagcactttagaagggtaaacctcctaagtctttgagaagataaggcttggctactgttaacatatataaatcaataatagaaatcaaatacagtaaactagcatatagtctacgaatagaatgggagaatagtaaagctgtaggttgaactgatttgaaaacaggaaagaggaactattggcgttgataaaattaaatcttcgctcacccagttttggtaaataaaagtcgtaaaagtgagagatcatgatattcatcagtcataactctaactcgcagcagactgctcagcatagccaaaaaagtagaacaaattaatattcataaaatcccatcttagatttgtaattatgcaaaaaaatgttgaatagattggtggcagtttatattactctgaaattggagcccatctgtttcatagtttagcctctatggttgcttctgctcctaaaattctctaattttcactgatcagggtgttgggatagaggaaagtcattaatcttgaaaaaatgtaacttgtcttttgcttttgctataaagcctcataattgtaagcctcacttggaattgatttgtgagtctttttttgttgttgttgtcagtcttattttccagtataggttaaatccttttataaatagcatggtttagaaggtttctaagttttagcaggtaatctactttcttttaagcagtgcatgatataacacaattctgataccactgacattttgggaccatgatatttttccatgattttgttatgattttattcattttgcacatatttattaaatatcctataggtgccaggtaatggggatatagtcaaacaaggtagacagcatactgccttcgctgagtttattttggcgtatggtgtgaacacagtgatggcatttacatttc

SEQ ID NO: 31806 - DNA, 1010 bp, Homo sapiens
agtcgctgtacttcttttgctcatcatctgtaaacttacattgtggaactgtgttacagatgacttcctaaaatgtaaattccaggtttagaaaaaaaaagattaggttagtgtttatcaggctcttctgtgtttccttagtgctgtgaaattttattagttataataagcattataaaaatatggaataagtcagaaagaacacaccaataccagagtgcattacacacaataagggtaagtatggtttcttagaacttgttttctttgggttgcagtgtaaaatgattcttgctgtgccttgcaataaaaaatgagagccacttgtttggggggaaccgcagttgtcaaaatacacacttttaagtctataactcttggctaagaatatcccatagtttaattctactgtgatgatggaggatgtaatagttcagtaaattttcaaatgctaaagaaaaatatgtatggctgaagtagaaactcaagtaagtggatttttcttatacaaggaatagttatttgtgtattaaagagttccatatatagtgtcaattaagaaagctgggcttttagctgttacactttgtaagcaggacatgtactccctccttcagttgtggacatgcaggtttcacttaaaagtcagagatgtgaagttttatactgagaagtataaaacttataagattgtgttggcagtcagcatattgtaggtgcttggtaattgatgatgatatcaaaaatgttactccaaaagggcagtgatcagtcattagaccgggttaagtgaaagacagctttgaacagcaacatggcagactggagtagacttctcaacccatttcctcgtgtgtaaaatgaggttactcactttaccaagttggtgtgacaatgtaggtgaagtgcctagtatataataagtgctcagccatcattatttgtgctttatctgtttttagagttctcatttgagaagtttcagtgtaacatttcaatattttaagtag

SEQ ID NO: 31807 - DNA, 1065 bp, Homo sapiens
gtccaagaccagactggccaacatggtgaaaccctgtctctactaaaaatacaaaaattagcagggcgtggtggtgcacctatattcccagctcctcggaagctgaggcaggacaatcacttaaacctgggaggcggaggttgcagtgagctgagatcgccccattgcactccagcctgggtgatgagagcgaaactcagtctcgaaaaaaaaaaaaagtcaagtatgccctaaggtgctgctttttctgattatagaaattagatacttttaatttaaaaaacatctaagcagtgtgtatcacatctatactctgttgtgattatgatgatttaatgttataaaacagacaccatgaattataaaatactgattatgtaaaagcatagaaggcttcaaaaaatattctacacatttttgctttctatgtaaagattaatttgtggaaatgaaatactcacctaatgaatccaggctttatccccttattacgattgaagtaagatatggagccatcagaacactgacttattttttatctatagaatactctcttaagctttctcttctaatttcataccgttagctaatagctcgatttgaagaagaaacaagttccgtgggacgagaacaagtaaataaggcctatcatgcatatcgagaggtttgcattgatagagataatttgaagagcaaactggacaaaatggtaagttgatttgaagcgaatgacatctgcattttggaaatgaattttctccttcaagaggtttaaaattagaagtaagttaaatatttacatttagtaattaaaattttgtatacatgttcaaggcaaaatggaaattttagtaatattttaacttatttttatgtaaaatatttagtatgtaatgatgtttaggacttaaatacatctaacaccaccgacttattttgaaaaactatgacatggtagatttagtctttttttttttttaagccagtgaataatgatgtcctaaattaggaaaagaaaaaaagacatttctgagaaactgagttcattttgtcaccttgctttta

SEQ ID NO: 31808 - DNA, 1050 bp, Homo sapiens
gaattcactcacgttgaccccagagactgcacccctttctcccaccctctcgtttctattgctctaacagtgagagccgacactgttcagtcaacctaagacctctgtccacgggaaagtgtgggctgctcacccctcccaacctcgcaccgctgtggagctgaggggcgttcagctgctctttgcagcccacttccctcaaaatgcctgaatcaatgcctggtaaatggtgcaggctcttaattgagtctgtggggaaaaacagttagttctaatgagaggaagcaacatgattgccactgggcttgtgagtgccaatgctgccgggtctgcaaacacacttcccagagttccttctgtgactctactttccaggatgaatgtcccagctgaatattttggttcctcagattgagattggacacaaaattattttaagtttatcagtttgaaaatcttaatgctttgcctttattggcgaatcaatttgtggaatttcaaatgaagatctcccagcctgaggaagatgcatggaaggattgattatttgatgttttttttttttttggcttctcttagctgttaggccaaatgaagaagtaacttatatttgtgatcccatttgtaagtctaattttaatatgtcttttattcatattaaggagatttttttttaaatgcaaccctgaaaaaaaagagtatgtactaagaaggcataattgcaggtgatttgatgaatgaacacacatttatggattttcagaaacaagccaaaggcatgtggtcttgccagtgccttcaaatcagtttagctctgaggctcactgacctcccccaggacttgggggaaattttaccttgatttggaagagatttttctgaagaaaaatgggaggaggatgctatctcttatgcagtattacattagagaaagtctgccctgtgtctcttccatccctcacaggtatagcctattggaagacgttgtagtttcctcttttttttttttttttttttgagatggagtctcgctctgtcgcccaggctgca

SEQ ID NO: 31809 - DNA, 1035 bp, Homo sapiens
acaattctgcaggctgggaagtttaagagcatagtgtcacatctggctggcttctggtgagggccatgtgctgggtcaaaacgtggcagaaaagggagcgggtgtgtgtgcagagatcatgtgggaagcacaagggtctaggaagccaaagtcgcttctagaacagcatgctcttgcggtccctaattcagtcctgagagagtgagaactcgctcctgaaggaaggcattaatctcttcataagggatctgctcccattacctacacaccttctactagtccccacttcctaacactgccacatcggggatcaaattgcaacacacatttgggagaggacaaactcagaccacagcagcatctcttctcccttccatcacatccaagtcatttgcagggaagggtgttggaatcctgaagtagagtcagggttacagatctgtgagcctgtgtgatatttgtggtccgtgatcatacaccctcccaaatgttttcatgggagtgagggactgcagaaaggaaggacagaattagttatgtaaagagagattgtaaaccagccccatggtattggtcaactcgctggaacccggtgtgttccctgcgtggcccagcaggtctgggctagctttccagtttcaaaatcctgtgagtccacgttaggaggaacagaatgagatgctctgggttaaggctggctgtgttttgcagctaagtgggtggattattaatacccgataactgtttgggaggccaagacgggtggattgcttgagctcaggagtttgtaatgagcctgggcaacatggtgagaccttgtctctactaaaataaagaaaattagctgggtatggtggcatgtgcctgtagtcccagctactcaggagactgaggcaggagaatcacttgaacccaagaggtggaggttgcagtgagctgagattgtgccaccgcactccagcctgggtgacagaaggtgactctgtctcaaaacaaacaaaaaatacccgatatttgtttcaagttaatttaaga

SEQ ID NO: 31810 - DNA, 1049 bp, Homo sapiens
gtacagaccagtttgctttcctcttagagaaagtggcagggctcttcctccgtgtcacacagaatgagactcctcgactagggtcttgccgctgcttgagttagcatgcgtctggctttagtttttaaatgtcacaagccaggtagtgctctgttagctgactatcttggttctgaatctggcccaggaaggacagtctgaaatccgaatcaaatctgtagatgcatatgaaagacaatttttttttcttgaaagattttacatgtatatactgtgtcttgcctaataaagaaaaagtagagagtcagaattctattggaattttcaggtagaatgcttactttgaaatagtcaccctgatgtgttaaaaaggaaaaactgggccgggcctggtggcccatgcctgtaatcccagcactttgggaggccaaggtgggtggatcacttgaggtcaggagttcgagagcagcctggccaacatggtgaaactccatctctactaataacacaaaaattagctgggcatggtggcgcgtgactgtagtcccagctacttaggaggctaaggcaggataatcgcttgatcctaggagcgggaggctgcattgagccaagatagccccagtgcactccagcctgggcagcagagtgagactgtgtctcagaaaaaagaaaaagaaaaagtagctattagcttaattgtgttacgttagttgatatgatgaatgattgtgcacaggtttatatttcttttcattttcttagcaccttttcaaaacattgtataatggaaaattttcaaatatatgcaaaatagaatagtaatgcaaccctatatccatcaccttactttaacaattccaactttccattgttcttgttttatctgtttttatttcccccaccactttatttttcctgctagagtattttaaagaatagttaagttttataaaaagttcctgttagataaataccattacattaactggcagtgataaaatgacacaacacttaactatgataccatcatttcacttttatgtaga

SEQ ID NO: 31811 - DNA, 1013 bp, Homo sapiens
agtctaagtagccagggatttattagagggttttgcagtgtttctgggagaaccaagatcaatgctacatgtttaggaacaacacagcctgtctctaaccaattcccatctatagcatggatataacccacttctgccttagggctggtgacactagaggccaaacttcataacatctgctataactgctccaaggaatcaaatacacttgtcaccatctgaccagaagttctgaccttctggtttgtggctactgcctcctgttgttcccctctcactctcagatcttgcatgagtgtgtctgcttagaagaatctagctgcaagggagtcagtgaaatgtagcttatagttttctagcttctgtagactagaagctgggctggaaagctgctagatggcactgaatgagctgctttgcattatttgttattaagagcatgtgcatggagatgatggctaaatccctggtgggtaaattctccttgtggcaaaaagaaaagagggaagaggattgagtgtaggagaccccacagggcttttgggagaatgaagcgacagggagtcagtgcaagtgccaatgctgttaccaagagggtggcttcctactgcatgataggtggcattgctgggtagctgtggctgcagtgccatgcctgagcctttggcacagtcctgacctttgcaagagggaagcagtgttgggctcatatggttctttttctattgaggttggtagagctggtttcaaattctagcctcggataagttcctgcaccattctgagtttcagtttgcttatctataaaatgatgatatgcctaccttgcagggaagttgtgatggtaagaccagatggcatatgagtgtctagcatatacctctggtgtatagtagtggttcaacaaattattactgtattactgttatcttcaattttgtcatctttccttttttcttttgtctgagcagctcacgctgcattaaaccccagtggatgcctggatgccagta

SEQ ID NO: 31812 - DNA, 1089 bp, Homo sapiens
atggctctggcaagttaaaaaaaaaaaaaaaaaaaaaaaggctgtagcttcttggttaaacattgacagaaggaggtcccttggggaatttgtgagctgctaggtggtttacaccattttttgggcagctttgaggttcaagcagtttggttttaaccctttgtaggtcaggtttttagaccttgtaatctattttcccttttaaaggaggaataaggattaaagaggataaagaggatggtttttctgtaagagagagtgctggtaattctctcctggtggtgagcatttgtagggtggggtaggggcacagatggcacatggctgatggccttgagggagaagtgggttgcacagtctcttgcaacagtttccagagtggggaaggttcagagatgctcttctggtttctgagcttgtgaagagagagacgtagaggagaaagggttaacttccatttttacttggaaatggatagtttaagctggggagggcctgtgttatgtaaactagcttgcaaccttctggtgtccattttagccttgctttctcatttaggtcaattggatctgaataaggaatttggccagacaacaaaatatttaaactggttcccctattgcatctcatttccacagtctgtttataatcctaattgatgcaaatgcccttgttattgtgaatgtgaataccctgaatgcagggttctggtttgtttcatttcacattgtattactgaacgtggtgagggaagctgagggtctgagtgacaagcggagtgtggctggatccagccttattttgaaggattcctttggcacccaggggcccagggatgaggtgctgttttgggaggctggtaaaagttcagaagcgatctctgagactccctatctgccagattcccagactgtgagctgcttcaagatcagggaagtttttcggtacgtaatttcttaagcactcagcaaagtgctaagatagtcttccctgcctcagggagtttggaaggacatttttccatggagtacatcagacctaagagggagagttttgtttttcttcactgataggcaactttcattttct

SEQ ID NO: 31813 - DNA, 1051 bp, Homo sapiens
ctcacatctgtaatcccagcactttgggaggccgaggtgggaggattgcttgagcccaggagttccagaccagcgtgggaaccatggtgaaaccctgtctccacaaaataaaaatataaaaattagccagtggtggtggcttaggcctgtagtcactgctgctcaggggtctgagttgggaggattgcttgagcacaagaggtcaaggctgcagtgagctatgatcacaccactggactccagcctgagcaacagagcaagactctgtctctaaagtagacatttatttggggaggaagagtagtgtgaactttggattcaaatcttgacaccaacacttagcacacatgtgaccgtgggctagctctttaattgcactgggcttctgtttttctcttctgctaaatgtgggaaatgatgttactcttttcattagttcaatgtgaagattaaatgagattattggtgtataagggactgagaatagtacatagcaagataccaagaagtggtagctattattagatcttcaatttgtctgtttttaagtaggcactttctggtccataaaattcttggtttttattctgagtgctgtggttaccctgggaccacattaacataattatcatagagttctttggggagaagatgattacttcattttgaagggatccttttaaaacttggcaccaaacatttacagctccccttcccagcctctaaatcctatcttcctttcctattttatttctctccatataccttgctattatctgacatgctttatattttactttttttggtctctccacactagagtataagctccctgaggacagataattttgtttgtctttgttgctgctgttatctccagtgttgagaacagggtctggtatacagtaagggtagagtaagtattgtcaaatggataaaaaaatgaataaatgtcagagagggaaaccagggcttagttctatttgagccagtgttagctattattagtatcagaagtcttggttctgtacctgcttgtaaccttgtcctt

SEQ ID NO: 31814 - DNA, 1038 bp, Homo sapiens
aataaaaagaaagaaaaaataccctcccccttttaatattagtagcaatttacattattatcattatttcctcttcaggtcccatttgaagtttcctgctcacttcccccttgcagttgagaagcctagttatggacacgtggaaggatggggctgtcgaggaaaggggctcaggaggcacttggaatggtggtagtgtgtgtgatctgccatcgtgaggaagacaagaacagatgtggcactactgtttactttttgtttttgttttttttttcaatttgttttccaaaaacaagccagagggaaatacaagtgtcagtgcgaggagaacaatgctttttggagaggtggttggtgggatattttgtcctgcctatttaacagtctccagatcttaatagacttggggctcttaaggatgtttgtgagatttgaattataccctggaaagttgcttatctctgctgcatggactatattacttggttatctcttcctgtagattgtttggaaatgttcagatttgcttccatctgaaacatatcagccagttatctgcacgaaactcaacttggaggaagaggtcttttgaagtatggaaactgagttgtttctatattgatattctacatataggactttctgagtcacctgggcttcctgggagatgtgttactatgttagtggaagttgcacttaacttttgaatccttttatttctcaaaatagtcctagtgtctgctgttgcctctcccttcccctttcaattcgtgaaagctgaaaaagaataggtagaatgcgtaggtagagggagatatgagatgactaaatctgatttcagttcttggtaattatgtctcgttaatggcaactcaaggtgccttgtcagtaacagcattttgttggtgtgttgagcaatcacttaatgctttttcttcaagtagattatgaggccagcaaagcttttaccctggattacagttattttattatttacttgctggggaacaatattttaccttgcagtctgtattaaag

SEQ ID NO: 31815 - DNA, 1034 bp, Homo sapiens
cctagagttttgacttgggactctagtgttaagatgatgagcccgtgcatcaggtccttctgcactttggtggaagtctcccagggtaggtttcctatttgaaacagtggaatcatgtttccagtgataaagtttaatgacctcatccttttttttttttctcatctgccatttgtgtgtcttagatgggttttaattgcatgaatgtggctaatgtggttctcagaaattggtcagtatggcccaacatagcttctgctctgtcttactgactcaatacctttaggatttgtatcagagtttggatactagtgttagtggtggtgtcaccactacttaattgggagataatgaaaccaatcatggatgctgtttttattgggcatgtcatctaagagaggagaaatagctgggttttgggtctaattatgaataaggactgattcagaaaacgagtttatggtaggtagactaaagtttcacatcagactgtaccattgtgatttagacctatctaaaattcagagcatatcatctgggctacctcagggtcaccacccatgtattgggcttagtcaggattgacagatacattctcagctggcctgtcatataaaacatactgtcattgagcttaagctccgcttgttctgaggtttcacctccatgtgtttcattggtgcaaaagtggatctcttagttggtcacttaattctttctttttcagaaagatagtatgttcactggtatatttggtcactcttagaaccttccttcacattgttttttatgggacccatgaatggttagcctttcttttctattgtagaaggaaataaataggagtaaaaagaccattgtagtaaataagttcaaggggaacttgggaccagaaaccactgttatgtacaaaaaaatggcaaattcaataaactcaaatttaaaataatttttaaattaacagttatgataaattttatattttatacaaatagattgcttagaatggttctcaagaattataagagaaatga

SEQ ID NO: 31816 - DNA, 1036 bp, Homo sapiens
cggttgataaatgattctgtcattctgttacaggtcattcttttactaggcttagcttccaaattatgctttatagctgtataaacatcgtgattatattcatctacttagaaattgttttatttttaaattaatttgcttagctgtttgttttgatgcttagattatgttctgttaatgggaatttaacatatttaagaaaccaatatttaaaatgttggtctaggtttttttccttaacatatattaccaggctttactgtatttcactcagccttaaatgttataatatttttggataacggttattaattctttgagaccttcgtatagcctataaaatgtatgggagatgttggtattttatgtgtataaaagcaacaatatcagcaacttcgtgtttatactgcaccttggttgttgatgtcaagtaaaaaaaagattgttttgtaacacataaaaaaatggaagaaactgataccacacctaaggaccaaagataagaaagactttttgcccaagacagtgaaagtaattataaaaacaagctttgaccacttaccaagtatctgaagagatgagttcatactatgatttagaaagtggttcaattcccctgttggcatatgattatttttactaaaattaatacagctctgtgggtcttccttagtgttttctttgaagccaatctgttttttttaggacaccagcctttggtttttcatctgttcgagatgcctcttctctgtctccttatcagatagaaatggagtcatgtgctgctgcttcatctagcagaggttggcctctggctctgacactttttgtcagttgtctttaggtggtcctgaatcttgggcccttttgattgtgaatactgtgtagcaggatcttgagagtccttgttcttacataggcattgctctagtttgtctttggcaaaaaaaaaaaaaaaaaaaagtaaatatccagggaaccctgcccagactaatactgttggtggcataagagaatcaagccattctcaagagat

SEQ ID NO: 31817 - DNA, 1035 bp, Homo sapiens
gcatattaatacacttaggttttaaatattttttcatgcaagagaggttttctgttttagaggaatgtgttttgagtgtgtggtactggtggtgcctaaagaagaataactttttttttttttttgagaagtcttgctgtgttacccaggctggagtgcagtggcgcaatagcagctcactgcatcttccacctcccgggttcaaacgattctcctgcttcagcctcccgaatagctgggattacaggcgtgtgccaccacacccagcaaatttttgtacttttagtagagatggggtttcgccatattggccaggctggtctcaaactcctgacctcaggtgatccgcccacctcggcctcccaaaggaataatattttttaagagagaatgtcttctatcccatgctattgcagtcggagtctattaagaacaacagtagccaacatttttgggacgtttacatttattagtggtatagctcagatttgaactcaggtagactggctctagaacccgtttattgaacactacattatggtctaaaaatgattgtcttgtttcaattaacttgaatgtattccaaatattagtaaatagaattttatatttatatgtaataaatttgaaataatcaaaaggattaaaaaataaagtactacagggaaacaccttttagaagcagagaaaacctctttttttttttttcttttttgagacagagtttcgttcttgtcacccaggctggagtgcaatggcacgatctcggctcactgcaaccttgtgcttcctgggtttaagtgattctcctgcctcagcctcccaagtagctgggattacaggtgcctgccaccacacccagctaatttttgtatttttaatagagatagggtttcaccatgttggccatggtgttcttgaactcctgacctcaggtgatccacctgtcttggcctcccaaagtgctgggattacaggtgtgaaccaccgtgcccggcaagaaaacctcttacattttatataaatgttaagtga

SEQ ID NO: 31818 - DNA, 1047 bp, Homo sapiens
atgttaagttttcatttctctgagatagttgcccaagagttctatttctgggtcatatggtagatatatgcttagtttttaaagaaaccgctgaactgttgtttgtccctttttaatgaaaatgttttgtaggataagatatttactattactatgaaatgtatctgttgattttggtagcaatcttgttgccattaacctgtctggttgcttctactggcctgactggagtgagaagggaattccctttagcctctgacttaggtcatcagtcattttgatggtttcggccctcagcaggaaattccctcagcttccacaaaacccacacaaactgcccaagcaaaatactcttcttcactctcttcccttctatttctagagaagagttagccccaaacctgagccctgaatcctatctttagagagccatttttctacctatgtctttagacccacccatcttactggtttctgcctaagtatttaaacatgctcagttctcccatgttgaaattcccttctctttgacctcatccactactgccctatctggccattctttcccagccacacttattgcctatgctgtctctccttcactgccttaccctccccttacttcccaatatacagtattgtaatcgagcttctctccctgactaccctggaacttttcttgctaatgtcactggcaaccttcttatagctcagtctaaggtaggtgtttcagtgttgttcttacttgacctttaagtagcatttagcactcttgattacttgtgtgtttgtgcatgtgtgtgtaaatacttttttcttgtttactacccctttgattgctgctgctagttgtcctttgctggtttcttcccctctgcatatcccgtaaatcttcagattcctcagatttccacataaggctatctttcctcatttgagtcatctcaccctcccactctgccagctcccacatctttatctgcatcttagacctctcctttgagctccagaccttatattcatttgctttccaactacatcttcacc

SEQ ID NO: 31819 - DNA, 1027 bp, Homo sapiens
gtcatagttgttttaaattcatggtctgataattccaacatcgctgctatatcccagtctggttctgatgcttgctctgtcttcaaactgttttttgtatgcttcgtacttttttattaacagctggatatgatgtacagtaaaaggaactctggtaagtagtcatttagcggtatggggggagaggaagctttctgtatttgtatgataaggtctcagttttagcaagcctgtgcccctgggatgtaaacttcacaagtgcttttcagtacccccaccccctttaggtgggacaggatgtctagaaggggctggagttaggtgtttcccttccaccaggttgatttggctctgataaaacctcaacaggtaaggctgtggcagaatcatttttcttgaggacaggccttgttaagaacagaatgctctggcatatttcaaaatggttactttccccctcccttgccagaagcacgagagatcttcatggtgaaatcttcactctgatcttcacggtgagaacctgggagagctcctagaggtaaaactcacaaagtgtggggaccctcttatgactgggtgtttgtagaattattaactcacacacttacccaaactgaacctctgggcaattcatcaattacaattcagattcctctgtcccagtactggttcccatggaggtgtatgcccagtgatttctgctccggtaagttgtgattctgtgtcacctgtctgtctccaatttgggaggcagtggtttgccctgtgaccatttctcccacagctctactgctttttctttttttttttttcagacgaaattttgctcttgttgcccaggctggagcgcaatggcatgatcttagctcactgcaacctccgcctcccgggttcaagcgattctcctgcctcagcctcccgagcagctgggactacaggcacctgccaacatgcccagctaatatttgtatatttagtagagatggggtttcaccatgttgaccaggcttatcttgaactcctg

SEQ ID NO: 31820 - DNA, 1071 bp, Homo sapiens
ctgtttagatgcaacttttttttcaaatattttccttctgtgattggttcaatccatggatatggaacccacggatacagagggctgactaatttaaaattttcgacctaattaataatataattattaagctttctgacctaagagataaacgaatacacacgtgcatgtatatgaggataaaatggtgttcatgggcatacaaaaatttatgaaaacattttatctgataaaatatttgagataaacaatgccagtgataaaatctttagtccagaaagggttctgcaaaaagggtggtgtagattctctctaaatcagtactcgatgaagtaagtggaactaatggaaaaaggaaaactgctgacagtatttggtgtacttggatatatctgctaccttgtttgcatgcataaaccaactcattctgtgtgtgtgagacattgaatgtgtactagaaaatccttgaaattaattgagttgttacttcagtttactgtaattgttcactctgggatttagtttaatcttaagaccttgcatagatcatgtttaaatctgaaagcttcacgcctgtaatcccagcactttgggagaccgaggcgggtaaatcacgaggtcagttcaagaccagcctggccaacatggtgaaaccccgtctctactaaaaatacaaaaaattagctgggcatagtggtgggcgcctgtaatcccagctgcttgggaggctgaggcaggagaatcgcttgaagctgggaggccgaggttgcagtgagccgagatcccaccactgcacttcagccccagtgacagtgagactccatctcaaaaaaaaaaacaaaacctgaaacctatttttgtacaattttttgcaaggaaatttgttttaaaactttgtttttaagcaaactttattgaagtatacaatacagaaaaaatgtacaagtgtatggtttgaagtatcacaaagtgaccacatataaccagcaccaaaataagcaacagaacattacccagcacttacagaagcttcgagtgtgccccctcaatcagtatccccacccaccaagt

SEQ ID NO: 31821 - DNA, 1094 bp, Homo sapiens
cctcctgagtagctgggatcacaggcacctgccaccatgcctggctaatttttgtatttttagtagaaacggtgtttcaccgtgttggccaggctggtctcgaattcctggcctcaagtgatcctcccacctcagcctcccaaagtgctgggattacagacatgagccaccatgcctggccttcattcctttttaattgctgaataatatttcattatatggctataccacatttcatttatctgtttactgggtaatggacatctgagtttcatctactttttgactattattaatatggtgctgctttgaacatccgtttttgtgtggatatttgtttgtaattctcttgggtaaatacctaagtggaattattgggttgtgtagtaactcggtttaaacaaaggttttgaaggactgccaaaatgttttccaaaatgctgtatcattttaaattgtcatcagcaggttaggaaagttcgtttctccatatccttgccacatttttattgtcatctgttgttaccactcattcatcttctctagatgctacatttttgttgctattttctgttttaccgttcttattgtcctatgccttaaaaaaaaaaacctttatgagattaaatgataggtgccagttatacctccatttggtaacagatccacaatttaaaatgagggaatttgttttttcttgaaatttatattatttttattttttagacagagtctcactctgttgtctaggttggagtgcagtggtgtgatctcagctcactgcaacctccacctgccgggttcaagcagttctcctgcctcagcctcccaagtagctgggattacagcagggtttcaccatgttggccgggctggtctcgaactcctgacttgaagtgatcctcccaccttggcctcccaaagtgctgagattacaggcgtgagccaccacacccagcttgaaatttttaaattaagtgttgtttgtataacttagtgtgctaaataaagttaatgaaagtgttaggactttttaaatgaagagatattggtgaaaacgatactttcacttatatctaaatcttgtttttttt

SEQ ID NO: 31822 - DNA, 1034 bp, Homo sapiens
ccgagatcgtgccaccgcactccagcctgggtgaccaagcaagactccatctcaaaaaaaaaaaaaaaaaaagtaagtgaccatggactaacctttttgggccttatttgctttatttgtaaaatcaggacagtggctattagaaagaccccacagattaccattttattctttttttcaccaaacatttattagagacatgtcatgtataaaatgctttgctgaatcatctggggtaaacaggatgactaagactcagctcctgccctccaggagcttataatctcctgtggggaagagactcaaagtagtaaagatcaagtatgtcggtatgaaataattgctaaataggtcacgaaatattttgcggatgaggtggtatctgagtacaattttgctaagaagggtgaggggagaacaacctgtgaaaagggcctaaaacgcagagaaaagggccgaggcagtttagatatggcggaaggagtcctgacgaaagccacaagatcttaagagtcagcctccctatcctttgaagtggtggagttgtggacaaattagaacctcctgacctgtaaactgagattatttcatgcatcatgggattaaaagaaccaaaagaaattatgtctaaaacactttcctctcaaaattggaaatcactattttaaattatgaaagtaatgcatgtttcttgccagagaaatttaaaaaaaggtaagaagataaagtgaaaatagccatgctcagtggctcccgcctgcaatcttagcactttgggaggccaaggtgggggcatggcttgagaccagcctgggtaatacagcaagactctgcctctacaaaaaaaattttttaaatagctggtgtggtggcacatgtcttttgtcccagctacttgggaggctgaggcagaaggttcatatgagcctgggagtccaaggttgtagtgagctgtgatcacaccactgcactacagcctgggtgacagagcgggaccttgtcccaaaagaaggaaagaaagaacatgaaaataa

SEQ ID NO: 31823 - DNA, 1036 bp, Homo sapiens
agcacatctttttttttttttttttcagtgtttgtatatgtgtatgtgtttgatctccagacactgcctcatctttatttttttaaagtttttcccagcattttgttttggaaaattttaaatccaaaaaaagttgcaagaatagtacaataaacacccatatgctttttacctagattcaccaattgttaacagtgctttaattgcctttttctctctgtgtatgtagtcaactgcttttctttttctaaccatttgagttatcagcaccatgtcactccacagcatacatcttttaagaaaaagaacattatcctgcagaaccacaatacaatgatcacacatgagaaatttaatattgatgcaatcctattatctaatataaattctatagtcaagtgtccctggtcattgcaataacgtcctttacagcttaatcttttctcaatccagtttccaatccataatcacacattaattatattctccttagtcttcttccgtctgaaactgttcctaagtctctctctcatgacatggacatttttgaaaaggtcggggtgtttgtagactttgcctcactaattagattcagtaagacattttggacatgaacacaacaaaggtgatatgtccttctcagggaatgatagcaggatgcccgtgagaccagcttgtcccttaactgcaatgttaagcttcatcacttaggatctcagccccatgttttgaaatggaaggttatccacgtcctcctttctgattttctgtggcaaccaccttctggaaggagtctgaacagtaaggcaaaataataacagcatatctaatcttagtttagtgaagtttgctgtcagttcctgtttttacacctgtgattttattccaacaattctattttgcaataaaatgaataattaagtccccccaccacacacacattcactgtttcatgaacgttgtatagggtactctgcagtcctagcacccacatctataaatggaacttacctgcacttagcagagctgttgagca

SEQ ID NO: 31824 - DNA, 1043 bp, Homo sapiens
tgcttgcaggctaagaggattgggtctctggcatcctggagctgaacagctcgtgtcaggaattccccaggcccttgagtctctggggtgagttgtaggggtgtgtagggtgctggggattaagatctgctgagtaggtgcttaccagagttatactgaaggacctgaagacagatcatcttcacataatcagcatgacccataatctgtgatgtcactgagcttcttttatttctgtagtcaaggaatgtgcacaagtaatgcaaatataattacttttagtcctgaggattagggaacttgggggatgttcacattacctgatgatgtcaatattgtgttatgtttaattttttttaaaaaagatgcttatttattactgaaataatctaaactgaataaataactttttaaaaaattacattggccagtattaggttcctgatacgtatttggtgttttgtttgtactgctgggttttttctctccagtattggatgcgttaacggggagccttgagaagttatgaattttggtttgttcggaattgctttttataagttttctgtgacctcatgcactaaatactgatgctaccacactcctgcaagtatgaaataaaagtatgtctcttcagtattgcattcctgcgccaattcatttagaagggtagaatttgcacacaggtcaaatcttgcattatttgcatttggggggaatacactctgaaggcagttttctctctctctgtctcctttttcctcctttcttcctcctattcccacttttttttttttttttttttgagacagagtttcagtcttgttgcccaggctggagtgcagtggcgcgatcttggctcactgcaacctctgcctcccaggttcaagggattcttctgcctcagcctccaagtagctgggattacaggcatgtgccaccacacccagctaatttttgtatttttagtatagatgaggttttgccatgttggtcaggctggtctcgaactcctgacctcaggtgatccacctgcctcggcc

SEQ ID NO: 31825 - DNA, 1035 bp, Homo sapiens
aaatatgaagaaaaattcaaacctcaaatctttttgtccagggatttctgttaatgtttattaaattatatttgtggatataaataatgtattcttacgttttagattggtagttcaagatttcaaggtagtaagatgggggaaagaaatagtttattcccatttaaaatgtttttttacttttttggtactttgaaaggtgtgaccttcgtacagatcctacagatcaggcagaaaacagatcaaagattactgttaaaatgcttttctttttttttttttaatttcagtttatcatgcaatctacttggaagaaatgattgcctcagaagttgctcgaaaacttgcgctggtgtttaatatccctctccaccaaattaatcaggtttacagacagggtcccaccggtattcacattcttgttagtgatcaggtaaatcaaatcatttgtttttccttttcagactggtatttacttttatacatgtaattgtagaactgtagaaaaattctgtgacctcttttgaaaatacttatgagaatcattttcagagagttgggaatcactttggaagaacttataaccaagagtttcaggcatcctagtgataatatggaatacaagccaaggaaaactggcttagcctccccccagccctttaggatgcagccaatcactggggcactctagggatagtggcaggctttggccctttttatgaggtgagtcactggatgtgttttccttttgtctattatttgatgactaatttaaaaaaacatgtaagatatataatttttcccctagtgattggtggcaagtaataatagaagagcactttatgcaatttttgttcgagtcatcatccactggagccggcagggaatgtgcccctgtgggtcacatgggtgactgaccaggtctctcagggaccattatggacaggcatagtgaacacaaggcagtgcagcacgtgtgcatctttgctgcctcacactgccttcatgaattatcgttttggccattgagtcctg

SEQ ID NO: 31826 - DNA, 1279 bp, Homo sapiens
cttctaagctccttcttgatacaggacatggaaaagccagcattttccttggctctgaaggacaggtgtctgtttgtcttcttatattgttcatgtgtatgtgtgtattcaggatatctgattattttgaaggacattggactgcatgaagacagatgcctgtaaagcagttctgttctttttccatttatttgagaaaaatatttttgctcttctctaggtgccgacttattaaaactgacaaaggaggatttagttcaaatttgtggtgcagccgatggaattcggctctataattcactgaagtcaaggtaaaatactgtgaactgttttgcttgaaataagaatgtacctttcttcgcgtggggaatttgggcagaatgtgtttccacgctaggttggcgtgtgtgcctgtgtgcgccatcgagcattggcagcattgtgctcacaagaagactgttttgtgtacaccttcagggcaggcccagatatgatgcaggcactgatgagggcagaggtagactgtaagactggtagaaatgcacatgggcagtactgatttcttgaagacgactgggtttgttgccaagaaaacaaaacttctaatttaggtgagctatacagaatctatggttttcaaggtcatgactattactaaacagttattaaaaatgtaaactaattgtgaattaaaatgacagaaactgtaaattgtgctggcttgtaagaaccatttactatcattgctctttctatacttgtggtgtgagaattccattaaaattgaatcttactgatttttaatttgctgacttaatcttgaaacttaaatttaccagcatctgacagaccatctcaatggtttagagtctggatcatcatattagaccacctgtgatagttggtgtgaggtgtgtggtttttatatttttattagtaaattactttgtataacgaaataacattataaagttctcataaggaaatagaacttagattcctgtagttgtcatatttgtacatgtgtaaggcagctttctctcccaggctcatcagtggcatcttctgattgcaggtcggttagaccccgtttaaccatctatgtctgccgggagcagccaagcagcacagtgctgcaagggcagcagcaagctgcaagcagtgcaagcgagaatggcagtggggcaccctatggtaggtattgagggcatctcaattctgtcacttctgagactgtcagacagaaacggaaaggactcgattgagcaggctttggaga

SEQ ID NO: 31827 - DNA, 1034 bp, Homo sapiens
tctgtatctcaagtctgaagacttgtatttgagattactctggcatgcttagcatgcttttgactgactttttcaacctcctaattgtaatagtgtatctccgtgtctttgttctgtttctggtcagaattttgcctggagctgaaaaatattaaagttcaccataacccttccagaaaatataaaagaaagaaagaaggaaagatagatagatagatagacagacagacagacagacagacagacagacagacagacagatagattagatagacagaccagacagacagacagatagatagatagatagatagatagagatagatgtagtactgtacacagttgatgtattttgatgctgggcctgtctggtctgtcttgaggattattaacctttagaggtatcagagaagcaaatgggtactggtgaggctgctcattagggaagagggcaaaaggagcactagctaggtcagagccatgtttcaggtcaccatgtgatgtcagatgttgcttataaatcctttcttgtcttcgccattcttaaatcttgataggtgcctgttgggaaactgataaagaggatactggtaaagagggaggagaaagctcttcaaagcaattatacttaagcatatattttaaatgcctttataaatttttgctgctgtcatcactttaggtcttctctaagattaatcagtgtctagacgcacacagcaggtaaaacttttctttgccacacagaagtaaatttgacatgtgtctgtgaggttgcttgataaatgtcagctgtctcgcattttataatcttgcatttggttagtgagtgaattacaaaaatatttcttccacatattttaaaagcatatcactaatttatttctgtttctgtccttagtgttctccgtggcccgatgcccccacagcctatgtgaataacagcccttccccagcgcccactttcacctccccacagcagagcacttgcagtgtcccagacaggtatctagtttgtgtgatcgtgtgcctgc

SEQ ID NO: 31828 - DNA, 1057 bp, Homo sapiens
acatatttagcaatgtgctttctctgattgttctgttttcgtctttttttgtcctatttttttcttttagtcttattgttagggccccatcacatgttgctagttctgaaaatgcagtcaatctccttttagggagaactttcagataacgagattttctccctgtttcatataagaagttcctttcctctctcccgccctcctccctctctttctttttctttcccttcctcccttccttttcattcctttcttttttcctttccgttcttttttgggtaggggtttctggtagaaactggaaaacctgctagacaaattctaaaagctatataatgctagaatttttcttatatatcttgtaatttcctaactttggtcctccttttatctttagtattttagtccaaccttctagaatggggcttagtaaagctctgaagtctaatacctgtattctaatactgttttcatctgaatatgtgtagttagtatggttcttactgagtatggaacaattagaactgtgatattttctgtgctgtacttttttctggagacgagctggctagcagatgtgaaccactggcattggtgtcttaggggccaccactagcctatgcaccatcactatgagagctttgctctggtcaggtgatggtgtgaagtgggtgctgggtaattgcttggacaggccctgcaggtgtgggtgcaggtaaggaagatgggaataaagcagccactgagccctataaatgtctcccacatggtactctttatctcaaagaaaaaaattgcttttaattggctgctgggattacaggcatgagccccaccgcacctggcctaagttcactttttcaaggcagcgggcagtgtttcggatttttgttttatgccagttcttttttttcaaaactcaaagtttttttttttttttttttgtgatggagtctcgctctgtcacctaggctggagtgcagtggtgcgaacttggctcactgcaagctctgcctcccgggttcacaccattcttctgcctcagcctcccaagtag

SEQ ID NO: 31829 - DNA, 1024 bp, Homo sapiens
ttaaaccagataaagatatttcatatcgataaaagtcataatccaccatctgtagtagtgatatagtagactgacattaattgatactgtgcatctagcattgtactaaatacatgtgttaaccttattcagttctcacagtaactctaggagagatttattcatttatagattaaacttagagcagttaattaccttgctcagtgtccatttggaaagcttaggttttaacaaaatttttttgaagtattacagtaatgtgcacaaatcttaatgaatttttacatatatattcccttgaaactactacctatttccatcttttccagtactccagcaggctcccttgtgcctctttctcaggtgatacctcacttgaatataatcaatgtaagggcaggtgattttcttgtcctttattctgcttactgcagtattaatgttgagtattttcttggttctggaattgtgttcatttatttcttgattttttctagtcttttcagaaaaaaggtagaaagctgaactgtatatgtagacatgtttaaaacaacatacattttagtaattttaaaaaatatgggccgggcacgatggctcacgcctgtaatcctagcactttgggaggccaaggtgggcggatccatgaggtcaggagatcaagagcatcctggccaacatggtgaaaccccgtctctactagaaatacaaaaattagccaggcatggtggcacacacctgtagtcccagctactcaggaggccaaggcaggagaatcacttgaacccgaggcagaggttgcagtgagccaagatcacaccactgcactccagcctgggtgacagagcgagactctgtctcaaaaaaaaaaaaaacaaacttttttttgagtaattttaaaggaactgtacttttatgtacccttttaaaagaaattataactttcaaaataatacctatatgagtatcatatataatatagtgtgttgtgctttgcacagactgtatcttagcatttatcatc

SEQ ID NO: 31830 - DNA, 1053 bp, Homo sapiens
tgcaccaggatggagtctgtggctaaataaacatcaaattttatcccctatatcttgtttgtagtttatgtcagagtgttacatttcagtgatatgaaagggttggtggggaaggagggaaaatagagatgtgggggtagtttacctttttttttttgagactgagttttgctctatcgcccaggctggagtgcagtggcgcaatctcggcacactgcaacctccgccccccaggttaaagcaattctcgtgcctcagcctcccaagtagctgggattacaggcacacaccatcacacccagctaattttgtgtaattttagtagacagggtttcaccatgttggccaggctagtctcagactcctgaccttaagtgatccgcctgcctcggcatcccaaagtgctgggattacaggcgtgagccattgcacccggccgagtttatctttggaaagaggagagtttgccctttgcagtttgggcacaggctgatgtgacttacccctgtaaacaaaagtattttgaatgcaggaattaatttgttggatacatatactgaaagcaggttgaattctgattttaaacaattttttgaacatttttactgttatatgctcattgtagaaaaactgggaaatatgtgaagggataatgccaaaaattgactaatatttttggtctgtttcttgaatgtatatacattttctttcaaaaaattagaattatacatctgttcacttgagtatatagtgtttatttttctgtcattaaatagaatttttactcgaagttttggaaagagcaatagattttagacttttacatgtgattaatctgaaatgtggaagaataacttatttctaccttttcatttgatatataagtttagaatctataaggttttaccttcaggtagtcctgtctctggcacttgtgacaattccctgtttgtttttatatttagtgtttggataggcaatcacttatttgagagttaagttttatatttgaaagaaccttaataacttatttggtaatctgttgtagacata

SEQ ID NO: 31831 - DNA, 1025 bp, Homo sapiens
aatcacttgaacctaggaggcagaggttgcagtgagctgagattgagccattgcactccagcctgggcaacaagagcgaaactccttctcaaaaaaaaaaaaaaagaatctaatcaacttgaaaaagaacaaaattggagtacttacactctcaattttaaaacgtattacaaagctatgatagtaaagacaacatggtactgtcataaaggtagacttaatagatcaatgaaatagaatccaaaaataaccctcacatttataggcaattgattatcacagttttttgtggggaagaagagtatttttaataaatgtgatgctaggacaactgggtttccacatgaaaaacaatgaagttgaacccctacctcacaccatatacagaaattaactcaaggagtgatgcacagaaaatggcagacagagtaggaagctccaagaattgatccatctacttaagcaaccattgagctggcaaaaaatgaatagaatcaacttttttggaactctaggatctaaccaaaaacttatagtaaccaagagagtacttaatgaaagaaaaaggcttactttcagtactttagaataatactacaatgaattaaaatacatcaaattttatttcaaagcaaattcttttttttttttttttttttttttttttcgagacagagtctcactctgtcacccaggctggagtgcagtggcacaatctcggctcactgaaacctctgcctcctgtgttcaagcaattctcctgtctcagcctcctgagtatctggctgggacgacaggtgcctgccaccgtgcccggctaatttttgtagtttttagtagagacaaggtttcaccatcttggccaggctggtcttgaactcctgacctcatgatccacctgcctcggcctcccaaagtgctgggattacaggcatgagccactgcacctggcctatttcaaagcaaattctaagtatcatgtcatattaaatacttcatgaagtttacactttcaggacatagga

SEQ ID NO: 31832 - DNA, 1098 bp, Homo sapiens
gttatcagaagcagctgtgactaggacttggaaagggtctttggaagaaaaaaaaaagcagcagtcaacagtgcacaggtcctcagtatccgcaggataaggttcttttttcatgccctgattcccacaagctgtgtgcaagctgctccagcaacatgtgcacagctgcctgtcaaggggctggggctggtggaggggggagtgggtagttgctactgtactgagagctgaaattgatagaaattaaccacactttaccatccaagaccttccctagaagttctaagccttcagtagactagagttccaaaatagttacatcagacagattctgttgtctggttgaggagacagagtcctgatgcttcctaatctaccatcttcccagaatctctcaataatatcttacagctaaaggatccatttcagaaccacacattgcatttaatcatcatgtctccatcagtgttcttctcctccagtgttcagtctttccttagctctcatgaccatgacacttttgaagttattttgtagcatttctctgaatgtagttttgtctgatgttttctcatgattagaatcaggttatacattctttgcatcagtattgcagaagtgatggtgcattcttttcattgcaccctatctagtaacacatggtttcactgtgctccatcactggtgatgttaactttgatctcttgattatggtggggcttaccagacttctttactgtgaaattactttttctttttgtaattaagtgttttatcaggagatactaatatttttaaacaggttacatattcttttcatcaaacttgaattcatttatttaggaaattttttattttctattctagaaaatttatttgagaaaattgacatacatttttgtaacagtagggactcatagtttcccattataacaatcattatttatttattttgaagctcaaattgcccttgatttgaccaacaggattccattcaagccggcttttgttgttcttctaacatgtccccatccttgcattctggtactgttgtactatccctgtgcttcagtcctggaatcaatcatttcttcaggg

SEQ ID NO: 31833 - DNA, 1025 bp, Homo sapiens
tagctgcctttaccacaatcctccctctaattttatcaccattcggaatatttcaaatcattccccttgcatttacctatacatttcaaatgagagcttacactgttgtttgatttatcaatttttagacttgtttttaatctattgatgaatgtagacattaggtatatccgtctattttgttaagtgaggacctagctttctcatactttctgtatcctttctaaggtattcataaactacttatgaatcaattactagttatcagtagaaaagatttacatttgactgtgcaggtattcacttttataccaagtgatttgcgactgcttgctttcttatagaaacgttatttttcctggagttgataatttgccttgctttttcatttgcctactttttttttttaagtatcataatattttcaacatctctgctacatgtgtatggctattatttttcatatgctcaaaagcatagattattattttattttctagagagctccttcttagacattctgttgttttctccagttttgacatgtttctccccaggcctgctgcacacacgtctgtctggaatttctcttgagcatcttcctgagacttatcttcatccctgtttacttcttctatctttttttttttttttttttttttgaggcagtctcgctttttcacccaggctggagcacagtggcatgatactggctcactgcaacctccaccttccaattcaagtgattctcatgccttagcctcctgagtagctgggattacaggcacccaccaccacacccagctaatttttatatttttggggtttctccatattggaccaagctggtctcaaactcctgtcctcaagtgatctgcccaccttagcctcccaaaatgctgggattacagatgtgagccactgcacccagcctgtttcttgcatcttatatttacttctatttactttcttttctggtgaattatttccatcaacatttgctgcaaaaggagtacacataggcc

SEQ ID NO: 31834 - DNA, 1050 bp, Homo sapiens
gcctaaattatttataaatatgtatttaatatagataatagatgtattagcaaatccatgagggaaaatcactttttggctgggcacggtggctcacgcctgtgatcccagcactttgggaggccaaggtaggtggatcatctgaggtcagtagtttgtgaccaggctggccagcatggtgaaaccatgtctctactaaaaatacaaaaagttagccaggcgtggtggcaggcatctgtaatcccaactactcgggaggctgaggcaggagaatcgcttgaacccaggaggcagaggatgcagtgagccgagtctgcgccactgccctctagcctggatgacagagtgagactccgtctcaaaaaaaaaaaaaagaaagaaagaaaatcacttttcaactcttacaccagtgtttagaatagcagggaaaagttatattggagccatactttatgccaaaaataaaaccagctttcaagtgagtgacaggattaagtataaaaaatttaacagattatagaaaaccacatgtaacttgagtatcagatctagaaaatttttttattgatctttcagataaatgatggatgtttatataaaattttacatctctttcagagtgtcatgtgattacatgtcaagaggaagcaatgggggaaatggcaatacaaagtgattttatttgaattagtaatactttaaagataaatataatctttgctgacctctttttctgggtttcacaaacaattaaagaatttcacatcctttagcagctagattgtttttccttctctgaaaaagaatgcatgtttgctgtattaaaattataaactaggtataaccttgtaaaatatcctaataaatatacatgttcaaatgattatatatgtattgtggttatgttgcctattagtatagtaaacacatacattctgtgaaacccttgtaaaattttgcatgacgataaattgctaaggcactgcactagttgaatctcacatagtgtaaataaatatattcagttattgatggtggcaaattataaac

SEQ ID NO: 31835 - DNA, 1890 bp, Homo sapiens
agcgagcctctcacctcagcctcccaaaatgctaggattataggcgtgagccaccatgcccaacctaaccttttttttttttttttaaagaaaattatatgtaaagttacttttacatgacttcttgctacagcaagatattaattaaccgctgtattatcttggcagtcgagttgaactgaaaagattatgtgaaattttcacaagaatgtttgctgaccctcatggcaaggtatgttttagtatttaagattatttatttctatagggtatcatttgtatattgtcaaagcagaaaaactgtaggccatttttattttattgtcccaaaatggcagtaatattttcaagcataattaaaattgtttggtatcatacgtaatttagaaattaatctctggtaactatttgagcttctccaatgatagatggtctaagactgaaataaaggggatacagttacaactcaagtaatttagtcaagttggtgtattttgtgttactaagactgttttagtgtttgtaaaagacataattggggtaagttgaaaaggtttttaacattttattttgttttcgtctgtgattaattacagcattgatgtaaatatgtttcaattttgaaataataattttgtagaaaagaattgtcattaacacaaaggcacaaaatgtggttccagccatagtttggtagtaatataagagacatttcttacattgaagtagtccataaaaattttcagaactttgttcatttttaatgttgattaaaatatatttatttaagtacttatatgtaatgtgcatgtgtactgtgaaattttggtttaccttgatgcatagtactgttataaaactgtggtcacatattctgtttccagcaatatgtttgataatggtgaaatcttcccttaggataccaaatgtctacaggagactttctaacctaagtgagcgggagatgtggcaaggaaataagaaaaatattaatgaatttcactttactgtttctttttattgtcttcactttattgttgcacatctcatttcctcctcatttttttctatttttagtattttcattacttacaacactacttaaagataatgaaatcccacattgtacataaactaaaatccagctaaagatttaaatgcagtgggggatatacttaattatttaaataaattgcttatactttaaaacaatattttcaaagattattctatcagaagttatatttatttgagggtaaaatatcccattaaaagacaaagaagaaaatacatttggtaagcagtttactaaaatcttttaaagtttgtaacttataattgaacatgtagataactataccattctagatagatattgctatcactgattacagctgttagtcttactttaatgtaaaaatttctataaatcctgaacagattaactgttgatatttttagttggcaatataagccaaaggacaagacagttatttgggttaatttgttttattaaacatttaaattaacagtctgttcaactttgaaatatatagttattaagcatcttcagtaattcctgctactggaagatataagaccaaagctagattatttcttgaagtcacagtttttgactttttgttaagtcagtaatgcagtttggttggatgccatgatgtatagtgataaagacaaacttttttaaaaaagatcaaataggaaagctgagtttaacactggtataggaacttaactgagcacaaatgtttggcctctcttaatacaggtggagaaccagctactattttccctaggattgcatcagatttctcttcttagggctttatagcaacataaaattcttatctacccatcttgtttgtttga

SEQ ID NO: 31836 - DNA, 1864 bp, Homo sapiens
tttgatgaattaggtccaggttatgggatcagccaatcaagtcgactgtcgtcttctgttagtgccatgcgagtcctgaacacaggttctgatgtggaggaggcggtggcagatgccttggtactcttctccattttcttatcattataaatgttccaattacgaaactgttgaatgagtaggccagtctatccatgtgggaaaggggttggggaaaaatcagtgattaaatctaaagataaaacgtgggcagtgtaaaaagcagaatataattaattcttgatccttattaatcagaattttataccagggccagtattactgatggcctatcagaaatataaatatagatgtctttaatatggtaatgtgttttatacactatagtatacttaagggagataaactatataaatatgtacacttaaaatcatgtaatttcaactctagcttaaactttggtatttaggaattattttactttggggctggattttgtttagtattttatctgtgttttttgaactaaaagaaagtacaacctcaaggcaaattataattaagatatattatatcttatagttagatataattctttatgtctgacacattaaacagtgagatttaaaaacatattctacagatccatgatagcttgtcagaagattgcaatacatatatcgttgtttttgtcacttaaaattatgtaagaagtagcatttttaaaaatgtatgtaattggctttggctaatttcccaagtcaattcagtatcacttcctctttcagattatgatattaatcctatgtttgagaaacatttactcagcttcttacccagaacttgtaagaggcctcatctttgttttgaaattaaaaaaaaatatgcttcctaaaatcatagatcccatcttaactagtgttgatataatacagtgtttgccacatagatttgaaaaggcaggtttttaaaaatattcattggtaatagctataatttattgaatatcacacgtgtagttctgcgctaaccatttcgctgtgctgaatttttcccgttacttcagccacttgattattttttataaattaatataattaagtagggactttgttctcttcaacatgggatatattgatcacatcttgttctgatgatattaaattaatgagatgtttttgatttgctattcctcatccctgtatctcaaatcatgttttctgggttttttaaattggataatttaccagttaaattctgcttacataaatgttacgaattgattgggtttttcttgaactattacttagaacactgagatggtgtgtttgaattatatgaggaatgtttaactaccaaggctaaagtttgactcccagtaatctgattctgaatacttccattatttgcagagcacagaagttccacttacaactaccaatttttaggaaaaaactttccagctagtaagcctaatttgtgctggagaaaatcatagaaatacacttaactttggaaatgacaaaaggatccaaataggaagaacatttaggtttctttgagaaaactggttatgggaatattttttgtagcatcactatttctctttgaactaaagaatattgacaagattaaagacacagcctgctaataagcagttctttgtacctatgtgtgaaaaaaacgtaatgtttctgatcataggcattgttaatgcctatttcactgtgctgattagcaaaatgttcttcattattttcaatttttctctttaaaaatttactgctctcagctcttaggagacatacggactaaggtatagacattgctattttctgacatcttatgataccataactttttt

SEQ ID NO: 31837 - DNA, 1081 bp, Homo sapiens
agatcatatcatattcttccctgatcttgtatatttttagagtaacttaatctttagcagtatatcatagtagttagaagacgtgtgcttccatatgtgctgcccagaccagtattagcatcatctgggagctagttagaaatatacaatctcatatgccattacagctctactgaatccaatctttaacaagatcatcaagtgatttatatcacagttaagtcttgagaagtacatactggtttagatcatagatactggagtctgcccaggtttgaatactggctctttgaggttatttgaagttactgcacttctataatttcatctgtaaaatgaagaggagaatagcatctacataggattgttgtgaggattaaatgatgtagcatatttaatagacataaaatattgcttagccctgaataagcactatatatgttggctaataaaattgtcattattttttaattttttaaaatttaaaaaaattttaaatactgcagatgatccttattatttttaatcaaatgtcaactgaattttagactgcttttgtgtacttctgtaccttgttattcttactgccttcagtaaacagagaaataaacaatgaagttaggaaaattgaagcataaagataaccaaccaggaatttccatgtccattgtctaaggataaaaattaattgtgagatattagttcttttctgaaacaatactgaggctgatcttagggcaaagactcaaagggcttttttttaaaaatacttaagagacctccttttcaggtacattgtaagtaaggatcacttcactggaaaatagaataattttttgcatttggcttttcactttgaaacccattccataatcctccacatcttctcctaaattgtgaaaacacagtaattgactttcttagaccaaataggactttaagattagaagactttccctctgtaaaatcatttgggttttatattggagggacttttgtttgtttgcttgcttatttatttgaatgactatatgttccattccgaattcttttgtaaaaaaggtattatgtaatttgtatg

SEQ ID NO: 31838 - DNA, 1067 bp, Homo sapiens
aataaggtagagaaatattgagaaaattgctgaagacttagttgtgattgaaactgaggcattctgactttaaaatgcttaatagtactgtccatttggccacagcctttttgttgaccatttgtcatcagattagctcatggtggtcaggtttatataattttcatgttttcagtgatttaaatgatataagttatctttgctttgtatttcgtagtatcagcaggcagcagcaaagccagttcccttccaggaagcctgcagcgttcacgaagtgacattgatgtgaatgctgctgcaggtgccaaggcacatcatgctgctggacagtctgtgcgaagcgggcgcttaggtgcaggtgccctgaatgcaggttcctatgcgtcactaggtaagagaactgattatggaaaattgtaccatgttctctccctgatctctgtgaagacaagttcatataccttaatcatttctattcattcttgttatttaaggatagtccatatgttttaatataattctatattgcggacacacttctgaggaatctgagctgccttgtttctccttttcccttgttctcatcatcgtcttgatcaaagaaacaattcttgaatccatgattgcctgtagaattttcataactgcacttctaccacatctagccactggtttctaagggggtttgggaagggaattggcttgtatctaactttcctgttttctttctcctacttctcttctcttaccaagaatgtgaagccttttggagatctgggagaactgcaaagctctactctgtctaaccaaaccctaaacatatattccaaaactctattcagtttgatttcttcatgtttttatgtctatcaaattaaaaagttgacgttggtttgcgtatctcttcttcatgcttccatttttttcttttgggtagtactgctggaacactaagcaggcagatcgccagaacacaatacaggttgagcatacctaatctaaaaatctgaaatctgaaatgctccaaaatctgaaactttttgagcaccaacatgacactcaaaggt

SEQ ID NO: 31839 - DNA, 1065 bp, Homo sapiens
atgcatttatctgggtttttttcttctcatgtgaatgtgatgaatatttctcctgtgatttcatttataaaggtcagatacccttgagttaagaatatttgatttggtctaaatcccttaaggaaaatatttgataaaatttaaaataatatttgtgttgacaataagcaatatattttttaaatttgtgaacttattgtttacataaccaaattacatttaccaaatgagtacctcagagttttcaagaagccagagaaaagggctgcatttgaagactgttctgctttgagaggtcccaatctggctgatcatgaaaatccctattttgatgaattaaatcaaatgcagggccttttgacaaatatggcttttatgacactatgaacaaaggaccatttttgtctttgttaggaagtctacatatcttaaaacattgaaatactgtttttaacagagagtattcctccaaatttgttaaatatggctcctattcttcaattctgagatgagtctgatacagaaagattttttgtcacaggtgatctgtagagaaacatgacagattaagtgttattagtataaaatgtgaactttttacttaagggtttttttggttttacttaaaaactacccatttggaaacaacagatggtcttttgattttttttttattagaaaaatgacacaggcttattgtaataagtgaaacaatgcagaaaactacagagaaaaagttaatagtttcctgcctattaaagaaacaaacttttgttgaggctaagatgggaggattgcttgagtccaggagtctgaagttacagtgagctatgattgtaccactgtgctccagcctgggcaacagagtgaaacgctatctctaaaaaaaataaaaaaacaaacttcattttagagtatatccttttctgtgttatatgtatttaaacatatatgacaagatatgcacaattttcccctactctttttgtaaaccaaaaaaaaaaaaagagagagatcatacttgatacattacttagaaacttgcttttttttttttggcttaac

SEQ ID NO: 31840 - DNA, 1037 bp, Homo sapiens
agcatacacagattttctgcatcacactatcatttattgacatttagtgtcattttaagttgctgttcaacttttaaaatgtttgtccttacttatgtttatttgtgtttgctagtgcattgaatagggaggcgggtttcagggctgtgttcttaacagtttgaatattacaacccgcctagcctagtaccttataatgaatcggcattacaaagtacattgacctttctgaaagttggagattttttaaatgctttcttataaaatggaatatcccttaaaattatacttttgttgatatcaaaagagttttatttttcatgttgtcattaatgttaagatgcttaaaaatgaaccttaggaaattaatttccttttaattagcaggtgcttctaaggaaggaggtgctggagcagttgatgaagatgattttataaaagcttttacagatgtcccttctattcaggtaaggctaccagtggcactccccgtgaatattgcctgtgtgcctgttcatataattatttgtctctgtccctttttaagaattcttttttccttatatagctatataaatgaaatatttgacttattaataccaagccattatttgttggtacaattagattttcaagtgatttttcagtgaggctgaaataaaattgaatcatattgttgaatcacattacactgcagtgttcagattcttaaattaatgagttttgagctcagagaattagattagttgatgatagaagtttggaagtcattcatatagatataattgaagtaaagtggacacatgcataaataagagtattatttccatgacttaaaaatacacataaatgttatattgtacataacattctacaacctgactttttactcagtgctttttttttatattttttcgtgatgtaaaatttgtgattctagttcattcatttggattgatggatggtattctattgtatgtacagaccacagtgcatgtatagtttgcttctaatttttggctattccatatcatgct

SEQ ID NO: 31841 - DNA, 1050 bp, Homo sapiens
aactgctaaattatgatttgttttcttccagttacttttccaattatttttacatatacaaatattttcttggtagaagaacaaaagtggcactattcattgtgtagtttttttgtaacttatattttaccctaagcattttctcgttgtcttaaattattaattgaaaattattcatggctaaataatgcctaggttgccatgagccttttctccttctataaaccgtgtcagcattcttttatatatatctttcagcacatctgcaatgatttctttggaataaatttctaaagttcgctggatcgaaagattcagggatttttagtgttctttcagtttggcaaagtattttccagaaacaagcccatttcagttctgaataaacaaattcttttttatgttgcattaaaatctacctccttgtagcatatgcagggaaaatgaattatttgtcaacatgctttcagatacttgaagattgttctatttctctttatgactattctgttttctggactatacattatctttcccatgattttacattgaatggtggtgattcagtctcaatgtattatttgctactccgaggtatataataaatagatagatgtgattagcttctaattaaagggatatagtaggtggaaatgtataatagtggcgtaagccagacacagccactgggtttgacaaatctcttttcaagtaagattaccaaaataaaaaaaaaaaaatacagtgagcttctttggaatcgtgacttaatctgcttttgtagtttgggaatgtattttacttcttctagagatatatatccagattagggctgtatgcaatttttagcaaagtatcctatccagttaattaaagctcataagtcttgtgtttaatctttagtgtatgttaatttgctttgttctttggccttcgtatgccacccttttcttctcatattgtattaataaatgtgtagcctttaagccaaggagacttgaaaaaaaggctatggctaggttcatacagtatatgtatcattgctataaa

SEQ ID NO: 31842 - DNA, 1572 bp, Homo sapiens
acctcatactggaacagcccatgtcttgtcggtagtagaatggatattaataaattgtggtactttcacacagtagaaaactatcagcaatgaaaatgaatcttccaaacattatccttccaacattgagtaaaaagaagctagataccagaatacatattgtatgattcattttatataatgttcaaaaatgaacaaaaccaagtgttagaattcgagactagttagctttggtagtaaatgtagacttttaggagtctcgagggtacttacacgatgctggtaatctgtggatctggatactggttatactggcatgatcattttgtgaaaattaattagctgtgtacttatgatttgtatactttgctgtattttgataaaaactttaaaaattaatttcccagtagtttgagaaaagagttaattttttttttaatggtagggacatatttactcttttcaattcttgtgtgtgtgtaggaacagaatactgtttccatgggaacttctggctgctctgtgttttagtgcttaactttctgtagatttgtatgtctactctttcttagctgcattttttttaacataacagtagcaaagaagtttatttggaattgtattagtgtttttaacaaagccgtctatgtactgcataggttttaagcttattaatttatccaaactgactccctaatagtgttatgctaaaaaaataattttttaagagtagaagataattttttcctgcaagttgtattacttaaaaacactttctgaaatagaatgtgactttagagtgtctatttgattcttttttcttttaataaataagtcttaaaactttcttggcatattttaagatatatttaatagttaaatagttatatattaaaaatagttatttttctttaaaatatttaataatatctctttataggaattatttaattctaggtgattgggtgtttgtttaagtaaagaaagttcattgaaaggaaaagattctggcatattcatctgaagcgtgtggtaaagctgcttctctgcctcgcccatgttgtttgtcatggttgatttgtgcagggtcctagagaaaaccatctcttctcaggagagtaaaatacattgtgtgtgtgtgtgtgtgtgtgtgtgtgtgtgtgtgtgtgtgtgtgtatgctgggagatgtttcatttgcatataagtagatgatactagtgtggtcattcatattccgaaaggagccttgtagaatcatttatgaaaacaaattgttttgtttggtttctatggcttaaataaagagcagattttaagattacagagttaattatgcacagtaatgagcactgtggcagtctatgctttactgatgcaataagcatcccagcagaatgaatattgcataaaaccttattttctatttatataaattttcatgtcaaataagaaaaacagatttctaagcctttagttttgaatgcctttgaaattttgatatagaataaggattatagctaatagagaattttttagatgcatggagaatttttacctttcatctggcagta

SEQ ID NO: 31843 - DNA, 1051 bp, Homo sapiens
agtctcatttaacgggtgcagggggttgggcaccaatagtaacatatcctcaaacctgatgttgctaataaacttgaatcttcaagaaaaggtttacatgttttctttgtacatatagaatagtacaattgatgttcttaaagctgcagtaggctaaactgtcttgaaaatttaagtagttgaaatgactaaattttgtaaaggttctaaataaacctgattctgagcctcatttattatttagtttgctgttatggctattatggcatgtgttatttaatttcattaataccaaataatggtttaaattgtgattgtcccgttacttcattggactgttcaaagtcttgaatttttaagggacccctttaaataaaagggcaaaagtcttcaaatatatttttaactagtcagttatatctacctagaaatttcaagatactttatcaattatcatggcctctattaaactttgtatagaactgactttatttcttataaataaaatagttaactaaggttgtgctgctgagaatactgcatctgcatgtgaatattaaaatatagccagttgtcttatttttgaagtccttgaattttcaatttctaataattttactaaattttttcattttagtttaaattgaagatgttttaaatttttactatttgattcttttacttctgaaagcttgtgattttctttagctctgggaagttttctcctattattttttcgtaagcttttcccctttattagtttagtcttttcttacctaattgttattcagatattgaacttcctgggttgatcctctgtcttttatgttttgtcttcgctttcaagttttatgtctttctcttattctatattctgggagatatccttgactttctcacccaatccttctattaaattttaactttgacaaacaaaagtttaaatgtgtccaagaacttgctttttcctttttccgtggttccatttccacaaaatcctgtgtgtgtgtgcactcatgtgcacatttgtgtgtaaaatgttgtgttccct

SEQ ID NO: 31844 - DNA, 1054 bp, Homo sapiens
attaattatttttaaaaaagtaacaacctctgacaaagatcagagggtaacatttcagctaattctcttcttcaaaaatatatacctttataaaaaatttaaacaataaagatatgtatatagtgataggctgtcttgggatttatatagttcttaacagtttgatatatactcctgcgtattagtctttgtcacatccagtgcacatacactataccagaatcatgtaaacatataaaacatgaacatataaaacaaatggattatactgcccctacctgatgttttttgtttatttacgaacttacaaactttgtttatttacgaatatacaaatgtcatttccctttcaaaattcaaacaatgaaggtaaagcaaaaatcccttcaaaaccaccttcaagccccgagcccaggtgtaaacagaggagaacacttttattaatacgtagcatgtctttttctacctgttactgtgcctttacatacatactaaatatcaaagtatatggttttgctttgactgtgtttacgtaaatgataccattctgaatgtaattttgccatttgctgtgtttactcagtatgggatggagctttttaaaaaaatactatcgtgttatttcgcatcattttttaaaacggttgcatagtattctataatatggacatatcataaccattttgtcttctatagaaatttgtttactatatataatttttctaaatggttctgaaataagcacctttgtacaaactacatgtgtttgtgtatatacacacagatatatttcttaaaatagtctggacgtggaatttctgaatcaaagttttcatttattttagaattgtgttaggtatagctaatttgctccaaaagaggctttaccacatacactcccaccagtagtgtctgctgtcctacattcttttcagttctggttattattaaaatttgtctatcagatggttgaaaaatatctcaccctttataaacatctatgctttctgataagattgatcaccttcatgtgtttggttatttatatttcctt

SEQ ID NO: 31845 - DNA, 1050 bp, Homo sapiens
gtctttgaactgaaatgctttctatatgtaaatagttgtatttgttgaatttattggaagtaggaggtgatgttaaggtttagaaatcctattataatgaattcctaggagatttcaactaaaaaaattttttagttcttactgaaataagccaataatttatttcaaaaagtatctgtatctataatttactggtaagaaatgaccacgatgaggaccaaggcttaagtaaggttttaggaaatgaaatttgacacatgtatatgggtgagtcagagaagaacatttggcaactaaaggcaatatgtcagtgaccctcctctcttcctcaattctctaagtcacaaatttaagaatgaatcatagcacaatatattggaaagagaaagaaaagcaaactaaaaaaaaagtgctgtcagttttatcccatttcactctgaagaaaatttgtatatgaatataaaagtatcagaaaggatacagttaataaatacattctctgaatgatagaaatgtggttttttctttgttcctatttatatttcctaattttcttttataatgaatgtacattacttttgtaataaatacatttttaactaagaaaagtgatagcagaagtgcagaaagtgtaattatcctgaatataaaattagaaggaccagtggaattggtgttgtatgaaaacagtcgtgtgaaacagggatagcatcagattatcagtgatattagccatctctttagtttttgatattttatattttattgtttgtatgtttgccttaagttactttggcatgatttttatatgcctttaaaagatgtcttggtgactgagtagacttattatgaggttgaaactaggatatttttgatggatttggaggaatgattttatgatgaaacatgagaaactgctttgtgtaaaaattgtcttttcacaaacatacctgcaaatatgtagagtcctacctatatgtgacttctttcaactgaagagagatgggttttgtgtcttctttcagtgcgttaattgtgaaagagagttgt

SEQ ID NO: 31846 - DNA, 1032 bp, Homo sapiens
ttatttaggattggtatttagatggtgaaaaagaggcttctagttgttttcatattggactgacagtggcccattgaagagcattatatatgctagatatgtatatctttgattcttcttatatatcccataggccatttttggagattctgagccatcatgcttttcctagagcctctggactcctttttttgctgtcccacacattttttcttatctgtctttggctctttgcttctagcagactagagtaaaaatctcatgctaagtatttaagggtcattactaaaatgaattatctttccatcgtctcaaatatccttcagcatttttaaaaataaagaaaacccttataattagctattttaaccaacttagtttttccctccatcattttagaaggtaatagagttattttagtatgcatagagttgttttcttaatcttgtcctttttttttttttttttttcttttggagacaaggtctcactctgtagcccaggctggagtggagtagcgcaagtatagctcactgcagcctctgtctccaggctcaagtgatcctcccacctcagcctcctgagtagctgggactacaggcacgtaccaccacgcctggctaattaaagacaaatttttttttatagaaacggtttcaccatgttgcccaggctggtctcgaactcctgggctcaagcaatccacccacctcagcttcccacagtgctgagattacagttgtgagccaccgtggcaggtcttgtacttttcaaacctaaaatgtattgttttttttaataccctggaaatttgcttcacgtactgtgatgcagaacactttgtgacagtatctctttctaacatacctttactccgagctctcttgttctaaacaactattgctttataaagtagaatgtttatattcagagatacacaaagaggtcaggcattctggtgtatttcattacagaagcaggtagtgagagtagagaaggaccattccataataattatacagtattaataaa

SEQ ID NO: 31847 - DNA, 1105 bp, Homo sapiens
tcatgcctgtaatcccagcactttgggaggctgaggtgggcggatcacttgaggtcaggagttcgagaccagcctggccaacatgttgaaaccccatctcttctaaaaatacaaaaaaaaattagccgggcgtgatggcgggtgcctgtaatcccagttacttaggaggctgaggcaaggagactagcttgaacctgggaggcagagggtgcagtgagccaagatcgcaccattgcactccagcctgggtgacagagtgagaccctgtctcaaaaaaaagaaaaaaaagaaaaaaaattaaagttaaaaaaagcagcatggcacatgtatacatatgtaacaaacctgcacgttgtacacatgtaccctagaacttaaagtatagtaaaaaaaaaaacatttcaatcgctgtcattacctgctttgaaacatttatatgttgttttaaaaattaaaatgaactaaaattagtttctttttcagagtttttacagcaagaagtaacaaagagttaaatgtctaaaaatagtgtttatattactgatgtaatactatcatcataataaagaatatttataaacataagtgtgggtaataaaaagaacactaaaaactttcagatatgtggaagttagggtgaagtgttctgagtagagccagaaatgatgtttcatgttttaataattaactgagaaggttttcagatctcttctctagattgggtctagaaggtttgtgtaggagttggagttattttcatttagttacatccctatgtgccttttttctcctggtgataattggaataacatatatattcaggtaaacaatatgaacactgaattgaaaatttacaaaactaagggttggattcagctctgcaaccttcagcaaaatctgtcacctctgaatttctttttccttagctataaaactcagggtttggactagacttttaaggtacctcccttcttgaaatactgtctgaaacaaccttaaggcctatctacagaagataggttaatttaattgtggcaagttgagataacaggctactatgaagctgtttaaaataaatgagggaagtctattagtatagatgggg

SEQ ID NO: 31848 - DNA, 1203 bp, Homo sapiens
tgcatttaatatctatagtttaccaacgatgacactgcaagcattgtgtcttctgatcgtgccagtcgtggacgaagggagagtgtggtgagcatgatttgcatgcaaagaaataagatgagttttaaatgacagcaatgcatgatcacatgaagtctgttggaaagtgaagtttgcatttgacaaaaagagcattttcctcaaatttagttatataaatattttgccttataaaacatgttgagaacacatattctctgtgggctgtgcaagctttcattaataatttgcctttttacatctcttaggagtgaatcattatttgaaaagtttttactttttcttctttgttgctgttttatgcacatacatgtgtgtgcagttcaccaaagacaaatttcttcagcaaaattaatgtttccatattgtataaaactcataactatggattacaaatcatgttaccattaattgctttctatattgttgtatttagatttaaccagtgtttatccacctgttaagacctgtaatccagtcagggtggctcatgcctataatcccagctacttgggagactgaggtgggaggattgcttgagcccaggagtttgaggctgcagtgagctatgattgcatcactgcactccagtgtgggtagcaaagtgagactgtgcctctcaaaagaaaaaaaaaaaaagacttgtgaacttaagaattgctaatgacaaaatttaaaaattctagtcttagacattcaattggataataattgtagaggcaacaaatagctatgttagaatacaaataatataatttcaggttattctttaatgaagctttaaattttacagaaaactgatgacatttttgttatatttaagaaattgatttggaaaatacattgttccggatggtatgtcagcttagagctagaataaagagcataagaggctgtaattcctttaagaaaaataggccatttaacatgagttatgtgaaagattataaacccgagttttcatagagaaggggaacattaaatgttggagagatttgttaccatacattcatttatttaattaaagccgttttagttccttagcaaagcaactaatgctcacgctcacaactgaaggagaaataatatgccacaacacctaaaaacaccttggaacgcagtggagtggaaagggcagggact

SEQ ID NO: 31849 - DNA, 1050 bp, Homo sapiens
tggctcacgcctttcatcccagcactttgggaggctgatgcagcagaatcacccaggagtttgagatcagcctgggcaaagtagtgagaccttgtatctactaaaaataaataaatacaaataaaataaattagctgggtgtggtgctgcatgcctgtggtctcagccagttgggaggctgaggtgggagctgtccgggaagtcgaggctgcagtgagcgttgattgtgccacagcataaaaacgaagaaaaagtgatcttgattgaatcagagcagtagggatacattgccttttctcattggtggagatttttactgttgcatgtatttagttactatttatataccagtagccttggtataattttaatgaatttaatttttaaaatatacttacaattttgtgttttattatttactattacactgtttaattctattgaagaacccatcaaaggatataactgggacactttggagtagagccagtacacccaaaaggaaagacactatggtgtgtagcccaggaaaatgtgtggtattagtgttatgcattcacttttgactttcagtgtccttgatatttgagtaataggtacattctaatagagattgacacttgctgaactttgttcactgtatgtactttctttctagtttgtttcctaatgaaaactttcaggcaagtttgacagttaaaatttctttaaaagattacaatagcaaattttggatttttttttaacttttaaagttaaaaaaaattttcttttttctctatggttatagcatcaaaaatttggaaatgagcccttactattttcacttttacctcctttgatgaatctttcttttctttacaacaatataaaggccaacttttacttattggggtgactttttttgtttgcccattgttctagtagaaattggtatgcccaaattatggattttcctaccagatagattcaacatttttttttaaaccagctgaattctacattatattttggaaaaggaaaattgaaacaggttatttccagtttggc

SEQ ID NO: 31850 - DNA, 1030 bp, Homo sapiens
gtagaaccagcaaaatttgaacatttgggggcctttaaaacaaatctgcaaacaaaaaaggaatctgcagttaaaccgataataactatataccagaatgtatataatcaggatgattttatttttatggcatttgtatcattaaacaaatttaagatataactccagtatttaatttcattatgttgattttgaaaatttgttactatgggatagaataaaactcccagtatttaaaaacgtcaatgtataaatgtaaaaattaataaaagttttacatcctagaggagattctagtacattactctctgtgagtgcacatctaacacagtttaaatgtttagactttcctggaaacaagtctgaaggctcactactaatttcatttaaaagaaatataattgagataaaactttttctgttttacccaaataatattgtgagttctaagttttcatcaaattatttgcttttaaaataatttttccattaagctgaattgttagacaacttttgtcctctgtagatggcctaaacactgacctaaatttccttgtggtttgctatataattttggagttatgcatttctcagccagttatttttaaaaacttaaggccgtgtactaagaggtctaatactttttgaacgtagtatttgatgtttgaacattagcagtacctgaatgtgaggtggatatatttatggtcttatgctgcattcttaggactttaggtttctccttttgtccaattaactttcatatactatctttttgaaaggtggcttaccagaagctatatgggctggaaatgttggtgtcagtgctatagacattatgtataaaaataaaaacagcaaaggtagttcaagactgtgaatggtaggattgggggagggaagattaaatcaaagttaggaatttagaattgaaacaatctgtgtctattagttttgtataatgattggattattaatagtgcagaacattagtagctgcttggtcattgctttatacattgaaatacaa

SEQ ID NO: 31851 - DNA, 1031 bp, Homo sapiens
gaatctagggaggcagtaggccttgctgagctgcggtgggctccgcccagttcgagcttccctgccactttgtttacactgtgagcatagaaccacctactcaagcctcagcaatggcggacacccctccccctgccaagctccagcatcccccggtcgatctcagattgctgcgctagcagcgagcaaggctccatgggcgtgggacccaccgagccaggcacgggagggaatctcctggtctgctggttgcaaagaccgtgggaaaggtgcagtatttgggcagaagcgtaccattcctgcaggtacagtcactcacggcttcccttggctaggaaagggaaatcccccaaccccttgtgcttcccgggtgaggcaatgccctgccctgctttggctcaccctccatggctgcacccactgtccaaccattcccaatgagatgaaccaggtacctcagttggaaaggcagaaatcacccatcttttgcatcgatcttgctgggagctgtaaactggagctcttcctattcggccatcttggaagtgactcccatgatccagttttatctttgttccacagctaaccattgttgcagcaccacttaataaaaactcagtatttgtcccaatgttttgaaatgccaccttgaatgtataccacttttccatatgcacttaggttgatttccggcctttttattctgttctgctggtccatctattcatgcaccagtaccgcacagttttaattacagaggctttgtagacgttttaatgaatagtagtgctagtctccaatgcccactatagctttttgcccctcagtattttcctagatattcgcaggaatgtttctttttccatataaactgtagtatcaacttgcttagccccagtaacaaaaactgtcctcaaagtgttcttaaaatttagaatgacttctcagcattaaaggtggggagatatcacatgaaaattgtatttctggtttctcttgaaaattgggaagcgctgtcacatgggcttttt

SEQ ID NO: 31852 - DNA, 2054 bp, Homo sapiens
tgaggctgcactccaccctggaagtatcagtgaacagatgctgggttctgatgggacatctgcagaagtcgtgatcagaggctcaaccatcaaaggcattttgaaggctgagtgcggtggctcacacctgtaattccaacactttgggaggccaaggtgagcagattgcttgagctcaagagttcaagactagcctgggcaacatagcaagaccccatgtttatgaaaaacacaagaattagctgggtgtggtggcacacacctgcagtctcagctacttgggaggatcacttgaacccatgaagtcaaggctgcagtgagctgtgatcacatcactgcactccagcctgggcaacagagcaagactgcctcaaaaaaaagaaaaaagaaaaaggcctttctgaagcagaggacctagtgtgtgcagggctgagcactgcatctcagcaaggagcagagctggtgaggctcataccccctgtccttgcaaaccctcagtttcccgacatgtgaaaggatagtgttgtgtgctgtggtatcagaagctcaattcagctctcactttctaggatgcttggaatccctgaatctacctattgaaggcaggctttaaccccagacatgagcagccctgagctcagccatgctgtcagggagagaggacaaagagggaaactataccctggtgaatggggtatagacggagaacctggtagtgggaaaatgcatcagaatctctgtctctaggtacactatttgtaagccaactctagccctccattttacaagtgggaaaactggctctgagagacaataccacttacttgccccaaacccagtatggatttaggcctgggtggagttaagcgagcaaggaaagagtggtgggagatgaagttgcagagtagtgggatggaagacagatcgtggtaaaagccaggtgtgatgggagtcaccggggtgtaagaacaggcagagctgtgacccgctttacattctgtagagactcccctggctatggtgtggaccacagactggagaaggtagagacagacggagtagttaggaggctatatcttggaagccaggagacagaagatagtgactggaaccaaggaccaagtggagaaggggagcacctggtcagattctggacatactttgcaggtagggctgacaggaggccccccaaggtggtttttggtttgagcagctgctaggtggacggtgttcccattggttgaaatggaaaattggagagagcgacactggctgaagtaggaagaaaatcaaaagtccagtttgggatgtatgacatttgaaagcacccagggtgagatattgagtaggcaactggatattccagtctagggttcaagaaagagctccaaggtggaagtataaatttagaagctatggggatacagatggtatttaaagccaggagaccagatgagatcacctaggcatgagtgtagcctgtagcctgaatgtactgtgggatgccccaacatctcatctggaggccaagagagaaggctggagggcagaggcaaatcaggagagagcagtgtctgggaaggaatgtgattccgctggaaacccgccaccgggaggttggggaaggtgacgactaagaatggactattggatttgacagagggggaaggtcactggtgcccttgacaagagaggttccagtggaggaaaaggacatgcacttggttaaggagggttcaagagagagtgggaagagaggaggtgtggcaagtacagacatctattttgcggggcttgctataaaatgggactgaaaatggtgtagtggtcagtgcggaatgtgggtcaatcaagggagggcttttaaagaaggggggtgtctttgcaggctggtgaaaatgatccagtagagagagaatgctagatgatgtagatgagcaaggggattgcaggagcaaagcccgtgagctggcccaagagggtgggaatgcagtgccaagggggagcatcgacctgaagagtggggaaggctgaatttcaggtggagatggagg

SEQ ID NO: 31853 - DNA, 1031 bp, Homo sapiens
gaaaaaatgctcatcatcactggccatcagagaaatgcaaatcaaaaccacaatgagataccatctcacaccagttagaatggcgatcattaaaaagtcaggaaacaacaggtgctggagaggatgtggagaaataggaacacttttacactgttggtgggtctgtaaactagttcaatcattgtggaagtcggtgtggcaattcctcagggatctagaaccagaaataccatttgacccagccatcccattactgggtatatacccaaaggattataaatcatactgctataaagacacatgcacacgtatgtttattgtggcactattcacaatagcaaagacttggaaccaacccaaatgtccaacagtgatagactggattaagaaaatgtggcacatatacaccatggaatactatgcagccataaaaaatgatgagttcatgtcctttgcagggacatggatgaagctggaaaccatcattctcagcaaactatcgcaaggacaaaaaaaaccaaacaccgcatgttctcactcataggtgggaattgaacaataagaacacatggacacaggaaggggaacatcacacaccggggacagttgtggggtggagggaggggggagggatagcattaggagatatacctaatgtaaatgacaagttaatgggtgcagcacaccaacatggcacatgtatacatatgtaacaaacctgcacgttgtgctcatgtatcctaaaacttaaagtataataataattaaaaaaacccgggatatagagacatacagaataaaagaaacaaatagaaaagacagagtaaagtagtatattcaaaaacaaaaatattcataaattacattaaatttaaatggactctgggaaaaagagtgtcagtcaagatttttaaaaattcaaataaattctgtttacagaaagccacacaaaacctaaggttaccaaaagggtacaaatacaagtacatagggcacatttacaaaaatagtccgtatgcctggccatagaa

SEQ ID NO: 31854 - DNA, 1048 bp, Homo sapiens
ttttattattctctgtgtctctccgtgtgtgtgttgcatgacaacgtttcagtcaaccacggactgcatatacaatagtgatcccataagattataataccatatttttactgtacctgttctatgcctgaatgtttagacacacagatacttaattgtgttacagttgcctacagtactcagtatagtaacatgctgtgcaggtttgtagcctaggagcaacaggccatagcatatactccaggtgtctagtaggctatgtgtaggttaagttctatgatgtttgcacaacaatgaagtcaactaacaatgcatttctcagaatatatccctgtcattaagcaatgtgactgtaaatatactgttttttctggtatattcttatatgattaatcgatatcttaacctcagtgaccaagctgtcatagatgttagtctgtccacagacacacatgcacacccaacacctgtgcccattgatggtatctaagttcttgaatgctcagtcctgtagcctggtggaaggagggtgctctgaactagaagttggctgatttgttttctagccacttatttttctcactgacttcttgggagagcctggccaagtttctcaactttcacagcctgccttaatctgcccatgagggaaaggggactgatgatgcaaattgctttgcatttcccagggagactgggagattgggagtggtggaactttccaagggagaagggaatccttatttgtacccagttttgctcattgccctcacctccaacccctaggagtctttagccacatgcctgcagcagaagcagcaatgtagtgggtgctcctgtagccaaggtgtgcttttcttcttttcatatatttatttatttttctcagcaaccctatcattaggtactgtgtatcttacttttaattgtggggaaactgaggctaggagaggttcaataatgtgtttatagtcatatagctgggcagctggagccaggggttgagcccggggtcagattccagagcctggtgctgagccttatcatg

SEQ ID NO: 31855 - DNA, 1068 bp, Homo sapiens
ctccgcctcctgggttcatgcaattctcctgctttagcctcctgagtagctgggattataggcatgcgccaccacgcctggctaattttgcatttagcaaaattagcaaaatgttggtcaggctggtctcaaactcccgacctcaggtgatccgcccactttggcctcccaaagtgctgggattccaggcatgagccaccatgccaggccagcttttctttatcttggacagaatgacttcatttataagcagcatcttgtgtaacagtcagttttatgtgtcaacttggctaggctataatacccagttttcaattaaacactaatccaggtgttgctgtgaaggtattttgtagatgtggttaacctctgtaatcagttgactttaagtaaaggagattatctttcataatctggatgaaagaaaatcaggacacatatttccctgacaaatacaccttgtttcccttccttaaagggtagaggctatctcctgcttttttctgtgtgtctttgagagaccactgaggcagagtaatgctgtaaaaagaaagtggactttggaatcaggcattgattctgtatttgatcctggatttgtcacctgctagctgtgtattcacctcaactttcttgtttgttattttgagataagtcttgtgctattgcccaggctggagtgcaatggtgtaatctcagctcactgcaaccgccgcctcccgggctcaagtgattctcctgcctcagcctcctgagtagctgggattacaggcgcacatcaccacgcccagctaatttttgtttttttagtagagatggagtttcaccatgttggccaggctggtctcaaactccttacctcaggtgattgcctgcctcggcctcccaaattgctgggattacagatgtgagccactgcgcctggccagtttatgggccttaattagaggtcaagagtgaagcctcccatatataaaattaaatacttagggtagattcagtggctccggcttgtaatcccagcattttgggaggacgagacagcaggatctcttgagcccaagagtt

SEQ ID NO: 31856 - DNA, 1041 bp, Homo sapiens
acctgaatgtccttgttttcagtaccaagggcagtgtactgccttggtactggtctcactctagggctgctccgcctgagtttgaattcacttcttactctgtacaacttgagcaaattatttaacaccgttttagagcctcggttctcccattttgtaaatagataagaatatgcggccgggcatggtggctcaggcctgtaatcccagcactttgggaggcagaggtgggtggatcacaagatcaggagttcaagaccagcctgaccaacatgatgaaatcccatctctcctaaaaatacaaaaatcagcggggtgtggtggcacacacctgtaatcccagttactcaggaggctaaggcaggagaatcgcttgaacccgggaagcagaggttgcagtgagctgagatctaccactgcactccagcctgggtgacagagtgagactctgtctcaaaacaaaacaaacaaacaaaaaaaaagaacgtgcttttcccaggattgttgggataaagggagatgatattcctggaaccccacactctattcaatgctattagtaacagtgaagtagaattatcttcaaaacagtctcttcctcccctgccccaccacaggtcctgatttggggttgtgaaaacatgttcccttttctatccatattactttacccaggatgctccctgctgctcagacctatgtgtcaatccactaaaaaatccagtccatcttcaagggtcaaatcaaacacacctctccttcaggaagtcttttccttttcctagccccctcctctaagacagatgtattcccatgagtctgccttaatatctttatttctcattgtctatagcatcctaattattcatataggatttagctcatcttttggactcttcttcaagggctaataaccttactaaatttgtgagtcccctactgccctttcacccctttcatatttgcccagaagggtcctgacattcaaaatatgattttgaagcaaattaataaatacccaacagctttggattaatattg

SEQ ID NO: 31857 - DNA, 1029 bp, Homo sapiens
cagtattttaccttacttggaaatgatctagatttaaattttaacttagaaaaattcgaagggtatggttaccaaagaaatttgggacacttttgaaagcagacattttaaaatataattattgtttaaaactacatttataaacttttatttcagttacatctatttaattcactcattcttaacaattatgcttggaacactcatgaaaattacatgagacatgagacaaagctgccatcacctcaagttattttcctattatccatcttgacagcacatgcatgtcaggcagtcatgacaatgcaagagccctaaagttaagtacatgagtattgttgacaactcagaagacacaaatgttctcattaaactgacaatattaaacgagtcttattacagatttactcaagtcatgtaaacctgaaaagcatttagactagttcctatatttctaggaattttaggtatactcatttatctctaagccaatttgaataaagcctttaatatttgtagaaaagacctttacaatttttcatttgctcaatattcaaatagtcaaaaatcatgccaacaaggaagaaagtggacagaggggcagagcatataaagttagcagggcttttagaaaaggaatttcagttgactaagacgttcccatgggagaagcaagatttaatagaacagaggggccttaaaaaatgtatgcatagcctgaatattagcttccagttgacttctggccatagtgttccttaaaaaaattcctcctcggcctggcgcagtggcttacgcctgtaatcccagcactttgggaggctgaggtgggcggatcacgaggtcaggagatccagaccatcctggctaacacggtgaaaccctgtctctactaaaaatacaaaaaattagccgggcgcagtggcgggcgcctgtagtcccagctactcgggaggctcaggcaggagaatggcatgaacccggggggcagagcttgcagtgagcccagatggcaccactgcactctag

SEQ ID NO: 31858 - DNA, 1035 bp, Homo sapiens
cacctcttaaagccctacctctcagtactgccaacattggggattaagtttcaacataagttttggaggggacaaaaaaatattcaaaccatagaaattgtttaaaggaagctgactcagttgggataagcgcctgttttggtcttctttctttctttttttttttttttttgagacggagtcttcctttttctgccaggctggagtgcagtggcacgatcttggctcactgcaagctccacctcctgggttcacaccattctcctgcatcagccttccaattaggtgggactacaggcgcctgccaccacgccagcgaatttttttgtatttttagtagagacagggtttcaccatgttagccaggatggtctcgatctcctgacctcgtgatctgcccacctcggcctcccaaagtgctgggattacaggcgtgagccaccgcacccagcctggtattctttcttattccttccgcttcctggaatgccaacacgatgctggaagtctgatagctgccttggaccatgaagtaaccgtgctatatggatgtgctgcagctggtggggcagaataatagatggagtctggggctctggactgcctgtttatggacttgctatatatgagagaagaaaccccatgtgtttaacctcttctcttttgaattttcagttaagtgaagttgaacctaaccctagccgaaagagcactgttgtctgaatgcaaccgcaggacactgagaagctggataagcactctcttagtgctctgtgttggatttgtgtatggcttggatcacactccctaccctaaccttgattccagagagttgggccagctcagggtggggtgtaggaggatacactgtatacactctgacagtatatgtgtctcctcaacattcagaggccacatggcagggcagatgtccattaactatcttgggcttatcacatctctttaataaacaacagtggggacagatagtgccctacaggcatattacagggaagacttgatgaaatttagcat

SEQ ID NO: 31859 - DNA, 1051 bp, Homo sapiens
tgtatttttaatagagacagggtttcaccatgttggccaggctggtctcgaactcctgggctcaagtgatctgcctgtctcggtctcccaaagtgctgggattacaggtgtgagccaccacgcccagctaacattagttttaatggagattcaaaaaatctatttttaaaaaattaaaccaggtgatagaatatttcacttaaaaataatctcatagaatatttcatttaaaaataatctcagttaaagaaaaagaaattaggctgggcagatggctgacccctgtaatcccagcactttgggaggccgaagtgggtggatcacttgaggtcaggagttcaagaccagcctggccaatatggtgaaaccatgtctctaccaagaaatacaaaaattagccaggtgtgatcatatgcgcctgtagtcccagctactcgggagactgaggtgggagaattgcttgaagccaggaggtggaggttgcaatgagttgagatcaaactactacacaccagcctgggtgacagaataagaccttgtctcaataaaataaaataaaaataaaaaaattagtactatactatactgaaatgatttcatttatttgaagttcaaaagtaggaaggtaacaggaatcagaatagtgattgccagggggcagaagttggggcagggattcactgagaaggaatatgtgggcactttcttggggtaatggcaatgcgctatacagagtgtggagtatatggatgtgtgcatttgtcaaaactcatcaaacctttcaaagtcctttggagaaaacttgaaaatgaaagcaaatcagtgtcttaggtataatttccttttaaaaaaacattataaacttataaattgcccttactattctaaaaacatacttttagaaggcaagaacacccaacttaggggcacgacttaagatctatccatttcactgaatagaagttatacctaattttttaaaaagataaaaagacattcaatgaaaatactgactaaataataatcttgggctgggtatagtggcttatgc

SEQ ID NO: 31860 - DNA, 1036 bp, Homo sapiens
accaaccccagctatttttttttttttttttttttttttaatggagacagggtttcaccatcttggctaggctgatcttgaactcctgccctcgtgatccaccagcctcggcctcccaaagtgctgggattacaggcgtgagccactgcgcccagccaatttataacctaagagattcttaaatgccttcagaaccacgaaagattcatttatgaacaacatatagctagaataaggttcaggaaactttttctgtaaagcatcagaaagtaaatattttaggttttgtgggccataaactctttgtcacaactactcaactctgctattgcagtgaaaacagccagagaatatgcacacttacataagcatggatggctgtgttccattaaaacttcattcacagaaactgaaatttgaatttcatataattttcacgtcacaaaataattatccttttgatttttttttttagctatccaaaacgattcttagttcataggccataaaaaaacagatggtgggcagtagtttgccaacccctcatttatttattacatactttcactgagaacaaaggcaggtgtatttttacatttgaattaagcacattaagcctaaatgtgaagacctgtaatagaaagggtttttaagtgggttaatatgttactaagagaaatcacaaagtgttcccccccgtaagtatcttcaaaacaagaagctggaccaaatcacacatgaaagctataacaagacaatttatttgggaaaaacatttcaggccattaaaagcagtatgtgctaaaccagaattcagccacaacatatgcatgatttttaaaatctttttttttttttaactataaagacctacaggcttgaaggtccccttaaactggcaatcagatcctcccaatggttcttaaccaagggtgttaatcagactaacctggaacatctaaaaatacagatggccaagaggttctctatcagaggggctggggaagggccctggcattgtatttttaatttacat

SEQ ID NO: 31861 - DNA, 1049 bp, Homo sapiens
aactttaaaatggtaattccttccctattgcttgtatacccagagaaaaacaacaaaaactaaaaaagggatagagagaaaaggaaaagggcttaagatctttgtttctgcttcgtgactctaaggacccagaccccacaaatgtgcaggacaactctagggcccatggggagaagagtggacagttgtggacatacatggagccagtcaggggcttgcttcaaagtcacagctccccagctgggttgggaatgatggattgagtacttagcatgactctccagccccagctctcacactctttcctggttaggggtttgtatcctcccccgcctgactgtgccgcatcaccacctcttttctctggactctgggccttgtgtttgagcaggtagtttttatttcatatgacagatcgctttttttctctgagtaatatcatgacctccaactttagctaacaactttgctcatccttatcttaggctgtatatgtctgtttatgctgtgtgtgtgtgtatgtatcctaatatgatacatatatattccaacttatatagaaaacagtctactttataattttcgcacatgtcagttcatactgataatagtattttcattgcacctttcaactagaggtagagtcatcacaaagtaccaagggtagcaaaaagatgagtccccaaagagttaaggattttccccagcatctctttaattagtcatgtgcaagtactttattgtacactttattaggtaacttaactttataagaaatggtagaaccaaatgtttacatttggataactttaagtttgtactattgagattgtactatttataaggatgctatgaaggtccttctcttatgtagataatctatataataatttgtttttcataaatttgcatctttatacattgtatttcattaaaacaactttagaatccttatgaccttaactcatgtttcattatcatgaaccaaagtatctcataatagtagcatctgactcatggcaccattttgtaatggggtgaaatggact

SEQ ID NO: 31862 - DNA, 1029 bp, Homo sapiens
ttctctgttgctaagtgcttatcccagagatgttctggttattgtcaccgactgttaatcagatgactctatagactgggaaacagttttcttcaaagttactgtttgacctttgtcttaataatgatgtaaaatctacccatgtattgagtgtttgctgtctctgggctggtcactgactgagtcattgatgtggataatattagaacaacctaatgagaggagatactattaaccccattttagagttataaaatctgaggcataagaggatggctgagtaagtggtggagccaggatttgaagctagatattttagcttgacagtttaaccatcatcatcattgtatatactgtatatgatacatgtatactgtatatgataccctagtatatgaagagttggcaaaatcctctagggatctatttttaggaatgtgttgctgattcgaatgttcttaaccaatctctgctttatcaatagcttcaatatgtcagtctctatttcagtcacaaatatgaattctaccttttctgttaaaattgtctttgttctaaaaaaaattccagaataatatagcatcatcatacctagtaactttctgaatactccagtcaacactacactggagaagttgcattttttgtgtctttaagccacaagtctatgcctgtaggttttcacacctgaaataaacttgctagactcaactgtcttatgatagttaaccctgtgctgtctgacacaactgaaaagtgggctcttctggttaattgaggtatttgaccaatgatactctcaggaagcagagggcagtaagataagctttatcagcaaaactcttccctccacaaattaatctttgttcaactgtttagaatgcctttctgaaaatacagtgacccacatgatattataaacagcagaacatcaagtaaagcctcaattatcttgttttacaagcctgctgaagctcttacttcataatgacagatacaaaaacagctgacttccctagaaacaatacc

SEQ ID NO: 31863 - DNA, 1050 bp, Homo sapiens
agagtataagagaaccatatgctctaggtaggagcaaagcgggtataaatgaatgaaaagtttgatgtactatttttgaaaaaatatttttgtaattttttaagcagtatttttttaattacaaaagcaatacagtttatacatgaatttcataacaacattgttcataatagccaaaaagtagggacaactcaaatgtaattcaattgatgaaggaataaataaaatgtggtataccataaaatagaatattattcagtcataaaaaggaatgaagtactgatacatgctacaacatggatggaccttggaaacattatgctaagttaaataagacagacacaaagcaccacatgatgtgtgattacatttatgtaaaatacccaaaatagacacatagattagtgatatgtggaatctacaaatctacagaaagattgtggttgctggaggctatagagagaggggaatgggtgtgactgctaatgagtatgagtttattttgggaatgatgaaggtattctaaaattgattgtggtgatgattgcacgttctgtgaatatactaaaaagcactgagtttgtacactttaaaatggtgaattttatggtatgtgaatttgttattttaaaaaatcacaacacaggccgggcttggtggctcacacctgtaatcacagcactttgggaggccgagttgggtggatcacgaggtcaggagattgagaccatcctggctaacacagtgaaaccccatctctactgaaaaaaacaagaaaattagccgggcgtcgtggtgggcgcctgtagtgccagctactcaggaggctgaggcaggagaatggcgttaaccccagaggcagaggttgcagtgaaccgagatcgcaccactgcactccagtctgggcaacagagtgagactccatctcgaaaaaaaaaaaaattgcgacacaaaatggaatatatagtgatggttgataacttggaatatacacgagcaaaaagaagaaagtaatgtcttccttaaacatataatgcatagattaacgta

SEQ ID NO: 31864 - DNA, 1052 bp, Homo sapiens
tacccagaagtgggatttctggatcatatggtaattctgtttttaattttttaaaggagcctccgtatacttttccataatagtcatactaatttacatttcaccaacagtgtacaggagttccctttcctccacattgttgccaatgtttgttttctttttttttttttaataataatcattctgacagatgtaaggtgatatctccttgtggttttaatttttatttccctggtgatgagcatcttttcatgtatctcgtggccatttgtatgtcttcttttgagaaatgtctattcaagttccttgttcgtttttaaatcagaatgtttttctgtagtgttgttgagttccatatatattttgtatattaaccccttatcatatgtatggcttgcacatattttctctcagtctgtagcttgtctctttactctgttattttgcagagtgtgttgtgcagaaactttatatttggatgtatctgtctgtttttgcttttgttgcctgcacttttgaggtcaaatctaaaaagttactgcccagaatagtgtcttgtgttttttcccctctgtgttttcttctagtggtttttcagtgtcaggtcttatgtctgagtctttaatccattttgaactgatttttgtatgtagggtgaggataagggtccagttttagtcttctacatatggatgtctgatttacctagcaccatttactgaagagacagtcgtttccctattatatgttcttgatacctttgtcaagagtcaattggctacacatgtgtttcatttctgggctctctattcttttctactggtcaatgtgtctatttttatgccagtaccatgctttttaagttactattgctttgtagtatagtttgaaatcaggaagtgtgacgtctctagcttcgttctttttgttcaatattgccttggccatttgagggctccatatgaatttattttgtggttccatttgaattttacaattgttttgcctatttttatgaaaaatgctattgaaattttattagggattgctgc

SEQ ID NO: 31865 - DNA, 1054 bp, Homo sapiens
tttagagtgtataattcagtggtttttagtgtattcatgacacaataaattttagaacatttttgtcacctcagaaagaagctctgctcatagcagtcactcaccaatccccctaaatcacctctgcctagacaaccactaagctactttgtcgttatagatttgcatattctggacatatcatagaaaaagaatcatgcagcatggggttttttggctagcttctttcagtttgcataacattttcaaggttcatccaaattataacatgtattggtacttcatttcatttgattgcataatttttttttattatatggatatactacattttgtttatccattcattagttgatagaatataggttgtttccacttctggctgttgtgaataatgctgtataaacattcatggacaagtttttgtgttgatatgttttcatttgtcttaggtatatacctaggagtggaattgctagatcatatggtaattttatgattaatttttttgaagaactgccagactgttttctgaagtggatgtatcattttacattgccaccagcaatgtgtatggactccagtttctccataccttctcctaaacttattatctgtcttttcaattgtggccattctagtggtgtgaagtaatgtctcatgtggtttttaaaaaaatccataaaaatgtattatacaagtatttattttttattgtaataaaatataaaataaaatttaccattttagccatttttaatgttacaattttgtggcattaagtgcattcacattgttgtgtaaccattatgaccattcatctctagattctagaagaaatgcactctgctcacaatctcagtcccagaatgccctgtaacatatgtgttgtcccacttctgatcttattagtagtgacgtgcttcatgtcttccttctctccatgtatctttattgagaacctaatatgtgtaagacattatgtgctggattcttttagggccaccaaaatgaataaaacttggtctggggctgggcacagtggctcatgcct

SEQ ID NO: 31866 - DNA, 1033 bp, Homo sapiens
tctaaaattgaccacataattggaagtaaagcactcctcagcaaatgtagaagaacagaaatcacagtaaactgtctctcagaccacagtacaatcaaattagaactcaggattaggaaactcactcaaaactgcacgactacatggaaacagaacaagctgctcctgagtgactactcggtaaataaggaaatgaaggcagaaataaagatgttctttgaaaccaatgagaacaaagacacaacgtaccagaatctctgggacacattaaaagcagtgtttagagggaaatttatggcactaaatgcccacaagagaaagcagaaaagatctaaaatctgcaccctaacatcacaattaaaagaactagagaagcaagagcaaacaccttcaaaagctagcagaaggcaagaaataactaagatcagagcagaactgaaggagacagagacgcaaaaaacccttcaaaaaatcagtgaatccaggagctggttttttcaaaagatcaacgacttaatagaccactagcaagagtaatatagaagaaaagagagaagaatcaaatagacacaataaaaaatgataaagaggatatcaccaccaatcccacagaagtacaaactaccatcagagaatactataaacacctctatacaaataaactagaaaatctagaagaaatggataaattcctggacatctacacccttccaagactaaaccaggcggaagttgagtctctgaatagaacaacaccaggctctgaaattgaggcaataattaatagcctgccaaccaaaagtccaggacaagatgaattcacagctgaattctaccagaggtacaaagaggagctgttaccattccttcagaaactattccaataaatagaaagagaaggaatcctccctaactcattgtatgatgctagcatcatcctgataccaaagcctggcagagacacaaccaaaaaagagaattttagaccaatatccttgatgaacattgatgcaaaaatcctcaataaaatact

SEQ ID NO: 31867 - DNA, 1056 bp, Homo sapiens
gtatattttgcattaagtctgtcatatcgatttttctaaagagtgttggatttttttctggtaggcaataaagttacttttagattattttaactttttaggggtttgctttaaagcttttttaaggcatatttagaagtgcctttattttaggagtaaggctgttctgtttctaaggcattgccattctgaattatttttacaaaaggcactatatattcaacatgacctctgtggtctggctggtgagaactccagtgattccctggccttctgtgagctctgggaattgtttctcttactcctacctagtaactcatttcttaggatttttttttttttttttttttggcctggcctttgtggtgttttttcctgtgcatatgcagattgatttcaaaaatccactggaacctttgtacagatttcccatgttatttttctctgtgtaactctcttctctctggaattctaccacctcaaactctgtttgccttctccttaactaatctagattgctggactctgtataggttcccgctcactgtgtctctgtctgaaaactgcctcatagtagaacacctggtcagtggtaggttcacctcacttatttttttctcttttagagatcatagtcctgtgctaagttatttttttttttaatatttgtctaattttctagtgtttgacagaggtagggtaattgcatatcctcttaatccctcatggctggaaggtgaagtccaagaatatccattttatgacatgtctcattctccttccagaatgttaataacaaaaggcagggaccatgtggctgaacatcaacaacactagctggcactggacacatactgctcaatgagaacttgctaaatggaaatagcgattgagtcttaggaccatcttaaaaaatattgacctcagtacttcattgattttgttttctttattaccatggcttaaaatatatgactgtcatacctaaatttatttaaatgactggatgcccaatttgtcaactgtaaccttaagtttttgtgtttttaaagttca

SEQ ID NO: 31868 - DNA, 1042 bp, Homo sapiens
aagttttttatattttttgtagagacagggtttcaccgtgttgcccaggctggtctgagcttctgagctcaagtgatctgcccacctcagccccctcaaagttctgggattacagaagtgagccactgtgcccagccaggctatttttctttttacacgagtggtacatttagatcatcattgtataaaaactaaaatataaagaaaagcctgaagaagaaaatggaaattagctatgactctgtgcccagagatatgcatagttagcatttattttaatgtatatatttctgtgtatctctctctctgtagttactgatgtaaatataactatcaactatagaccggtcatctctttgtgtggttccagcatccgtgaatttcagttaccatggtttggttaaataactccagttcccctgcaacatggttcagatttcagttacagatttcattgtgtttatatgtgtgtgtgtgtgtgcatgcatgtgtgtagggtatatggtgagtaactgtacaatgtagaaacttgcctggtagatcttcaatcaacaaatcactaaagagatgcgcatcatgatcagtgacctatcacatcacttctttgaaagtctttcagtgatttgtcactttgcatcagctcttgtttagacagcaaagtgggtagttgtgttttcttgtctctcagtgataaactcacatgaccttttacaaaaatggatagttgagagactggccaacaaaaataaaagttcagcaaagaaacaaaatatgataatactggaaatgaaatctgaattaaatataaggggagttagggaagaaatagctgattgtggtaatggtgacctgctgctttctagaattcctagctatgcagccagaggaacttggtgaaggtgagcttgttgacattagtgaggaaagtggttgtgacagaaagcatgaggatgtcccagaggaagtgacatcagtttaaaaaaaaatcgacattaagagaacacacacagatatttcacaacattgaaagcacaaaggataa

SEQ ID NO: 31869 - DNA, 1031 bp, Homo sapiens
taattgaagagacagcccagaagagagtagagcttactatgtgcaattatatttaacacttattttgaagtacctacatttcttttacttaaaaaagtgtgtgtatgtatatatatgtatatgtgtatgtatatatatgtatatgtgtatgtatatacatatatacatacgtatatatatgagtgtatatataggttttcccacccaactgtccatttcactattcatttacatatccatttaattattgatgtacttttatctttgtatccatgcaaaacaccagagaatcacacagagctcaatcacataaaaatcacaagactgggaagtcttgaagttaaccattgtttaatttatacccaatttcattttataaagttttggagttgactaaagatgtcatctagttcacattttgaaagagatgtgcagaaaatgccaaaaagaatcagccatctacccctttcttgtagcagtctagaggaatgtctttaaccttctcaaaagttagattttacctcagtgtccttgctgtttggcagcctgctctttacctaaacccagaatatctctttccacacacatctctgtaaactcttcaagcctcagatccatgttgcattctgtcagatttgcattttaacacattaccttcctcaaatccttcccttgcttagaaacattttaacctgaagattgtagaacacattaacagtatttacccaactattcaagactctcaggttttgcttcttgcctgccattttaagttaatatcttcctgctccattctatggtttcttcattcctggtgagatttacttagtactttttgaaattctctgtttggaacctgtctgtccccactattccttgacattgtattgttattgtctatgttattatctatgtctgtgactatatctacatttatataacactatattactggctgtcttatattattattatattatctatacctacatatatagatgtactaaaaatcatttaaacaattcccaatc

SEQ ID NO: 31870 - DNA, 1071 bp, Homo sapiens
agaactggaagacaatggcctctgctagggatagcattggtgctttgaaacgcaatattaaagggtacattaaaccattcagagcaggtggcaaagacatggaaacttgagaggaaacagtaagaaatatggagtggaggtccaggagatctcacatgccaagtgccaagaacattaggaggagtaaagaacagatggaggaggatttccaattgaggaaatcatagcagtaatcttctggttgaatgtgttctcttctgatactgtactcaaatgagaataaaagaattaaaaggcacaaaaccacaagggcagaagcaaagggaaagatggctaaagcagatgaatgttgttaccttgtctttgtattttggaagttgaaaattaccagactccatcattaaaggcagtgcccgtttattaaactgacagtttccatgggtcaggagtctgggcttcgtataactggatcctctgctcacatctcacatacttgatgtcaaggtgttggctggtgctgagattctcagttgaggctcggagtcctcttccaagctcgctggttcttggcagaattcatgttcttgcagtctttggactgacatcctcactttcttgctggtatttggctggggttcatgctcagcttcaggaatctgtccttcttcattgacagtttactgcatacctgtttactttctcttggtggccagcaagattgcttctcatgccttgagaagcaggcactcattcccctcatgcttcagacatctttgacttccctcctctgccatcagtcagagaaaatgagttttaaatgtctcacttgattagcttaggctcactcagattatctatgtgtcttaagattaatggaattgggactttaattatgtcttcaaactcacttcccaatacagatgctccttgatttccaatggggttacatttcaataaacccatcataagttgaaaatatcatgtcaaaaatgcatttaatacatctaacctactgaacatcatagcttagcccgtcctaccttaaatgtgctcagaacacttacattagcc

SEQ ID NO: 31871 - DNA, 1034 bp, Homo sapiens
aagagcttggaatgtgaagatctaggggaagaactttgtggttcagccttcctgaagtgtgagagatcttagggagatgtgggaagagaaagaaggtcatcagagttggagcacagccagcagggaggaagggacatggaagaacctgggcagttggaagaagacccagctcaggtagggtcatgatattggccttcctaaggggttttagtgcaatgatcattgtcttattgttacttaaagaaaagtgagtgtcgtctatacctgtctatacatgtgtgtttgaggtgcagatttaccagccttattgttgataggttagaatgagtggaagaggaagagacccaggagcaaatacaaaattgcttcctgttgaacagggagaaggaattctacgtgttgttttttggcgggattgacgctcatatattatggtcttttacaatggaaacccagtctccaaaagagttccattcccttccttttaaataaaagaaattactgtttgctacagaaaacttagaagactctaaagaagaaaacaaaattagctggaatctcactacccagacataatttttgttaacatgttggtttatctctttctagttttctgtctgcgtctatgcattttatgcacacatttaccaagttaaaataaaattgtgttgatttttcttgctgttttcatgagtattttactatgtcattaaatgttcctcagggatattaaaagaaacttgttatatgatttattttgtgatgcaccaataatttaactcttcctccactattgaactgtttggctcctgttttttggttgctactcatcatgatatgatgaacaccctgttacatacatctttgtgttcacctctaatagattactcaagtgttatacacatttgtaaggtgctgccttaatgttgcttgattgttctttggaaaggtagattatgtgggtaccatttatttgtaatttatccagcagtcgtttaagccacatgctgtatttttcttataataaaacctag

SEQ ID NO: 31872 - DNA, 1030 bp, Homo sapiens
attttttatcccaagaggcctttttgaactttgccaaacctttgtaccacagaatgttcatctgaacatgttccaagagccttttagtgattaaaatagaaattctttaaatggcttctgcctacttgtcccatttcagtaatgttaaactgaaaatgtctcagtccttcctatatgctggcatttcttatgcctcaccaactccagcttccatctctttctcccatggcctttgccttttttagggggaggagtccctttatatttttctgcttgctctgacctatttttattcctttccttgtaatactctgccagttgaaattatagagcccccattctgtttttaacctatcctcttctagtcctttatatgcctttattatatatacagtagagtttgtaagtactaaattcgtatcacagaactgtatagtgataaacagggctctctagtagcctttctcaaagtgtcttctctagtcccttgttaaagagtgatccctggaccagcagcattgacatcacctagaagcttgttggaaatgcagacttttaggccccatgcagaccttctgaatcagaatctacattttagtgagatctctaggtgatttgtttgaactttatgctttgagaagctttgcttgagaatattagtgtttgatgatgtgttaacaggtaaaaaataaagtaggcctggctatatataaatttggaaagcaatgattcaaacttagaaatattttcagttgtacaatttttcccagtttttaatatgctaatgtgtattgtgattgtgaattctcatgaggggaaagtagtatgcagcattatttcaaccagtcattttctttttctttttttcttttttttttgagatggaggctcgctctgtcgcccaggctggagtgcagtggtgtgatctcagctcactgcaagctccgcctcctgggttcacgctgttctcttgcctcagcctcctgagtagctgggactataggtacccgccaccacgcctggctaattt

SEQ ID NO: 31873 - DNA, 1089 bp, Homo sapiens
ctagtgaataaccaaatgattatttgtaatagtttcataatgacctgaaagagttatcattcctcccaagttgcctaacacatccagaggcatgttactgtcttggtatcataacattatttacaatggtcataaagaaataacatgtatttatttctcacactaatattattttaatctcctttctctataggaagagcgtgttgtgaatcacatggcagcaaaaattattgaaaatgtctgtaccaccttttctgctcagtcccagggctttattacaggagaaataggacccattttgtggtacctattcagacactccactgctgattctcttaggataacagcagtatcggtaagatgaagcatcttttgggggatatgtctgggtatctttaaacagcaagtttgaagaaaatattagaataagaataaatttaatttaatagataggaaactgaaatctcagagtaatattgagagaaataatttgattttcttctaaaagagaattttgaaaacttggaactggaaaaccttgagactgtgagagaatttcaataaaaccttgttaggactatggtattatggtttcaaaaactaattaataagtttatttattttgagacagagtgtccctctgtcatccaggctggagtgcagtggtgtgatcttggcttactgcaatctttacttcccaggttcaagtaattctactgcgtcagcctcccaagtagctgggactacaggcatgcaccaccaggcctggcttatttttttgtatttttgtagagatggggtcttgtcatgttgcccaggctggtcttgaactcctggcctcaagcaatctgcctgccctggcctcccaaagtgctggaattacgtggatgagccaccgcgcccagccttaaaaacaatttagaggcgatagtagaaaactgtggcagtatatagggtacagggtttggtttgttatatttttagtgttccctgacttttccctgttagcatccccattcagattttgtgtcaaatgagtttatcatgtggttcagatgaattcattttaatgttcaagcatctgtgatt

SEQ ID NO: 31874 - DNA, 1042 bp, Homo sapiens
actaattctttttttaaaatttcaactttattttagattcagggtgtacatgtgtaggtttgttacatgaatagattggatgatgctgcggtttggggtacaactgatcctacctcccaggtagtgaacatagtagtcaatatgcagtttttcagcccttactcctgtcccaccctccccacttgttgtagtctctagtgtcttttgttcctatcttctgtctgtgtgtattcatgtttagttctcacaagtgagaacacgtggtatttgattttctgttcttgcttcaatttgcttaggataatggcctccagctgcatccgtgttgctgcagtagtatttcgtggtggatatatactacattttctttatccacttcactgttgatgggcacctaagttgattccatgtttttgctcttgtgaatagtgctacgatgaatatatgagtgtgtgtgtgtttttggtagaatgatgtattttcctttgggtatataaccagtaatgggattgctggttcaaatggtagttctgtttttagttctttgagatatctccaaactatttttcatagtagctgaagtaaattaataatgtactaattctgtcatttggacaatcttgagtatgttccgtaagtagaacctaattttttctgctttaaaaaattagtttttttcatctttctgtgtggtacctgatttattttctgattgtatttgataggttgcaggagtgtgcttgtggttattacactaatttggttaatcttctgggagagaattattgctcatgtcattaaaatcagtgtacccgcttatttgctcattttatttagttccttgtcttactaggtaacataataccttttacttgtgcttgtgaattatcctgagatattactcaaacttgtgttttctatgctttcaaatcattccagataatgtaatacttttcagatagttgtatctgtattatcatctacaattatcattagattgatttatctgtcagatcatattggatcatattgtcatttctca

SEQ ID NO: 31875 - DNA, 1030 bp, Homo sapiens
ggacttgggctacaatgccacctgagccgctgtgctagaaattatctattggcattcagcctcttctctagccccttccatgttcccctgctttgttggggttggaaggctcaaggcttcctttccggaattctctcactgctaggaatttgatgcaacttaggctctaccagagggaagcaccaccaagacagttgggaagcagagaaaagtaaaggctgtgtttcctgcagcgtggtggctgatgggtgggatatggcagacctgagttttctgcagcagcaggacactatgttccttctgctttcttgtcactagctttaatggatgtgcaaccgagatattggcagtaatgttcggcaaggtggcagctgcaatggtgtgaccatggatagaggtgcacccaaacttccagccctccaagccttcctatatttaattccctacactcaatctctttctgtacaaaacacccggaacgttttctgtctcttacactgaagcatgactgatttggatctctcccctcccccatatactgcaccactaggctcaggtggaggaatatgaaagatcacacatttatcccaagaaatgtccaaaaagagactgagagtcagactctgttggttacctactcagcagccatccccatttctttctcagtagatcaacttcccttatagaaccctcaccaatctttgcagctgtggtttgggtatgtgacctaatcctggcctgaagagagtgtgcgaaaggtgggtcctgggatagatgactgtccctgataaaaggagacatatagaggaaattctcctccctgccagtggatggggttctgtgggaacatgatgcttgggcagcaacagtcattgtgcagtcatgagggggtaagtctgaggatgaaagtccacatactgagatggcagagtggacagacagaaaatacctacatctgcggtgatattgctgagccactgaatttgccctggagctgcctccttctagtagacatcaccctgacaggatc

SEQ ID NO: 31876 - DNA, 1024 bp, Homo sapiens
atcccagtacttttcaaggccaaggtgggaggatcactttaggcctggagtttgagaccaaccagggcaacatagcaagaccccatctctgaactttttttttcttttttttttttgagacggagtcttgcactgttgcccaggctggagtgcagtggcacaatcttggctcactgcaagctctgcctcccgggttcacgccattctcctgcctcagcctcctaagtagctgggactgtaggtgcccaccaccacacctggctaattttttttgtacttttagtagagacggggtttcaccatgttagccaggatggtctcgatctcctgaccttgtgatccacccgcctcggccgcccaaagtgctgggattacaggcatgagccaccacgcccgacctctgcaaaaaattttttaaaaaatatatacatatataagactaggtcaaagaactgctgatttttttgttgttgttgttgttgttgttttaaatagtaataccttctgactcagacctgttctttaggaactgaagcaaacattagaacattaactagagggttttgattagttattttcatataagctgtgtactaaggggtggcataaagaggcgattttgagtccctcataggcagagttaattctagtgaaagcgtggctctaattctccttccttgtcctccgtatggactaggattttagcactgtctctgaatacatattttttctccctttttttaaaattaaaatttctgttcttaggacgctttccttctcttccacatacatcctagaatggtttattcttaagaattacccaggccaggtgtggtgactcatgcctgtaatcctagcactttgggaggccaagatgtgtggatcacttgaggccaggagttcaagaccagcctagggaaccccatctctattataataaaaatacaaaaatcagctgattatggtggtgcatacctgtagtcccagctacttgggaggcttaggcatgagaattgcttgaacc

SEQ ID NO: 31877 - DNA, 1209 bp, Homo sapiens
atggagataagtatattaagaaggtacagatagagcagttgaagctgtttgggtaggtagagtattcctcctggcgggtcagaaaaggaccatggtattcatgctgggtgtaggaggaccagcaagatttaagccttggggggagaaggaggtataggaacagaggagcaagtcaacacaactagctagaagttagcattatgaaagggaaaacaggctagaaggacacagaggccaaatccaaagcgcttaatgccattggacttggctttgtggctaaggggcatctgctgaagctttttgcacaggagtctgtcaggctcagagctgtggtttagagaaacttgtccctcagcaaatgttattcatttgttcagcaagtattcattccatgcctgccatataccaggccctgctacaggcactgaggatacagcaatgaacaacacagtgcctgccattgtgaagctggtggggagggagagaggcagtcaacaagtaaacaaatcaaaatataatgtgtcagatgactctcagtgccatggaggaagacaaaacagggcaagggcatggggagcgagggcagggatgccttctacaataggatatgaggagacctctgtgataaggtgacatttgagaggaagtaggtaaggtagatgtctgggggaaggacattcctggagaggtaacagcaagtgcagataccccaaggtggttatgagcctggtatcagtgggaatggagacatgggggcagattttaggacatttatggaaaataaacaagatttatgattaattggatgataggtagatgatgtggcttgaggttggtttaaggcagggatgcttaccactggctacactttaaaatcgtgaggggagcatttaataattccagtgtctgtgctctattatttcatttatgtgaagttcaaacagacaaagtatcaagaatgtacaagaaactgatcattcagtaacagtgagtgattgtattgtgactgtaaattgtattgtctaatacaatttaaaaatgggcaaaaaatgtgaatagacacatcacaaaagaagatatacacatggtcaacaagcacatgaaaagatgctcaacataactagtcaacagagaaatacaaattaaaaacacattgagataccattttatttttattttattttaattaattaatttatttatatttta

SEQ ID NO: 31878 - DNA, 1035 bp, Homo sapiens
ctggttgtaatattatactaaagttctgcaaaatatcattgtggagaactggaaaagtatacaggggatctctattattttttacaactgcatgtgattctataaaaatctcaatataatttcaaattaaaaagcaaaaaacaaagggcagtgtcctacagatacttctggctagagaaacaaagtgggctggaattaacaaacatctgtatactgtacatgaggaaatactggtgacccagattggattcgccagcttcttggatgataaaatgtcaagcttataaactaaagaaaattctcaaaagaattttgggcagaaaaaaaaaatggcatgagagccttagtggtgaccgtggaaaagtaacaaacctagaggaaaatcatccctgctttttaaaaaatgggttactgcaaaaatgatatcctcgtcaaaaataatccttggattgctggagcaaatgttacccctttcccaaactttctaatacatacattctagaatgtcggttctgaaattctcttgcatccttaattttctcacagcatgttcttattttaatgaaaacctggctttctgctaggatccatgctttccagaagccctctaagtagacctggctattccttttcctatgccacatagtcccatcgtggtcatgaggcaaacgaatgatactccccactacacacaccatttaaaaaaaaccctaatcctttgaggctcacatctacctgaatcctactctttatcctgtctctctttgctgccacctgtatattatacgtctcccaccctcagctcaccaggcagcaattggagaccaacgggaaagatccatttttcctttatcaggaaacttcgggtttatacctgcagtgctgatggcagtctagtgccgtatcttatgtatgcatgtctatgggatgggtattcattcaccttatgaggaaaaaaaatagaaaaacaactgccaaggttttcaaattatgaagtcctggataaatatttgggcaggagctgtggctcacgcc

SEQ ID NO: 31879 - DNA, 1048 bp, Homo sapiens
ctagccccaagagatactcatggtataataactaaattggatttggggcctgcaaagctgaggtctagaatgagagctgtgaaatggagagagccaaatgaggccttggttttaagctgtagcagaacttacttccattaccaggcaaaacagctaaatctgtagtaattaatatatgtgactactaaaataataaagataactgaagagaatttcacattttacaaagcactttcatgacctatttgattatcatgataataaaggtactattaccgttttaagaagaaagttgaggtttgtgacttgactaatgaggtcaaaactcaggtattcccacttctgactttgttcaattcatttttgtttctcatagtaagagtagggccactgtttatgttatgtttacttattggtgggagagagaatttcagtgatgggaaatatatttggtgactattatcattaagataaataagcatgggtaaaagtcccactttaaagttggaactacatggaactgtggggagaacctaatttagggattaggaaaaaaagccattacacccacacaagtatgcacagctgatttttaaaacctttattgtggtaaatatacatataaaaattaccattttaaccatttttaagtgtacaatacagtggaactaagtatattcaaaatgctatgtaaccatcaccaccatccacctctaaagtcttttcatcagcccaaacagaaactccatgccctttaagaataacttctggttggatgtggtggctcacacctataatcctagcactttgggaggtcaaggcagatcgcttgagcccaggagttcgagatcaacctgggcaacatggcgaaacaccatctctacaaaaaatacaaaaattagctcggtgtggtggtgcgagcctgtggtcccaactacttgggatgctaaggtgggaagataacctgagcccaggtggttgaggctgtagtgagctgtcattgcacgactgcattccagcctgggcgatagagcgagaccctgtctca

SEQ ID NO: 31880 - DNA, 1077 bp, Homo sapiens
ccccacctgcccagctgttactggggtctgcagttgcaacagcatttttgacattatcctctgatgctcggaacagctgggatcctagaaaggaggattcactaagtctggggatctgataacatttaactgctcttgggagcttagtaaagtggtttgggggagtgaattggtagcttcctcctgtctgcctcagtttctaaagggattttctaggcatgtttttaatctcttgttgatttcttttttctctttcttttgaaaaaatttttgttttatcatgctttgtcctggctgagccactaagccctttgttccccactccagttggtctctaaatttggtgcccaatatagaggaggcagaggcagataaacatggtggtgttgaagtaccctggtctgtgtggccctggaatgccaagaaggtgaggtccaaatggtgcctgggctattaacataagacagtgcttagaatccatgttcagatcctgcctccattctgtacatgctgagggacttggacacatttacttagcttctcccagcctctgtgtcccaatctataaaatggagtaatagaaatagtgttagcctcttaatgttggtttgaagattgaatgagaaaatatacctacagtgttcagtatactgcctggaacataaagtgttagaggctggtgattttgagtgtgtttttcaaggtaagagtgggttcatatttaatagttgttggtaatctgggaatcagtttcaggtgccgattggatccttggtagcaggatgggatgggaggtacagcacgggaatcagctgctggtcccagagcagtggaggggccaaaactccgcttagggcacgagtaagaggagtgataggaagaggcagcttttcctagtttgattacctccgcttttctaaaggaaagcaaacaaataaggatcaaggttgttgggtcccctttgaatcccttttgtctccttcaagagtttcaccactgagcactgtgatcacatccacccagcattcactcatcttcccttctccctgccccatagcctgatgactttcagctggt

SEQ ID NO: 31881 - DNA, 1032 bp, Homo sapiens
gaggttctaggacgccttcgggatccaggagagtttgcagaactgaggggtgacgtgtgaagcgagctgagggaggcgcgggaggtgggcggggcgggggtggaccctcagggtcgggggccggggattgggggtcgggggccgggggccggggacctgggcaacgccctggggcttgccagttcgagccctcagctcgtggcaggcactggcgtcgggtcctcaggcccttttgctttgggaggtgatgggtggtgcacatttggcgggggtggtggggagccacgcgaggtgcgcggagcgggcctgggcctccccaactgcctttgaaggcagaaccccggcaggcctgcagctgattcctgggcgctttgggggccagtagggcacctaccatgtgtgtccggtggtaagagcttgccacggcctgcttggcagtgccagagtagcctctgaagaaggaacccagtgaactcctgactccatgtgtgtgtttaggaacccgtctccagctcactgatgggaactctctgctaaagtatgtgaccgtcaggccagagtcttgcaccaggtgcagggcgaccagtgtctgcctactttattgccagccaacacttagagcgtactcttgggagaagcaaggctccgcgtggaaaaggatgacttcagggttatggggcgagcttgataggacttagtagctaagagcatagacagaggaggtttcattcaccaaatgtttactacaatatgtgccccgccttcaaatcttggttctcggctactagcggtgtgcgtttaagcaagtcacttatcctctcttagcctctgtttctttctctgtgaagtggagatgaaagtacagtgcctttatcacggggttgcagtggggatgaaatagtgccaggcaagtcctcagcccagtatgtctaacagtaagtgtgtggcaaatatcagcagtcgtggtgactaacgacagaaagtgttagaggtgcttggagtccaggttcatctttaatggtactagctgcc

SEQ ID NO: 31882 - DNA, 1026 bp, Homo sapiens
tttatgtcatctaagttttttaacttacaggtataaagttgttcacattattttcttgttatggttttaatttctatagaacatttaatgatatctccttttttattcctgatattggtaatttatgtctttcttcttttattcttaattagtttagctagaggtttagtttactgatctttttaaaaaacgtttgttcttattgattttcttctatcgattgatttctattttactgatttttacacttttaatattttcttcattttttcctgttttttttttctagccccttcttagttctattatatgaaagattcttagattagattcctcagcttttctattgaagttttcattttgacaatcatatggtaatttccaagaactctttctggctttcaattgttccttttctgtgagtgtctgctcttgttgtatgaatacaggattttcttagttctccctgaggctgctgtcctttttttaaaaaaaaccctctctcctgttctcagaattatctgtttcatctggattcattttcttcttttttgccatggggtatatgtgcatagctgtgtgtctgtctgattttcttcatgaagacttttctcaagtgtttggtgagtcttggctatctgttcatattgagaattagccagtagcatggctggctcaggccttcatgatatgggtgaggttttccaagaggcaaagactttgctttatgatagaagacaaaggggagagggggagggtgcagaatacactgcccatcccccaatgccagaatgtggaaggtgttttgagctcccttagtcctcctaccttccaccccaagaaagttcacttaatttgtttagtaaagatctattttgtgtgtgcatgtgtggcacatgtatgtatgcatctgagagttacttagctgcagccatttgcacataggattatagggagagatgaacttccatatcactcttcctaccattatgagggcattgtccaggtacaaagcctttccaaggc

SEQ ID NO: 31883 - DNA, 1988 bp, Homo sapiens
gttcgagcttcccagctgctttgtttacctactcaagcctcggcaatggcaggcacccctcccctagcctcgctgctgccttgcagtttgatctcagactgccgtgctagcaatcagcgaggctccgtgggcgtaggaccctccgagccatgcacgggatataatctcctggtgtgccgtttgctaagaccattggaaaagtgcagtattagggtgggagtgacccgatttttcaggtgccatctgtcacccctttctttgactaggaaagggaattccctgaccccttgcgcttcccaggtgaggcgatgcctcgccctgcttcggctcacacttggtgcactgcacccactgtcctgcacccactgtccgacactccccagtgcgataaacccggtacctcagttggaaatgcagaaatcacccgtcttctgcgtcactcatgctgggagctgtagactgcagctgttcctattcagccatcttggctccaccctcccacagtatcaaaaaaatctttagaaagcataacttactaaaactggcaagatgaaatagaaaatctgaatagcttaatatctccttttttaattgaatgtgtaatttttaaaatattttccataaagaaaagtattttacaaatacagtccccaacttataatggctcaaattacaattttatgactttactgtaggagtatgagccagagacaaaactcctcagacatggagttaaagaaggaaggggtttattcggccaggggcattcgaagattcctgtctcaagagccgagctccccaagtgagcagttctgtcccttttaaaggctcacaactctaaaggggttcatgtgagatggtcctgatcgattgagcaagcagggggtatgtgactgcgggctgcatgcaccggtaatcagaatggaacaggacaggatgggttttcacagtgctttcccatacaatgtctggaatctatagataacataacctgttaggtcaggggtcgatctttaactaccaggcccagggtgtggcgctgggctgtctgcctgtggatttcatttctgccttttagtttttacttctttctttggaggcagaaagtggggataagacaatatgaggggtggtctcttcccttattgcaatgatatgaaagcaatacacattcagtagaaaccgttcgaatgcccatacagccattctgttttttactcttactgcattattcaatagatggcatgaaatatttaagactttattataaaatagaccttgtattagatggttttgcataacagtaggctaatgtaagagtgctcaggacatttaaggtaggctaagctatgatgttaggtaggttaggtgtattaaatgcacttggaatttaacagtattttcaacttacagtgggtttatcaggaaataaccccatggtaggtcaaggcacatctgtagttaattaattggcccctcagggcccctcatgttgattagtgtttgtttttccttcccttgagtctgaacttgtgacttgttttgaccaaaagcatgtggcagaagtgatgctgtgtcatttccaatgctgaaacttaagaatctgttgctccagagttcaccaattcatctattccctctcctaagtcaaatactatggcaaaagtctgactaccctgagaccaccatgctgtaaggaagccttgctagccatgtggagagagaaaccatgtgcagagcaccaaggcaccagacttatgagtgaaggctttgaattcccagcccgcccaccacctgaatgcagctgagtgaatggccccaaccagtattgtgtggattaatgtctgcccagattagcttgaattactgacccacagaattgtgagaaaataaaatggtgatggttttaagccactatattttgaagtagtttgttaggtagcaatagatcatcaaatcaccttcacacgatgcattgataactcctt

SEQ ID NO: 31884 - DNA, 1091 bp, Homo sapiens
aggagaatcacttgaacccaggaggtggaagttgcagtgagccgagatcgcacaactgcactccagcctgggcgacagagtgaaactttgtctcaattaaaaaaaaaaaaaagtgaagtgcaaaatgtgactgaggagatacagtactctccaaattgcataattttgccaatttttatagaaacctggggaatctgtagagatagcgtcagaagcattggaacgagagcaactccatgttgaataggggctgggtaaaagtgtcagaggtatttgaaccagagcgactccattttgagtgagggctgggaaaatgaggctgagacttactggcctgcattctcagaaagttaggcattcctaccctctaggattgaattgggacccctttcctgtaacatatttctggtgaccacagaagggactatagtgcagaaacgttgacccaacggctacctttgcgtaagtgttggggtcctgtaacatatttctggcaaaccacagaaaggatgatactgaagaaatccccccaaccccaaagaaatagactgcagcactgattggacgactttgggtaagtgatggggtacccgagtaacaaatgggattgggttagaggcccaacttaggggagttggagtttctcctaagacagagtgagttagaggcccctcttaataaaaggcaaggacacttgactgacctcaggttagaggttactccatcctactctatggagtagctgtcctttcaccactttactttcttaataaacttgtttttgctttgcactgcggacttgccctgaatcctttcttgcacgagatccaagaactctcttaagagtctggatcgggacccctttcctgtaacaaaatgaggctgagacctactgggctgcattcccagacggttaaggcattctaagtcacgggatgagataggagattggcacaagatccaggccacaaagaccttgctgataaagcaggttgcagtaaagaagccagctaaaacccaccaaaaccaagacggtgatgagaatgacctctggtcatcctcactgctaccctcccaccagtgccatgaca

SEQ ID NO: 31885 - DNA, 1028 bp, Homo sapiens
gctgggcatggtggcacgtgcctgtaatcccagctacttgagaggctgaggcaggagaatctctagatcccgggagttggaggttgcagtgagccaagatggtgccactgcactccagcctgggtgacagagcaagactctgtctcaaaaaaaaaaaaaaaaaatgccatggcaacatcaggaagtaacactatatggtctaaaaaggagaggaaccctcagttctggtaattgctcacacctttcccgggaaacttatgaataatctaccccttgtttagcatataatcaataaataaccataaaaataggcaaccagcagcccttggggctactcttcctatggagtagccattctgtatttctttactttcttaatattaactactttcactttgtggactcgcccgaattcttttcttgagcaaggtccaagaactctctcttggggactggatcacgaccgctttctggtaacaggagcaatacaaatggctattagtaaacgaacgcttaagtaactctagtacatctatgatgaaataccaggccacagtttttttaaaaatgaggatgttctctatatactgacgcacagtcaccaagacatgcactttataggaaattataagctcctccttgcctaaatctccttaattttgcttaataaataacaagtgaagccagaagctgtaaactcataattttaatgaagaaatgggatccagaagatggagatgtttttcattctactttattagatgaggaaaaggagagtaaatacttgtatgccagctaccacaccttttaaagttaatgttaaccctgctaagaacagcaaggagattttatatcagccaggttttagttgccagaaaccacaccagttattttagcaaagaccttataaagaagtgtactatatttaagtagctaaaaaggcaagaagaaaatgccaaggtgtcttggaggtagcaactgctaagcagctgccaccccaggactgggggagctagaatagagtctcc

SEQ ID NO: 31886 - DNA, 1041 bp, Homo sapiens
cttatggctaatgttagtcctacaaaggcaatctagtccccaggcaagaaggagatctgctttgggaaagggttgttaatctctatgtttaaactattagtttctcccaaagttagttccatccgtacccaggaatgaacaaagacagcttggaggctagaagcaagatggagtcagttaagttagatctctttcgctgtctaagtcataattttgcaaaggcggtttcacttttctttaggcctattgttgggcaagtaggttgttttcaatgttatgttacagagtgctctagtgtacactcatgtaaatgtctatataccgtgcatctatttttccagggtagattcttactttatttcatttttcaatagaaacggagtcttgctgtgttgcccaagctggtcttgaattcctgggctcaagtgatcctcccatattggcctcctaaagtgctagaattacaggtgtgagccaccacacctagctctcacagtagattcttagaaggaaagttcctggggcatgaagaatgtgcctttttattgtaaatctttaactagaattcatttttttagtgtgtggttttatttgttatttaaatttggctagccagttgtcccaatgcaattcattgaatagtctaatctttcccactgatttctaatgctgcctctatcatagaccaaatatatatgtatgcataagcccatgtcaggattctgtatgtactgtttcttccatctactatttgcgtattccttcagtaatactcagtgttttcattaatgtagctttatagtaagccttaatatcaggtagaacaaatattttcaccgctaaaaagttatcttggctattcttggccttttagtcatttgcttgaattttagaatatgcttatcaagccctaagaagagatggtggaatttggttgggattttattaaccacacattaccttaggaagaattgtcatcatgaaaagatttgtctttccatacttaagatttattcaggtctattatgtcttatgtttatc

SEQ ID NO: 31887 - DNA, 1019 bp, Homo sapiens
acataggcaatattcttaatttgcccaacaggctgcatggggaaccgaattaacattttctatcccagcaaaacacacataacaaaacaaacattagtcaccttgttcagcacccaaagtcaacctgacgaagctcaaactttttcccattggtccctgttgtctttgatccataccaggtgggaaaggacaacctatgaatgttaattcacaatggggtctctgggcaaggggaagagcagatagtcaccccaagagacagacctgttgagcgttgagtcttctttagagctcatcgaatgtcaccagacaaataaggaaggttctttgagttaggcctgctggacttccatcagcaacccctctgagatcccttccacataaacacatgcaaagatgagacagacagccttctaaatcagatccctaaccaagctatcctcctattctcggtctgagaaacctcctcgaaatcttcctgattgagtagaagtcttccaaaccaggactcttcctcctggttagaaggagcacttcaggagccaaacagacacccagcagtggtgctacagacacagacaccccatggtagagctacaaacagacaccccgtaatggggctacagacaccacaccatagggctacagaagctgctgggagaaggaaggaggcattggcagcgcctaggatactcaccaatgcagacactctgcagtggggctacagacagacaccctgtggtagggctacagttaagggatgtccccccaggactatttctccattgctattaaatctgtgcacatggggtcagcagtgccccgccagtagagagagtaccagaatcagcccccagttccaaaagaactaggtggctgcttgggctggcttctggatccatcgctggaggggggccactgaaccatgggcaggtagctacaagggcagtcctggacaagcccccaaatttgtaaccgcccaaggagtaaactttgcctgctgcttagacagagctgat

SEQ ID NO: 31888 - DNA, 1449 bp, Homo sapiens
cctgcctgttggaagctgcagttttaccttctggttcttgcctgctcatcccctaccatactaagcctccagagtgtgggaatgtgcaccatttcctaactatattaactcactgccaccagtctggtgtgggtgctcagtacaagtgaatcctgaaaaagcctcaggctcttggatggaggaaaactggctgcatttgaaagccatacttcaatttctattggtcactgctagtataaactttaattattgatttaaacaaattttatctggatccaattatgttgataaattatttttaggtttaataatttgttagattcatttcctagcttttctaggtttagaataaataatgatttatttgtcttttgatgtcacttatgttgtgcattagcaagaacttcagaaaacatggaacagtagatgtctttctcttaacgcttgggggaatgtttttagtattctgcagtttcatatcgtgttcattgttggattctgatgttctgttagatttaggaagtttccttctaatcttatttctagaagaagcagtgtagtttagtggttaagagcacagattttgttcccagtgccctaggttcaaatcctgagtccaccactttgttaggtgtgtgatcctgggcaaatcacttaccttccttgtatcttattcctccatctataaaatggagctacctcatagggttgtgaagaatacattattgtaacaatactgggcacacagtgcacagtttcccaattattattatacttacagttttgttttctgtttttttttttgacaaggtctccctctgttgctcaggctggagtgtagtgatgtgaccataggtcacctcagccttgaactcctgggctcaagagatgctcctgcctcaacctcccctatagttaggaatacaggcatgtgccaccatgcccgactaagtttttatttttattttttgtaaacatggggtttcactattttgctcaggctggtcttgcggtcctggcctcaagcgatcatcctgcctcagcttctctaagtgctgggaatacaggtgtgagccaccatgcctggcctatacttaaaaagtttttattaggattggttgctatattatatcaagtttaaaaactccatcattgtaattttatgagttatggttttttctttttgtaattcattttcttgacaagtttgcaaatatttgcaatttccttgtacttttcaagtaaaatctatttgttcatagtgaatttttattaagtacagaagtagattcaatttggtaatgctttgctagctttgcaaaagaatttggaaaaaattttgtttatcttattgctatggagagtttgtataacatgggaattgttccttgaaggcttgctaaaagtaactgggcctggttctttgggtgaggggattgggagggatat

SEQ ID NO: 31889 - DNA, 1050 bp, Homo sapiens
cttagagtctgcatgctgccattctcttttttatattccttttctttttaaactttttactacgaaaatttccaaacggagataagctagagtgaataagagtcagtgtgtatggagctgcctgggtcctcttgaataggaccttctctgcattcagcttgaacaatgatcagcattctcttcacctcattattgattgacataaggtggtttaggtagagtttttttagttgtaaggaatagagagccactcaagttattgtaagtaaggagctgtgagtcataggcttaaaggaatgagaacccagaagaaactgatcgctagaccagactgtgggaagtagggccttgactcagggcagcctgggagcctgaacagcaaaagcaaatgcatgttgatgcctgtgttctggtgtgaatgtaatgcagctgctcgcagtgtatctgttttctctctgcttgtactcctcctgctgcccattttcttcactgtgaatcttttgtccttttcgtagctctttcctaattgtacttcctgttcccttatatttgttgcttgctgtgtctcctaatggcttggcttctctccatgtatcacttcagattccattaccactcgtaattttgccctacttccagttccgaatttccttagagacagattcccattgctatagccattactcatcatctcggttgggcagagctttggcccaggccatggcagaggctgaagactaacctacagataagctgcccttgggtctggtacctggtactggtccaatcacttgcagtccatcatgggatgatgttcaggatcacttgccacagagcatggttgcctaagtgttgctctctgcaaagactggggcagtgcagtttcctggaagggcttcttggcagtgcaggtgctatgattgatgcatatagggcagtagccaactctggaaagggtgggcttaggaatctttcacccagacatcttaaactttccataggctaactgacatgatggctgtagccccaattcagatgtgattgaaagga

SEQ ID NO: 31890 - DNA, 1113 bp, Homo sapiens
tttgaaattgagaagtttgagtccttcaactttattcctctttttcaagaagaattgtgactgtatggttctcttgagtttccacataaattttaggatcaactttcgacttctaaaaagatgccccctgggaatctgatagggattgtgttgaacctgtagataagttttgggagtatccatgggacttgtgtttgaagaaaagagaggaattaaaatgttttggccagtgtgtgaattcattgacataacttgggaaatccagagaggaaggtagtaagaacatgcattttagacactgaacttgaggtgttgcaggacacccaagtgcaatgtcccataggcaacaggaggcatgtggtaggggtctaggagagaagtaagaactgtgagagcagtattaaagcaatgagagttggtcagattgctgacggaaaaaacaaggaagcactggggcctgagttgcaaggagtgtccataatgagagggcaggagcagacatgaggaaccacaactgtgtggggaaaatcagggctggctggtgctagggaagccatgggagagagagtggccagaatagcttccttgaaaaaggttgaagagagtgagggcttggaggaacacccagttctcagcttgatccgggaccttgtactgtaccctccagggaaaattcacaccactcttgggataatgccttatggaagaggttaagagtcagtgtgtgtggaggtgcctgggttctcttgaatccacttattgggaatatagatcttatgggagccagaagcagggcttgtcccactcatagctttctttcctccctcagctcaatgtacttctccagttcctacccttcctcaagtggggaactcaggagaccaagcaggggcaactgtacttcggatggtcaggccccaggtgagcttggttctttgtgtttttaccaagtccccatgagtctggtccaagaatggctagaggtctcacccccaggactctgccccatctaagactattcctgtggctctcctgcctcattgcttcccctggaggtaatggactctatcttgcactggactttcgaggtgttatctcagctcctctctccca

SEQ ID NO: 31891 - DNA, 1040 bp, Homo sapiens
ccaaaatgcaaaacatcatacagttggccccctgtattcttgggttccgcatccacatattctgaggatatggagggctgactgactgtaaaggagcatctgagggctttgatatctgagataggggcatcctggaaccaattccctgtggatatgactatatatggaaaaagaggtcaattacatatacagaacagaggaaaagaatcttacagaatactaggtgtaactttatgccaacgtttgacagaatagtaaatacgatttccagatacatattagaaaaatttacacagaagtagaaaacctgaagaacaaaaccactgaaaaaaactgcaaggatgctactgccacatccaaacaccaggggaaaaaaattatatatatatcagaatgcgtcatttctagctagcctttaaggaataactgctatattatgcatactgttccagagtaataaaagaaaaaaaacttccaaattcattttgcacagccagcaaaatattggcaaattgaatctacttctgaactttaaaaaataataataataataaggccaggcgcagtggctcatgcctgtaatcccagcactttgggaggccgaggcgggcggatcacctgaggtcgggaattcgagaccagcctgaccagcatggagaaaccctgtctctactaaaaatacaaaaattagcctggcatggtggcacatgcctgtaatcccagctactcaggaggctgaggcaagagaattgcttgaacctgggaggcggaggttgcagtgagccgagatcgtgccattgcactccagcctgggcaacaagagtgaaactctgtctctaaataaataaataaaatagatttatcccaggaatacaagaaaatttcaattatttgggaacttttagattttttataacttgataaaacttagcaactattcctaataaaacttttattatagtgtatactatgtgtcaatcactgttttaagtaccttacacatactgactaatttaatcctcacaaccctatgaagtagc

SEQ ID NO: 31892 - DNA, 1059 bp, Homo sapiens
tggtcatatctttcttactaatttgtaagttatgtaatttatcaatttttttttgttgttctgtttcccaacctctatgtcagataaagaatcacccaggccagacacaatggctcatgcttgtaatcccaacactttgggaagccaaggtgggagaattgcttgaagccaggaatctgagcccagcctgggcgacaaagcaatacccctatctctacaaaaaataaaaaatagccaggtgtagcgacacacacctgtagtcccagctgctcaggaggctaagcaggaggatggcttgggcccaggagttcaacgctgcagtgagctatgattgcaccactgcactccagcctgggcaacagagtaagaactgtctcaaaaaaaataaaaaatagaaataaattttaaaaaaagaattacccatattctctttgtttttgtttattcacattaacctttattctatctggaatttattagagtatacttttttctcaaataatcaattgtcctagaaccatgtgtttctcatttatttgaaaggccatctagtgagagatttctccaaatgttggggtagggaagggaggggaagcactttaaagtctgagcctttagaggtgattcctcaagaccctgcttaatcctaacaattttcctcattagtaaaagtcagcccaaactgggggcttgttaagatccttaccagccacatccatctgaaattatgaatttcaaagtatcttacaaatttggtgccacattatcttttttaagtttgttttgttttgtttttttgagacagagtctcgctctgtcacccaggctggagtgcagtggcgcgatctcagctcactgcaagctccgcctcctgggttcacaccattctcttgcctcagcctcccaagtatctgggactacagtcgcccgccaccacgcccggctaatttttttgtatttttaatagagacggggtttcactttgttagccaggatggtctcaatctcctgacctcatgatccacctgcctcggcctcccaaagtgctgggattacagg

SEQ ID NO: 31893 - DNA, 1023 bp, Homo sapiens
agtttggtatgatatgtagtatatttttcattatttctgaacatttactacattgctttaggggaaaatgctgtagttccaaacagtcacttttcaaactacttaaaaatacaacctgattgtaattgggaactgacaatattatagaatactttagcatgtgagtttttattaagtaactgcatgccttgagggcaatatagctagaaacaatggagaagaccagactgaatcagattcagggatatccttaaatacaatatgagattttcttattatttgcttctaaggtaaaggcaaaataatgaggagaagaaagttcttaaaaattctgtttttgctcagatgaagaaccaactccagccgatggaagaatcatatatcgaaaaccagtcaagcatccctcagatgaaaaatattcaggtttaacagcaagctcaaaaaagaagaagccaaatgaagatgaagtaaatcaggactcggtcaaaaagaactcacaaaaacaaattaaaaatagtagcctcctttcttttgacaacgaagatgaaaatgagtaagtgtaaatattttgaatttagtctactttgaaagtatatggagtgttcattaaaatcacattttttcctattataaagatactacaagttctttatagaaagtttaggaaatagagaaaaaaatttaataaactacatctattcatcaatacccctctgacttaaaatgccaactctatagaaattagctagtattaacattttgttatttcccttgtgtggttgtatatatatgtaaattatatttttaagcaaaatacattttttgtgtgtaaacaaaattttataaatacaactgtattgcaaatgttctttgtcctgcttctcacttgacattgcattacgagtattcttccaggtcagtaaatttcaaaaacctgacattaatagctacagataatttcataaacatctcattgtatctttttcattagcaatagctccactttgggtgggggagatgata

SEQ ID NO: 31894 - DNA, 1096 bp, Homo sapiens
tatctggcttaggatcacctcatagaagagaaagaattcacagtgaagcagaaacaagccactgaccagcgtactcccaacctgaaccttctttttctcaccctctccctcaagtaaacatcttgctgacttgagcagtgtgattgccgtagcaaagcagagtggcccccagggatcccgctctgttgggcccacaggaggagccgatgaagctgatccaaggagtgaggacaagcgctgcagagggacgttcgctaaaagccttctaggggccgcacatgctctaacacggacataaggatgccctgaatttctgcagctgaggccatatagtctggtgaccaagtatttgggtcctggcttcagtctttggttgaaatgtctgcttggctacttattaccgcacctactaccaaaatatgaccttgagcagtaacttctttaagcctcagttttttcatctgaaaacgggaatgataatctaaatcacaaagttaatggaaggattaaatgagggtgatgaataggaatgtatagcgtctggccctggtatggctttataaatgttagctgtgttggagctgtgcttttcaaaccattggtcacagccattcatggtttgcaaccagcatgtttttcaagaaaaatgtttaatgcattacatattgcaggataagtattgttttatgaagcttagggagttgtgtgtatatgtgttctggaatgcaacagaaaaatgtttcctcttgtgggttacaatatagaggtatgaaatctctgatgaggagagacagtgttatctggcccgctatgaagagacacatttgcataggctgctccctgaggctctggctttctacatctgatgatacagggagcagggaacagcctgttctcgttctgtggggctcagctgagtctgttctgcacagactcttccttcctcgggagccttagtcctaatacattcattttggagtgttggtgagtttgttcacagatcacagctcatgtgtcacccagactgacctgggccaaaaggcccatcacacaccctgcaagagcttctggtgtcgactatgacccccttaccagg

SEQ ID NO: 31895 - DNA, 1044 bp, Homo sapiens
ctcattcgtggtctgtcactcctattcaaccttctcagtttgtgtctcaccaggcccactaagcggggtgctgcttgatcccccaggctggtgagacacacaacgccagagcagtcatttgatttgttactttttttttgtctgcaaggtggtcatggtagcttcaaacttcctaggaacctatcccaaattaatggccatcattggttatgatgattgcgagctccccaacagctctgaggcctctcacgccaaagccttcatagtactccatccacagcccagcacagagtttctgaagagtgcctctgcagagctcaacaaggggccagggctggagagacgcgctccttatcttagcgacacaccccggcctggcatacttacaagcagcagtttctgcgctgctgatagtgcttctttttccctcccttcttggagggacttgtgaatgagtgcccaccaaaaaaaggagaaatttttttagtaacactttttatgagaaagatatattaggtagatagctttgttgctttaaaaaggaaacatttactccattcacctgtcgctgcggacatccctccccagaaaccacagcaatgcagtgcttgactgaaagtatgattgttcttgttttcagggaatagaacaattgaaaaaggaagagagaagatgggctaaaaaaacaaaatggatgaacatgaaagccgtttttggccaccccttctctctaggctgggccagcccctttgccacgccagaccaagggaaggcagacccgtaccagtatgtggtctgaaggaccccgaccggcatggccactcagacacaagtccacaccacagcactaccgtcccatccgttctcatgaatgtttaaatcgaaaaagcaaaacaactactcttaaaactttttttatgtctcaagtaaaatggctgagcattgcagagaaaaaaaaaagtccccacattttattttttaaaaaccatcctttcgatttcttttggtgaccgaagctgctctcttttccttttaaaatcactt

SEQ ID NO: 31896 - DNA, 1092 bp, Homo sapiens
catagctctcatttccttgcacgccctcatcatggtgggattccacttcctgcattgctttgaagaagattggacaagtgagtatgtgctgaggctttcctccctgctccagggtgggtgtgtgacctgagtggggggcggggaggctctttgtttccttcatggtgccaggggccaacctcattttattaaatctcctgaaagcctatggactgaacagggaagaaatggcagagactggaatctctcttcatgaaaaaatgcagccccttaacttcagttcgacaggtaaagtcatgagttggacagacagaccctctggactgagcgtgcccagggagaatgcaggccccaagcaagcacagaggccggttccaatgcgtgggagccatgctgggagagaagttttgttttctgtctttccatgaggcacttaaatcaaagatcattttattccagtcttgcagagattcattttttactttctggctaggacatggagtttctttattaatttctttggtttttgtgatggtgttttttaactgcttacactgataatcgtgaatttacattaagattgtagataattcttcctgctttagaggcttcccactgaaatgtgcaaatactgagggagaaactccagccagaagattgcacagatcctgaaggaaaacaatagatgctggaggaaaagaaataagaggccacctgctgggctggctctttcatactcacaatctgtgagacaaacgtcttgagcaaggaacattgtatttcctaagcttttccctccatgggcctccttttttttatttcactgtctttagaacttttgctcttcctatacatgctgacttcttcccacaattctggcataagtcaaatggcagaggtcaagccagcagacaatagagataggagaggagggtaggggtgagtgggtatgtgcagaacttgccattctgcatatctaggtgagtcgccagcaagttcctgatcacttggtgagcattctgaagtacatgccttctgctaggcctggggaaccagatctactccagatgtggccttggttacttgacaagg

SEQ ID NO: 31897 - DNA, 1076 bp, Homo sapiens
agcacctcatagtgcttctagaacttccacccatcccttggtggtttggtcttttggggaaataggtagcagccattctccaaatcttagcccacttggtcaagtttttgaaactgcttcattctttttctctcgggaaaccaaatcgtaagccccattacttcaggagagcaggttctatcttagccatgtaaccatgtcagttccgtcctatgtatgtgttaagctaaggggctttggagaatgactctgtacccgtttggaatgactgccacccctggggtcctgaccctgcctcccaagccccacgtgacacacacccagcaaaacccctggcagtgcccaaggaagccatttcagaggagtggagcaggagccatgggttctgcgttcccccggggccctcccaacaccatggggatgccctaaaggtctgacctgtgggctgtttcagtgtttgtaagcggtgcattcggaagatggaccaccactgtccctgggtcaacaactgtgtaggcgagaacaaccagaagtacttcgtcctgtttacagtaagtcagcttgcaaattctgccctgccccccatgaagcaatggagcactttgttcctttgaaaattctcagcattcacgatgttctttgctcagaatactgcctggccctgtagatctctgccttcctgccaaagatctctctggctcaacaagtgcctgtacctaagcccttcacttgagcgtttagaaaattgatttcagttgattagctatgagcaagggctgtattctgggctcccattccaagtgttggacctaagtagctcaagaaggcagtttgggtgatgacctcaaatcctgaggtgcaggtaggtggagtctacttagtgcaaggactagaagggccctcagcagtcagcaccctggcttttcaagggaggaggtacagcaggcttgaaccccccgcccaggcagctcatactgcctggagcccaggtcatgcctggtgacgggcttgcttctgttctggttccacgtactcccggaggtggctgctcacttgacccagggctggtgggtaga

SEQ ID NO: 31898 - DNA, 1050 bp, Homo sapiens
catcctattttagagtttctactattttgctgatgttcatgacatctgctaagaggctgatgaaattgagtttcgattttatagttcctacttgtagggagccagaaagtttaatccctcaatttttgttttaagtatatagattatccttatctctaagccaaggggagatcattgcacctgatttcaagtttgttaaaccagtctgtatacagctatttcatacaggctccaatggttgaattaattgccctttgttgatgctactttgtaccgtctcaagatgtgtgctgttcacgagtgcatgaatgttcatgtggatgtgagaatgtgggtggatgcggtgttttagaaaagtaatcctcacaaagtactttgaggtgcttccaaagatttggttttagatctggctgaactactccatgactttagtgtgggatcttgtcttataaaagcaggtgaataggacttgttggcaatctgagaggatgggggtccttggtacacttgctggactgagaacagtggcattttgggactctaatacattcagtagagaactttatgtttgatgtgacaatcatgctttgaccctgtccataaagcatggactgtgggtcagggttttgttttgggtttttttgccacatgataaagattagtagggatttgcccctcactcaacaaatgatgtagctggattctgcccatcactagcagtcaacacttggccaggccagttcatcctggccaacccgatgaagtgccacagtgggatggggcctgagagcttggcattagcaccacgatgttcaaaccctttgagctgcctaccatggagagacagcatggggactgaggcataagtggtataccccaaggctgactcagcaacccagtccctggggctcatggagccccagactccacttcactaagtatatttgtgtctgtcagtgtgggttagtggaagagcacacttatgataaggtataatgaagcacgtgtgttatgtatggatctggaggcaattctctggaccacaggcag

SEQ ID NO: 31899 - DNA, 1042 bp, Homo sapiens
agtagcagagaatctagaaagacaggttgtttaggaagataacaatctatggtagaaagacttccgggcatcttagtccaaagatttgggctttgctattaacttgctttatgactttgaacaagtcagttaacctaagtctcattttgccctcaagtgagtatcttgccaggtttttaaactcagaatggatcctggatatgcaaatatttgaatattgaaaaatgaccatgtttaaattggggtttttaagacttctttcatttaccacttcattatacttgatatattttgctagtgctttttccactctgaaaaaaattaaatgaacaaaaggaagtcgtaattttatgctgtacttgattgaaaaaactaaacatgctcaggaaattgctaagagagatagttactagtgggcttctttttgaatattagcaaatcgggaaaagaggtaagtgaagcttttggtaaaaaaatgtaaaatccaagatattaacaaagaaaacgttgaatttgctcctgagaacagaggactcatagaatctcagccctgcaaggggccctagcaatcagcgtgatcttcccctttgttttatcaaatgaggaaactgaggcccagaatggtaactgtcttgcctgagatcatgaggttagcgagtggcaggattgggagtaaactctggcctcttgattccaagctcagtcttcattccctttagcactagcctcccatctatttccaaagccctctggtgaatggctggagagcccctcaccaggtaagcaggggctgtgttctctttctcacagcccattacagccttctttctgtggtcccaggttcctcccagggctctgctcttgcactgccacttacagtgcctggaataagtgataccagcagattcctgaaagtcaaatggctcccctttttaggccctagtacctagtacagttgcaataactggttctctcccttccctagctagtctttcggatttctctaagcacttttgcttttagtccctaaaaacaaccaagc

SEQ ID NO: 31900 - DNA, 1044 bp, Homo sapiens
cactcggaaatgaaggttgtcattagatctgatagattttatgtaatgcattagtaaaaagacacatatattactagttcatatatctgctttaatatttggagaattgtgtttcaatttaattggtttgtaattctattttattgtttgcattttaaagcattctgagaaaggggctataggctttgtcagattgtcaaaggtgtggatgaggccaaaaaaaaaaaaaagttaaggatctttaggttgtggcaggtcctcatgaaaaacaagagaaagatcagctcattgcagcactggtttgttaatagtaacaatagtagcattgtttaatttgtgtaattgtataattttctaggctcttgctgtaagtcagcccacttttacagatgaggaaccaagacccagggaagatggtaagtctgaaccatttacagaacatattactgctactgcgttatgctgagacagctgtaggagtggttttctctaaaccattctcattttacttgaatttagattatctgatgacttataaaaagcttttccataaaccaggatttgctatggcagcccttgaccttcagacctttattatgattgttaatacaaaaggctgtatcagttacctgttgtcagaccaagctgcattattctgcgttatttgaagttggataacctcaaaaccgtggcttaaatcactgaagatttattttgctcacgaatatgcaggttgactgggggctctggactcttggtgggctcactcccttgtctgcccgtggtcagctacgcattgaggctgtgctcccacatgtctgagggttggctgctcattggctaatcgtggctggggttgactcctacatctgtggtcagttggtcaaagaaaggctggctaggctaggatggtcttggccagacaacttggctgtactccatgtggtctccctgaccccaacaggatagcctgggcttattcagatggccactgagcaggtttccaagagagtgagtaaaagtgcccgagcttcgcaaagccca

SEQ ID NO: 31901 - DNA, 1025 bp, Homo sapiens
ccagctccacgtctccaggcctctctttcacctcttctaaagagcagaggtggacactcaaaaccaattatttgtcagtaacttattattaattgttctttgattgttgacccctctcctgtggtgttccagtgttctttagagattttgtgacacacaggctcatgcttgcagagtcttaccatgtcactgctgaggggtagaggagtgacactcctaagtcacagagccagtggtggagctggatctgaaccaggcggtctggccagtctgaactcttcataaccaaggtgccctttccctctctctgatattgattcccactgctctgccactgccctgcccaaagaaggggcttaggaaatacaatggaaagactgaatgaatgaatgaacgagaaagggagaaataaaagaaggaagggcagagcttgagataagcaagcccaaaactgcaccacaaagcccctggccatgtggcgggagcgacaggtgccatctctgggaagcactctgagaaccagctaaggttcaggagtgtataggttgggagatgggggagaagctggacaagagaatgagaatggagggagatgaggccagagggatagcaggaggggagtggagacaggaccagcattgactgagtatctgccaatcatttggagaggggctgggcacctgcccctgtttatgtcttctgcttcagcacagaccccttaactggaaccagctctttagagagaactgcctgatctgtttctggccacatcctctctgagcaaggtcctgggctaccggtcacatccccagcatgggtacttggctcttagcagaataactagacaggacactagggaaaacctgagtcatcccctcaccacctccaggccttgaactgccagggcttgtggccaagagtgcccaccagaggaggggttggaagatgaacttcccacctcaccccctcctgcccctccgtacactcccaagtggaaatgaaagcacccctggagttagcaggac

SEQ ID NO: 31902 - DNA, 1031 bp, Homo sapiens
aaaatacaaaaattagctgggtgtgttggtgtacacctgtaatcctagctactcaggaggctgaggcaggagaattgcttgaatccaggaggcacaggttgcagtgagccaagatcacgacactgcactctagcctgggcaacagagtgagactccatcttaaaaaaaaaattttttttaaatgttggttggctctagcctagcatggtggctcacacctgtaatcccagcactttgggaggctgaggcgggcagatcacctgaggtcaggagttcgataccaacctggccaacatggtgaaactccgtctctgctaaaaatacaaaaattagctgggcatggtggtgggtgcctgtaatccctactactcgggacactgagaaaggagaactgcttgaacctgggaggtggagattgcagtgagccaagatcatgccactgcactccagcctgggcaacagagtaagactccatctcagaaaaaaaaaggaaaaaaaaatgttgactggctctgccttatctcctagaatattttcagttttaaaatgaggcctgtgtcttagctggtaagtaggttgaagagcctgccctggtggggaagaagtgagccattcaaagacctccctctgagccctggccctgtctagcacacaccctttgcacagattttgtctctgacagtgaggcccttcaaaaatcgtctgaaaaaaaaatcaatatcagtgtctcctgggactaatttctcattctcagggaaggcagagagtgaataggaggctgaggcccaggcacgggaagatgaaagggtcctggggcacatggaccagccaaagcacagccaggagacaggcctaggtggagccagagatgtcgagcctggaggagagtgggcccagcagctttgtgcctggaagattgttatctggaaggaggtctcagcctgtcctgcgagacccaagggcagcaccaggaccaacaggagacagctggacagatggatcccacctagactaagcttcatatcctgaag

SEQ ID NO: 31903 - DNA, 1016 bp, Homo sapiens
actccaaaaaagaaattctgtgcccattagcagtcactccccaacctctgcccccagtgaccactaatctattttgtggatatgctgattctagatgtttcatgtgaatggaatgaatgaaaaacagctggaatgaatgaaaaggctacagagtaagatgttttaaagaaatgaagagtatcattttcaagaacgcacattaatctatgttaaacatgccctcttcaggggacctgccttaaggagctcttgatgttgcttgtaatcaaggtagtgagtgcgagggtgtgcagggtgggcacaccaaggtccccatgcaaacagcaagccttcccctccagcagctccttcccatacacccctgctgcagtgtctgagaccaggccagagttgttaggttgtggatcacagaaacagaaccaacccctcactctcccgggatccttagtccctggtggaactagaatgtgatagaatattaatggaagtaaatgagacgccgtgtgcagaagaggcagcacagagcctacgtgtagcaggccctcagtgtacactctttgtacacctttgtcccctccagccttgtcaggggcccgtcctactccctcaccactaccagctgccagcctgagcaagcacactgttgtgttaggaacacaatgctcgctctccctcccatgcctttttgattccccttttgatttcccttcgatccacacgtttgaatttgttatttagttttcaaatattttgagattttccagagatctgctcttgatttctaatttaattccattgtagacctagaacatactttgtataacttgaatcctttgaagtttgagaggtgttttcttaatggcctagaacaagggtgtccaatcgtttggcttccctgggcctcgttggaagaattgtcttgggccacacataagatacactaacactaacgatagctgatgagctaaaaacaaagacaaaaacaaataaaaaaactcataatgttttaagaaagt

SEQ ID NO: 31904 - DNA, 1024 bp, Homo sapiens
tatcctctataattaaaatcctattttgttttctgaaaattaaaaaaaaaatctacaactttggaagtagtgtaaaagtctgataatgatgaagcaaattacaattcatacataaaatagaatatacttaaatgtttaggaagtatttttactgattttggaaaatgcaatacagttaaattgctaagaacagtgtaaacacaaagtaaatatgcaaaataagtattaactattactattacaacaaatagatgtcaaaaggatataaaattgtgattcttaaccttttttgaccataaactcctttgagaatctcctaaaaactgcagaccttttctcagaaataatgtatatatatatacacacacacacacacacacagacacacacgcacacacacaaacacccctacaattctgggagtccatgaaccccttgaatccttctgccatgtattctgtgggccctcacataagagttcatgataaactatgtgattttaactgaccgtacttttagaaacctggaaaaaatgatcacattttattaacagttggcctccagctggtggaattatgggtgacttatttcttcctttttttaaaatagttttcaaagtttctacagtagtatgttgatttatattgaaaaaagaacataaatgataatctgataaaacagcctgtcttatgcaaaagaaatgaaaacagagattattcattgagcaaatatagacaataactagattctccttatctccctgggtgggtctgactatgccattactagcagtaccatcagcctgcaagcactaactgtgtgcctggaaacatgttcagtagttttcatgtttctccagtttaacccacacagcagcaaatggcagtgatggaatttgaacgaagagcagctgagctccatagcctggcattttgcactgtaccctactacagacaggaatctgagaataccaacaatacctggggttagtcctccctgtcttcttttcaatataaagagtaaa

SEQ ID NO: 31905 - DNA, 1028 bp, Homo sapiens
cattattagttggcattctactgtaaggaagatctttttctttttccccatttattcattcatagcagtattgactcatggattcttattttattcaataggttgcattctgtcactgtcattatttattttgaagcttacattatcccatttatccaattaccccagtggggagcccccttcaagctggctcttgtggggaggtttggttacatctgatacttttttaagaaataaaatattatagatcagctaaagccccaccccaatgccatcctttctcctttgttcccctttcagaagtaatcatgtaatcaatgcatttcattctcagatcttatgctttcattattaattgtgtatttgtaaatattttatatatgtatatatatatagttttattttgtaaatgttttaaaattttacacatgttgaatcatgtaatagctatcctttgcaacctgcttttttcattttgccttgtttttgagattttgtatctgtttatacatggagttctgtaagtgtagagttgggttggcaaagcacagcccagagggctgtgtggaacacagctttgcccatttactcacctgttgtccatggctgcttttatgctaacagtgccagttgagtgacagagaccatatagcccacaagaccaaaatatttactatctggcccttttcaaaaaaaaagaatgccaacccatggtgtagagaattctgttgggtgaataagccacagtgtatctctttccatagcagtgtagagtttgtttggtttccctttttccagttacagtgctgccaagagcatccccactgtctccttatgtacatatgtgactgtcttcagggaagatactgtgaagggcagttgctgggttttggagactaggtttgaacacacaataattttagatttaggagatgattctgatgaagtaaaaatgtgtttcgtttccagtgttcctgctaaacgagagttatcacacaagcctttgtatttctaaagcagtgccatcc

SEQ ID NO: 31906 - DNA, 2084 bp, Homo sapiens
ctgcatcttccctcttctctccctggacagcctgcccacctggctggccttccaggtgttctcgggtcccaccttctctcattcccagtggcattcaggctttggatgcactatagggtggttatctgttcactgtctgcttctctcttccctgcccctgacttccctgagggcagccatcttgctttagtcacctttttgtctgccccatgacaagactcagagactccgtaaacattcaaatgaagaagcaactaggcaggcacatggatttgggagttagttgggctgagattttcctcaggaaaaacagacttgcccacgaggacaagtccaagagtttatttaaaaagtgcaggctgtggcgatgctaacagcaagaagaacttcactgggtgattgtgaagtcagttaggtttcttcgatctgtagtttaggcatggactaggggtgctttgacagccgttaacattggaaaagaactgggcattttagttggtcacaggctttgaataagccagtggtgtgacgtggataccaggaacactgatgtcccagctgtggtgttggctgtcggttggttgggaaataactttttttttcagacggagtttcgctcttttgcccaggttggagtgcagtggtgcagtcttggctcactgcaacctcctccttctggtttcaagcgattctcctgctcagcctcctgagtagctgggactacaggtgcccgccaccatgcccagctaatttttgtatttttagtagagatggggtttcaccatgttggccaggctggtcttgaactcctaaccttgtgatctgcccgcctcggcctcccagagtgctgggattaccaggcgtgagccaccgtgcccggtggaaatacctgttcttttaataaatggtagctcttattcccttgacccaccccattttaagaacaaatctacccacatgaaaggtcacatagatgctatagaggttgatgcatctggtgccaggtttgagtgagggccgttggcagctatcaaggaaactgttttaggggatccagaattgatgtaaacagggccatgggactagggtgtgtgtgggaggcgaaagggtatcatttacaggggccacccactgaggttttcaggtccttgcttgctgtctctgttggatccagcgaaagtgaacacatagtggttgggctttctcctcctcttccctcctgggctcagcctaaggatcctatctaccagccagagtttgtggagaaaggtcaccttcttttgttctacaggccttacagatctggggatggtcaggtagcagccacatgtcctcaggaccagagagtctgggtggttgttccagtccctggaactgaccaggtgggccccctgtgcctgattcctctgactgtccactgtgaggcaatggggaaggggtttctgggtgccacacgaagctgtctcccaccaggggaggggtcttccaatctgcatggaccttatcatttgcttttgtgatttgctcactgctgctcccctcgtgagcttagaatggtgaggaagtcctagtggttgtgaattctgctttgtggtgaaggaggcttttttcccctccaagaaaagggaaatggtggggtagggtgagagggtggggaggtgacttcattgctcatcaccagttagtttcttaaccgacatttttagccccccagtaatggagatgtctatcctgatttaagagggcttagtctacaattggctgctgcatttgctactgtggttagagtcccaggctgcagagggacgctggtgtgtgcaggctcaacctgtcctcttctgcaccagcaaagctggacttttttttttttttttttccaagcttgagaaaagtcattaggcattgacaaggctgtgtcaggcctgagtgccagccatggtttcctgcttccccatttagccaggtgagggtcaagagaatctgtttagggtatgagtcaagatagtgagccatagtcagctaggttcctctggttacttttattattaagtcattttgacagcagaattaaggaagatggaaaa

SEQ ID NO: 31907 - DNA, 1050 bp, Homo sapiens
tgcagtgagccgagatcgcgccactgcactccagcctaggttacagagtgagactggtctcaaaaaaaaaaaaaattgggaaaaaagaagagggccttagttctttctttggggatgggcctactagcctattaattgccatattcggaagcatttttctttgctgtcgtttaacagcaaatgaaaagttccatttctactttgttcatctttccaacgtaatggagaggaagaagaattctgaagttcactacctgtgtgcaaaccctagtttgcttttttacctggacttgggacacattgcttcatctctctgagctgggtttcttcatgtctccagtggggaatgacagtccgtacacattcattctcattgggttattgtgagatctaatgggataatctgtgtgaaagggctacagagacagaccaatgagggccgtagttttagatgggtgaaaactgtgtccttcagtgtgtgaagtaaaagaatgttaaatagctagacctgtcagagatggggggcacttcccactttccaactgaaaaaacaggctggacagtctgacccctattttccttactgcatggcagtctgggggtcctgtgtgaaagtgaaaagggaagtaatagggtgtgaaagctggctagagtggcttctgcttttgttggctgcctgtggaacatatcagacagcccctaaattgcctgtcccagagaagctcaaacctcagcctttcaaacaatggctagttcacctgagctgttcgcttggatttagggcaggttattggggccgggtttgaggtcggaatgcaacggacaaaatagcatccacagagcccattgccagggaaggacgtgctagatcatcaggagaactggcttttaaagagggatcctctcagtgggctggaagtatggcctgattgttattttttctatgttttaaaattgtgggaaaatacacatacaatttactattttaaccattttaaatgtataattcaatgtccagaacgttttcatcatcccaaactctgtacccgt

SEQ ID NO: 31908 - DNA, 1017 bp, Homo sapiens
gagtgcaagtgttaagatttggtcttggttttcagtcagaaattcacatatacaatcaatcagattaacttctctatactcaagagctgagtccccctcagttcttaggagatacacacattcccctaggcttcaagccagcctccttctagattacttctccttcaagcctgtccctgcctacactggcagtcctgcaccatgtgcttcctcagcatggtacaaatggttgcttatagctctgttatgctttttcatcctgggagcatagaagaaactcaaccagagaaagttaggaggactttgtgagaaagtggcatttgagctttaaaggatgaggaatttttcagtaagcaaagataggctaaaaggaaagctggagcaaaggcagggaaggaagggagtgttcgggatatgtttggggaatagctctgtttacttgtatgggaacataggcatcataaaacttgtaatccagcatgaggttggaagggcattgttggggatagatcttggggatttgaaaatgtaaaagaatatgaacctttgtatggtgggaaacctttgaatttttttttagtaaaatttatctcaaggcttatgtttataggccctaaaattcagaaatgatactgtaaataaaggaattgacaagtacttgtggaaagcaattcagtctttaaggatggctttttttttttcatctctgagacagtctagttctgttgcccaggctggggtgcagtggtgcgatctcggctcattgcaacttctgcctcccgggttcaaacgattctcatgcctcagcctactgagtagctgggattacaggcacctgccaccacgcctggctgatttttgtatttggagtagagacagggtttcaccatgttggccaggctggtctcgaactcctgacctcaggtgatccacttgtctcggcctcctaaagtgccgggattataggtgtgagccaccgtgcccagctttattatttgtttttaaatttttatttgt

SEQ ID NO: 31909 - DNA, 1095 bp, Homo sapiens
tttgtatttttagtagagatgaggttttatcgtgttgcccaggctggccttgaactcctgacctcaagcaatctggctgcttcagcctcccaaagtgttgggattacaggcatgagccaccacagctgaccgtatgaagtgtcttgaatgaaatcagatatcatatttttatgttctaaaacctgactaatatttttttaattttgaaaagaattaagtacttcagtggttaaattattgggaataggtggaagaaggaagagggaagaaaaggagctggagtgagaagggattaaagtagaaatgaattcattcttgtttatattttattcacttttggaggaaatattttcctcttttcacatgtgtttggcatttgcaaaaagatacacacttacgttcaatccatgtggagtttgctaaatttcaaatgaatcacataaatcacttagccacttcactccagctgttgtgctgtcttgttttcctgaatcatttaggaatatgcccaagactgctaggcacttgacatttaaattatatgtaagcttaaatacaaacaaaaatcacaactcccatttccagacttctgtactgtgttagttatatcttttgaaaaataaacaaagggattaagataagatctggtgcagcaatacagctgagttctggggccaagtttataaagcatgttggaggccttacccttcttaaaagcccaagttcatgggcaccgtaactattaatcttgattcagtcttttggtctagtatatgcatattaaattaggcctttcaaagcgaatgaggaatgggcatgaagttcactgttgcttatttaatgctcaaggaattgcctttcttatatgaagacctgtgttaggaaatccaggtcatcaaactagccaagcacaaagtaggagctgagaagtaggggccaagtaaaagggcagcttatgtgccatgctacacaattagacgttcattctctggctagctggtgagaaagggaaacctttaaagtgatttgatcagtaacatttgccttttacaaggctctctgctggagatggactggaggggttgaccatggagc

SEQ ID NO: 31910 - DNA, 1047 bp, Homo sapiens
ggtttgatctcgcggctcactgcaacctccgcctcccaggttcaagcagttctcctgcctcagcctcctgagtagctgggattacaagtgcacaccaccacacctggctaatacttttgtatttttagtagagacagggtttcactatgttggccaggctggtctcaaactcctgacctcgtgatccacctgcctcggccttccaaagtgctgggattacaggcatgagccactgtgcttggccgactaggcatttttaatacaaacataaataagtttccatttgtattcttaaaagctgatctttcaaataagagagatgatgatcacaagagaaagatggtgactacactaaaaataaagttttgtgttgggaataagtactgaatggtttggaatatatattttttcttttttgccttaaactattaagagataaatggtttggaatattaagggacacagaagcttggggaaaagaggtcactttataagctaaaggatagggtaatggaggaattgaaacttaagctgggccagaaaaccccagctgggtgaaataagagataaaaaagagtatacacaaagcaagaatgctcaaagacccgtgtttgcttaaaagtgaacacattttatctgagcctggggtcttcaggttcctctttaactgtgcaagcaaaggtaaaggtaaaaaatgtattcttcattaataggcttgaaagaaggaacaagtatatatccttgtggtgattactagtctgctagggctgcggtaacaaaataccacagactgagtggattaaataacagaaattttctcacagttcttgaggctggaagtccaagatcaaggtgtcagcagtgttggtttctcctgaggcctctctccttggcttgcaaatggctgccttcttgctgtatataccttttctctgtgagtgtcctctggtgtcagttctcttttaataaggacaccatcctattagataaaaagtcctcactcttttgacttcattaatcttaattagctctttacaggccctgtgt

SEQ ID NO: 31911 - DNA, 1104 bp, Homo sapiens
catactatatggaacatactatttcgagttaaagactttctaccttttacttttatttgtttttttttttctgtatgttttgtgtctgggcaatctccagcagtatcactatatgttattgtttcttaaatttccccaaattgtgatcttttgctttagcctgtttcctgaatttcaaatgtatatttatcactctgaccctggaaacacaatgttttgggctgtaggtgaggcctttaaacagtagttctttccagggataaaagcgtagggtatatgcagtattttgagtttatgtagcactgtgtaggtgatttctataaattagaagtagaatttcacttgttggtccattcagaaaggaattgagtgttgattatgtgccagacactgttcttggtgctagagatacaataaagaataagacagtatgggcccataataattatagcttgagtgtgtatgaattgtgtgttagttgaggtttgcacctagacactaaagaaataagaggacaatatgtaaaaagtatcagatggagtgtggaagcagattcttttaggtctgtctgagggcaagagcagtcctagaacctaacttacagaatatcaaacctgccaggcatagtggcacgcacctgtaggccagctacttgggaagctgaagatcaaagcatcccttgagcatgggagtttgagggtgcagtgagctatgatcacaccactgcactggacatgatggcttccagcacttcgggaggctaagacaggaggatcacttgaggccaggagtttgagaccagcctgggcaacagagcaagaccccatcgctatacacacatatacacacacaatattaaatcttagaacatccacagtattgtcttcagtattctcttccagtaaataacattttgagaccttatagatctgaaaaatgtccttattctattctcccttgtttggcagatcatataattatcattttgaaatcttctgttatagtatgccagtctcttgagtggaatatttaacaaagtaaggtgatcttacattaagggttaacatgaatgaagccaatttaaacattttctgtaacagactc

SEQ ID NO: 31912 - DNA, 1064 bp, Homo sapiens
tcttaatactttaaacttttaattatgatataatttcaggctcaatgaaaaactgcaagaacagcattctgtacatattctacatgttacacacattctagtgacgagtctagagaaaattcagtgaaaaattcctctaaacttttcactgagattccccagtgttaacattttaccttattttttttattgttttctgtttctgaactttaaaaaagtaagttacagcagaggtgggcagatcatttgagcccaggagttcaagaccagcctgggcaacaaagcaaaaccctgtctctacaaaaactaaaaaattagcgaggcatggtggcacatgcctgtagtcccagccacttgggaggctgaggtgggaggattgcttgagcccaggaggttgaggctgcagtgatccatgatggtgtcactgcactccagcctggatgacagagtgagactttgtgtaaaaaaaaacaaaacaaaacaacaacaactaagttatagatatgatgcccctggatattgtgtatttcctaaaaccaaggatattcttctgtgtaactttagtgtacttaccaaaatcagcaaatcacagtgataaaatactatgatctaatcagcagacctctttcagattttgccagttgttcacataatggcctttatagcaaaaaaaaaaaaaaaaaaaaaaaaaaggctgagaatctaatatgggagcacacattaattgagttgtatgtctccttagtatcctttactctgaaatagttcttcggtctgcctttattttttataaagttcacattttaaagtatttttgaatttttgtagaataccccgcagttgggtttgtctgaaactttcctttgcttggattcaggtatacatttttttggtcaggaatattacagtagtgttcttctcatggtactgaattgtcccattactagcattgtcaacttttatcactcgattaagcagtagtctgccagacttttccagtgtaaagttacgatttttccctttataattaaaaagcatcacatatgagcaactttggaaatatg

SEQ ID NO: 31913 - DNA, 1062 bp, Homo sapiens
gaattgcttgaacccaggaggcagaggttgcagtgagccaagatcatgccattgcattccagcctgggtgacagagtgagactctgtctcaaaaaaaaaaaaaaaagtcaactgtacaaagtgatgtaatttttttttatgtttaatcagattataaagactttggaacacttgcccattcctactaaaaatatgttggaggaaagcaaagtacttccaattattcaacgctggtctcagactaagactgctgtccctccgttgagtgaaggagatgggtattctagtgagaatacatcgcgtgctcatacaccactcaacacacctgatccttccaccaagctgagcacagaagctgacacagacactcccaagaaactaatgtttcgcagactgaaaattataagtgaaaatagcatggacagtgcaatctctgatgcaaccagtgagctagaaggcaaggatggcaaagaggatcttgatcaattagaaaatgtccctgtagaggaagaggaagaattgcagtcacaacagctactcccacaacagctgcctgaatgcaaagttgatagtgaaaccaacatagaagctagtaagctacctacatctgaaccagaagctgacgctgaaatagagcccaaagagagcaacggcacaaaactagaagaacctattaatgaagaaacaccatcccaagatgaagaggagggtgtgtctgatgtggagagtgaaaggagccaagaacagccagataaaacagtggatataagtgatttggccaccaaactcctggacagttggaaagacctaaaggtaaggaagcatcttttgttcatttcaacttgaattactcaggtttagagttctacaaacctaagcaaaattaactactttttttagccatgcatatttctgaaaaatggaatactgtctctcttactgttttatttataagtgtctcaaacatcctctaaaccgtggcaagagtcatattagccaaactaatatacaaatgtcttcttttctgtcacttagaaaagtacatcacaatagtgagttcag

SEQ ID NO: 31914 - DNA, 1072 bp, Homo sapiens
gaaaaataatgaatatttttaaagagcagttttcagacatttctattagtaatagcagacttgttggaatctcttcaagttatggtttttgtttgtttgattttgtttagactggtatgacttttgtgtgtattgccaacagttttgtatggtttacttccacatagctgacttctttcctatgctctttgaacagaaaagaagcccagaaatgtttctgcggatcagccaattgccggggttacctgggaggagaaaacagagtcagcatcagagcagcaggagggaaaatgaagaaggaacgatctcgtaagaaggattcagtaagtttgcatttttctttcaactttcacaataaaaaatttaaaaagcgaggtggcttttctgattgaaggttataaagtcatactactgccaccagagaaatccaagatcagatgagttgttaccagaaaagagatgcaattgctatttttatttcagattcatagagattggaattgggtactgagaactattaaagtattattgaaaacacctggactaatagtttttcagattctttaaaactcctaagtacaagtaaaacatatcttttctccctgatagctcactatgtctgctgtacgtttctaatctcttgttattggtttgtctttgtttggtactctaaactttgagtgttcttcaaatctctgaaaatcctcttttgagtgtgagaaaagttttgagaggaagtaggtaacctaagaccaacaggagtagtcacagatgctctttttatttaatgaaacagcagttgatagcctcattttgtaccctgtcttgcctgagttactcctgggatggggatgggattgttggtggggaatatcctgttactaaagggactatcaattgcaaaaaggactttgtgtttaaaaaaatattctcctcccttttttgaggatccctttgctagagcactgtttttcaaaaatgtgatccttggatcactttctttagaaccagctggctggatccatagtaaaaatgcacatttttgggctactctctagacctgtgaatctta

SEQ ID NO: 31915 - DNA, 1051 bp, Homo sapiens
cattttaattcttgagtcttatgcatctgttctgatgtccctttcactatactcagccagatgaccaccacttcatggaattaaacttttgggatcagtgtttcctagtttctatatctcatcttatcttacaacatggttacttttaacatatgttaatatagacttgcctttgatactcagtgacacaagcatcctctgtttgccaatttttagtacaagtgaatctttactgtatggaaatgttaagataaattaaaatagcagttacttttttttcttttttttagcagttacttttattagagacgaattagagatatatgcaatctggtagtccattaaatgagagttacacttaaatattttagttcttttaaagaaaaaagtctccatgtgctatttgggaaaaccttcattgcctaaagacccacttgcataattaaggcagatgatgatgatctttatatatgcgcacacacacacacacacacacacacacacacacacactaataagttactaatttcttttgttttcaaacatcatctcagtggactgtgaacggacaactgagggttgggttttttaccaccaaactggttccttcaggctcagagttaacgtttgactatcagttccagagatatgggtaagtattgtttctactaattttgctgcttctgatggggaaataggctgttcagatataaggatataaaactttaatataaattacttaaaagttatatttactcttaactcttatctataagatattgttttggttttgtgtgtttttctactgtatgacacttctgacccttaagggatgttgtacaggaactgtataattttctcctcaacttcatatggtctacttgtataattatatttcttatgtaattctgaaaaactttagacatgccaactctttttgtgtctgaagagaatagtacagtattataaattcctctgtatccgttattcagcattaacagttagcataactcataaccagtctatttcatctgtaccattttgtactctt

SEQ ID NO: 31916 - DNA, 1061 bp, Homo sapiens
ttgttctttttttttttttcctttgaagataagaaatgatgttgatattaatctatccttttgggaaccaatcagaaagcaacatgttttgttacacaaaaagggggctagtaggaacctcatagatttctcttctcctctaagttttgtaaaaacacaccctggctcataactggtttttattgttttttatttttttgagacagggtcttgccctgtcaccctcgctggagtatcctggcgcaatcatagctcactgcagtgtcgacctcccaggctcaatttatcctcctgcctcagccttctgagtagctgagactataagtgtgagccagtatgcccagctactttatttttctattttttgtagagatggggtcctcactatgttgcctaggcttctcataactggtttttaattgtttatttgaagcaaatatcccacagaattgtcatatgccccatatccattcattggattctttataatattttaaacaaataattggttacacttcctttgaacactgttgatacagaactcaatacctctcaaagcagcccattgaatttccaaaatcactagttctagtccagacgcacattttcaaagatgccttctttcattctgccctagccagccaggccttcttgagattttttttttttttttttttttttttttttttaaaggaaccacagtttggacacaagcctctcttacagggacaatagtggatgagctgtctggatgctggtcttttgtggtatctgcagtaaaacacatagcttcaaacctgatctaaattctgttacttgcaacagacactctttgatagctcagtgctcttctcatattaaggggaaaggagactggggaagggaggaaaggatatatggctccagtttataagccaggttaaaatttcctaaagctcttccgttttcttcagctattcacagagaaccctgctttggtaaaatatactaggacttaatgtttccatgtttcccataccttcctactcctataactgccacatgatgatgtgtaataccaa

SEQ ID NO: 31917 - DNA, 1047 bp, Homo sapiens
gtgggaaattttacacatgacctgatgtgaggggctgcagtcaaaacacagccaagctgggcatggtggcatgcacctgtagtcccttcaggagcctgaggtaggaggatcatttgagtccaggagttcaaggctgcagcaagctgggattgtactactgtacttgctccagcctgggcaacaaagcaagaccccgtctcttaaaaacaaaaacaaaacacaggcatacaacacagtttattccatgtcccaaaattattaaaaaatattgtataaaattaccttcaggccatgtgtataaggggtatatgaaacataaacaaatttggtgtgtagacttgggtccaagatatctggccccaagatatctcgtgtatatgcagatattccagaatctgaaaaagttggacatacttactgtcccaagtgttttcagtaagcgttactcaacctgcagtttttttcatcattctagttatgtttacacattgtcagttttgatttttcagtgttctcacctctgtagatgtaggcatgaaaaccagctgcgtactttaacttttggatataatattgtctactatttaattccaagccatattctgttatttttaaaatatttatttattgtttgtttgtttgattgattgattgtttttgagacagagtctcacttgtcgcccaggctggagtgcagtggtgtgatctcagctcactgcagcctcagcttcccgggttcaagcgattctcgtacctcagcctcccgagtagctgggattacgggtgtgtgcccatctaatttttgtattttttgtagacatggggttttaaccacgttggcatgaactactggcctcaagtgatccacccgcctcgacctcccaaagtgctgggattacaggtgtgggccaccgtgcctggccttatttctttttctggacttacttattttttatttttatattttgagacggagtctcgctctgtcaccaggctggagtgcagtggtgcgaactcggctcagtgcaacctctgactccctggttc

SEQ ID NO: 31918 - DNA, 1051 bp, Homo sapiens
gggtaggccgcgaatccccgggctcgggtggaagctcgacccgtcgcccgacctccccgcgacggcggcgcctcggaccggaagggcctagcgcgggttgcctggcccccgggccgtggaggggcccgcgctgcactcctgagtttgattttttcctcctgggaactcgatcctggccttgcagtgcttccggattcacattgtgcacctttggcacttgggttttgtaatggcgaggtttgtgtggtcccgttgttgaggtgacaccgggtttgtttttccgcttgaaaatgaaagcctcctgagggacatacattttcttgcaggttgtgagattttcacactttcggacacaattttcttggtaacaggaatctcttaccctaaacggatgactttctatttcttgtgaagacttggttaaaaaccaagaatcgtttgaggattctctaaagaagacaatgttgtggaaaaccgacacacagttttgcccaatagtaatttttcagtctaggacacctttacatttctcttgaggtctgaatctgctgctgtatctgctatctcagaaagcctggagtcacttctttccctgaaccctcacgagaccattgttttgaaaagccgttcttaaacaccgtttgctggtgttagacctaggaatatactattgatttaaaacttatcggttgataggggtttcacatgaaactgtcaaacttttatgaccaggatgattccaagagctttgctgttttgacacattttaccttaggtttgctctggctcgtttttgaatcccttgccacatcttctcacattggtccagaaatgtctggatcttaattgatagttttgattgcaacacaaacggattctgttgaggtgttggtcatttctgcacaacaagataaatcattattttgcttttctaaaaacccaactcttacttgcaatagtaagttaacatggctttttcctttcatgggttcttggccattggttaacattaccttaattagattggtctttttgttttgctactggcagg

SEQ ID NO: 31919 - DNA, 1049 bp, Homo sapiens
aggctccttgactgttggtggcagcaccatctgacctagagctggagtctttttccttggggagggggcgtcccttgcccttagtgatgttgatttctgccagtgggctgctgccgtcattcctgtcaccacaggttctgcatgggctttggctgacatcctcccctccagcctggccaatttcaccaggcccctccatgcttcttggaaattctcctttgctgcttgttttagctttaaggaaagccccgatgtctcaacctgaccatcagggttcctggtgactgtggtctctccttgtccacccacttccaatcataaaactggcttccccagctctggtgcaggcccttcaaattcatgggcagaggttgtaggcagacatgcattgcctttccctgcagtaagattttgaaccccatctgctttgaggctttggggttactgggcaaatatacccatccctgcctgtcagactgtacctaggaattttggagagcaaagaaaatccttgtttctttatggaaaaaggaattgatgtgagctgtgcttgggttgaagctgcttttatgtggagaatgcaggcttccgcaacacccaacatagcccaccctgcatcctgtttcccctcagcagccctcccttcagctccaggctacatggagccctctgcttgtttttaatttacaaacttacgtgatattcaccaggtaccaccttacacgttagctcacttgattctcatgaccaccctgtgaggtgggtactcttatccccattttacggatgaagaaactgaggcacaaggtggttaatatttggagttgccctctggctccagcatctgttctggcaccatgtgctttcctcttggccatgtccctcctgtgccttcttgaactggcccttaactctcatgtccacatgctcagccccagggctggggctctaagggagaggcccctggcagctgttcttctcttccaggattgtggctgcacggctcaacggttcccttgatttcttctccttggagacccacactgccc

SEQ ID NO: 31920 - DNA, 1011 bp, Homo sapiens
gggccggagcctggcccataccaacaccgggcttctgcaggacatcgagtgcctggccagcgacggcatgctgctggtgagctgctgcctggcaggccacgtctgcgtgtgggacgcgcagaccggggattgcctaacgcgcattccgcgcccagggtaggtgcggctgccctttcctcctttgtgcccccacaacccccctcaccccaccccccgccgccacgtatctcccctcctttcttcctccgaggtatcccccaacccctccaggccccctctccccccacccccgcaccccctcccaccaccccgtacccccctctccccaccccgcaccaccctctccccccacccccttttcccttgccccttctcactcccacgccccctctcacccccgtcccccgccccctctcacccccctcccccgtgccccctctcactccgccctcctggcccccagcaggcagcgccgggacagtggcgtgggcagcgggcttgaggctcaggagagctgggaacgactttcagatggtgggaaggctggtccagaggagcctggggacagccctcccctgagacaccgcccccggggccctccgccgccttccctcttcggggaccagcctgacctcacctgcttaattgacaccaacttttcagcgcagcctcggtcctcacagcccactcagcccgagccccggcaccgggcggtctgtggccgctctcgggactccccaggctatgacttcagctgcctggtgcagcgggtgtaccaggaggaggggctggcggccgtctgcacaccagccctgcgcccaccctcgcctgggccggtgctgtcccaggcccctgaggacgagggtggctcccccgagaaaggctccccttccctcgcctgggcccccagtgccgagggttccatctggagcttggagctgcagggcaacctcatcgtggtggggcggagcagcggccggctggaggtgggcagaggggctaaaggtgggc

SEQ ID NO: 31921 - DNA, 1080 bp, Homo sapiens
agaacatggccacggagctgggcatcatcctcatcggctacttcaccctagtgcccgccatccaggtaaggccccaaggcctgccacctggatgagcatggaagcaactgctgtgctccccagctgtgcagccatgggcagggtgctcccctcttcagcacaggcatccttgcttctgaggtgggacctctttgcctggcaagcagatcactacagcacccagatggcccctggcatgcctggctcagaagtgctcagcaaaccctggctgggttcccagattgagcacctagccaggcagactctgcccttgaccctgtcttcctacccctccctgcctgcttccctttcagccaagtggcaggaggaggctgcaagggcatggcaggagctggggactggctgtgcagtttgtcacacctgtttcccatttttgagggagaagcaccgtggggttcctagacccttcctccggtctcctcccttggccctggcctgtgccgcagtcgccagacgcatggccttgcctggcctgaccagtgggagggccaccacccattgcccagagtgaccctgctcttggcaaagtgccctcactcagctgtgggctgtgagcagaggtggaggtggccctgcactgagctggaaccccagactgatgccagccattccagaaggagttgcaggaaggggaggatgccatcttttctcgcccgtctttcccccagggctggcaggccagctgagggatgggggtgagcagagaacagatgggctgtgggctgcttctcctggaaaaacagtagtatctgcaggatagggtacagtcttgggacgttagagctgagacaaccactgtgccactatctgcactccatggtcttaccccagatcggagtagcactgtggtgatgtgctagaggtctcaacaccgacatctcagaaaattttgtctgctgacagagcttggggagcagagagctcaccctttttcagttttagagaattaatccctctctctctctcttcattgttccggggcagttgctggctgggaacctttctgagagcccctgaatc

SEQ ID NO: 31922 - DNA, 1285 bp, Homo sapiens
ttccagcctgcacttaaagtcagccccaaacctggaaatgtgtgctggatgtgcacagaaagaggtctaacagaagccatctttctagtttgaggagcaggaaaggggatcctcatgggtcaggaatggggatggaggaagaaatctcgtgtgttgtttgctttgtcttttctccttttctcttgctctggccctccacgtaattgtgtagtggtggagacagcagtgacattggcaaatggataggagaggaagtcttctatttaaagggactgtggtcccaggagcatggagggaatccttgattttgttctttcctttctctcattgcttttccttggaggtagtcacagttgtgggaggtactcagcaggttagggaaattaaacccctgacttttagccagaagaccaggaaaggggcccttgggatctggaaagtgttaggaagattgtgtagaggaaggagctcaacaaattgaactcataaagttgcatatgaactcttgggctgttcctcagaactaacatacgtgcatctgaccctaaacagcataccaaaggctttgaggaccaaactgtggagtacattactgctcaagtagttctgcactggcccctggacggtatgcttgggaaaaatcaaaataatacttaaaaggctttgaaaactgatatcatattggtaccacagcccacagaaggtgggtaggaacttgtggactggacctaattaggttgattgctgcaaagacaaattcaaaattttacgtgggacttaaacaagagctagagtcacatagcataatattcaaaatgtccagtaattcagaattacttcagctatgaaaaatcaggaaaatcataaggggaaaagacagccaacagatggcaaccacaacatgacacagatgttgaaattatcaaaaaattaaaagccaaagtataattaaagtattaattaaaaccttgctataacaagtaagggtgaatgctcttgaaatgaacagaaaatcagaaatttatttactgcaaaatatgacaacctaaatgaaaaattaattgggtgggctcaatagcagaatggagaagacagaagagtcagtgaacatgaaggtagaataatagaaattatccagtctgaccaacagagatcgaaataaaatgaaaaaaaaaaatgaacagagcttcagggacccatgggacaataacagaaagtttatcttttatgtttttgaagtctcaaaaagagaggagaaagagtggtgcagaaaaaaatttgaaga

SEQ ID NO: 31923 - DNA, 1046 bp, Homo sapiens
tgcctgaggtgctttgtatcacagttagaagttgagaagatatgtactgagcactgtcctaataatatctgatcctggttgggttggttggtttgttcatcacttattcaacaagtggtttgttttcagagacagggtctcactgtgttgcccaggctggcatcaaactcctgggctcaagggattgtcccacctcagtctcctgagtagccgggattataggtgcatttaataaaaatttaacatgccaagtgctattaaagaccctgaagaacagacagggagtttatttatagtcttgacagaggacagatagtaaaccagggaataagtcatttgtacaattacagagttttaaatgcactgaaaaagaagaaataggctctgtaaggaacaataaagagaactactggaaaatatatggtcaagggaggtctttttgtagaagtgatatttcagctgagacttgaagaatgaaaaggaaccagcctataaagagaagagggaatagaggatggaacagtatgtgccaggcccctgagatgggaatgaggttggcacacataaggcattggaagaaaccagaacagggagaggtgacacgaagtgaagttgcagaggaccggggtgggttgtgcagagccctgagagctagggggaggcatttgggctttgttctaagtgcagaagggtatccagctcacagcattagtagaatctgtgtccactctgacctctgagataaagtgaattgtaaagggataggtaggaaggggtctatgagggccaggcatggtgggtggctcagcctgtaatcccaactctttgggaggctgaggcaggaggattgctggagtctaagagtttaagaccagcctgggcaacatggtaaaaccccatctctattaaaaatacaaacatttcgttgggtgtggtggtgcacgcctatagtcctagctacttgggaggctgaagtgggagaattgattgagcctgggaggtggaggctgcagtgagccatgatcgtgccactgcactccagcctg

SEQ ID NO: 31924 - DNA, 1086 bp, Homo sapiens
ggtcgggcatggtggctcatgcctgtaatcccagcactttgggaggctgaggcaggcagatcacttgagtccaggattttatttttatttatttatttattttgagacagagtcttgccctgttgcccaggctggagtgcagtggcgcaatcttggctcactgcaacctccacctcccgggttcaagcgattcttctacttcagcctcccgagtagctgggactacaggtgcctgccaccacgcccagctaagtttttgtatttttagtagagacggggtttcaccatgttagccaggatggtcttgatctgctgacctcgtgattcgcctgcctcggcctcccaaagtgctgggattacaggtgtgagccaccgtgcccagccagaagatctgttttataaaaagggttataaagataaaaacaatcctaaaggctgggcatggtagctcatacctgtaacctcagcgctttgggatgctgaggtgggaggattgcttgaggccaggagtttggaggccagcctgggcaaaatagcaagaccctgtcttgaacaacaacaacaaaaagctgggcatggtggtgtggtcccagccactcggaaggctatggtgggaggactgtttgagctcaggagttcaagcctgcagtgagctatgatcaagccactgcactcgaagctgaatggcagagcgaaactgtctcaaaaaaaacccaaaaccggccgggcgtggtggcttacgcctgtaatcccagcacttcggggggccgaggcaggcaaatcacgaggtcaggagatcaagaccattctggctaacatgatgaaacctcgtctctactaaaaatacaaaaaattagccaggagtgcttgcaggcgcctgtagtcccagctactcgggatgctgaggtggagcttgcagtgagccgagatcacaccactgcactccagcctgggcgacagagctagactccatctcaaaaaaacaaacaaacaaacaaacaaaaaccctgaaaccaaaaaccaaaacaatcctaaagactgctgtagcctaatgagaggttgatatagtttgggtctgtgtccctg

SEQ ID NO: 31925 - DNA, 1028 bp, Homo sapiens
aggcatggtgatgcgcacccataatccagctacttgggaggctgaagcaggagaattgcctgaacctaggaggcagaggttgcagtaagccaagattgcgccactgcactccagcctgggcaacagagtgagactctgcttcaaaaaaaaaaaaaaaaaacataaaaatactttaagggtcttcctctgaaagactttttccttctgtttcctttttttttcctctttcacattttctgtattgagccaatatgactactgtaatggaggggaaccctttatttgtagttagctggtgataggctttattttacaagttggccccattaccagatggcacatctgactatcatctcatagaggcctcagctgaagggcacagagaaggtagggtggggttcccagtggagcaggtcctggggtggctgctcctctttcattcttctctgtctctgtagctgaggatcctgtggaggagaccatcgcagcccgcagtccaccgggatcagagcttcacttaccagtataagatacaggacaaaagcgtgtccttttttgccaaaggaatgtctcctgctgttctgtgacctgatttcggagcagctgaagctacataggactgtttttggacgtggaagatagagcaacatagcaagaatgggtctttctcctctgtagtaatatttcaggctggaccggcgactccactgtgaccagagggttgagtgctgcagtgatggcatgccttggctgccctgggccctgttcagaaaacacaagggaccacaatcctgcctttgctgagagagaggctggatgctagacccaagtgaaaggggtcctttggagcctttgtttaaatatgccttagccccagctgcccatttttggttgacaagcctttcagagccagagtgggtatagatgtgccagccaggagatggcaccggatggcaggtgtgcaaggtgacaactaggataatcatggctggaataaagtaagtttccacactggagcttcctgtggg

SEQ ID NO: 31926 - DNA, 1071 bp, Homo sapiens
ggcgtaccaccatgcctggctaatttaaaaaaatttttttttgtagaggtatagtcccactctgttgcctaggctgttcttgaactcctgggctcaaatgatcctcccccgctggccccccaaagtgctgggattacaggtgtgagctactgtgcccagcctgtttaactttttccagctgtgtataacctcctgggaaggtttccgcctgcccaatccaagctgatcttccagattccttaagctcttgggttgagaggctgtatggtgtctcttttttttttttttttttttttttgagacagagtctcattttgttgcccaggttggagtgcagtgggatgatctcagtcgtggctcactgcaacttccgtctcccaggttcaagcaattctcctgcctcagcctcctgagtggctggtattacaggtgtgcgccaccacacctggctaatttttgtatttttagtagagacggggtttcaccattgttggccaggctggtctcgaactcctcacctcaagtgatccacccgcctcagcctcacaaagtgctgggattacaggtttgagccactgcacccagctacgtatggtgtctcttaagggcgctaggagctgtttatttttgtgtcttccagtttctaacacagtgctttatacctagtaggcctcaggaaatatttgaattactcctgtacatgtgcatgccttttctttctaaccagatcatgaagtctttgttgccaagaattgtgatacagttctttgtcccccttagccctctcctgtcgtgctacttggtccttgataaacatctgtagagagagtgaagtctggtaacttttgtcctgtctctccagggaggctaatgctgggaacttgaaaccattgtttgagtttgtacgggaggccctgaagccagtagacagtggagaggctcggtggacgtacccggtgctgttggtggacgacctcagtgtgctcctgagcctgggcatgggggcggtggctgtgctagacttcattcactactgcagagccaccgtgtgctgggaactaaaggtactca

SEQ ID NO: 31927 - DNA, 1030 bp, Homo sapiens
tagaaaaagaatttttccatggcctggaaatgccccagccatatccacaagtttattaattaccctttctatttcctcatgactagagatgatggtgtttccaaaagttgtgctactagataataaagatctatttcttcaaccttcagtactattttcctccctgtactttattacctaatgatggttttcttaaagccctttcagcttgcacccactatgtggtcccaaagccaaagagaaacattttaggtttctgttacaaaagctccccatttccagataccaaattattttacaatagcaaaattgagtagtttaaaacataacaattttattaaatctcataattttgttaaattttaacaccaaacagctgggcaattctgctacatgtatcaattgagtcatttagtagtattaacttcataggtaggtttatgtagaaggtctgagacggcttcattagaatcctagtccttgacaggggtaactgaggtttttttccactccatgtagtctcagaatttccccttgtggtctttccagcagggtgatcatactttgtacatggcaacttgagactcccagagagaacattccaagaaacaggacatgaaagtttgcaggattgtaaggcctgggcttagaaaaggctaccactaatttttattgggcaaggcagagagcctgtcttgatctgcctcttaatgaaataaaggccagtgaacttgtggctatctttaatctaccacaagtcccttctaagaattacccaggaaagtatccactcaagtatcaattattccaaagatgcattggaaaataactaatgggcctttgggtttggaattttaatttttagttccagctctgccatttactcgtctcttttttctttttcctttttttttctttctttctttcttttttttttttttttaaagacagggtctcaccaggcacggtggctcacacctgtaatcccatcactttgggaggctgagtcagacagatcacatgagatcag

SEQ ID NO: 31928 - DNA, 1029 bp, Homo sapiens
actgcaacctccgttttctgagttcaagcaattctcctgcctcagcctcccaagtagctgggattacagccacgcgccaccacatccagctaatttttgtatttttagtagagacgtggtttcactatgttggccaggctggtctggaactcctgacctcaggtgatccacccaccttggcttcccaaagtgttgggattacaggtatgagccaccacgcccagcctctgggcctttgtgttcctaatactgttactgcacatagggatcagtcagtcactatttgagtgaatatatataagccaagattgaaggtcttgattatatgtggtattctaaaattgtatatagttaaggggagggtgagggtaataatgaaattgattatagttcctgcattattctaaagacgatatttgtacttcacatttttaatttcatttaattcctaaaagagtctcagctgggtgtggtgtgtcatacttgtagtcccagctacttggaaggttgtaggatcacttgggaggctggaggatcacttgatactaggactttgaaaccaccctaggcaacatagggggaccctgcctctaagcaaacaatatagcctcatgaagtcagtgatagtcagttgcggttttttcagtttctaaagcatgatcactgatgttctctcatggttcttcctgaaattattagcagatggctgtattaaaagactttgtcaacttttccagcagcatttcaacttgcttctttgttgatggtgtgacatttaaatgctcttaattctttaaatcaatcagtaattattaagtacacacacacacacacacacacacacacacacacacacacacacacacatatatatattttgttgtggttgttgttgtttttgagatggagtctcactcttgctgcctaggctagagtgcaatggtgtgatcttgggtcactgcaatctctgcctcccgggtgttcaagggattctcctgcctcagtctcctgagtacctgggattatagg

SEQ ID NO: 31929 - DNA, 1032 bp, Homo sapiens
tattgcgtttctcccacattatacttattcagtctctgagccaactcagtcaaggtgacctaattcatatttatttacaagtaatttgtgcttaatctgtcatgggattagaaagaaattttaaaagtaacctgaagtttgggggttttgtttgtttttaataaacaaggtcttactctgtcacccagtgtggacggcagtggcacaatgataccctgctgtaccctcaaactcttaggcccaagccatcctcctgccttctcagccaggtagcctgtaatttttatttcagttttatttaacttcaattttactcattttaagaagattgaacctttatcttcatctaatgtctgctcatactcactgtggggttgcatatttgagggttggtttttttttttttttggtgggggggacagggtctcgctctgtcacccaggctaaagtgcagtggcatgaacacagctcagtgcaggcttgacctaggatcaagagaccttctgggatcaagcagtcttctttcacagcctcctttgtagctgggaccataagcatgcgccaccacgtccagctaattttttgtagagacagtgtctcactttgttatgcaggctgttctcaaactcctagtctctagtgaaccaccacacccagcctgagatattttcattgatggagttgatagaaattattgactaattgctattggaaggtgagagagtgaagaaagtcaagattgggttgactccccccaccttgccgtttcatggaataccaagaggatgatacagttaataaagatactgagaaatacagaaattaatctttcatcctcatttcctatttgcataaaaccaaccttttaaaatttttagtttttaaaaaagttattcttggctgggcacggtggctcatgctgataatcccagcacttttgaaggccgaggcgggcggatcacttgagctcaggagttcgagaccagcctggccaacctggtgaaaccctgtctctactaaaaatacaaaaat

SEQ ID NO: 31930 - DNA, 1049 bp, Homo sapiens
gcttgctaacgtattgaatatctcatataatttatggaatattacatcaaaaatgaaaagcagaatgatcatgtggatattcagattatggtttcaacagaatgcatcgcttttgcaccattgtaaagctgaaacaccatgagtcaaatcactgtaagtcaggtaccatctgtaatataaatcaagactgaggaacttttgaaagaattcacgagtgcattcttttcgctgtctgaccgatcatttcattgtgcatcatgcagcctctaaagtgtcagactctaaatctatgtgagaatgagaatgaaaaggcaaataacatcttagtgttattatgaaaatagttttgaccttaagtagaggctcatgcagaagaaacacagttagttttgcttgggtccattagggaagtcttcacaaagaatgtgacattttatacaggaacaaataaggaaaaaatgaaggtaggtggcatattctggaatgaatgccaagaggtctgtggggagcaggtactctggtcaagtgcatgcaactctggagatggctgggggactgattttgaagggttgttaccttgcagacattgggaagtcatcagaaaatagaagtagcatgattcagtctgtttttgaaaataactgctggcagtttacaaatgaagtgcagaaaatggagggtggttcctgccaaatagtcgtaattcatgattattacacacttatattaaaggcagctatgtggcaaacatttaaatctcttctccaatatgcctctcccagttatttcagcctgttaggaaataattactagacctttcttcatactgtttttgctaaccatgttattactagaatgtctttggcacgggacccactagtttaagttatatgccttcttgtttaagtcgtttaatcctcttttaacgctgcagacatgggtcagattacacatttttggggaaggatttttaacctgttggtttatcaacaataacaaaatgacatgagatacatggagaggctgcagcctcctaagtgtttatgatt

SEQ ID NO: 31931 - DNA, 1071 bp, Homo sapiens
gagaatggcgtgaacccgggaagcggagcttgcagtgagccgagattgcgccactgcagtccgcagtccggcctgggcgacagagcgagactccgtctcaaaaaaaaaaaaaaaaaagaaagtaaagctggatgaacactcaaaacacctcttacatttatattttaagtgatttcccataggaattatttaggaaatgagtgttttcttatgagaagggtcttcttcagtccatctttttaactatggtcactcaccaagaactattaatttctgtacatttatatattttttgtttttcattgactggaccattctaggcatacaaaaaatacttctgagtacccatatttagtccacattgtatagggatttttgattggccatttgagtttcttttcaggagaatcctttggaggaagtaactttttttttttttttttgcaaaagcaaggaaactgaggcatggagaggttacataagtgtgtatctgaaccagaaatttaacctaaatctctctaatcccaaagctctacttctcttcattgtagcaggctgccagaagtaaaatttgtagatgtgtctgtgtggttttcattcattgaacaagcatctttaaaggcttaatagctccaaaatactattccgtcttagatactatgggaaatataatgctgaagagcccaggccctcttgagaacttaacacctgtctcctgaaataggcaaatgcatcaggcagagcagctgtggttgacttcctctatatgccactgaatgccaacaaaacccacagaagcctgggtgctgtggcttatgctcgtaatcccaacattttggcaggcaggagaattgctttaggccaggatttcgagaccagcctggtcaacatagcaagaccccatctctacaaaaagtaaaaataaaaaaattagctgagcatggtggtgcaaacctgtagtcctagctactcaggaagacaaggtgagaggatcacctgagcccaagctacagagagctgtgatccacactactgcattccagcctaggtgactaagcgagaccatgtctc

SEQ ID NO: 31932 - DNA, 1029 bp, Homo sapiens
atatgttgaatttttgttagaagtatagtgtagaagtgtgggtatttattgttttttgtaggaaatccaccaagagtggtttaagtgccaatattaaactttttttttttttttgagacggaatcttgcactgttcccccggctggagtgcagtggcatgatcttggttcgctgcaacttccacctctgggttataagcaattctactgcctcagcctcctgagtagctgagattataggcacgtgccaccacgcccggctaatttttgtatttttagtagagacgggtttcaccacgttggtcaggctggtcttgaactcctgaccttgtgatccgcctgcctcggcctcccaaagtgctgggattataggtgtgagccacggcgcctggcccaaacaaatttttaaaaacatttaccctcttgactttaaagaggctaactcagccatttatcatttatttgactcaggttcctgctgctcaacagatgctaaattttcctgagaaaaacaaggaaaaaccagttgatttgcagaactttggtctccgtactgacatttactccaagaaaacattagcaaaggtaatttttctaatcacacatgggctgcaatccagcacatcttagtccttctaagatacatctaatgagctttctactcaaatctgatggtatttttaaaaacaattatgatttatcttaccttttatattcctatatgacttagtagataggtattttaaaaataacactattagagaaattcgaggggaaaatggagaatttgaagagagaattagaatctgtaaaaagaatcatgaatattttagaactgaaaagtatacttgaaattatttgataggtttaataacgactgcatacagcagaagacaggttagtgaactcagagacaaattagtagatatattgaaactaaagtaccaagagaaaaaattggattgaggtagggaggggccaggacaaagagaggagagtggaacagatatgtgagatagagttcaggctg

SEQ ID NO: 31933 - DNA, 1028 bp, Homo sapiens
gatcgcaccattgcactccagccttagagacagagcgagactctgtcacgaaaaatgcggatttttttaatgtgtgtatttggtctatgtgtgagttcttttattaccatggacctaaatgcgtattcgtgctctcatttctgtgattgaaatgattaggctttgtaataggtttgggggtgctgtgttatcaacattacttgtggcttgtagaaattgttcgtcacataacaaaatctgtcaagtagtttgtgatgtttgacagcctgctgagcacatttactggttttattgtttctgttttttaatggcatgatgatgatagtaaaagcacatgaagttgattctttagattttaactttccgagctttattctttagggtccatgcctttttagagcagtggggactcgttaattaccaagttgacccggaaagtagacccatggcaatgggacctcctcctactcctcattttaatgtattagctgataccccctctgggcttgtgcctctgcatcttcgatcacctcaggtaaattaatgttgacttttcatcagacctggatagtaacaaatggccatttatagcatatctatttagaaacaattattattatactataatgctattattagtgctatttctttgatccttgcttgtgtgtgtattttggtgtactgtaaatattacagtccaaaagaatatatagtgtttaagttaatgctgtcccaccaatcccaagaccgaatgccttactctgtcaaattattaatttacttttatatgcataaaagtaaattatccttctgtcatcaaaaagacactcataagtaagcagatgatgcaaaatcttctttcccttccttcaatctgtgttctagaaatgtgaagcaaagaaatctttataacttgtcctaagatttgtaaagtgtatatccatatatacattatcaaaacagattatgtcaaacaaattatatatagcattaagttggattcacaggaacctaaggtataaattttg

SEQ ID NO: 31934 - DNA, 1035 bp, Homo sapiens
tctaattaaagtactttttcaaatgtcactgaaagaattgtttttgtaacagtatgcaaaatgatactgtattgttagaacaaaaatctgtggagtgttaatactttgtaagccaaattaaagtttctaagcagtataaaatgagaatgacatcatcctttcctagtatttccaagtcttagagtacattttcacaagtaaggtataattcttgagtgattttgcaggagaatagaaaagagtataatcacttgttctccttaaacattaaataggggtagttttaaacatctttgttctggagagttgtagatgagacattaggcttgatttcttttcttcacttgtaaaggagaacctattgttttcagtatttactaaaattttgactttacggaactttaaacctgaaagggattttcaagatcttttttagaaaatgagatgtcagttctatcttctaattaaggaattctgtatttgaataaattgcagtcattattattttttgagacggagcctcggtctgttacccaggctggagtacagtggcacgatcttggttactgcaacctcctcctcccgggttcaagcaattctcctgcctcagccccctgagtagctgggactacaggcacgtgccaccacgcccagctaatttttgtattattagtagacatggggttttaccgggttggccaggctgatctcaaactcctgacctcagttgatccacccacctcagcctcccaaagtgctgggattacaggcatgagctttcgggcctggcaattacagttattattgatggcagatacgagtgggtattttggagagtgatccatcaactgtaaatttttgttctcagagctgttgtattttgttttttgttttgagacaaagtctcgctcttgtcacccagcctggagtgcaatagtgtgatcttggctcactgcaacctccacttcccaggttcaagcaattctcttacctcagcctcccaagtagctgggattacaggcgcctgccaccact

SEQ ID NO: 31935 - DNA, 1079 bp, Homo sapiens
gtggaggttgcagtgagctgagatcgcgccactgcactccagcctgggtgtcagagtgagaccctgtctcaaaaaaaaaaaaaaaaaaaaaaaaaaaaaaaaaagaaaaaaaattcaacttcagatttactgtatcattcaaaggtgtatatcctttagatttttttcaaactgctattacatactcataaggtgtttaagcttctcagtttgatgctatggagcttctgaatggaaatacagttgtaaggaataggatggcaacagagaaaattaatgtttaattcatggattttttcattttagcatgagacagaatctcattctatcgcctaggctgaagtgcagtgttgcgatcatagcacactgtcaccttgaccttcggagcacaagctatcctcccggctcagtattctgagtaattcgggccacagacgcacacccctacatccagctaacttttttttgtttgtttttgtagagacaaggtcttactatgtttcccaggctggtcttgaacttctgggctcaagcattccccccgcctcggcctcccaaagtgctgggattacaggtgtgagccaccgtgaccagcctaattgatgttttaattttagattatttacttatgcctctgatgcttttacctaatctagtactgataatttaggtgtttttttctttatgatagtctattttattaaattggtagttgctgtatgcaggcttacttttgtttgttgatcttaatgtcttgcaactttcctgaacttgttcattaggtctggaagctttttttatgtataaaattgtatcatctgcaagccgggatagtttttacttataaaggttgactttttttttttttccttctttgagacggagtcttactctgtcacctagggtggagtgcagtgacatgatcatgattcagtgcaacctttgcctaccgggttcaagcagttctcatgtctcagcctcctgagtagctgggagtacaggcatgctccaccatacccagctaaatttttgtatttttagtagagatgggctttccctgtgttggagaggttggtctt

SEQ ID NO: 31936 - DNA, 1047 bp, Homo sapiens
ggggcaggtgatcggcctctgcgaatgtgctctgtcatcaacacttagagtgttgttgataaacccaaagacatccttcgtgcctaaagcaatgactgattttggctctgtgctgttgaatgtttttatcagtgattttcatgaacataaggatgaaatgattaagcaaaacaaatttgagggactttgctatcaaaatctgggtctagtataaattattgatgctttcttgttctctttaatatggaataaaaatagagatgattaaattacaactcacatatcattagtagtatcacattattaatgttttatgcatttgaggctttgaaaataaatcagcttgtttccttctcaatactgtaaaaccttgagtgattttgttatttatgtagatattgatgctttgatatggttttaggttcatgtgaaatggattttggacactgatattttcaatgaatggatgaatgaggaggattatgaggtggatgaaaataggaagcctgtgagttttcgtcagcggatttcaaccaagaatgaagaggtattttctttggcacagtttctcatcattaagtctgtcttcttggcctaaatgttattaaatcttcatcagtaagctgtcatatacaaaccacttaggaactttcacatctgcctgatggctgatgtgccatcaggtgaaaattccaaagtggctgtaatagccatctcagaaacaataacctcccaaaaagtggtatgaaaatcttaaaaggttattaagatttaaagtggcccatgcagaagggtagtggtatagctgattttgcccactagatctgaagtgtaatatcacagcagaatttaatgtagctgttggttttcctatgcaaaactcattttgtttagtatgtatatatattttttgagacagagtcttgctctgtagcccaggctggagtacagtggcactatctcggctcactgcaacctctgcctcttgggttgaagcgattctcctgcctcaagcctcccaagtagctgggattataggcgcttgcc

SEQ ID NO: 31937 - DNA, 1035 bp, Homo sapiens
tgcatcaaaagaaatttttttcttgagttttttttttttttttctttttagagatgaggtgtcactttgttgcccaggctggaatgcaatggcactatcctagcatccttgctcactgtagctttggacttctgggctcaagagatcttccagtttttttgttgttgtggttgagagagtctcgcgctgtcgcccaggctagagtgtaggggtgcaatcccggttcattgcatcctctgcctccgaggttcaagtgattctcgtgcctcagcctccgaaattgctgggactacaggtgtgtgctaattgtatttttcgtagaggtggggttttgccatgttggtgagcctggtctcgaactcctgacctcgagtgatctccccacctcagcctcccaaagtgctgggattacaggcatgagccactgtgcccggccacaatggtttctcactatgttcccaggctggtcttgaattcctggcttcaagtcatcctccagcctcgccctcccaaagtattaggattgattataggtgtgagccaccatacctggcctctttttgagttcttaaagtaccagtgttttttttctctcccctcatctttagcttttagcctagagtagcatttaataaagtcattgctatggagtcgttagtcttattgtaaagtgtgcttacatagacctaaggaaactagtgtattatgtatcacagaaccctatatcacagagattataaagtcaaatagagttggtaacataattgttggtaagaagaaatgaagtattactttcaagtaatcctgtcttccctaaccccccattttatgtattctgttacatatatgatttaaaaaaaaaaattgaaggccgggcgtggtggctcacgcctgtaatcccagcactttgagaggccaaggcgggcggatcacgaggtcaagagattgagaccatcctggccaacatggtgaaactctgtctctactaaaaatataaaattagctgggcatggtggcatgccactgtagtcccag

SEQ ID NO: 31938 - DNA, 1073 bp, Homo sapiens
aaaaaatatcaaaattagccaggcgtttgggagggcccctgtcgtcccagctatttgggaggctgaggtgggaggattgcttgagccaggtggcgaaggttgtagtgagctgagattgcacctctgcactatggcctggatgaaagtgacaccctgtttctcctcttttttttttgggtcagagtttcgctcttgttgccccggctggagtgcaatggtgcgatctcagctcaccgccaccaccgcctccctggttcaagtgattctcctgcctcagcctcctgagtagctgggattacaggcatgcaccatcacgcctggctaattttgtgtttgtgtttatcttggccaggctggtctcaaactcctgacctcaggtcatccacccacctcagcctcccaaaacgtaggattacaggcctgagccaccgcgcccggccaacaccctgtttctaaataaataaataaattaattaattaaagggacagatagtaaatattctagatagtaaatattttaggcctgtaggctctgtgggctctgttacagccactcagtgtagtatgaaagcagctatatacaatacgtaaatgagtgtatgtatatgcagtacataataagtatggctgtgtactggtaaaactttaattttgatttttttgagatggtaccctgttgtgttaccaggttggagtggtgtcctgaatgaacacagctcactgcagccttgacctctagggcttaagcaatcctcttgtcttagcctaggcatatactaccacgtgtggctagtttttgtttttttttttttgcgaggctgaagtgggaagattgcttgagcccaggagttcaaaaccagcctgggttagatagtgagaccacatctctacagaatattaaaatattagcgtcagcatgttggcaaactcctgtggttggagctacttaggaggttgaggtgtgaggatcacttgagcccaggagttgaaggctgcagtgagtagtgatcattccactgcactccagcctgggtgacacagtgagacccttgttgtttttcgatagctgtttc

SEQ ID NO: 31939 - DNA, 1027 bp, Homo sapiens
acttgaacccgggaggcagaggttgcagtgagccgagattgcaccgctgcactccagcctgggtgacaagaccgaagctccgtctcaaagaaaagaaaaaaaaaattaaccgtcttaaccatttttaaatgcacacacatatttgtttttgtaagctcctttatagcacagagcgtgtctcagacatctataaatttcccataacgtaagtacttagtaggtactaggaagtaagccaacattttctcctgcaaaaattgtactagtttttgaatgcctgtctttatcttgcagtatgttcatgcggatgctcctaccaataaaacactggctgggctggtggtgcagcttcttcagttccaggaagatgcctttgggaagcatgtcaccaacccggccttcaccaaactccctgtaagtacatcagcttactgttatttgggcatcctcagttgctgtatacttttaggtgtagcatccagcttttttcctttgctgctgctagcgtgtagaatttaaaaaaaaaaagcaaaaaacaaattttagttatagaatattactattttttaactgtaggaagctgctttttgaagaggcatttaacatttgcattaaatattgcagcagtcattgtgaagacctaacaatattttactatgttgcagttccctatcctctcgccgtaccgagtcttctccatgctttctcctgatgcagctcttatgccataaatagaatttatggaattttttatattttgtaggtgagataccttctgaagttgtgtgagaatataattttggtgtccttgcaattgtgtgttttatttttgtttttacagacaggatcttgttctgttgcccaggctggagtgcagtggtttgatcacagcgcactgcagccttgatctcccggctctagccatcttcccacctcaggttcccaagaggctgggactactagcatgtgctaccacgcgcatatgggtgacttttaaatttctgtagtgatgggatcttgctgtgtt

SEQ ID NO: 31940 - DNA, 1042 bp, Homo sapiens
atgatccacccgcgtcagccctcccaaagtgctgggattacaggtgtgagccactgtgcctggctcattcttttttttactggtaatttccttgatgggtaagctcagtggtttgtcctagaatctggattcttctaattacatcctcatggttttaattaacatattctgttgtccctcaattttctttaaatttatttggttttggttttttccccacatgctagcatgacatgtaagtaggtaatgaggtttattctgtgagaaattacattcatgtctcattcttcggttgtctctttttttgtgatgttggcaattcctggacctgtgggttcagtaggcatatgccgtggtaagactaattctagcattacttcttcatttaccagctggaatacatccataatgtgaaactgactgcccctcaactattctttaattgcatactagacaaaaggtcaagagatagaggcttcaaatatggaacactgtctagaaatctgtggccctggccgatgcagtggctcacacttgtaatccaagcactttgggaggccaaggcaagtgggttgcttcagcccagaaattcgagaccagcctgggccacttggcgaaaccccttctctacaaaaaaatgcaaaaattagctgggcatggtggtgtgcgcctgtagtctcagccacttgaggggcttgagcctgggaggttgaggctacagtgagctaaggtcatgcctctgcacttcatcctgggtggcagagtgagaccctgtctcaaaagaaaacaagaaagaaatctgtggctctacatcttggtgagggccctgggcttggagagtgactgttaacttcttgcaggtgctgttgtggttacagctaagatgagcttgtcaccattgcttgaagacccatgttgggttggtttaagcagctaccagatctttggctggtaaaagtacccttccctatgccctctcttatgggggataaggatagggagatgtttggatgaggtcttcatgtctccctcttcttgaatt

SEQ ID NO: 31941 - DNA, 1039 bp, Homo sapiens
tgcaagtgcacagaaacaacctgcggggaaagtgagttttatttagacccacctctgcaaggtgaagatggtaaaatacttcttccagcctgagccacatgccctctcttgcactttttccctttccctaactagtttctacttcttctcccctatattcccttctctgtgcttgatgactcggccatcagaaaattttttgtattaaccttgaaagttaatagagttgggagcccattagccctttggagaatacatatgtgtataatttttggctggataaaatggatccaaagactttcattcatttccttcacactgaccttgatgtgaaacctacctggtatggatgcaaatacagtgcacccacattcgttatcaagaagacatggcaggggtaatttccaccacctggaaccctggagcccctgtgctttaccttgaagtagaagatccctctcataacgctgctgggtatggagataacttcatttgtcctggttccccgggtcacctcttaactgaaagttaggatgctcattcccaatggaaacccacttagtataggtatgcagcatcaactggagggcagaggtaagctgaaaccacaggttctttccccttgcctctgtaaacctggaaaccaggcccctcctgagtgcttgcaacacctaccttccttagctgtagcaggtaggtgtgcctctgccagagaagcccgcactccagcccttagggaccagcatgggaagtctcagcctagggcattcctacagtgaagaaagctgcaccgtggcttctgggtgactactagaggtcctaggttcagaccaaggctcattaagtagtttgctaaccacttggttaccatcaaagttgtgaaaaaggctagaaatgagtaggtacaatgaggtatatgggttggagtttctcaggatttctgtactctgtggagaactcttcagcctgggacctgcatcatttgcaaagaaaggaagttggcaactattccttcttgagaaggtcctaggattctttg

SEQ ID NO: 31942 - DNA, 1013 bp, Homo sapiens
ttagtagagacagggtttcaccatgttagccaggatggtctcgatctcctgacctcgtgatccacctgccttgggctcccaaagtgctgggattacaggcgtgagccaccacacccggccaatcatattttttcttgttactaattagaatcatgattctcctggcattcttcattttgttatacctcacttccttttccttagcaagatctttgccatagagtatggaaaccaggttccttgccagttaatctgtattgtgctttgtcatgtattgttactaaacagctcaagatcaaggggaagaaatgtatatgaggctcagttcatgttcagtttttttttttcagcattgcaacattgccactcatcatcatgagtgtagccctgtgtcaggtactgaaggtaatggaaaaggtatataaggttgatccctgtactcttgttgggaacttgagtggtatgaatagagaaggtgagttcttggggacagaggctacagtttagcaagctttcctatgcggaccttggtaatttctttacattttatagaccaaagaacaatcttaacttgcccttttttctaaaggcattgtttaaaaactgtcatcaaatcattgcagtttatggcaaatggcctttttttaaaaaaaaaaaaaaagcaatctaaatcttttcttcatcttggaaaaagacttctcttggatttctgatagaatatttccagtatgctatgttattgcaagacagtaacttacagctagacaagaaaaatcagctttgttcaaagtaagagtatagcctgtccttatagtgtaatttttttctcacagttttgttttatggttccttcagtttgaatatacaatatttgagctcaaagcccagggcagcaaaggaccatgctgagttaaatgggggcagtaagctctggtgagtggggaaaactccaagctacaattgttagagtccctaagtctggaggtcagagaaagatgcactgcccccagtgt

SEQ ID NO: 31943 - DNA, 1033 bp, Homo sapiens
catgagaaatgtttctaaaatgtagaatatggtttctgaaatagttttacctttatgtatgtatgtctaaacacttggaacgtttacttccagggaagaaactagattataacttgacaactttatcttttattaacaaggagtgagtgtcatcaatcattgttaatagtagaattattgactttcattgtaatgataattgtttcctggaggcaataactgggaacagttggtcaatctggaaagtagtgttgccttggtaactgataagaaagaatgcagagaaactagttgtctgtcatgtataaaaaccaaggccctgaacaggttaaatactaactccaagcacaaggctaaaacagaaatatctgccagtacatgtactgggattagagacctgcaggctttgccaagagtcctggaaaccaccttctgcccagacacacaggaatccatgcgctttcttcaaactcagacagaatggaatagaacttcacaatatttagctcaaaggacattccagatcaccaccgcttgggttgggttgaagacagctttaatgatggaacggatcaggtcaaatgatgcagatgcagtgtaaaaggaaactacccatcctttcactgagcagatcttttttgaaagcttatttactgtgagtcaagcactgtgcagtgcacccacatggcacaaatgcacagttcacattcctaccttctagaagctcctgggaaagtcatataaataaaagattacagtgtggtttctaaattctaaaaagagatagagtattatgataatataaagaactcaggaggggttcaaagagactttgcagaggtgagtgagtaggaataggacctagaggcaaggggccgggtgcggtggttcacacttgtaatcccagcactttgggaggctgaggcaggaggatcacctgaggttaggagttccagattagcctggccaacatagtgaaaccctgtgtatactaaaaatacaaaaattagctgggtgtggtgattagctggga

SEQ ID NO: 31944 - DNA, 1120 bp, Homo sapiens
aagagatgactcagcctaaggtggcaggcaccatgcaggcattgattcctttggaaagtggatcaggcatgactcagacttctggtgttagcacagaaacaggagatgtagtcaaagatatgggtgtcaataaccagagcaaggaaggaaggtgtccatggaaggatcatgaggcagctccctggatttctgaaaagcctaaaaagagaggcaatgaaggcaaaagcaaaaagtttaaaaataattattccacacagcctgctagaatggagaggaaggaagaaatccttaacccaccttttgaagggaaggatggagatactggtagtattccccataaaagcaaggaaataggatttactttccccaaaatgcatgattcttcgttctcacatacaccagatacacccacagtggaagcagttgacaggaagggtggaaattttcaggttaattttgttgagcttgggactcttggggaaaacaagataagcacagtcaaggcttctactgttactgaaccacctgccaaggtgacagatgtgagctgccaagagcaaatccagggggcaggatttgttccttcagtagtatctgaggagaataagacagatgcagccaatagatacactgcagtggctgacaaaccaagtaaaaggagtaatgatggaaaaagtaaaaaggttaaaaatagttctcctgagaagcacattctggagaataagatagatgcaacaaaaatacatgttcccatggaaaccacaggggaccagggaattgaaggaatggcctatatggacgaaaatagaaatattacatttacctgtcccagaacaccatcagagctgataaataaatcatctcctctagaggttctggaatcagcagcctgtgaaaaactgcccactcctactcctcaagtagtaaaggaaggtgattcctttccagataccttggcaaaaaatgggcaagagatagccccagcccagatttccaaatcattaatggtagataactacaccaaagatggagtcccaggtcaagaaagacccaagggtccctctgctgttgtgccctctacaagcacaggaggagttgctctacctattacaacagccat

SEQ ID NO: 31945 - DNA, 1821 bp, Homo sapiens
acagaagcacccctggctaaggatggggttctgaccctggccaacaatgtgactccagccaaagatgttccaccactctcagaaacagaggcaacaccagttccaattaaagacatggaaattgcacaaacacaaaaaggaataagtgaggattcccatttagaatctctgcaggatgtggggcagtcagctgcacctactttcatgatttcaccaggtacgtgcttgtgcttattctcagtatttctctctaccaggttgtagtctcgagaagactaaggacaaacatcatgccaggtaaagtacagacagtcacactgtactttgcaagtttattcatactcctgctctcctagacaactctttcccgcctttaccctcctcccacctccaacaccttttctatgttcattctctgctgattgtcctgtttttcttgcagataagtcaagcaataaaatagaacatcgacaaacttctattccattatctacccaactacttgtatctgtatccatggtctctgcttatgaaagttcccgtttttataagtaaactgttcctgctcctaattaagaccaacctctcctcattttgccctagattccatctcctctttcctactcgatatattgccccatgtattcttcccttttttgcccctcataccaatttaaatcttttttcattggatcattcccacccatttaacaaacgtttgttatttttcccatcttaaaaaacgaaacattgaccgggcatggtggctcacacctgtaatcccagcactttgggcggccgaggtgggcggatcacctgaggtcgggaattcaagactagcctgaccaacatggagaaaccccgtctccactaaaaatacaaaattagccgggcatggtggcgcatgcctgtaatcccagctactcgggaggctgaggcaggagaatcacttgaacctgggagacggaggttgtggtgagccgagatcgcaccattgcactccagcctgagcaacaaagagtgaaaaactccatctcaaaaaaaaaaaaaaaagtaacataactagacataccttcccaacttcagcttccaactaccacttcactcctttgctgccccttgtaggagaactcctcagaaactaatcccatatccaatttctggcagatggaaaatagctgaaatcatgcttctctgaaacgtgtgtggcttttgttattacctttagaaaccgtcacaggaacggggaaaaagtgcagcttgccggccgaggaggattctgtgttagaaaaactaggggaaaggaaaccatgcaacagtcaaccttctgagctttcttcagagacctcaggtaagttaggaaaacaaaatgaactctttgaaacaaattaggggcgatagagtagtgatggtagacattgtctctagttccctgttgtatggtggtaatcagcagtatagtttatgaagtcaattctcttagacagattttatctggtttagacagaatgtcagcttgttatatctttaaaaattactactacagcaaatcaggatacctaattttttttttctccactgttttttttgttgttgttgtcgttgtttttttttttttgagacagagtctcactctgtcgcccaggctggcgtgcaatggcgtgatcttggctcactgcatcctccacctactgggttcaagcgattctcctgcctcagcctcctgagtagctgggattacaggcgcctgccaccatgcccggctaatttttagtagagatgaggtttcaccatgttggccaggctggtctcaaactcctg

SEQ ID NO: 31946 - DNA, 1035 bp, Homo sapiens
cgcggtgtctcacacctgtaatcccagcacgttgggaggccaaggcgggtggatcatgaggtcaggagttcgagaccaatctggccaacatagtgacaccccatctctattaaaaatacaaaaaaattagccaggtgtggtggtgtgtgcttgtagtcccagctacttgagaggctgaggcaggagaatggcgtgaacctgggaggcagagattgcagcgagccgagatcgtgccattgcactccagcccaggcgacagtgcgagactctgtctcaaaaaaagaaaaaaaactttttttgcattgttttttattagtctgtgtcttcctggcaatatatgcagctgattttaaatatcaaatacctcttaggccgggcgcggtggttcacgcctgtaatcccagcactttgggaggccgaggcggttggatcaagaggtcaggagatcgagactatccgggctaacatggtgaaaccccgcctctactaaaaatacaaaaaattagccgggagctgtggcaggcgcctgtagtcccagctactcgggagactgaggcaggagaatggcgtgaacccgggaagcggagcttgcagtgagccgagatcacgccacttcactctgtctgcgtgggcaacagagcgaaactctgtctcaaaaaaaaaacaaacaaaacaaaacaaaacaaaaatatatcaaataccttttgtttccaatgtttactaagtttcaaaatgtatttgtttgtgtttcaatattaggtatgtctccctgcaacacagctgttgtacctcaggggtggtctgtggaagccttaaactctccacactcagagtcctttgtttccccagaggctgttgcagaacctcctcagccaacggcaggtaaactattagagactccctttatcagttaatggttgcagtattggtaatcaatataaatcatcaggtgtattttttagcagcttacagcaggtataaaaatttcagaacaatcacaaatgttttgcttatattagtgatatcaccactgga

SEQ ID NO: 31947 - DNA, 1041 bp, Homo sapiens
ccattttggaaacagtttggcagtgtctcaaaatattaaacataaagttgctttatgacccagcagttctactcctagggatatatcaaagataattgaaacacgttcccacaaaaacctgtacgtgaatgttcatagcagcattattcacaatatccaaaaagtagaaacaaccaaatgtcagctgattaatggataaacaaagtgtggtggatctacacagtggaatgttatttggctataaaaaggaataaagttcagttaccatactacagcatggatgaaccttgaaaacattgtgctaaatgaaagaggtcagtcacaaaagatgacatattgtgtgacttcatttatatgaaatatctagattaggcaaatccttaggaacaaaaagtagacgagtggttaccgaggggtaggggaaagtgggaaaggagaaaagatatgggatttcttttttggagtgaagaaaatgttctgaagttagatagtggtgatggttgtataactgtgtatatgctaaaaaacctttgaactcgactttaaaagagtgaattttgtgaattatactcgataaaactgttatttaaaaaataaaaagaggctggtccaaaggtagtgagttatctcaattgttcagtcagttacagattgaactccacgttccactctttccctgcttctcactgttgtacttgactagtctttaaaaatacagatggagccaggcacagtggctcaaacctgtaatcctaggacttgaggaggttgagatcagagaactgcttgagcccagaagttggagaccagcttgggcaacataatgagaccctgtctctacaaaaaaaaaaaaaaaaaaattttgtttaaattaggcaggtgtggtggcaagtgcctatatttgtagctacttgggaggccgaggtgagaggattgcttgagcttgggaagttgaggctgcagtcagccatgatccacaccgctgcattccagcctggatgacagagcaagaccctgtctcaacaacaaaaaaagagcaac

SEQ ID NO: 31948 - DNA, 1022 bp, Homo sapiens
aacagaaatattgcaatttgaacaagggaaagttaacataaagaattattaactagtaatagattaaccattaaagggtaaagagaactctgaaagatgtaggtgtatcagctataggagcagctactccctctgtgcctgaggcagagtatgaaagaaagagacagattggagagagagcctacccaaggcggagattcagaccttttgaggaggtaaagctgtagtctgttgcagttttaagttcctgaggatggcaccagccgagggttaaaagcaagagtattgtttgctggagtgccaacaaaactgtctaggaagctgctctgggtggtgctgtcgaaaatcactgggaagttagctggggtgactggaactcacctgaagccactcattgtggtatccctaaaactggtgggtgagcaccgctgggtgtcccacgcatcacatgaggccacgggagaaagaagaggaaaacacagtggaaccaggaggaaatcctcttcctcctgtagtattcctccagtgcttgctattggcataagaaaaacatttgaagagtccagcttcattattgcaaagcagagcagtaaagtatagatttggaactgaaaggcaataaattgataactaatatatcatacctcttaacctatgcctagaatggaatacaatttccagatgtagtttagccagcataagtagagcaggatacctaccccactccgcatcattcctggtactatgttgttgatgttgcttgccaagaatgtaagctctctatgggtggtgattcttttttttttttttttttttttttgggacgcagtcttgctctgttgcccaggttggagtgcagtgggacaatctcggctcactgcaacccccgcctcctgggttcaagcaattctcctgtctcagccttctgagtagctgggactacagatgcacaccaccacactgggctagtttttgtattcttagtagagacggggtttcaccatgttggccaggctggtgtt

SEQ ID NO: 31949 - DNA, 1461 bp, Homo sapiens
tctggaaatatgttatctgtcatgaatttgtttaaattttgaggaagctgtggatagagcacctactagctttgatttcttaggcaagttgtttgccctctttgaggctaagattcctgctgtgtaaaaggagagctctataaaaatagttgtttgcctgaagtgacagaaattattttcagtgctttgaaacctcgttgaaggggttaatatttaaatgtaagatgatattagaatgatgattaatgtccacatagaaagttcttacagttcaacccattatatacttttgttaaatcattctgtttgaccatcagccccttttcctacttaattggttgtgtaacagtattttaatcggatgtaactggagcatattggtccattgtgaagcagaaatgctctgtttctagaggacaaaactggaggtgaaacttcaaaagtgagctccaggcagactgaaagaagagtttttttgttttgtttcttgtgaaaaaattaacttaggactctcactgcaaaaaactggcaagcctggccctccagtgggttttcagcaatttaaaatgaaatgagaagatgcaaaactatgtcaactgtaaacttaagtattaacattagactccttagaggtcttcattgaaggattttgctttctatttaacaaattaatatttctggtcttcagtttttctgtgtaaaacgaacaggcattctgctgtttctgctgctgctgttagtgctgagcaacagagatacagtatgttctgcggtaggtgatagctttttagacatttagagattaacatttgccttctgatttattttctttgggttaaacatctttcattttttcttccactctttcctattatgtagatttatgctgtttttaatggccaatatttggatcagagtctattcaggagacagaagctacaccataaattgaacagagaatttactataggggtaaagagaactctaaagaatacaggaatgacagatatagggaatagtcactacccttagggctggggcagagtacacaaagaaataacaaatttggaaaagtatgcgcccctcccccaccctgcccccaaagctgattgcatatcttggaggaagtctccatttggtagtaaagatgtttgctgagttgctgcaggtcagggtgatgtggggcaaacaagcccccagactggggcttaacccaggagggttcttggctttgccaggaaagaatttaagggtgagccagtagtgagagaaagaaacttttattgaaccagtgctgcttcttgctgagcagggctaacccataggcagtgtgcccagaatcggtgtctgtgagctgctagctagctgtttatatctgttattaattacatgctaattaagaggcaggttatttagaactttctggaaaaggggctggaagtttctgggaatcagataagg

SEQ ID NO: 31950 - DNA, 1032 bp, Homo sapiens
ttgggaccattatcttatattcaaaaattaacttaaaatggatcaaagacctaaacaaagcaccaaggctatacatttcttagaagaaaacatagagggaaatcttcatgacattggatttggcagtgttttcttggatatacaccaaaaacacagacgacaaaagaaaaaacagataaattaggctatatgaaaattgaaaatttttgtctatctctgtagagtgaaaaggcaacccatggaggcaaaatatttgcaaatcttatatcttctcaggagttaatatccagaatatgtaaataacttctagagctcaacaaaaaaaaattaaaaatatgggcaaaggacttgaagaaacatttcttcataaaagatacaaaaattgccaagaaatacatgaaaagatgctcagcatcattaatcattagagaaatgcaaatcaaaaccacaatgaaatatcacttcatactcattaggatggctagtatgaaaacaagaacagaaattaacaagtgtttacgaggatgtggaaaaattagaacccttgtgtactgctgataggaatgtaaaatgaaagtgctatggaaaatagtatggtggctcctcaaaaaattaaaaacagaattattgtaagatccagcaacccaacttctggatatatgcccaaaggaattggaatcagggacttgaacagatatttgtacactcatgtttgtagcagcattattcacagtggccaaaagatggaagcaacccagatgtcccatcaacacatggaatgaataaacaaaaatgtggtacattcatataatggaacgttatttagccttaaaaaggaaggaaattctgatatggtacaacatgaataaaccttgaagacactatgctaagtgaaaaaagccagtcacaaaaatacaaatttatatgcggtacctaaagtagtcaaatttacagaaacaaatataaatatactccatttatataaattaccttaagtagtcaaatttacagaaacaaagtagaatggtggtt

SEQ ID NO: 31951 - DNA, 1081 bp, Homo sapiens
tcagctcaccacaacctccacctcctgggttcaagcaattctcctgcctcagcctcccaagtagctgggattacaggcacacgccaccatacctggctaattttgtatttttagtagagacggggtttctccatgttggtcaggctggtctcgaactcccaacctcaggtgatccacccacctcggcctcccaaagtgctgggattacaggcatgagccaccatgcccagcttttaaagactttttaaaaaacctatcttaagttctagttactgagagaaaatccatattgaggcaagggctttgcatgtaggtagtttattttgggaagtggccccagggcacaagagtgggatactgggaaaagtgaaattagaggaaaagaatacagtgaagtatgactactgacctagtcactgctgtgggcaaagtgggcttaagtcttttggggtcttttgaggacctgtatagaatgcctctcagtgttcactacctgagtatcttggttatagaagtggataacatttattcaccatttaccatctctcattgcttaagactcttttttttttttttgagacagagtcttgctctgtcgcccaggctggagtgcagtggtgcgatctcggcccactgcaagctctgcctcctgggcctaacactcttgtacttctggatttgcacatgtgtggtgccaggatgcagatgtcttgtctcttggtgtcagagaagttgtagggcagaaaactctggtttggttgatacaaagtgctgtcaaatcacacctatgtgcagctggatgctgtagcaatagctagaataaatagtgaacttaacagagtgtgaggtgggggcacaagaagtgtctaaccaagaggttacttcaaagcaagattctcttaacataagatttgtctgcttatgccttaccatagaggatgagatccttcaactctgtagaggaaatttgaaggaactccatctattatggtactaatccttttttttttttctctccccgcgccccgcgagacagagttttgctcttattgcccaggctggagtgcaatggcgtgatctt

SEQ ID NO: 31952 - DNA, 1814 bp, Homo sapiens
tgagccaccgcgcccagcccacttatgatttttgatagttattgtaaactctcttttatccagaattataaaagttaagaagttcaaatgactactgatatttaatgtcatttggtgagaaagtcacttgacagaaaggtgtgaagaagttattccaaaaggaggtttccatggtatatcaattgttgttagatgctttctaatactacatttattaatttctaacactacatttagtttagtgcagttaaaattcacattcaaagtcttcctaaagtgcctcctgaattatcagataaaatttactacattcagtaacatttaatttgataactttgttatttgataacccagtatgcagtatctgggaagaattcaacaaaatgcgcagttccctagccattctgggttagtgtttgtttacagtagggttgcaagtacaatatgttgactgaattaagacattaaaaatattttatatctaagtaatttgcatagcataaggaactttttaagcttggcagacattttagttaagaacacttaatttaatgtttttagatttcctttttattaaaacagctcagtaatctgttctcaggtttaaagcacagattttaaatactataaggaataattgaccattaactttcttatacataccctaggtttaaagcttttggtaattgaagcaattcttgaattttgttattgtcctcatccctgatgcgaagtgaaacctggcttcatttggattcttcctccttattgacttgataatatggtgggaggctagagggtgttctaggcaaagacacaggactggtccagcaggcacagaatgttagtttcattcctaaatcatgtgtaatactgtattatcctcaattttatgttgatgccgtttccattacagtgaaggtttaacaagacttaactacaaattatttgtgggataaagctctgtgcgaccatggaggtaaattactcttatttatagtgtttggggctagacacattgcactaagtgctgtacaaatggcagtgttactggttgtttccatcgtaattagagtaggtaaacagtttactattgtgataactgtttgcatgtgtaaagtcatgccagcagtgaaacagtaaatctacttttttagaatatcatgacacagaaggtattctgtgtgcttcatcactatctcatctggtaggatgcaaaggatttagcatcagaaaaatgcaaaagcaccaaaaatgtgaaatattaacagataaataaatctgtggtgtgttagagtttctgaacagctattggagccacgctgtaaattggcatcataactcacaagtggagcccagacataagctgcacattatgttgctatgtatagacagcaagacatccatccgaactccaccaaattcctggaacaaagttttatttcttttctttcattttccagttaatgagttgcatgctggagacacatcagcaaattaacagcacgtaatgtttcttaaagtttttttggttcatggttttctaataaaaatacagaatttctcttcagaaaagtccacatatacccatatacaagatgttacatttacgtttagagtgtttaggactccattgaaaccagctcatggactacaatccttttctaagccaagcatttaattaatactctaagccacgttatttcagtttcttttggggctttgtattgaataagacaaaatagcttcttcttgagctttaagtgaaaatataattctgatttttttttgtttgtttttgtttttgagacgaa

SEQ ID NO: 31953 - DNA, 1037 bp, Homo sapiens
tggctaatgtgacacagtaaaatgaaggtttcctaacacagtggttaggaaaagtgagtatgatggtgggaatcaggcttctgttcttgctttttttttttgagtcagggtttcactctgttgcccacgccggagtgcagtggtgcaatagtggctcactgcagcctcaacctcctgggctcaatcagtcctcccacctcagcctcctgagtagcagggactacaggcatgtgccaccatgcctggctaatttttacatgtttttgtagagatggggttttgccattttgcccaagctctgttctagcttttcatgagttttttccctgcattttagctcccatagtagcacctttcaaggggtgaatagaagaggacagagacagcaacaggccattggtaaaccagattgccaatttctcatcagacagaatgagcacagaccccgagtgagtggctctagatgcgaatgacctaaaattttcaggaggacttcatggagcttaaaaggttcttcagaacttctgtgtaattaagttagatattaacactgtttaatctgtatagacctgtaaaatatttttagtacagtaattaattccagagtttgtgaactatccaaagtaaagcatacaacaaagtactgtggcctcatcatatatccttatttcctgtttatgagcacctagctcttaatagtgagattgtagtcaagagagtattttatcatcatgccatgtagttgcctcttgccttagtttacctattttaaaaaacccggctcactaatagtttcacttcaggcatgtcatcagaatgaaagatcagatatacaaagtgctgtgcttgaaaactgtgtgttcccttagtgcctggttagataatacagggcttattttctggcagagtggtgttgagtctcctttgatgttagccagaactgggtggagtttcttaagctccagtcagattggctcaagcagggcaccatgcagtggtgaatttgttttcagtccctccctttgccaaaaagcttt

SEQ ID NO: 31954 - DNA, 1027 bp, Homo sapiens
atttcagtaggccgggcacagtggctcacgcctgtaatcccagcactctgggaggccgaggcgggcggatcacgaggtcaggagctcaagaccatcctggctaacacggtgaaaccccgtccctgctaaaaatacaaaaaattagctgggcgtggtggcaggcgcctgtagtccccgctgcttgggaggctgaggcgggagaatggcatgaacctggaaggcagagcttgcagtgagccaagatcgtgccactgcactccagcctgggcaacagagtgggactccatctcaaaaaaaaaaaaaaaaaaagtttcagtgcattgtacatagtatggatgagtattgatttataaaacttctgtttcatttatatatgtgtatgtgaatatggatcataatataaatttttttttgccatggatggtgataaaaagaaaaaaatgaagacttgagaattagaaaaacacatatttttctttccttcactctttcatacgttcttttgcatctgccatgctcctggaactgggataggtgctgggtgagcatccaaatattccgaaaatcctcactcttttttttttttttttttctttttttggagatggagtcttgctctgatgcccaggctggaatgcaatggcgtgatctcggctcactgcaaactccacctgctgggttgaagcgattctcttgcctcagcctcctgagtagctgggattatagacgcctgccaccaatgcttggctaatttttgtatatttagtagagatggcattttgccatgttggccaggctggtttcaaactcctgacctcaggtgatccacccaccttggcctcccaaagtgctgggattacaggcgtgagccactgtgcctggccgaaaatcctcactcttgagctcacagtttatagagggtaataggcacataaataataaagtggtatagtagaagcacatgtcatacattaactgtgtactagaagtacatatcatatagagtgctcctgaagtcatggcgact

SEQ ID NO: 31955 - DNA, 1086 bp, Homo sapiens
cccagcactttgggaggctgaggcgggcagatcataaggtcagcagttcaagaccagcctgaccaattggtgaaaccccgtctctactaaaaatacaaaaattagctgggtgtggtggcgcatgcctatagtcccagctactcaggaggctgaggcaggagaattgcttgaacctgggaggcagaggctgcagtgagccgaggttgcggcactgcactccagctgggtgacagtgagactctgtcttacaaaataaataaataggctgggcgcggtggctcacgcctgtaatcccagcactttgggaggccgaggcgggcggatcacaaggtcaggagatcgagaccgtcctggctaacatggtgaaaccccatctctactaacaataaaaaaaaattagttgggcatggctgcaggcgcctgtagtctcagctactcgggaggctgaggcaggagaatggcctgaacccaggaggcggagcttgcagtgagccgagatcacgccactgaactctagcctgggggacagagcaagatgccgtctcaaaaaaaaataaaaaaataaaaataaataatatgattttgtcaaatttaaaaccttaagatcctattggcttgtaatagcaaggagtagaagcgtggattgtagaatgttcttatgaaggctttatttcatcaatggcttttaagcactttggggtcagactttgagctgttagtgattgtttttgagctgtagtccttagagattccaaactgatgactgcatatgtcacttgtatagtcaatgtgactggttttcaaaagccctttcagttatagagccaatgactgggcaacagaaatgcctttcatttatatcattcttctgttttcttggtgcaaagggctgtagttaagaggaacagttagattttagtggcttaccaagttgctttagaggaagtctatgaaaggactgttgagccaaacaatgttcagattaaaaaccagtctgttagcaggacagaatcctcttgcagatactttgtttaacctttaacttagtgcaagaagagttcaagctatgacttttgagattaaatc

SEQ ID NO: 31956 - DNA, 1049 bp, Homo sapiens
gtggctcacgcctgtactcccagcactttgggaggcttaggtgggcagatcacgaggtcaggagatcgagaccatcctggccaacatggtgaaaccccatctctactaaaaatacaaacattagctgggtgtggtggcacgtgcctgtagtcccagctactcaggaggctgaggcaggagaatcgcttgaccccaggaagtggagattgcagtgagccaaggtcgcgccactgcaccctagactggacacagagcgagactccgtctcaattttaaaaaaaaaaagattacagagcaattgcagtttttctcattaattattatgatcactttgcatggtttcagcgtgcattcttacttttacggttttgcactattgtgtaaaatgaaagctgcctgtttgtaaactgtggaaagtttaatttttcttcttagtttttaggggtaccccctaactagccttttctttgcagagtttgtatatgcatctctaacaaagtatgtttcctttgacaagttttgcttttaaaaaacttggactgactgaaaataatatttgtagaaaatattctaaaagtaatgcaaaaaggaaatatccttaaagctagtattaagaataatctcataggaaggaagtttcatgtgtttggtgttatctctctttttggtaacagttttgttgagatatattttatataccataccattcacccacttaaagtgtagaattcaggccaggcacagtggctcatgcctgtaatcacagcactttggaaggccgaggcaggtagatcacttgaggccaggagttcgagaccagcctgaccaacatggcaaaaccccgtctctactaaacatacaaaaattagccgggcatggcgacacgtgcctgtaatcccggctacttgggaggctgaggcacaagaatcgcttgaactcaggaggcggaggttgcagtgagccaagatcatgccattgtactccagcctgggtgacagagcaagactccatcacaaaaaataaataaataaataaaatgtacaattcat

SEQ ID NO: 31957 - DNA, 1029 bp, Homo sapiens
aataaccataaaaaagaatgtgtagaagagtctgatttttatagtttatttcaaagaaatttaagagtctcaatggtgctataaagaaattaaagactggctgtggtttggttgacttgaaaaggatatgtgggtctgagtgtgtgtgtttaattttttaaattttcttttgtttttgttttcagagagagtcttgctctgtctcactgcagcctctgcctcccgggttcaagcagttctcctgcctcagcctcctggtagctgggattacaggtgcacaccaccacacccagctaatttttgtatttttagtagagacggggttttgccatgttgcccaggctggtcttgaactcctgacctcagatgatccatccaccttggcctcccaaagtgctgggattacaggcatgagccaccacagccagcctaagtgtgtgtgtgtgtgtgtgtgtgtgtgtgtgtgtggaaattgaatggttttcaaaggtgatttgattagcatttgcatagactgtgaatccaagatgtttgtgttcccttccctcattcttccattcttttctctgtttgtcaatttttgtaccgcgatatatgagggattaaagaaaaatcttttagaatagttttggctttctgccttttttttttttttgagatggagtttcactcttgttgcccaggctggagtgcaatggcgcgatctcagctcaccgcaacctctgcctcctgggttcaagcgattctcttgcctcagcctcccgagtagctgggattacaggcatgcgccaccatgcccagctaagttttgtagtttcagtagagatggatttcaccatgttggccaggatggtctcgatctcttgacctgtgatccgcctgcctcagcctcccaaagtgttgggattacagttgtgggccaccgcgcacgtcctctatagtttttttttttttttaagtttatgataaattgaaacaacactaagaaaatcagataatacaggaatattaaatgaaaaccgaatcttt

SEQ ID NO: 31958 - DNA, 1155 bp, Homo sapiens
acacctgtaatctcagcactttgggaggccaaggagggcagatcacctgaggtcaggagttcaagagcagcctggcccacatgatgaaacccatctctactaaaaatacaaaaattagccgggcgtggtggtgcacgcctgtaatctcagctactcggaggctgaggcagggagaatcacttgaacccaggaggtggaggttgcagtgagccgagatagtgccattgcactccagcctgggcgacagagcaagacctcatctcaaaaataaataaaataaaataaaataatattgtatctagattttcaaatcaggtgtttatgcaggaaaagacaattgttttattggttttagaaaaccaacaaaccaaagcaacaataaagattcctgtatacatttttttctttaattaatgaattacttgggtcattctggtaaaataagatgctttcttgttaccgaatgccagttttatcagatgaaaaggactgtgttcatagatgatggagataatcaccagttctgatagttactctaaaagataagacataatcctgttcagccagacctagtgaaaatcagaaataccgatgaaacttggacacgtagagtaagatttttggcttaaaacacctttgcaagtgggtgggtatgtgtagtatttatgtgtgctacttggtttctaaagactccctactatatgctaatttttaaattatgtacatggtactttttaagcctcgcaggctggccagccggcctactggcctccctccctctctccgtacaataaattagccaaaataatgaggtaatatctaagtcattgtagtctaggactgagtcatttttctctttgaaaaaattccagaatactttatattttcttgaaggtaacttttttgcacttgttttaaggtattgttactttatttacagccaacgaaatggaactgttaggtttgtaagcatcttatatttttgaagtgctgattgtatgttcaatctaattcaataaatatttattgtctaatatgttctaggctttggtgtaggtgcttgggatataaggatatgtaactcatagttcagccttaagtctaaatatttagtatatttgtgttttttaatttagtttttaaacacagtttttt

SEQ ID NO: 31959 - DNA, 1074 bp, Homo sapiens
aatttttgtatttttagtagagactggggtttcaccatgttggccaggctggtctcgaactcctgacctcgggtgattcacctgctttagcctcccaaagtgctgggattacaggcgtgaaccactgcgcccggcccaaaatctttttcatttgttttttttggtgtgtggatatctagttgtccttgaaccagttgttgaaaagacttctttttccattgaattgtgtatcatcttagcatccatgttttgagtcaattgaccacagaggtgtgggcttatttctggactttctttttttttgagacagtcttgctccgttgcccaggctggagtgcagtggcgtgatcgcagctcactgtaacctctctgccttccaggttcaagcaattctcctgcctctgcgtcttgagtagctgggattacaggcatgcaccaccacacccagctaatttttatatttttggtagagacggggtttcaccattttggtcagacgggtcttgaactcctgacctcaagtgatccgcctgactcggcctcccaaagttctgggattacaggtgtgagccaccgtgcccggcctggactttcaattctattgcattggtgtacgtctatgccagtaccatcatgcttgctttcttgtattttcaccctgtggtactactatctgctactatctgcataaatatgctgtcttgattaatgtacttttgtaatatgttttgaaattaggaagtgtgagttttctaattttgtttttttgaagattgttttggctattctggatccttggcatttccatttgagctttaggattaacttggcaacttttgcagaaaaggcagttggaattttgatagggaatgccttaaatctgtagatcaatttagagagtgctgccatcttaacaatgtcagatcttccacttcatgaacgtgggatgcctttccatttgtttatgtctttaatttctttcaagaatattttttaagctgagtgtggtggtggctgacacctgtaatcccagcactttgggaggctgaggtgagaagattgcttgagcccagg

SEQ ID NO: 31960 - DNA, 1025 bp, Homo sapiens
aattttacttgatagaacctagaaatgagtcaccaagtcatatccatattctgggggaagggaattaagctccaacccctgaagggaggagtatcaaagaatttgtgggcatgttaaaattcctaaagtaattagttaatattttggggaagataactgtgaggttatacagaatctgatttctccttaaaaatttcctctacttattttagcattcattagtgaatcttgcctgcggcagcgttgattatattattctgttggttttctatttttctaattctttctacttttatgatttggaatccttttgtaaggaagatttatgcctcccccatttatttattaaatcatttatgtcaacatggacccatgaatatttttttctttgcttataatccagtactgtattttgttgctcaagttgttccagctttggccattctaacattggcacctatgttcttttgaaatacctttccctacctttctttgtcttttagcacttttgtacttcctggcactgtaagatgccccagtctcatcttgtactttacctgccccaaccctaaaatcagccatttctccaaggtgtcctggttccttctgttggagaagagtatttggaaaccactatctggtttctaaatgagcttgatgcactcattactgctagggtatcactgcttctaggccctctcaggggatagttaggaagtaatatatatatatactgacccacacatatcttcgtttacttccgtatctgtctgtatataaatataaacatgagtttatactgatatctctgatgctgatccagcaccacagagttcattctagcattctcttccttgcttctttctctgaaagtgagaaatttggctgatttaatgaataatacatgctaattttttcaactctaatatatatatgaagtaaaaaatagtcttaattgtcatataaagtaaatttccaaagcattttgcagttgttaactaatttaaattatactcctataatat

SEQ ID NO: 31961 - DNA, 1043 bp, Homo sapiens
agtttgcatatatttaaatatgtttaaaaatttatttatgctgggtgcggtggctcatgcctgtaatcccagcactttgggaggctgaggtgggcagatcaagaggtcaggagttcgagaccagcctggccaacatggtaaaaaccccgtctctactaaaaatacaaaaattagctgggcctggtggcgggcgcctgtaatcccagctactcgggaagctgaggcaggagaatcacttgaacccgggaggcagaggttgcagtgagccgagactgcaccattgcactccagcctgggctacagcgagactgtctcaaaaaataaatttttttatttataactttcctcacttctttttatatggaaaatagtttaaaactccttttaaataatttcaggtttacagaagagttgtaaaggtagtacagactttctatatacattctgtattcattccatttctcttagcgttaacattttatataacctgatacccttatcaaaattaagaaattagcattagtggaatattattgagcaaactacagactttcctctgattttcctgtgttttccactgatgtccttttcctgttacaggatccaatccaggataccacattgcatttagatgtcacaattctttagtttcttccaataggtgacagtttcttagtctctccttccctatctttccttgacacctttaaagatgagtggtcatgcatttgtagaatggttctcattttgggttttctggtgctttctcatgattagcccgaggttatgcattttggggaaaaataccatagagatggtttacccttcttgtcacatcatatctgggaatacctgatatcaacatgactcgttactgattaacttttttttttttttttttttttgagacaaagtcttgctctgttgcccaggctggagtgcagtagcatgatcttggctcacggcaacctctgcctacccaattcaagtgatttttgtgccttagcctcccaagtagctgggaccacaggcacgtgccacca

SEQ ID NO: 31962 - DNA, 1040 bp, Homo sapiens
gttggggtttcaccatgttggccaggcttgtctcgaactcctgacctcaggtgatccactagcctcggcctcccaaagtgctgggattacaggtgtgagccaccgtgcctggccattaatgtttgttttttaaaagatgcctcctaccagccagacaaaacagtataagtgtgaataatatataggctttcagattctctaagtatctttttttctttttaagggttatctctttcatacagttgctgggaaacatcaggatttaaaatacatctctccagaaattgtaagtccatccttttgaaacccaccacacatcgggtacttgaatctagttttccctgacggtcaaagttgattctccctaattttctctcaacagatggcatctgttttgaatggcaagtttgccaacctcattaaagagtttgttatcatcgactgtcgatacccatatgaatacgagggaggccacatcaaggtatggattcctgagacttgctgtagaaggagccctaaacaggatctgtggttttaaagtggggaggacagtgacacctggccacttagctcatatgctagttgttagaattttgaaacaatacagtgagtgtggaaggcatttgattccgggtgctcttaacgaatgttcccttgtctgcaatactctctaccaccttgtgcacagttattcttcatgtttgtccctcacaccatcattatcaaggacacttgtaggaggtacccactgatgtttaagtcattcgggggacaagaatgggtttcatagcatttaagaggcttgggtaccaatgtctgagcaccccagggctcctgatgaggagaagaccatctctggcaacatgtcctggtgtctgtgccaggcctagtgatgcctccaaagttgattgttcagcaagctgcctggtggaggggcgtgttgggacacacgttcccaagaagaaaggaactgattttgccattttaatctttttttttttttttttttgagacagagtccgctctgtcgccaggctgga

SEQ ID NO: 31963 - DNA, 1028 bp, Homo sapiens
tctgtcttttttttttttttttttgagacgctctgtcgcccaggctggagtgcagtggcgcgatctcagctcactgcaagctctgcctcccgggttcatgccattctcctgcttcagcctcccagtagctgggactacaggaccccgccaccacgcctggctaattttttgtatttttagtagagacggggtttcacagtgttagctaggatggtctccatctcctgaccttgtgatccgcccgcctcagcctcctaaagtgctggaattacaggcgtgagccactgcgcccagccctgtctgtctaattcttcaagttaattcattgcattgctcatagttgtataggctgttttgttgtttcctgtttctgagacagggtctctctgtcacccaggctggagtgcagtggcatgatctccgctcactgcactctccacctcccaggctcaagcagtcctcccacctcaggctctcaagcagctgggactataggtgtgtgccaccaaacccagctaatttttgtattttttgtagagacaggctttcgccatgttgcgcaggctggtctcaaactcctgggctcagggcaatcctcccgccttggcctcccaaagtgccaggatcataggtgttagacacagcacctggcatgggtgagctagtgtcatggttgtctgggcctaagtcctatggtcctttgtgttattttttctatttattctgtggctagacacacaaaacactggtttatttgtatgtttttccttcattatactgtccttatattgaggtttggtattaagcattataaaatggtgaactacctgtgttttctgtggcatgaaaaggtttaagtaaatctcatcacagtcttaaaaggttagagagatgacagctaggaaaacatttagcatttaggcctactgccttatcgtatctgcttttgtttttaatgctttatgaatgtttttaaagtattgttctaaaagaatattttaataattgcatagtatttttgttttggg

SEQ ID NO: 31964 - DNA, 1053 bp, Homo sapiens
tccactcagaaaatcagagggccacttaactaacaacagattcataccccaaagagatttggattttaaggattacttgtaggtcataacattgggactaccctgctactgtgaaaaaaataactctaaacttttttttctggatttgaaagtgcctagaaaataaataattcagtattagcagtgtttgtattggtaggatttatcttcaggtgtggatttatgagcagtttttctaaattttctatattccatgtttagaggtttcccaaaaaaagtatgactataggttggctaatgaggtaccgccattttaattccaggaatggttttctcctagggagatagtgtggtgagaagagtttggattttggagtcaaacagatgaggtgtataatcttggtaacctcttaagcaccagtttcctgatttgctaaagaaaaaggaaaggattagctacctttagtgtattgtgaggcttctattggattatatgtataaagattatatcgtagtatctggcacacagtaattcctcgtttaaaaactgagcatttaaatcccaagtctaaagaacgaggatagattttatagaaggaagttaccctttattcccccctgtcagaactggagttatatataagtgcattctctaggccattttatggtctttatagagatttgcatctgcttgccctaactcatttcagcagattctcatactgtcacagtcctcaatgctgatcggtgttcactgatgcaaccttctaataaaagaaaccttgttcttcacaagaggctatctctagtacccattataaggtgaattgcttctggcaagagttctctgtaaaggctactgactactcagggctgtgtgtggtcatcaaatcatttataatcttgggatacattttcatataatcagtaatggctaaaattttgctttgtataacaagtataacatagtatgttttcatcataaaaactagtgacccattcaaggaaatgaaagtggatcagagctctcattattaatccatgaattttgtc

SEQ ID NO: 31965 - DNA, 1032 bp, Homo sapiens
cagttcataatccttgtccttacaatcttcaggtttagtgtgaaacccactgcctccatgaactctcctgatgatttctttatcaacctgggaagtgtcatgagaaagaatatggaaatgagttccagccttgagtgcttggaacagtgtatcagcctctagtgctttttaccagggcaaagctgtactgatgcctggttttcccccgaaatagcttctcagggttgcttgcctggagctttgttttaaagggaaaacagcatagatggtggttaaagagctctcactctggagttgtcctgttttacttcaatattttgggcacattccttaacctgcaaggtctagttttctcacctgtaaaatcgggacaatcaggttgtatttgatggttaaaaagttaatgcacagaaagtacttagtactgtgttggcatagaaatcactgtaatattagccattactgctttttttttttttttgattcttcatggttttatttctctcagaactttaaaatgtgaacattctataattcagccagtctttacttccaggtaacttctttattgggtcgcaatacccttttaaataacatgctcttgttccggaaggtagttagccgttcatcactctttctgtctaaataacatccagtgacaaatcccatagggacaagaacatgaacccagtggtcccgcacaatctgaagtaagttcaccatgatagctgcagcctcagtgccgaccgcgaccccgagaccaagggcaacggggaactcagccacccacgccagtgctagccattactgcttttaatacttaattatgagttcttaagtgaatattttagggcaagggacctgtgagtgttttcattccataaagtggaatcatacgatatgtattctatcatatctggctttaaaaaacattatgcttgtaagaatcgtccacgttgagtaaaccagtagggcttttttttttttcattgcttttagtatagaatagaataattataagtagaaaaaatt
